United States Patent Application Publication US 2004/0029129 A1 - sequence listing, part 2

SEQ ID NO: 6837 - DNA, 411 bp, Escherichia coli
atgagccagctcgtctacttctccagcagctccgaaaacacgcagcgttttatcgaacgtttaggtctgcccgcggtgcgcatcccgctcaatgagcgggaacggattcaggtagacgagccttacatcctgatcgtgccctcttacggcggcggcggtacggctggcgcggtgccacgacaggtaattcgctttttaaacgacgagcacaaccgggcgttgcttcgcggcgttattgcttctggtaatcgcaactttggtgaggcgtatggccgcgccggagatgtgattgcccggaaatgcggcgtgccgtggctgtaccgttttgaactcatgggtacgcaaagcgatatcgaaaacgttcgtaaaggagtaaccgaattttggcaacgacaaccgcagaatgcctga

SEQ ID NO: 6838 - DNA, 537 bp, Escherichia coli
atggccagcagaggcgtaaacaaggttattctcgttggtaatctgggtcaggacccggaagtacgctacatgccaaatggtggcgcagttgccaacattacgctggctacttccgaatcctggcgtgataaagcgaccggcgagatgaaagaacagactgaatggcaccgcgttgtgctgttcggcaaactggcagaagtggcgagcgaatatctgcgtaaaggttctcaggtttatatcgaaggtcagctgcgtacccgtaaatggaccgatcaatccggtcaggatcgctacaccacagaagtcgtggtgaacgttggcggcaccatgcagatgctgggtggtcgtcagggtggtggcgctccggcaggtggcaatatcggtggtggtcagccgcagggcggttggggtcagcctcagcagccgcagggtggcaatcagttcagcggcggcgcgcagtctcgcccgcagcagtccgctccggcagcgccgtctaacgagccgccgatggactttgatgatgacattccgttctga

SEQ ID NO: 6839 - DNA, 1263 bp, Escherichia coli
atgatcaaggcgacggacagaaaactggtagtaggactggagattggtaccgcgaaggttgccgctttagtaggggaagttctgcccgacggtatggtcaatatcattggcgtgggcagctgcccgtcgcgtggtatggataaaggcggggtgaacgacctcgaatccgtggtcaagtgcgtacaacgcgccattgaccaggcagaattgatggcagattgtcagatctcttcggtatatctggcgctttctggtaagcacatcagctgccagaatgaaattggtatggtgcctatttctgaagaagaagtgacgcaagaagatgtggaaaacgtcgtccataccgcgaaatcggtgcgtgtgcgcgatgagcatcgtgtgctgcatgtgatcccgcaagagtatgcgattgactatcaggaagggatcaagaatccggtaggactttcgggcgtgcggatgcaggcaaaagtgcacctgatcacatgtcacaacgatatggcgaaaaacatcgtcaaagcggttgaacgttgtgggctgaaagttgaccaactgatatttgccggactggcatcaagttattcggtattgacggaagatgaacgtgaactgggtgtctgcgtcgtcgatatcggtggtggtacaatggatatcgccgtttataccggtggggcattgcgccacactaaggtaattccttatgctggcaatgtcgtgaccagtgatatcgcttacgcctttggcacgccgccaagcgacgccgaagcgattaaagttcgccacggttgtgcgctgggttccatcgttggaaaagatgagagcgtggaagtgccgagcgtaggtggtcgtccgccacggagtctgcaacgtcagacactggcagaggtgatcgagccgcgctataccgagctgctcaacctggtcaacgaagagatattgcagttgcaggaaaagcttcgccaacaaggggttaaacatcacctggcggcaggcattgtattaaccggtggcgcagcgcagatcgaaggtcttgcagcctgtgctcagcgcgtgtttcatacgcaagtgcgtatcggcgcgccgctgaacattaccggtttaacggattatgctcaggagccgtattattcgacggcggtgggattgcttcactatgggaaagagtcacatcttaacggtgaagctgaagtagaaaaacgtgttacagcatcagttggctcgtggatcaagcgactcaatagttggctgcgaaaagagttttaa

SEQ ID NO: 6840 - DNA, 2577 bp, Escherichia coli
atgaaactaaatgggaaatttccagtgaagttcgtaaagtattttttgatccttgcagtctgttgcattctgctgggagcaggctcgatttatggcctataccgctacatcgagccacaactgccggatgtggcgacattaaaagatgttcgcctgcaaattccgatgcagatttacagcgccgatggcgagctgattgctcaatacggtgagaaacgtcgtattccggttacgttggatcaaatcccaccggagatggtgaaagcctttatcgcgacagaagacagccgcttctacgagcatcacggcgttgacccggtggggatcttccgtgcagcaagcgtggcgctgttctccggtcacgcgtcacaaggggcaagtaccattacccagcagctggcgagaaacttcttcctcagtccagaacgcacgctgatgcgtaagattaaggaagtcttcctcgcgattcgcattgaacagctgctgacgaaagacgagatcctcgagctttatctgaacaagatttaccttggttaccgcgcctatggtgtcggtgctgcggcacaagtctatttcggaaaaacggtcgaccaactgacgctgaacgaaatggcggtgatagccgggctgccgaaagcgccttccaccttcaacccgctctactcgatggatcgtgccgtcgcgcggcgtaacgtcgtgctgtcgcggatgctggatgaagggtatatcacccaacaacagttcgatcagacacgcactgaggcgattaacgctaactatcacgcgccggagattgctttctctgcgccgtacctgagcgaaatggtgcgccaggagatgtataaccgttatggcgaaagtgcctatgaagacggttatcgcatttacaccaccatcacccgcaaagtgcagcaggccgcgcagcaggcggtacgtaataacgtgctggactacgacatgcgccacggctatcgcggcccggcaaatgtgctgtggaaagtgggcgagtcggcgtgggataacaacaagattaccgatacgctgaaggcgctgccaacctatggtccgctgctgcctgccgcagtcaccagcgccaatcctcagcaagcgacggcgatgctggcggacgggtcgaccgtcgcattgagtatggaaggcgttcgctgggcgcgtccttaccgttcggatactcagcaaggaccgacgccgcgtaaagtgaccgatgttctgcaaacgggtcagcaaatctgggttcgtcaggttggcgatgcatggtggctggcacaagtgccggaagtgaactcggcgctggtgtcgatcaatccgcaaaacggtgccgttatggcgctggtcggtggctttgatttcaatcagagcaagtttaaccgcgccacccaggcactgcgtcaggtgggttccaacatcaaaccgttcctctacaccgcggcgatggataaaggtctgacgctggcaagtatgttgaacgatgtgccaatttctcgctgggatgcaagtgccggttctgactggcagccgaagaactcaccaccgcagtatgctggtccaattcgcttacgtcaggggctgggtcagtcgaaaaacgtggtgatggtacgcgcaatgcgggcgatgggcgtcgactacgctgcagaatatctgcaacgcttcggcttcccggcacaaaacattgtccacaccgaatcgctggcgctgggttcagcgtccttcaccccaatgcaggtggcgcgcggctacgcggtcatggcgaacggcggcttcctggtggacccgtggtttatcagcaaaattgaaaacgatcagggcggcgtgattttcgaagcgaaaccgaaagtagcctgcccggaatgcgatattccggtgatttacggtgatacgcagaaatcgaacgtgctggaaaataacgatgttgaagatgtcgctatctcccgcgagcagcagaatgtttctgtaccaatgccgcagctggagcaggcaaatcaggcgttagtggcgaagactggcgcgcaggagtacgcaccgcacgtcatcaacactccgctggcattcctgattaagagtgctttgaacaccaatatctttggtgagccaggctggcagggtactggctggcgtgcaggtcgtgatttgcagcgtcgcgatatcggcgggaaaaccgggaccactaacagttcgaaagatgcgtggttctcgggttacggtccgggcgttgtgacctcggtctggattggctttgatgatcaccgtcgtaatctcggtcatacaacggcttccggagcgattaaagatcagatctcaggttacgaaggcggtgccaagagtgcccagcctgcatgggacgcttatatgaaagccgttcttgaaggtgtgccggagcagccgctgacgccgccaccgggtattgtgacggtgaatatcgatcgcagcaccgggcagttagctaatggtggcaacagccgcgaagagtatttcatcgaaggtacgcagccgacacaacaggcagtgcacgaggtgggaacgaccattatcgataatggcgaggcacaggaattgttctga

SEQ ID NO: 6841 - DNA, 486 bp, Escherichia coli
atgcgtaaattaactgcactgtttgttgcctctaccctggctcttggcgcggctaacctggcccatgccgcagacaccactaccgcagcaccggctgacgcgaagccgatgatgcaccacaaaggcaagttcggtccgcatcaggacatgatgttcaaagacctgaacctgaccgacgcgcagaaacagcagatccgcgaaatcatgaaaggccagcgtgaccagatgaaacgtccgccgctggaagaacgccgcgcaatgcatgacatcattgccagcgataccttcgataaagtaaaagctgaagcgcagatcgcaaaaatggaagaacagcgcaaagctaacatgctggcgcacatggaaacccagaacaaaatttacaacatcctgacgccggaacagaaaaagcaatttaatgctaattttgagaagcgtctgacagaacgtccagcggcaaaaggtaaaatgcctgcaactgctgaataa

SEQ ID NO: 6842 - DNA, 1353 bp, Escherichia coli
atgttgaaatcccccctgttctggaaaatgactagcctgtttggtgcagtattgctgttgttgattccgataatgctgattcggcaggtgattgtcgaacgtgctgattaccgtagcgatgtggaagatgcgattcgccaaagtaccagcgggccgcaaaaactcgttgggccgctcatcgctattcctgtgaccgagctttatacggtgcaggaagaggataaaaccgtggagcggaaacgaagttttatccatttttggttacctgagtcattgatggttgatggcaatcagaacgtggaagaacgcaagatagggatttataccggtcaggtctggcacagtgatttaacgttaaaagccgatttcgatgtttcgcgtcttagcgaactcaacgcgccaaatatcaccttaggcaagccatttattgtgattagcgtcggggatgcgcgtggtattggtgtggtgaaagcgcctgaagttaacggaacggcgctgaccattgaacccggcaccgggttagagcaaggcgggcagggcgtgcatatccctttacctgaaggggactggcggaagcagaacctgaagctgaatatggccctgaatttaagcggtaccggcgatctttctgtggtgcctggcgggcgtaatagcgaaatgaccttaaccagcaactggccgcatcccagttttttaggtgattttctaccagccaaacgggaagttagcgagtcaggttttcaggcgcactggcaaagcagctggtttgctaataatctcggtgagcgttttgcttcaggcaatgataccggctgggaaaacttcccggcgtttagcgtcgcagtaacgacgccagccgatcaataccaattaactgaccgggcgactaagtacgccattctgctgattgcactgacttttatggcgttctttgtttttgaaacgctcaccgcgcaacgtttacacccaatgcaatatttgctggtggggctttcattggtgatgttttatttgctcttgctggcgctttctgaacataccggttttaccgtggcatggataatcgccagtctgattggggcgataatgaacggtatttatttgcaagcggtattgaaaggttggtgcaacagcatgttgtttaccctcgcgctgttgttgctggatggtgtgatgtggggactgctcaactctgccgatagcgcgctgttgttgggaaccagtgtgctggtggtggcgctggccggcatgatgtttgtgacccgtaatatcgactggtatgcgttttcactgccgaaaatgaaagccagtaaagaagttacaacggacgatgagttacgtatctggaaataa

SEQ ID NO: 6843 - DNA, 2673 bp, Escherichia coli
atgacagatgtaacgattaaaacgctggccgcagagcgacagacctccgtggaacgcctggtacagcaatttgctgatgcaggtatccggaagtctgctgacgactctgtgtctgcacaagagaaacagactttgattgaccacctgaatcagaaaaattcaggcccggacaaattgacgctgcaacgtaaaacacgcagcacccttaacattcctggtaccggtggaaaaagcaaatcggtacaaatcgaagtccgcaagaaacgcacctttgtgaaacgcgatccgcaagaggctgaacgccttgcagcggaagagcaagcgcagcgtgaagcggaagagcaagcccgtcgtgaggcagaagaatcggctaaacgcgaggcgcaacaaaaagctgaacgtgaggccgcagaacaagctaagcgtgaagctgctgaacaagcgaaacgtgaagctgcggaaaaagacaaagtgagcaatcaacaagacgatatgactaaaaacgcccaggctgaaaaagcccgccgtgagcaggaagctgcagagctcaagcgtaaagctgaagaagaagcgcgtcgtaaactcgaagaagaagcacgtcgcgttgctgaagaagcacgtcgtatggcggaagaaaacaaatggactgataacgcggaaccgactgaagattccagcgattatcacgtcactacttctcaacatgctcgccaggcagaagacgaaagcgatcgtgaagtcgaaggcggccgtggccgtggtcgtaacgcgaaagcagcgcgtccgaagaaaggcaacaaacacgctgaatcaaaagctgatcgtgaagaagcacgcgcagcagtacgtggcggtaaaggcggaaaacgtaaaggttcttcgctgcagcaaggcttccagaagcctgctcaggccgttaaccgtgacgttgtgatcggcgaaactatcaccgttggcgaactggcgaacaagatggcggttaaaggctctcaggtcatcaaagcgatgatgaaactgggcgcaatggcaaccatcaaccaggttatcgatcaggaaaccgcacagctggttgctgaagagatgggccataaagttatcctgcgtcgtgaaaacgagctggaagaggcggtaatgagcgaccgtgacacgggtgctgcggctgaaccgcgcgcgccggttgtgaccatcatgggtcacgttgaccacggtaaaacctctctgctggactacattcgttcaacgaaagtggcctctggcgaagcgggcggcattacccagcacattggtgcataccacgttgaaactgaaaacggcatgatcaccttcctggacaccccggggcacgccgcgtttacttcaatgcgtgctcgtggtgcgcaggcaacggacatcgtagtcctggttgttgctgccgacgacggtgtgatgccgcagaccatcgaagcaatccagcacgcgaaagcggcgcaggtaccggtggtggttgcagtgaacaagatcgataaaccagaagctgatccggatcgcgttaagaacgaactctcccagtacggcatcctgccggaagagtggggcggtgaaagccagttcgtacacgtatctgcgaaagcgggtaccggtatcgatgaactgctggacgctatcctgctgcaggcggaagttctggagctgaaagcggtacgtaaaggtatggcgagcggtgcggttatcgaatccttcctcgataaaggtcgtggtccggttgctaccgttctggtacgtgaaggtactctgcacaagggcgatatcgttctgtgtggcttcgaatacggtcgtgttcgtgcgatgcgtaacgaactgggtcaggaagtgctggaagcgggtccgtccattccggtggaaatcctcggcctgtccggcgtaccggctgcgggtgatgaagttaccgttgtacgtgacgagaagaaagcgcgtgaagttgcactctatcgtcagggtaaattccgcgaagttaaactggcgcgtcagcagaaatctaaactcgagaacatgttcgccaacatgaccgaaggcgaagttcacgaagtgaatatcgtcctgaaggcagacgtacagggttctgtcgaagcgatctccgactccttgctgaaactgtctactgacgaagttaaagtgaagatcatcggttctggcgtaggtggtatcaccgaaaccgacgccaccctggctgcggcgtccaacgccatcctggttggctttaacgtacgtgctgatgcctctgcacgtaaagtgattgaagcggaaagcctggatctgcgttactactccgtcatctataacctgattgacgaagtgaaagcggcgatgagcggtatgctgtctccggaactgaaacagcagattatcggtctggcggaagttcgtgacgtgttcaaatcgccgaaatttggtgccatcgcaggctgtatggttaccgaaggtgtggttaaacgtcacaacccgatccgcgttctgcgtgacaacgtggttatctacgaaggcgagctggagtccctgcgccgcttcaaagatgacgttaacgaagtccgtaacggtatggaatgtggtatcggcgttaagaactacaacgacgtccgcactggcgatgtgatcgaagtattcgaaatcatcgagatccaacgtaccattgcttaa

SEQ ID NO: 6844 - DNA, 879 bp, Escherichia coli
atgccagaaagggtcctgaatttcagggccctttttttacatggattgtataaaatggataaaccaaaggcgtactgccgcctgtttctccccagctttcttttactttcggcttgtaccgttgatatcagccagccagacccatcagccacagcagtagatgccgaggcaaaaacatgggctgtcaaattccagcatcaaagctctttcaccgaacaatcaataaaagaaataacggcacctgatctcaaacccggcgatttgctgttctcctcaagccttggggtaacctcatttggaatccgcgtcttcagcacttcctctgtgagtcacgttgcaatctttctgggtgataataacgttgcagaagcgacaggcgctggcgtccagatcgtttcccttaaaaaagcgatgaagcatagtgataagcttttcgtcttacgagtcccggatcttaccccgcaacaagccacagatatcaccgcgtttgccaataaaatcaaagatagcggttataactatcgcggcattgtcgaatttattccctttatggtgactcgccagatgtgctcactgaatccgttctccgaggattttcgccaacagtgcgtcagcggcctggcgaaagcgcagttaagcagtgtgggcgaaggagacaaaaagtcgtggttttgttcggaatttgtcacggatgcctttgccaaagccgggcatccacttacactggcgcaatcgggctggattagccctgccgatctgatgcatatgcgtattggtgatgtctctgcgtttaagccagaaacgcagttacagtatgttgggcacctgaagcctgggatttatatcaaggcgggtcgctttgttggtttgacccggtga

SEQ ID NO: 6845 - DNA, 1719 bp, Escherichia coli
atgcgtactagccaatacctgctctccactctcaaggagacacctgccgacgccgaggtgatcagccatcagctgatgctgcgcgccgggatgatccgcaagctggcctccgggttatatacctggctgccgaccggcgtgcgcgttctgaaaaaagtcgaaaacatcgtgcgtgaagagatgaacaacgccggtgcgatcgaggtgtcgatgccggtggttcagccagccgatttgtggcaagagagtggtcgttgggaacagtacggtccggaactgctgcgttttgttgaccgtggcgagcgtccgttcgtactcggcccaactcatgaagaagttatcactgacctgattcgtaacgagcttagctcttacaaacagctgccgctgaacttctatcagatccagaccaagttccgcgacgaagtgcgtccgcgtttcggcgtcatgcgttcccgcgaattcctgatgaaagatgcttactctttccatacttctcaggaatccctgcaggaaacctacgatgcaatgtatgcggcctacagcaaaatcttcagccgcatggggctggatttccgcgccgtacaagccgacaccggttctatcggcggcagcgcctctcacgaattccaggtgctggcgcagagcggtgaagacgatgtggtcttctccgacacctctgactatgcagcgaacattgaactggcagaagctatcgcgccgaaagaaccgcgcgctgctgctacccaggaaatgacgctggttgatacgccgaacgcgaaaaccatcgcggaactggttgaacagttcaatctgccgattgagaaaacggttaagactctgctggttaaagcggttgaaggcagcagcttcccgcaggttgcgctgctggtgcgcggtgatcacgagctgaacgaagttaaagcagaaaaactgccgcaggttgcaagcccgctgactttcgcgaccgaagaagaaattcgtgccgtggttaaagccggtccgggttcactgggtccggtaaacatgccgattccggtggtgattgaccgtaccgttgcggcgatgagtgatttcgctgctggtgctaacatcgatggtaaacactacttcggcatcaactgggatcgcgatgtcgctaccccggaagttgcagatatccgtaacgtggtggctggcgatccaagcccggatggccagggtaggctgctgatcaaacgtggtatcgaagttggtcacatcttccagctgggtaccaagtactccgaagcactgaaagcctccgtacagggtgaagatggccgtaaccaaatcctgacgatgggttgctacggtatcggggtaacgcgtgtggtagctgcggcgattgagcagaactacgacgaacgaggcatcgtatggcctgacgctatcgcgccgttccaggtggcgattctgccgatgaacatgcacaaatccttccgcgtacaagagcttgctgagaaactgtacagcgaactgcgtgcacaaggtatcgaagtgctgctggatgaccgcaaagagcgtccgggcgtgatgtttgctgatatggaactgatcggtattccgcacactattgtgctgggcgaccgtaacctcgacaacgacgatatcgaatataaatatcgtcgcaacggcgagaaacagttaattaagactggtgacatcgtcgaatatctggtgaaacagattaaaggctga

SEQ ID NO: 6846 - DNA, 1392 bp, Escherichia coli
atgagtcactcatccgcccccgaaagggctactggagctgtcattacagattggcgaccggaagatcctgcgttctggcaacaacgcggtcaacgtattgccagccgcaacctgtggatttccgttccctgtctgctgctggcgttttgcgtatggatgttgttcagcgctgttgcggtgaacctaccgaaagtcggctttaattttacgaccgatcagctatttatgttgactgcgctgccttcggtttctggcgcgttattacgtgttccatactcctttatggttcctatcttcggtggtcgtcgctggacggcgttcagcaccggtattctgattattccttgcgtctggctgggttttgccgtgcaggatacctccacgccttatagcgtcttcatcatcatctctctgctatgcggctttgctggcgcgaacttcgcatccagtatggcaaacatcagcttcttctttccgaaacagaagcagggtggcgcgctgggtctgaatggtggtctgggaaacatgggcgtcagcgtcatgcagttggttgctccgctggtggtatcactgtcgattttcgcagtatttggtagccagggcgtcaaacagccggatgggactgagctgtatctggcgaatgcgtcctggatatgggtgccgttccttgccatcttcaccattgcggcgtggtttggcatgaacgatcttgctacctcgaaagcctccatcaaggagcagttgccggtactcaaacggggtcatctgtggattatgagcctgctgtatctggcaaccttcggctccttcatcggcttctccgcgggctttgcaatgctgtcaaaaacgcagttcccggatgttcagattctgcaatacgctttcttcgggccgtttattggtgcgctggcgcgttctgcaggtggtgcattatctgaccgtctgggcggaactcgtgtcacgctggtgaactttattctgatggcgattttcagcggcctgctgttcctgaccttaccgactgacgggcagggcggaagcttcatggcgttcttcgcggtcttcctggcgctgttcctgacagctgggctgggtagtggttccactttccagatgatttcagtgatcttccgtaaactgacaatggatcgcgtgaaagcagaagggggttctgacgaacgtgcgatgcgtgaagcggcaaccgacacggcggcggcgctgggtttcatctctgcgattggcgcgattggtggcttctttatcccgaaagcgtttggtagctcgctggcattaacgggttcgccagtcggcgcaatgaaggtatttttgattttctatatcgcctgcgtagtgattacctgggcggtatatggtcggcattctaaaaaataa

SEQ ID NO: 6847 - DNA, 726 bp, Escherichia coli
atggctaccaatgcaaaacccgtctataaacgcattctgcttaagttgagtggcgaagctctgcagggcactgaaggcttcggtattgatgcaagcatactggatcgtatggctcaggaaatcaaagaactggttgaactgggtattcaggttggtgtggtgattggtgggggtaacctgttccgtggcgctggtctggcgaaagcgggtatgaaccgcgttgtgggcgaccacatggggatgctggcgaccgtaatgaacggcctggcaatgcgtgatgcactgcaccgcgcctatgtgaacgctcgtctgatgtccgctattccattgaatggcgtgtgcgacagctacagctgggcagaagctatcagcctgttgcgcaacaaccgtgtggtgatcctctccgccggtacaggtaacccgttctttaccaccgactcagcagcttgcctgcgtggtatcgaaattgaagccgatgtggtgctgaaagcaaccaaagttgacggcgtgtttaccgctgatccggcgaaagatccaaccgcaaccatgtacgagcaactgacttacagcgaagtgctggaaaaagagctgaaagtcatggacctggcggccttcacgctggctcgtgaccataaattaccgattcgtgttttcaatatgaacaaaccgggtgcgctgcgccgtgtggtaatgggtgaaaaagaagggactttaatcacggaataa

SEQ ID NO: 6848 - DNA, 933 bp, Escherichia coli
atgaggaacggaatgatgaataataaagtcagcttcactaacagcaataatccaaccatctctttgtctgcagtgatctatttccctccaaaatttgatgaaacccgtcagtatcaggcaattgtgttatctcacccaggtgggggcgttaaagaacaaacggccggaacctatgccaaaaaactggcggaaaagggatttgtcactattgcttatgacgcatcttatcaaggtgaaagtggcggcgagccgcgtcagttagaaaacccatacattcgtactgaagacatcagtgccgtgattgattacctgacaacgctttcttatgtcgacaatacccgaattggtgcgatgggaatttgtgccggtgcaggatatacagccaatgctgcaattcaggatcgccgcatcaaggccatcggtaccgttagtgcggtcaatattggttcgatattccgtaatggttgggaaaacaatgtgaaatctattgatgccctgccatacgttgaagcgggttcaaacgccagaaccagcgatattagcagcggagaatacgccattatgccactggcaccaatgaaggagtccgatgcgccgaacgaagaactgcgtcaggcctgggagtattaccacacccctcgcgcgcagtatccaacagcaccgggttacgctactttgcgcagccttaaccagattattacctatgatgcttaccatatggcggaagtgtacctgactcagccgacgcagattgtggcgggcagccaggcagggagcaaatggatgagtgacgacctgtacgatcgagcatcaagccaggataaacgctatcacattgttgaaggcgcaaaccatatggatctttatgacggcaaagcctatgtggctgaagcaatttcagtattagctccgttctttgaggaaactctgtaa

SEQ ID NO: 6849 - DNA, 1086 bp, Escherichia coli
atggaaagtggtcatcgctttgatgctcagacgctgcacagttttattcaggctgtatttcgtcagatgggtagcgaggaacaagaagcgaaattagttgccgatcatttaatcgcggcaaacctggcagggcatgattcacatggtattggcatgatcccaagctatgtacgctcctggagtcaggggcacctgcaaattaaccatcatgccaaaaccgttaaagaggcgggggcggcggtcacgctcgatggcgatcgcgcatttggtcaggtcgcggcacatgaagcgatggcgctggggattgagaaagcgcatcagcacggtattgccgccgtggcgctacataactcgcatcatatcggccgtatcggttactgggcggagcagtgtgcagcggcggggtttgtctctatccactttgttagcgtggtcggtattccaatggtcgcgccgttccacggtcgcgacagccgctttggcaccaatccgttctgtgtggttttccctcgtaaagataatttcccgctgttgcttgattacgccaccagcgccattgcatttggcaaaacccgcgtcgcctggcataaaggcgtccccgtgccgccaggttgcctgattgacgttaacggcgtgccgacgaccaatccggcggtaatgcaggagtcgccgttgggttcgctgttgacctttgccgaacataaaggctacgcccttgcagcgatgtgtgaaattcttggcggggcgctttccggcggtaaaacgacgcatcaggaaacgttacaaaccagtcccgatgccattcttaactgcatgaccactatcatcatcaacccggaactcttcggcgcgccggattgtaacgcgcagaccgaagcctttgccgagtgggtgaaagcctcgccgcatgatgatgataagccgattttgctaccgggcgagtgggaagtgaacacgcgtcgcgaacggcagaagcaggggattccactggatgcgggaagctggcaggccatttgtgatgcagcgcggcagattggtatgccggaagagacgttgcaggctttctgtcagcagttagccagctaa

SEQ ID NO: 6850 - DNA, 3744 bp, Escherichia coli
atgagtaaattcctggaccggtttcgctacttcaaacagaagggtgaaacctttgccgatgggcatggccagcttctcaataccaaccgtgactgggaggatggatatcgccagcgttggcagcatgacaaaatcgtccgctctacccacggggtaaactgcaccggctcctgcagctggaaaatctacgtcaaaaacggtctggtcacctgggaaacccagcagactgactatccgcgtacccgtccggatctgccaaaccatgaacctcgcggctgcccgcgcggtgccagctactcctggtatctttacagtgccaaccgcctgaaatacccgatgatgcgcaaacgcctgatgaaaatgtggcgtgaagcgaaggcgctgcatagcgatccggttgaggcatgggcttctatcattgaagacgccgataaagcgaaaagctttaagcaggcgcgtggacgcggtggatttgttcgttcttcctggcaggaggtgaacgaactgatcgccgcatctaacgtttacaccatcaaaaactacggcccggaccgtgttgctggtttctcgccaattccggcaatgtcgatggtttcttacgcatcgggtgcacgctatctctcgctgattggcggtacttgcttaagcttctacgactggtactgcgacttgcctcctgcgtctccgcaaacctggggcgagcaaactgacgtaccggaatctgctgactggtacaactccagctacatcatcgcctgggggtcaaacgtgccgcagacgcgtaccccggatgctcacttctttactgaagtgcgttacaaagggaccaaaactgttgccgtcacaccagactacgctgaaatcgccaaactgtgcgatctgtggctggcaccgaaacagggcaccgatgcggcaatggcgctggcgatgggccacgtaatgctgcgtgaattccacctcgacaacccaagccagtatttcaccgactatgtgcgtcgctacaccgacatgccgatgctggtgatgctggaagaacgcgacggttactacgctgcaggtcgtatgctgcgcgctgctgatctggttgatgcgctgggccaggaaaacaatccggaatggaaaactgtcgcctttaataccaatggcgaaatggttgcgccgaacggttctattggcttccgctggggcgagaagggcaaatggaatcttgagcagcgcgacggcaaaactggcgaagaaaccgagctgcaactgagcctgctgggtagccaggatgagatcgctgaggtaggcttcccgtactttggtggcgacggcacggaacacttcaacaaagtggaactggaaaacgtgctgctgcacaaactgccggtgaaacgcctgcaactggctgatggcagcaccgccctggtgaccaccgtttatgatctgacgctggcaaactacggtctggaacgtggcctgaacgacgttaactgtgcaaccagctatgacgatgtgaaagcttataccccggcctgggccgagcagattaccggcgtttctcgcagccagattattcgcatcgcccgtgaatttgccgataacgctgataaaacgcacggtcgttcgatgattatcgtcggtgcggggctgaaccactggtatcacctcgatatgaactatcgtggtctgatcaacatgctgattttctgcggctgtgtcggtcagagcgggggcggctgggcgcactatgtaggtcaggaaaaactgcgtccgcaaaccggctggcagccgctggcgtttgcccttgactggcagcgtccggcgcgtcacatgaacagcacttcttatttctataaccactccagccagtggcgttatgaaaccgtcacggcggaagagttgctgtcaccgatggcggacaaatcccgctataccggacacttgatcgactttaacgtccgtgcggaacgcatgggctggctgccgtctgcaccgcagttaggcactaacccgctgactatcgctggcgaagcggaaaaagccgggatgaatccggtggactatacggtgaaatccctgaaagagggttccatccgttttgcggcagaacaaccagaaaacggtaaaaaccacccgcgcaacctgttcatctggcgttctaacctgctcggttcttccggtaaaggtcatgagtttatgctcaagtacctgctggggacggagcacggtatccagggtaaagatctggggcaacagggcggcgtgaagccggaagaagtggactggcaggacaatggtctggaaggcaagctggatctggtggttacgctggacttccgtctgtcgagcacctgtctctattccgacatcattttgccgacggcgacctggtacgaaaaagacgacatgaatacttcggatatgcatccgtttattcacccgctgtctgcggcggtcgatccggcctgggaagcgaaaagcgactgggaaatctacaaagccatcgcgaagaaattctccgaagtgtgcgtcggccatctgggtaaagaaaccgacatcgtcacgctgcctatccagcatgactctgccgctgaactggcgcagccgctggatgtgaaagactggaaaaaaggcgagtgcgacctgatcccaggtaaaaccgcgccacacattatggtcgtagagcgcgattatccggcgacttacgaacgctttacctctatcggcccgctgatggagaaaatcggtaatggcggtaaagggattgcctggaacacccagagcgagatggatctgctgcgtaagctcaactacaccaaagcggaaggtccggcgaaaggccagccgatgctgaacaccgcaattgatgcggcagagatgatcctgacactggcaccggaaaccaacggtcaggtagccgtgaaagcctgggctgccctgagcgaatttaccggtcgtgaccatacgcatctggcgctgaataaagaagacgagaagatccgcttccgcgatattcaggcacagccgcgcaaaattatctccagcccgacctggtctggtctggaagatgaacacgtttcttacaacgccggttacaccaacgttcacgagctgatcccatggcgtacgctctctggtcgtcagcaactgtatcaggatcaccagtggatgcgtgatttcggtgaaagcctgctggtttatcgtccgccgatcgacacccgttcggtgaaagaagtgataggccagaaatccaacggcaaccaggaaaaagcgctcaacttcctgacgccgcaccagaagtggggtatccactccacctacagcgacaacctgctgatgctgactttaggtcgcggtggtccggtggtctggttgagtgaagccgatgccaaagatctgggtatcgccgataacgactggattgaagtcttcaacagcaacggtgctctgactgcccgtgcggttgtcagccagcgtgttccggcagggatgaccatgatgtaccacgcgcaggaacgtatcgttaacctgcctggttcggaaattacccaacagcgtggtggtatccataactcggtcacccgtatcacgccgaaaccgacgcatatgatcggcggctatgcccatctggcatacggctttaactactatggcaccgtaggttctaaccgcgatgagtttgttgtagtgcgtaagatgaagaacattgactggttagatggcgaaggcaatgaccaggtacaggagagcgtaaaatga

SEQ ID NO: 6851 - DNA, 1188 bp, Escherichia coli
atgaacttatccctacgacgctctaccagcgcccttcttgcctcgtcgttgttattaaccatcggacgcggcgctacgctgccatttatgaccatttacttgagtcgccagtacagcctgagtgtcgatctaatcggttatgcgatgacaattgcgctcactattggcgtcgtttttagcctcggttttggtatcctggcggataagttcgacaagaaacgctatatgttactggcaattaccgccttcgccagcggttttattgccattactttagtgaataacgtgacgctggttgtgctcttttttgccctcattaactgcgcctattctgtttttgctaccgtgctgaaagcctggtttgccgacaatctttcgtccaccagcaaaacgaaaatcttctcaatcaactacaccatgctaaacattggctggaccatcggtccgccgctcggcacgctgttggtaatgcagagcatcaatctgcccttctggctggcagctatctgttccgcgtttcccatgcttttcattcaaatttgggtaaagcgcagcgagaaaatcatcgccacggaaacaggcagtgtctggtcgccgaaagttttattacaagataaagcactgttgtggtttacctgctctggttttctggcttcttttgtaagcggcgcatttgcttcatgcatttcacaatatgtgatggtgattgctgatggggattttgccgaaaaggtggtcgcggttgttcttccggtgaatgctgccatggtggttacgttgcaatattccgtgggccgccgacttaacccggctaacatccgcgcgctgatgacagcaggcaccctctgtttcgtcatcggtctggtcggttttattttttccggcaacagcctgctattgtggggtatgtcagctgcggtatttactgtcggtgaaatcatttatgcgccgggcgagtatatgttgattgaccatattgcgccgccagaaatgaaagccagctatttttccgcccagtctttaggctggcttggtgccgcgattaacccattagtgagtggcgtagtgctaaccagcctgccgccttcctcgctgtttgtcatcttagcgttggtgatcattgctgcgtgggtgctgatgttaaaagggattcgagcaagaccgtgggggcagcccgcgctttgttga

SEQ ID NO: 6852 - DNA, 768 bp, Escherichia coli
atgactttacgaactgaaaatctgacggtcagttacgggacagacaaggtacttaacgacgtttcactctcactgccaacggggaagatcaccgccctgatcggtcctaacggttgcgggaaatcgacgctgttaaactgtttttcgcggcttttaatgccgcagtctggcaccgtatttctcggcgataatcccataaatatgctctcatcgcgccagttggcccgcaggctttcgctgctgcctcagcaccatttaacgccagaggggatcacagtccaggagctggtttcgtatggtcgtaatccctggctgtcactctgggggcgtctctccgctgaagacaatgcacgagttaatgtcgccatgaaccagacccggatcaatcatcttgccgttcgtcggttaaccgagctttccggcggtcagcgccagcgcgcatttctggcaatggtcctggcccagaatacgcccgttgtattacttgatgagccaaccacctatcttgatatcaatcaccaggtggacctgatgcggttgatgggcgaactccggactcaggggaaaacggtggtcgctgtgctgcacgaccttaatcaggctagccggtactgcgatcaactggtggtaatggcaaacggacatgttatggcgcaaggcacaccagaagaggtgatgaccccaggattgctgagaacagtattcagcgtggaagcggaaatacaccccgagccggtatctggcaggccgatgtgcctaatgaggtag

SEQ ID NO: 6853 - DNA, 957 bp, Escherichia coli
atgaaaattgcgctggttattttcatcacccttgccctggcgggctgtgcgctgttatcactccatatgggagtgatccccgtgccgtggcgcgcgctgctgaccgactggcaggccggacacgagcattattatgtattgatggagtaccgactgccgcgcttgctgctggcactgtttgtcggtgcagccctcgccgtggcgggcgtgctgatacaggggattgtgcgcaaccctctggcatcaccggatattctcggtgttaaccatgccgccagcctggcctctgtgggggctctacttcttatgccgtcactgcccgtgatggtgctgccgctgctggcctttgcgggcggcatggcggggttgatattgctgaagatgctggcaaagacccaccagccgatgaagctggcgctcaccggcgtggcgctttctgcatgctgggccagcctgacggattatctgatgctctcgcgcccgcaggatgtgaacaacgccctgctgtggctgaccggcagcttatggggccgtgactggagctttgtgaagattgccatcccgctgatgattttatttctgccgctgagcctgagtttttgccgcgatctcgacctccttgcactcggcgatgcgcgcgccaccacgctcggtgtgtcggtgccccatacccgattctgggctttgttactagctgtcgccatgacatctaccggcgtggccgcctgcggcccgattagctttattggtctcgtggtgccgcatatgatgcgtagcatcaccggtggacgtcaccgcagactgctgcctgtttcggccctgacaggtgcgttgctgttggtggttgccgatctgctggcgagaattattcatcccccactggagctcccggttggcgtgctgaccgccattatcggtgcgccgtggtttgtctggttgcttgtgagaatgcgataa

SEQ ID NO: 6854 - DNA, 645 bp, Escherichia coli
atgatgcaaccatcaatcaaacctgctgacgagcattcagctggcgatatcattgcgcgcatcggcagcctgacgcgtatgctgcgcgacagtttgcgggaactggggctggatcaggccattgccgaagcggcggaagccatccccgatgcgcgcgatcgtttgtactatgttgtgcagatgaccgcccaggctgcggagcgggcgctgaacagtgttgaggcgtcacaaccgcatcaggatcaaatggagaaatcagcaaaagcgttaacccaacgttgggatgactggtttgccgatccgattgaccttgccgacgcccgtgaactggtaacagatacacgacaatttctggcagatgtacccgcgcataccagctttactaacgcgcaactgctggaaatcatgatggcgcaggattttcaggatctcaccgggcaggtcattaagcggatgatggatgtcattcaggagatcgaacgccagttgctgatggtgctgttggaaaacatcccggaacaggagtcgcgtccaaaacgtgaaaaccagagtttgcttaatggacctcaggtcgataccagcaaagccggtgtggtagccagtcaggatcaggtggacgatttgttggatagtcttggattttga

SEQ ID NO: 6855 - DNA, 390 bp, Escherichia coli
atggcggataaagaacttaaatttttggttgtggatgacttttccaccatgcgacgcatagtgcgtaacctgctgaaagagctgggattcaataatgttgaggaagcggaagatggcgtcgacgctctcaataagttgcaggcaggcggttatggatttgttatctccgactggaacatgcccaatatggatggcctggaattgctgaaaacaattcgtgcggatggcgcgatgtcggcattgccagtgttaatggtgactgcagaagcgaagaaagagaacatcattgctgcggcgcaagcgggggccagtggctatgtggtgaagccatttaccgccgcgacgctggaggaaaaactcaacaaaatctttgagaaactgggcatgtga

SEQ ID NO: 6856 - DNA, 2673 bp, Escherichia coli
atgcgtcagaaagagacaacggccacgacccgcttttcactcctaccggggagcattacccgcttctttttactgttgatcattgtgttactggtgacgatgggtgtaatggtacaaagcgccgttaacgcctggctgaaagataaaagttaccagattgtcgacattacccatgctatccaaaagcgcgtcgataactggcgttacgtgacctggcagatctacgacaacattgccgcgacgacctccccctcctccggcgaaggtttacaagagacgcgcctgaaacaggatgtctactatctggagaaaccacgccgcaaaacggaagcgttaatctttggctctcacgacaactcaacgcttgagatgactcagcggatgtccacttatctggatacattgtggggcgcagaaaatgtaccgtggtcgatgtattacctgaatggtcaggataacagtctggtgctgatctcaaccctaccccttaaagatctcacctccggatttaaagaatcgaccgtcagcgacattgttgattcacgtcgtgcagagatgttgcaacaggccaacgccctcgatgaacgcgaaagcttttctaacatgcgccgcctggcctggcagaacggtcattactttacattgcgtactacctttaaccagccaggacatctggcaacggtcgtggcttttgatctgccgattaatgatttgatcccaccgggtatgccgctggacagtttccgccttgagccagacgcgacggcaacgggaaacaatgataatgagaaagaagggacggatagcgtcagtatccactttaacagtacgaagattgaaatctcctcggcactcaactctaccgatatgcgcctggtctggcaggttccttatggcaccttattgctggatacgttgcaaaacattctgctgccactgctgctgaacatcggtttgctggcgctggcgttatttggctataccacattccgccatttctccagccgcagtacagaaaacgtccccagcacggcggtcaataacgaattgcgcattttacgggcaatcaatgaagagatagtctcactgctgccgctcggcctgctggttcacgatcaggaatcgaaccgcactgtcataagtaacaaaattgccgatcatttgctgccgcatttgaatctgcaaaacatcaccaccatggcggaacagcatcaggggattattcaggcgacgatcaataacgagctgtatgagatccgcatgttccgcagccaggtcgcgccgcgcacacaaattttcattattcgcgatcaggatcgcgaagtgctggtaaacaagaaactcaagcaggcgcagcgtctgtatgagaaaaaccagcaggggcggatgatctttatgaaaaacattggcgatgcgctgaaagaacccgcacagtccctggcggagagcgcggctaaactcaacgccccggaaagcaaacaactggcgaatcaggcagatgtgctggtgcggctggttgatgaaatacagttagcgaacatgcttgcggatgatagctggaaaagtgagacggtgctgttctccgtgcaggatttaattgatgaagttgtgccttcagtgttgcctgccatcaagcgtaaaggtctgcaactgctgattaacaatcatctgaaagcacacgatatgcgccgcggcgatcgcgatgccttacgacgtattttgctgctactgatgcaatatgccgtgacctcaacgcaattgggaaaaatcacccttgaggttgatcaggatgagtcctccgaagaccgcctgacgttccgcattctggacacgggagaaggcgtaagtattcatgaaatggataatttgcacttcccgtttatcaaccagacccaaaacgatcgctatggcaaggcggacccgctggcattctggctgagcgatcaactggcacgtaaactgggcggtcatttaaacatcaaaacgcgggatgggcttggtacacgctactctgtgcatatcaaaatgctcgcagctgacccggaagttgaagaggaagaagagcgtttactggatgatgtctgcgtaatggtggatgttacttcggcagaaattcggaatattgtcactcgccagttagaaaattggggtgcaacctgtatcacacccgatgaaagattaattagtcaagattatgatatctttttaacggataatccgtctaatcttactgcctctggcttgcttttaagcgatgatgagtctggcgtacgggaaattgggcctggtcaattgtgcgtcaacttcaatatgagcaacgctatgcaggaagcggtcttacaattaattgaagtgcaactggcgcaggaagaggtgacagaatcgcctctgggcggagatgaaaatgcgcaactccatgccagcggctattatgcgctctttgtagacacagtaccggatgatgttaagaggctgtatactgaagcagcaaccagtgactttgctgcgttagcccaaacggctcatcgtcttaaaggcgtatttgccatgctaaatctggtacccggcaagcagttatgtgaaacgctggaacatctgattcgtgagaaggatgttccaggaatagaaaaatacatcagcgacattgacagttatgtcaagagcttgctgtag

SEQ ID NO: 6857 - DNA, 1929 bp, Escherichia coli
atgcgggatatgagtggcgcttttaacaacgatggtcggggcatatctcccttaattgcaacctcctgggagcgatgcaataagctgatgaaacgggagacatggaacgtaccacatcaggcccagggcgtgacatttgcttctatttatcggcgtaagaaagcgatgctgacgctcgggcaggctgcgctggaagatgcctgggaatatatggcaccgcgagagtgtgcgctgtttatcctcgatgaaaccgcctgcattctcagccgtaatggcgatccgcaaaccttgcagcagctaagtgcactgggattcaatgacggcacgtattgcgccgagggaattattggtacttgtgcgctatcgttagcggctatctctggtcaggccgtgaaaacgatggccgatcaacatttcaaacaggtactctggaactgggccttttgtgcaacgccgttgtttgacagcaagggccgattgacgggaacaatagcgctggcgtgtccggttgagcaaactaccgcagctgatttgccgttgacgttggcaatcgcccgcgaggtcggaaatttactgctgacggacagtttgctcgctgaaactaaccgtcatttaaatcaacttaatgccctgttagaaagtatggatgatggcgtgattagctgggacgagcagggtaatttgcaatttattaatgcccaggcggcgcgggtcttgcgccttgacgcgacggcaagtcagggacgggcaatcactgaactcttaacgttacccgccgtattgcaacaagcaataaaacaggcacatccgctcaaacacgtagaagcaacctttgaaagccagcaccagtttattgatgcggtgataacccttaaaccgataatagaaacgcagggaaccagctttattttgttgctccatcctgtggaacagatgcggcagttgatgaccagtcaattaggaaaagtcagccataccttcgctcatatgccacaggacgatccgcaaacccgccgcttgattcattttggtcgccaggcggcgcgcagtagctttcctgtcctgctttgtggagaagagggcgtgggcaaggcactgctaagtcaggcaattcataatgaaagcgagcgtgctgcaggtccttatatcgccgtcaattgtgagttatatggtgatgctgcgctggcggaagaatttattggtggcgatcgcacggacaatgaaaatggccgtctgagtcggctggaactggcacacggcggcacgctgtttcttgaaaagattgaatatctggcggtggagttacagtctgctttgcttcaggttatcaagcagggggttatcacgcgactggatgcgcggcgtttaataccaattgatgtcaaagtgattgcaacaacgaccgcggacctcgcaatgctggtggaacaaaatcgttttagtcgccagctgtattacgcgctgcatgcatttgaaattaccatcccgcctctgcgtatgcggcgtggcagcattccggcgctggtgaataacaaattacgcagtcttgaaaaacgcttctctacgcggctgaaaattgatgacgatgccctcgctcgcctggtttcttgtgcatggccaggcaacgattttgaactttacagcgtcatcgagaatcttgctctgagtagtgataacgggcgcattcgcgtcagtgatttgccggaacatctgtttaccgagcaggcgacagatgatgtcagcgccacccgcctttccaccagtctgtcatttgcggaagttgaaaaagaggcaattattaacgcagcccaggtcacaggcggtcgcattcaggaaatgtcggctttacttgggatcggccgcactacgctgtggcggaaaatgaagcaacatggcattgatgcagggcagtttaagcgccgggtatga

SEQ ID NO: 6858 - DNA, 1176 bp, Escherichia coli
atgacaaatcaaccaacggaaattgccattgtcggcggaggaatggtcggcggcgcactggcgctggggctggcacagcacggatttgcggtaacggtgatcgagcacgcagaaccagcgccgtttgtcgctgatagccaaccggacgtgcggatctcggcgatcagcgcggcttcggtatcattgcttaaagggttaggggtctgggatgcagtacaggctatgcgttgccatccttaccgcagactggaaacgtgggagtgggaaacggcgcatgtggtgtttgacgccgctgaacttaagctaccgctgcttggctatatggtggaaaacactgtcctgcaacaggcgttgtggcaggcgctggaagcgcatccgaaagtaacgttacgtgtgccaggctcgctgattgcgctgcatcgccatgatgatcttcaggagctggagctgaaaggcggtgaagtgattcgcgcgaagctggtgattggtgccgacggcgcaaattcgcaggtgcggcagatggcgggaattggcgttcatgcatggcagtatgcgcagtcgtgcatgttgattagcgtccagtgcgagaacgatcccggcgacagcacctggcagcaatttactccggacggaccgcgtgcgtttctgccgttgtttgataactgggcatcgctggtgtggtatgactctccggcgcgtattcgccagttgcagaatatgaatatggcacagctccaggcggaaatcgcgaagcatttcccgtcgcgtctgggttacgttacaccgcttgccgctggtgcgtttccgctgacgcgtcgccatgcgttgcagtacgtgcagccagggcttgcgctggtgggcgatgccgcgcataccatccatccgctggcggggcagggagtgaatcttggttatcgtgatgtcgatgccctgattgatgttctggtcaacgcccgcagctacggcgaagcgtgggccagttatcctgtcctcaagcgttaccagatgcggcgcatggcggataacttcattatgcaaagcggtatggatctgttttatgccggattcagcaataatctgccaccactgcgttttatgcgtaatctcgggttaatggcggcggagcgtgctggcgtgttgaaacgtcaggcgctgaaatatgcgttagggttgtag

SEQ ID NO: 6859 - DNA, 2259 bp, Escherichia coli
atgcgcgtcgatgccattgctaaggtcaccgggcgggcacgatatactgacgattatgttatggcgggcatgtgttatgcgaaatatgtacgtagccctatcgcacatggttatgccgtaagtattaatgatgaacaagccagaagtttgccgggcgtactggcgatttttacctgggaagatgtgcctgatattccattcgctacagctgggcatgcctggacacttgacgaaaacaagcgcgataccgccgatcgcgcactgctaactcgccatgttcgtcatcatggtgacgccgttgccatcgtcgtggcccgcgatgaactcacggcagaaaaagcggcgcaattggtcagcattgagtggcaagaattacccgttatcaccacgccagaagcggcgctggcagaagacgctgcaccaatccataacggtggcaatttactgaaacaaagcacgatgtcgacgggtaatgtccaacaaacaatcgatgccgccgactaccaggtacaggggcactatcagacccccgttattcaacattgtcacatggaaagcgtaacatcgctggcgtggatggaggatgactcgcgaattaccatcgtttccagcacccagatcccgcacattgttcgccgcgtggttggtcaggcgctggatattccctggtcatgcgtacgagtcatcaaaccatttgtcggtggcggttttggtaataaacaggatgtactggaagagccaatggcggcattcctgaccagcaagcttggcggcattccggtgaaagtttcccttagccgtgaagagtgtttcctcgcaacccgtacccgccacgcttttaccattgacgggcaaatgggcgtgaaccgcgacggaacattgaaaggttatagtctggatgttctgtctaacaccggcgcttatgcatctcacgggcactccatcgcttctgcgggggggaataaagtcgcttacctttatcctcgttgtgcctacgcttacagttcaaagacctgctataccaacctcccctcggctggtgcgatgcgtggttatggcgcgccacaagtcgtatttgccgttgagtctatgcttgatgacgccgcgacagcgttaggtattgatcctgttgaaattcgtttacgcaacgccgcccgcgaaggagatgctaatccgctcacgggcaaacgtatttacagcgcagggttgccggagtgtcttgaaaaaggccggaaaatctttgaatgggaaaaacgccgtgcagaatgccagaaccagcaaggcaatttgcgccgcggcgttggcgtcgcctgttttagctacacctctaacacctggcctgtcggcgtagaaatagcaggcgcgcgccttctgatgaatcaggatggaaccatcaacgtgcaaagcggcgcgacggaaatcggtcagggtgccgacaccgtcttctcgcaaatggtggcagaaaccgtgggggttccggtcagcgacgttcgcgttatttcaactcaagataccgacgttacgccgttcgatcccggcgcatttgcctcacgccagagctatgttgccgcgcctgcgctgcgcagtgcggcactattattaaaagagaaaatcatcgctcacgccgcagtcatgctacatcagtcagcgatgaatctgaccctgataaaaggccatatcgtgctggttgaacgaccggaagagccgttaatgtcgttaaaagatttggcgatggacgctttctaccaccctgaacgcggcgggcagctctctgctgaaagctccatcaaaaccaccactaacccaccggcgtttggctgtacctttgttgatctgacggtcgatattgcgctgtgcaaagtcaccatcaaccgcatcctcaacgttcatgattcagggcatattcttaatccactgctggcagaaggtcaggtacacggcggaatgggaatgggcattggctgggcgctatttgaagagatgatcatcgatgctaaaagcggcgtggtccgtaaccccaatctgctggattacaaaatgccgaccatgccggatctgccacaactggaaagcgcgttcgtcgaaatcaatgagccgcaatccgcatacggacataagtcactgggtgagccaccaataattcctgttgccgctgctattcgtaacgcggtgaagatggctaccggtgttgcaatcaatacactgccgctgacgccaaaacggttatatgaagagttccatctggcaggattgatttga

SEQ ID NO: 6860 - DNA, 2517 bp, Escherichia coli
atgccacaacgacaccaccagggacataaacgcacaccgaaacagttggcgctcatcatcaaacgttgtttgccgatggtgctcactggcagcggcatgctttgcactaccgctaacgccgaagagtattatttcgaccccattatgctggaaaccacaaaaagtggtatgcaaacaaccgatctgtcgcgtttttcaaaaaaatatgcacaactaccaggaacttatcaggttgatatctggctgaataaaaagaaggtttcacagaaaaaaattacatttaccgccaatgcagagcaacttctgcagccacagtttacggtagaacaactacgtgagctgggtattaaggtggatgaaatcccggcgctggctgaaaaagatgacgatagcgtgatcaactcgcttgaacaaatcattcccggtacagctgctgaatttgatttcaatcatcagcaacttaatttgagcattccccaaattgcactgtaccgtgatgcaagaggttacgtctccccttctcgttgggacgatggtataccaacgctgtttaccaactactcgtttacaggttctgataaccgttaccgccagggcaatcgtagccaacgacagtacctgaatatgcaaaatggtgctaattttggcccctggcgattacgcaactattccacatggacacgcaacgatcagacatcaagctggaataccatcagtagttatttacaacgtgatatcaaggcgttgaagtctcagttgcttctgggagaaagcgccaccagcggcagtattttttccagctacacctttactggcgtgcaactcgcttccgacgataatatgttgccaaacagccagcgcggatttgccccaacggtacgcggtatcgcaaacagtagtgcaatcgtgactatcaggcaaaatggttatgtgatctatcaaagcaacgtgtcagcgggtgcctttgaaattaacgatctctacccctcttccaacagcggcgatttagaagtcacgattgaagaaagtgacggtacacaacgtcgctttatccagccttattcttcattacccatgatgcagcgacctgggcatctaaagtatagcgcgaccgctggacgctatcgcgctgatgcaaacagtgatagcaaggaacccgaatttgctgaagccacggcaatatatggtttgaataatacttttacgctgtatggcggcctgctcggttctgaagattattatgcgctggggatcggtatcggcggcacacttggcgcactgggcgcgttgtcgatggatatcaacagagctgacacccaattcgataaccagcactcttttcatggctatcaatggcgtacgcagtacatcaaagatatcccggaaaccaacaccaatatcgctgtcagctactatcgctataccaacgatggctattttagttttaatgaagccaatacccgcaattgggactataacagtcgccaaaaaagtgaaattcaattcaacatcagccagacaatatttgatggggtaagtctgtatgcctccggttcgcagcaagactattggggcaataacgataaaaacaggaatatctctgttggggtttccggccagcaatggggagttggttacagcctgaattatcaatacagccgctacactgatcaaaataatgaccgcgcactctctttgaatctcagtattccgttagaacgctggttaccgcgtagccgggtttcctatcagatgaccagccagaaagatcgcccaacccaacatgaaatgcgtcttgatggctcactgctggatgatggtcgcctgagctatagcctggaacaaagtctggatgacgataacaaccataacagtagcctgaacgccagttaccgttcaccttatggcaccttcagtgccggatacagctacggtaatgacagcagccaatacaattacggcgttaccggcggcgtggttatccatcctcatggcgtgacgctctcgcaatatctgggcaacgcttttgcgcttatcgatgctaacggagcatctggcgtgaggatacaaaactatccggggattgctaccgatccttttggctatgcagtggttccttatctcacaacttatcaggaaaaccgtctctcggtagatactacgcagctgcccgataacgtcgatcttgaacaaacaacacagtttgtggtgcccaacagaggtgcaatggtagcggcgcgtttcaacgccaatatcggttatcgcgtacttgttacagtcagcgatcgcaacggtaaaccgttgccctttggcgctcttgccagcaacgatgatacggggcaacaaagtatcgtcgatgagggcggcatactatatctctctgggatatcgagtaaatcacaaagctggactgtacgctggggaaatcaggcagatcaacaatgtcagtttgctttcagtacaccggattcagaacctacaacctctgtattacaaggcacagcgcagtgccattaa

SEQ ID NO: 6861 - DNA, 1617 bp, Escherichia coli
atgtttagacgaaatcttattacctctgccatcttattaatggcaccgttagccttttctgcacaatcattggctgaatcattaacggtggaacaacgccttgagttattagaaaaggcgttaagagaaacgcaaagcgaactcaaaaagtataaagatgaagagaagaaaaagtatacgccagcgacggtgaatcgtagcgtaagtacgaatgatcaagggtatgccgccaatccgttcccgaccagtagtgccgcaaaacctgatgctgtactggtcaaaaatgaagagaaaaatgccagtgagacaggctcgatttattcttccatgactctgaaagatttcagtaaatttgtgaaagatgaaattggctttagttacaacggctattaccgttctggttgggggaccgcctctcatggttcacctaaatcatgggcgattggttctctgggccgctttggtaacgaatactccggctggtttgatttgcagttaaaacaacgtgtctacaacgaaaacggcaaacgggttgatgccgttgtgatgatggatggtaacgttggtcagcagtactctaccggctggtttggcgataacgccggtggcgagaactatatgcagttctccgatatgtacgttaccaccaaaggtttcctgccctttgcgccagaggctgatttctgggtgggtaaacacggtgcgccgaaaattgaaatccagatgcttgactggaaaacgcagcgtactgatgccgcagcgggtgtaggtctggaaaactggaaagtcggtccgggtaaaattgatatcgcgctggttcgcgaagatgtcgatgattacgatcgcagcctgcaaaacaaacagcagattaataccaataccattgatttacgctataaagatatcccgttatgggataaagccaccttaatggtaagtggtcgttatgtcacggcaaacgaaagcgcatcggaaaaagataatcaggataataacgggtattatgactggaaagatacctggatgtttggcacatctttaacgcagaaatttgataaaggtggcttcaacgaattctccttcctggtcgcgaataactctatcgccagtaactttggccgttatgctggcgcaagtccatttaccacctttaatggtcgttattatggtgatcacaccggcggaacagcggtacgtctgacttcgcagggcgaagcctatattggcgatcatttcattgtagctaacgcgattgtttactccttcggtaacgatatatatagctacgaaacaggcgcccactctgatttcgaatctattcgtgcggttgttcgcccggcctatatttgggaccaatataaccagacaggtgttgaactgggctatttcacccagcaaaacaaagatgcgaatagtaataaatttaatgagtctggttataaaaccacgctcttccatacctttaaagtcaataccagtatgttgacctcgcgtccggaaattcgtttctacgccacgtatatcaaagccctggaaaacgaactggatggcttcacctttgaagacaataaagacgaccagtttgctgtcggtgcccaggctgaaatctggtggtaa

SEQ ID NO: 6862 - DNA, 927 bp, Escherichia coli
atgtcgttaattaaggtgccttgtatgcaaatcaccaatatgcattgcagtggacagaccgtttcacttgccgcgggggattatcacgcgaccattgtgaccgtcggtgctggtctggctgaattaacctttcagggttgtcatttagtcatcccgcacaaacccgaagagatgccgctggcgcatctgggtaaagtgcttattccgtggccgaaccggatcgccaacggctgttaccgctatcaggggcaggaatatcagttacccattaatgaacatagttcaaaagccgctattcacgggctgcttgcctggcgagactggcaaattagtgaattaaccgccaccagcgttaccctgacagcttttctgccgcccagttacggctatccgtttatgctggcttcacaagttgtttattcgctcaacgcacacacgggtctttccgttgagatcgcaagccagaatatcggcactgtcgcagcgccttatggcgtgggtattcatccttatttaacctgcaacttaacatctgttgatgaatatctgttccagcttccggcaaaccaggtttatgccgtcgatgagcacgcgaatccgacaacgcttcaccacgttgatgagctggatttaaatttcacgcaggcgaaaaaaatagccgcgacaaaaatcgaccacacctttaaaaccgctaatgatttgtgggaaatgaccattacccatccacagcaggcgctttcggtaagcctttgttccgatcaactctgggtgcaggtttatagcggtgaaaaattacagcgtcagggactggcagttgaacctatgagttgcccgcctaacgcctttaattcaggtatcgacttattattactggaatcaggaaaaccgcaccgcctgttttttaatatttacggacagagaaaataa

SEQ ID NO: 6863 - DNA, 954 bp, Escherichia coli
atgacggacaaattgacctcccttcgtcagtacaccaccgtagtggccgacactggggacatcgcggcaatgaagctgtatcaaccgcaggatgccacaaccaacccttctctcattcttaacgcagcgcagattccggaataccgtaagttgattgatgatgctgtcgcctgggcgaaacagcagagcaacgatcgcgcgcagcagatcgtggacgcgaccgacaaactggcagtaaatattggtctggaaatcctgaaactggttccgggccgtatctcaactgaagttgatgcgcgtctttcctatgacaccgaagcgtcaattgcgaaagcaaaacgcctgatcaaactctacaacgatgctggtattagcaacgatcgtattctgatcaaactggcttctacctggcagggtatccgtgctgcagaacagctggaaaaagaaggcatcaactgtaacctgaccctgctgttctccttcgctcaggctcgtgcttgtgcggaagcgggcgtgttcctgatctcgccgtttgttggccgtattcttgactggtacaaagcgaataccgataagaaagagtacgctccggcagaagatccgggcgtggtttctgtatctgaaatctaccagtactacaaagagcacggttatgaaaccgtggttatgggcgcaagcttccgtaacatcggcgaaattctggaactggcaggctgcgaccgtctgaccatcgcaccggcactgctgaaagagctggcggagagcgaaggggctatcgaacgtaaactgtcttacaccggcgaagtgaaagcgcgtccggcgcgtatcactgagtccgagttcctgtggcagcacaaccaggatccaatggcagtagataaactggcggaaggtatccgtaagtttgctattgaccaggaaaaactggaaaaaatgatcggcgatctgctgtaa

SEQ ID NO: 6864 - DNA, 588 bp, Escherichia coli
atgaatactttacgtattggcttagtttccatctctgatcgcgcatccagcggcgtttatcaggataaaggcatccctgcgctggaagaatggctgacatcggcgctaaccacgccgtttgaactggaaacccgcttaatccccgatgagcaggcgatcatcgagcaaacgttgtgtgagctggtggatgaaatgagttgccatctggtgctcaccacgggcggaactggcccggcgcgtcgtgacgtaacgcccgatgcgacgctggcagtagcggaccgcgagatgcctggctttggtgaacagatgcgccagatcagcctgcattttgtaccaactgcgatcctttcgcgtcaggtgggcgtgattcgcaaacaggcgctgatccttaacttacccggtcagccgaagtctattaaagagacgctggaaggtgtgaaggacgctgagggtaacgttgtggtacacggtatttttgccagcgtaccgtactgcattcagttgctggaagggccatacgttgaaacggcaccggaagtggttgcagcattcagaccgaagagtgcaagacgcgacgttagcgaataa

SEQ ID NO: 6865 - DNA, 399 bp, Escherichia coli
atgcaaacacaaatcaaagttcgtggatatcatctcgacgtttaccagcacgtcaacaacgcccgctaccttgaatttctcgaagaagcccgctgggatgggttggaaaatagcgacagttttcagtggatgacggcccataacatcgccttcgtcgtggtcaatatcaatattaactatcgtcgcccagcggtattaagtgacctgttaactattaccagtcagttgcagcaattaaacggtaaaagcggcatcttaagccaggtcattacactggagccggaagggcaggtggtagcggatgcgcttattacgtttgtttgtattgatcttaaaacgcagaaagcattagctctggaaggggaattgcgcgaaaagctggagcagatggttaagtaa

SEQ ID NO: 6866 - DNA, 735 bp, Escherichia coli
atgaattttgaaggaaaaatcgcactggtaaccggtgcaagccgcggaattggccgcgcaattgctgaaacgctcgcagcccgtggcgcgaaagttattggcactgcgaccagtgaaaatggcgctcaggcgatcagtgattatttaggtgccaacggcaaaggtctgatgttgaatgtgaccgacccggcatctatcgaatctgttctggaaaaaattcgcgcagaatttggtgaagtggatatcctggtcaataatgccggtatcactcgtgataacctgttaatgcgaatgaaagatgaagagtggaacgatattatcgaaaccaacctttcatctgttttccgtctgtcaaaagcggtaatgcgcgctatgatgaaaaagcgtcatggtcgtattatcactatcggttctgtggttggtaccatgggaaatggcggtcaggccaactacgctgcggcgaaagcgggcttgatcggcttcagtaaatcactggcgcgcgaagttgcgtcacgcggtattactgtaaacgttgttgctccgggctttattgaaacggacatgacacgtgcgctgagcgatgaccagcgtgcgggtatcctggcgcaggttcctgcgggtcgcctcggcggcgcacaggaaatcgccaacgcggttgcattcctggcatccgacgaagcagcttacatcacgggtgaaactttgcatgtgaacggcgggatgtacatggtctga

SEQ ID NO: 6867 - DNA, 435 bp, Escherichia coli
atgactatgcgtaacttcgatttatccccactgatgcgtcaatggatcggttttgacaaactggccaacgcactgcaaaacgccggtgaaagccagagcttcccgccgtacaacattgagaaaagcgacgataaccactaccgcattacccttgcgctggcaggtttccgtcaggaagatttagagattcaactggaaggtacgcgcctgagcgtaaaaggcacgccggagcagccaaaagaagagaaaaaatggctgcatcaagggcttatgaatcagccatttagcctgagctttacgctggctgaaaatatggaagtctctggcgcaaccttcgtaaacggtttactgcatattgatttaattcgtaatgagcctgaacccatcgcagcgcagcgtatcgctatcagcgaacgtcccgcgttaaatagctaa

SEQ ID NO: 6868 - DNA, 1278 bp, Escherichia coli
atgaaaacaacagcaaagctgtcgttcatgatgtttgttgaatggtttatctggggcgcgtggtttgtgccattgtggttgtggttaagtaaaagcggttttagtgccggagaaattggctggtcgtatgcctgtaccgccattgcggcgatcctgtcgccaattctggttggctccatcactgaccgctttttctcggcgcaaaaagtgctggcggtattgatgttcgcaggcgcgctgctgatgtatttcgctgcgcaacagaccacttttgccgggttcttcccgttactgctggcctactcgctaacctatatgccgaccattgcgctgactaacagcatcgcttttgccaacgtgccggatgttgagcgtgatttcccgcgcattcgtgtgatgggcactatcggctggattgcctccggtctggcatgtggtttcttgccgcaaatactggggtatgccgatatctcaccgactaacatcccgctgctgattaccgccggaagttctgctctgctcggtgtgtttgcgtttttcctgcccgacacgccaccaaaaagcaccggcaaaatggatattaaagtcatgctcggcctggatgcgctgatcctgctgcgcgataaaaacttcctcgtctttttcttctgttcattcctgtttgcgatgccactagcgttctattacatctttgccaacggttatctgaccgaagttggcatgaaaaacgccaccggctggatgacgctcggccagttctctgaaatcttctttatgctggcattgccgtttttcactaaacgctttggtatcaaaaaggtattattgcttggtctggtcaccgctgcgatccgctatggcttctttatttacggtagtgcggatgaatatttcacctacgcgttactgttcctcggtattttgcttcacggcgtaagttacgatttttactacgttaccgcttacatctatgtcgataaaaaagcccccgtgcatatgcgtaccgctgcgcaggggctgatcacgctctgctgccagggcttcggcagtttgctcggctatcgtcttggcggtgtgatgatggaaaagatgttcgcttatcaggaaccggtaaacggactgactttcaactggtccgggatgtggactttcggcgcggtgatgattgccattatcgccgtgctgttcatgatttttttccgcgaatccgacaacgaaattacggctatcaaggtcgatgatcgcgatattgcgttgacacaaggggaagttaaatga

SEQ ID NO: 6869 - DNA, 1017 bp, Escherichia coli
atgtttgtcatctggagccatggaacagggttcatcatgagtcatcaacttaccttcgccgacagtgaattcagcagtaagcgccgtcagaccagaaaagagattttcttgtcccgcatggagcagattctgccatggcaaaacatggtggaagtcatcgagccgttttaccccaaggctggtaatggccggcgaccttatccgctggaaaccatgctacgcattcactgcatgcagcattggtacaacctgagcgatggcgcgatggaagatgctctgtacgaaatcgcctccatgcgtctgtttgcccggttatccctggatagcgccttgccggaccgcaccaccatcatgaatttccgccacctgctggagcagcatcaactggcccgccaattgttcaagaccatcaatcgctggctggccgaagcaggcgtcatgatgactcaaggcaccttggtcgatgccaccatcattgaggcacccagctcgaccaagaacaaagagcagcaacgcgatccggagatgcatcagaccaagaaaggcaatcagtggcactttggcatgaaggcccacattggtgtcgatgccaagagcggcctgacccacagcctagtcaccaccgcggccaacgagcatgacctcaatcagctgggtaatctgctgcatggagaggagcaatttgtctcagccgatgccggctaccaaggggcgccacagcgcgaggagctggccgaggtggatgtggactggctgatcgccgagcgccccggcaaggtaagaaccttgaaacagcatccacgcaagaacaaaacggccatcaacatcgaatacatgaaagccagcatccgggccaaggtggagcacccatttcgcatcatcaagcgacagttcggcttcgtgaaagccagatacaaggggttgctgaaaaacgataaccaactggcgatgttattcacgctggccaacctgtttcgggcggaccaaatgatacgtcagtgggagagatctcactaa

SEQ ID NO: 6870 - DNA, 1017 bp, Escherichia coli
atgtttgtcatctggagccatagaacagggttcatcatgagtcatcaacttaccttcgccgacagtgaattcagcagtaagcgccgtcagaccagaaaagagattttcttgtcccgcatggagcagattctgccatggcaaaacatggtggaagtcatcgagccgttttaccccaaggctggtaatggccggcgaccttatccgctggaaaccatgctacgcattcactgcatgcagcattggtacaacctgagcgatggcgcgatggaagatgctctgtacgaaatcgcctccatgcgtctgtttgcccggttatccctggatagcgccttgccggaccgcaccaccatcatgaatttccgccacctgctggagcagcatcaactggcccgccaattgttcaagaccatcaatcgctggctggccgaagcaggcgtcatgatgactcaaggcaccttggtcgatgccaccatcattgaggcacccagctcgaccaagaacaaagagcagcaacgcgatccggagatgcatcagaccaagaaaggcaatcagtggcactttggcatgaaggcccacattggtgtcgatgccaagagtggcctgacccacagcctggtcaccaccgcggccaacgagcatgacctcaatcagctgggtaatctgctgcatggagaggagcaatttgtctcagccgatgccggctaccaaggggcgccacagcgcgaggagctggccgaggtggatgtggactggctgatcgccgagcgccccggcaaggtaagaaccttgaaacagcatccacgcaagaacaaaacggccatcaacatcgaatacatgaaagccagcatccgggccagggtggagcacccatttcgcatcatcaagcgacagttcggcttcgtgaaagccagatacaaggggttgctgaaaaacgataaccaactggcgatgttattcacgctggccaacctgtttcgggcggaccaaatgatacgtcagtgggagagatctcactaa

SEQ ID NO: 6871 - DNA, 828 bp, Escherichia coli
ttggaaagcctgttaacccttcctctggctggtgaggccagagtcaggattttacaaattaccgacactcacctgtttgcacaaaagcacgaagccctgttaggggtaaacacctgggagagttaccaggcggtgctggaggcgattcggccacaccagcacgaattcgacctgattgtcgcgacaggtgatttagcgcaggatcaatcctctgcggcctatcagcatttcgctgaaggcatcgcaagttttcgtgcgccctgcgtctggctgccgggcaaccacgatttccagcccgcgatgtacagcgcgttacaggatgcgggtatctccccggcgaagcgcgtgtttattggtgagcaatggcaaatcctgttgctggatagccaggtgtttggcgtgccgcacggtgagctgagcgagtttcagcttgagtggctggaacgtaaactggccgatgcgccagaacgccatacgttgctgctgctgcatcatcatccgctacctgcgggttgtagttggctcgatcaacacagtctgcgtaacgcgggcgaactggataccgtgctggcgaagtttccgcacgtcaaatacttgctgtgcggtcatattcatcaggagctggatctcgactggaatggtcgccgcctgctggcaacgccgtcgacctgtgtgcagtttaagccgcactgttccaactttacgctggataccatcgcgcccggctggcgtactctcgagttacatgctgatggcacgctgaccaccgaggtgcatcgcctggcggacacacgtttccaacctgataccgcttcagaaggctactga

SEQ ID NO: 6872 - DNA, 423 bp, Escherichia coli
atgaagcgttacacacctgactttcctgaaatgatgcgcctgtgcgagatgaacttttcacaattgcgccgtttgttaccgcgcaatgacgcacccggcgaaactgtaagctatcaggtggcaaacgcacaatatcggctgacgattgtggaatcgacccgatacactaccctggtgacaatagaacagactgcgcccgcgatcagttactggagccttccgtcaatgacggtgcgtctgtatcatgacgcgatggtggctgaagtgtgttcaagccagcagatttttcgcttcaaagcgcggtatgattatcctaataaaaagttgcatcaacgcgacgaaaagcatcaaattaatcagtttttagcggactggttgcgatactgtttagcacatggagcgatggcgattccggtttattag

SEQ ID NO: 6873 - DNA, 414 bp, Escherichia coli
atgaaaatatactgttgcttaaataccgttggtttttttatggatggctgtggcgtcattccgccagattctaaagaaataacggcagaacactggcagtcattattaaaatctcaagctgaaggaggcgtgatcgatttttctgtttttcctccttctattaaagaggttatccgtactcatgatgatgaagtcgcagatgcgaactttcaaaagcagatgcttatctctgatgcaactgattttatcaatagcagacagtggcagggtaaggctgcattgggaagacttaaagaagatgagctgaaacaatataatttgtggctggattatctggaagcactggaactggttgatacatccagtgcgccagatattgaatggcctacgcctccggcagttcaggccagatga

SEQ ID NO: 6874 - DNA, 1677 bp, Escherichia coli
atgcatcacgccaccccgcttatcaccaccattgttggcggccttgtgctcgcctttatcctcggcatgctggccaataaactacgtatttctcctctggtgggatatctgttagcgggtgtgctggcaggaccattcactccgggctttgttgccgataccaagcttgccccggaactggctgaactgggcgtcattctgttgatgtttggcgtcggtttgcacttttcgctgaaggatttgatggcggtaaaggccatcgccattcccggtgcgatcgcccagatagccgtggcgacgctgctgggtatggcgctctctgccgtgctgggctggtcgttaatgaccggtatcgtgttcggtttatgtctttccaccgccagtaccgtggtgttactgcgcgcacttgaagaacggcaattaattgacagtcagcgtgggcaaatcgccatcggttggttgattgtggaagacctggtaatggttctgacgctggtgttgctgcccgcagtggcaggaatgatggaacagggcgatgtgggctttgccactcttgcagtcgatatggggatcaccatcggcaaagtgatcgcatttatcgccattatgatgctggtaggtcgccgtctggtgccgtggattatggcacgcagcgcggcaaccggttctcgcgagctgtttaccctgtcggtgctggcgctggcgttaggggttgcctttggtgcggtagagctgtttgatgtctcctttgcactcggtgcgttctttgccgggatggtactgaacgagtctgaactgagtcaccgtgccgcccacgatacgctgccattgcgcgacgcgtttgcggtgctgttttttgtctccgtcgggatgttgtttgatccgttaattctgattcagcaaccgctggcagtgctggcgacgctggcgattattctgtttggtaagtcgttagccgcatttttcctggtgcgactgtttggtcactcccaacgtacggcattaaccatcgccgccagcctggcgcagattggtgagttcgcgtttatcctggcgggactgggaatggcattgaatttactgccgcaggccggacaaaacctggtactggcaggggcgatcctgtcgattatgctcaacccggtactgttcgcactactggagaaatatctggcgaagaccgaaacgctggaagagcagacgctggaagaggcaatcgaagaagagaagcagatcccagtggatatttgcaaccatgcgctactggtgggttacggtcgtgtaggcagcctgctgggggagaaattgctcgcctctgatattccgctggtggtgattgagacgtcacgaacccgtgttgatgagctgcgagagcgcggggtccgcgcagtattgggcaatgcggcgaacgaagaaattatgcaactggcgcatctggaatgtgcaaaatggctgatcctgacgattcccaacggttatgaagcgggtgagattgtggcatctgcccgcgcgaaaaatccggatattgagattattgcccgcgcccattatgacgatgaagtggcgtatatcaccgaacgtggtgcgaatcaggtagtgatgggcgagcgtgaaatcgcccgtaccatgctggaactgctggaaacgccaccggcgggtgaggtggtgacggggtaa

SEQ ID NO: 6875 - DNA, 4194 bp, Escherichia coli
atgagcggaaaaccggcggcgcgtcagggcgacatgacgcagtatggcggtagcattgtccagggttcagccggggtacgcatcggtgcccccaccggcgtggcctgttcggtgtgccccggcggggtgacgtccggccatccggtcaatccgctgctcggtgcaaaggtccttcccggtgaaaccgacatcgccctgcccggcccgctgccgttcattctctcccgcacctacagcagttaccggacaaaaacgcccgcgccggtggggagcctcggccccggctggaaaatgcctgcggatatccgcttacagctgcgcgataacacactgatactcagtgataacggcggcagaagcctgtattttgagcacctgtttcccggtgaggacggttacagccgcagcgagtcactgtggctggtgcgcggcggcgtggcgaaactggatgaaggtcaccggctggccgcactctggcaggcgctgccggaagaactccgcttaagtccgcatcgttatctggcgacaaacagtccgcaggggccgtggtggctgctcggctggtgtgagcgggtgccggaagcggatgaggtgctgcctgcgccgctgccgccgtaccgggtactgaccgggctggtggaccgcttcgggcgcacacagacgttccaccgcgaagccgccggtgaattcagcggcgaaatcaccggcgtgacggatggtgccgggcgtcacttccggctggtactgaccacgcaggcgcagcgggcagaagaagcccggcagcaggccatttccggcgggacggaaccgtccgcttttcctgataccctgccgggttacaccgaatatggccgggacaacggcatccgtctgtctgccgtgtggctgacgcacgacccggaatacccggagaatttacctgccgcgccgctggtgcgctatggctggacgccccgcggcgaactggcggcggtgtatgaccgcagcaatacacaggtgcgcagctttacttacgatgataaataccggggccggatggtggcgcaccgtcacacgggccgaccggaaatctgttaccgttacgacagcgacgggcgggtgacagaacagctaaacccggcaggcttaagttacacgtatcagtatgagaaggaccgcatcaccatcaccgacagcctgaaccgccgtgaagtcctgcacacgcagggtgaaggcgggctgaagcgggtggtgaaaaaggaacacgcggacggcagcgtcacgcagagtcagtttgacgcggtgggcaggctcagggcacagacggatgccgcaggcaggacaacagaatacagtccggatgtggtgacgggcctcatcacgcgcatcaccacgccggatggcagggcatcggcgttttactataaccaccacagccagttaacgtcagccaccgggcctgacgggctggaaatacgccgggaatatgatgaatggggccgtctgattcaggaaactgcccctgacggcgatatcacccgctaccgttatgataatccacacagtgacttaccctgcgcaacggaagatgccaccggcagccggaaaaccatgacgtggagccgttacggtcagttgctgagcttcactgactgttccggttatgtaacccgctatgaccatgaccgttttggtcaggtgacggcggtgcaccgcgaggaagggctgagtcagtaccgcgcatacgacagccgtggacagttaattgccgtgaaagacacgcagggccatgaaacgcggtatgaatacaacgccgccggtgacctgaccaccgtcattgccccggacggcagcagaaacgggacacagtacgatgcgtggggaaaagccatctgtaccacgcagggcggtctgacgcgcagtatggaatacgatgctgccggacgggtcatccgcctgaccagtgaaaacggcagccacaccaccttccgttacgatgtactcgaccggctgatacaggaaaccggctttgacggccgcacacagcgttatcaccacgacctgaccggcaaacttatccgcagcgaggatgaggggctggtcacccactggcactatgacgaagcagaccgcctcacgcaccgcaccgtgaatggcgaaaccgcagagcggtggcagtatgacgaacgcggctggctgacagacatcagccatatcagcgaagggcaccgggtgacggtgcactatggttatgacagtaaaggccgcctcgccagtgaacacctgacggtgcatcatccgcagacgaatgaactgctctggcagcatgagaccagacatgcgtacaacgcacagggactggcgaaccgctgtataccggacagcctgcccgccgtggaatggctgacctacggcagcggctggctgtcaggcatgaaactcggcgacacaccgctggtggagtacacccgcgaccgcctgcaccgggaaacgctgcgcagcttcggccgttatgaactcaccaccgcttatacccctgccgggcagttacagagccagcacctgaacagcctgctgtctgaccgcgattacacctggaacgacaacggcgaactcatccgcatcagcagcccgcgccagacccggagttacagctacagcaccaccggcaggctgaccggcgttcacaccaccgcagcgaatctggatatccgcatcccgtataccacagacccggcaggtaaccgcctgcccgacccggagctgcacccggacagcgccctcagcatgtggccggataaccgtatcgcccgtgacgcgcactatctttaccggtatgaccgtcacggcaggctgacagagaaaaccgacctcatcccggaaggggttatccgcacggatgatgagcgcacccaccggtaccattacgacagtcagcaccggctggtgcactacacgcggacacaatatgcagagccgctggtcgaaagtcgctatctttacgacccgctgggccgcagggtggcaaaacgggtatggcggcgtgaacgggacctgacgggctggatgtcgctgtcacggaaaccgcaagtgacctggtacggctgggacggcgaccgcctgaccacgatacagaacgacagaacccgcatccagacgatttatcagccggggagcttcacgccactcatcagggttgaaaccgccaccggtgagctggcgaaaacgcagcgccgcagcctggcggatacccttcagcagtccggtggcgaagacggtggcagtgtggtgttcccgccggtgctggtgcagatgctcgaccggctggaaagtgaaatcctggctgaccgggtgagtgaggaaagccgccgctggctggcatcgtgcggcctgacggtggcgcagatgcaaagccagatggacccggtatacacgccggcgcgaaaaattcacctgtaccactgcgaccatcgcggcctgccgctggcccttatcagcacggaagggacaacagcgtggtacgcagaatacgatgaatggggtaacctgctgaatgaagagaacccgcatcagctgcagcagcttatccgcctgccggggcagcagtatgatgaggagtccggcctgtattacaaccgccaccgctattatgacccgctgcaggggcgatatatcactcaggatccgattgggctgaaagggggatggaatttttatcagtatccgttgaatccgatctcaaatatagatccattaggattagaaacactaaaatgcattaagccactgcattcaatgggcggaactggtgaaagaagcggtccagatatatgggggaatccgttctatcatcaatatctttgtgtcccagatggtaaaggggactatacttgtggtggccaagaccaacggggagaatcaaaaggagatggtctatgggggccaggtaaagcaagtaatgatacaaaagaagctgctggccgttgtgacctcgttgaaaccgataatagttgtgtggagaactgtttaaaagggaagtttaaagaggtaaggccgcgttattctgtattgcctgatatattcacacctataaatttagggctatttaaaaactgccaagactggtctaatgattctttagaaacatgtaagatgaagtgctccggaaataacattggacgttttattagatttgtattcaccggagtgatgtaa

SEQ ID NO: 6876 - DNA, 4236 bp, Escherichia coli
atgagcggaaaaccggcggcgcgtcagggtgacatgacgcagtatggcggtagcattgttcagggttcagccggggtacgtattggtgcccccaccggcgtggcctgttcggtgtgccccggcggagtgacgtccggccatccggtcaatcccctgctcggtgcaaaggtccttcccggtgaaaccgacatcgccctgcccggcccgctgccgttcatcctctcccgcacctacagcagttaccggacaaaaacgcccgcgccggtggggagcctcggccccggctggaaaatgcctgcggatatccgcttacagctgcgcgataacacactgatactcagtgataacggcggcagaagcctgtattttgagcacctgtttcccggtgaggacggttacagccgcagcgagtcactgtggctggtgcgcggcggcgtggcgaaactggatgaaggtcaccggctggccgcactctggcaggcgctgccggaagaactccgcttaagtccgcatcgttatctggcgacaaacagtccgcaggggccgtggtggctgctcggttggtgtgagcgggtgccggaagcggatgaggtgctgcctgcgccgctgccgccgtaccgggtactgaccgggctggtggaccgcttcgggcgcacacagacgttccaccgcgaagccgccggtgaattcagcggcgaaatcaccggcgtgacggatggtgcctggcgtcacttccggctggtactgaccacgcaggcgcagcgggcagaagaagcccggcagcaggccatttccggcgggacggaaccgtccgcttttcctgataccctgccgggttacaccgaatatggccgggacaacggcatccgtctgtctgccgtgtggctgacgcacgacccggaatacccggagaatttacctgccgcgccgctggtgcgctatggctggacgccacgcggcgaactggcggtggtgtatgaccgtagtggcaaacaggtgcgcagctttacttacgatgataaataccggggccggatggtggcgcaccgtcacacgggccggccggaaatccgttaccgttacgacagcgacgggcgggtgacagaacagctaaacccggcaggcttaagctacacgtatcagtatgagaaagaccgcatcaccatcaccgacagcctggaccgccgtgaagtgctgcacacgcagggcgaagccgggctgaagcgggtggtgaaaaaggaacacgcggacggcagcgtcacgcagagtcagtttgacgccgtgggcaggctcagggcacagacggatgccgcaggcaggacaacagagtacagcccggatgtggtgacgggcctcatcacgcgcataaccacgccggatggcagggcatcggcgttttactataaccaccacaaccagttaacgtcagccaccgggcctgacgggctggaattgcgccgggaatatgatgaattgggccgtctgattcaggaaactgcccctgacggcgatatcacccgctaccgttatgataatccacacagtgacttaccctgcgcaacggaagatgccaccggcagccggaaaaccatgacgtggagccgttacggtcagttgctgagcttcaccgactgttccggttatgtaacccgttatgaccatgaccgcttcgggcagatgacggcggtgcaccgcgaggaagggctgagtcagtaccgcgcatacgacagccgtggacagttaattgccgtgaaagacacgcagggccatgaaacgcggtatgaatacaacatcgccggtgacctgaccgccgtcattgccccggacggcagcagaaacgggacacagtacgatgcgtggggaaaggccgtccgtaccacgcagggcgggctgacgcgcagtatggaatacgatgctgccggacgggtcatccgcctgaccagtgaaaacggcagccacaccaccttccgttacgatgtacttgaccggctgatacaggaaaccggctttgacggccgcacacagcgttatcaccacgacctgaccggcaaacttatccgcagcgaggatgagggtctggtcacccactggcactatgacgaagcagaccgcctcacgcaccgcaccgtgaagggtgaaaccgcagagcggtggcagtatgacgaacgtggctggctgacagacatcagccatatcagcgaagggcaccgggtggcggtgcattacaggtatgatgagaaaggccggctgaccggtgagcgtcagacggtgcatcacccgcagacggaagcactgctctggcagcatgagaccagacatgcgtacaacgcgcaggggctggcgaaccgctgtataccggacagcctgcccgccgtggaatggctgacctacggcagcggttacctggcaggcatgaaactcggcgacacaccgctggtggagtacacccgcgaccgcctgcaccgggaaacgctgcgcagcttcggccgttatgaactcaccaccgcttatacccctgccgggcagttacagagccagcacctgaacagcctgctgtctgaccgcgattacacctggaacgacaacggcgaactcatccgcatcagcagcccgcgccagacccggagttacagctacagcaccaccggcaggctgaccggcgttcacaccaccgcagcgaatctggatatccgcatcccgtatgccacagacccggcaggtaaccgcctgcccgacccggagctgcacccggacagcaccctcagcatgtggccggataaccgtatcgcccgtgacgcgcactatctttaccggtatgaccgtcacggcaggctgacagagaaaaccgacctcatcccggaaggggttatccgcacggatgatgagcggactcaccggtaccattacgacagtcagcaccggctggtgcactacacgcggacacaatatgaagagccgctggtcgaaagtcgctatctttacgacccgctgggccgcagggtggcaaaacgggtgtggcggcgtgaacgggacctgacgggctggatgtcgctgtcacggaaaccgcaagtgacctggtacggctgggacggcgaccggctgaccacgatacagaacgacaggagccgcatccagacgatttatcagccggggagcttcacgccactcatcagggtcgaaactgccaccggtgagctggcgaaaacgcagcgccgcagcctggcggatgcccttcagcagtccggcggcgaagacggtggcagtgtggtgttcccgccggtgctggtgcagatgctcgaccggctggaaagtgaaatcctggctgaccgggtgagtgaggaaagccgccgctggctggcatcgtgcggcctgaccgtggagcagatgaaaaaccagatggacccggtgtacacgccggcgcgaaaaatccacctgtaccactgcgaccatcgcggcctgccgctggcgctcatcagcacggaaggggcaacagcgtggtgcgcagaatatgatgaatggggcaacctgctgaatgaagagaacccgcatcagctgcagcagcttatccggctgccggggcagcagtatgatgaggagtccggcctgtattacaaccgccaccgctattatgacccgctgcaggggcgatatatcactcaggatccgattggactgaaggggggatggaacctgtatggatatcaattgaatccgatatcagacatcgaccccctgggtttatctatgtgggaggatgcaaaatcgggggcatgtactaatggtctttgcggcacactatccgctatgataggtccagataaatttgattctatagatagcaccgcatatgacgccttaaataaaataaatagccaatctatttgcgaagataaagagttcgctggtttaatatgtaaggataatagtggcagatatttctcaacagcacctaaccgaggagaaagaaaaggatcatatccattcaatagcccttgccctaatggtactgagaaagtatcagcttatcatactcatggtgcagatagtcatggagaatattgggacgaaatattttcaggtaaagatgagaaaatagttaaaagtaaagataacaatatcaagtcattttatttaggtacgcccagtggtaattttaaagcaatagataaccacgggaaggaaataacaaacagaaaaggattacctaatgtctgcagagttcatggtaatatgtaa

SEQ ID NO: 6877 - DNA, 2958 bp, Escherichia coli
  misc_feature (833)..(833): n=g, a, t or c
gtggtgaaaaaggaacacgcggacggcagcgtcacgcagagtcagtttgacgcggtgggcaggctcagggcacagacggatgccgcaggcaggacaacagaatacagcccggatgtggtgacgggcctcatcacgcgcatcaccacgccggatggcagggcatcggcgttttactataaccaccacagccagttaacgtcagccaccgggcctgacgggctggaaatacgccgggaatatgatgaatggggccgtctgattcaggaaactgcccctgacggcgatatcacccgctaccgttatgataatccacacagtgacttaccctgcgcaacggaagatgccaccggcagccggaaaaccatgacgtggagccgttacggtcagttgctgagcttcaccgactgttccggttatgtaacccgttatgaccatgaccgcttcgggcagatgacggcggtgcaccgcgaggaagggctgagtcagtaccgcgcatacgacagccgtggacagttaattgccgtgaaagacacgcagggccatgaaacgcggtatgaatacaacgccgccggtgacctgaccaccgtcattgccccggacggcagcagaaacgggacacagtacgatgcgtggggaaaagccatctgtaccacgcagggcggtctgacgcgcagtatggaatacgatgctgccggacgggtcatccgcctgaccagtgaaaacggcagccacaccaccttccgttacgatgtactcgaccggctgatacaggaaaccggctttgacggccgcacacagcgttatcaccaccacctgaccggcaaacttatccncagcgaggatgaggggctggtcacccactggcactatgacgaagcagaccgcctcacgcaccgcaccgtgaagggtgaaaccgcagagcgctggcagtatgacgaacgcggctggctgacagacatcagccatatcagcgaagggcaccgggtgacggtgcattacgggtatgatgagaaaggccggctgaccggtgagcgtcagacggtgcatcacccgcagacggaagcactgctctggcagcatgagaccagacacgcttacaacgcgcaggggctggcgaaccgctgtataccggacagcctgcccgccgtggaatggctgacctatggcagcggctggctggcaggcatgaagctcggcgacacaccgctggtggatttcacccgcgaccgcctgcaccggaaaacgctgcgcagattcggccgttatgaactcaccaccgcttatacccctgccgggcagttacagagccagcacctgaacagcctgcagtatgaccgcgattacacctggaacgacaacggcgaactcatccgcatcagcagcccgcgccagacccggagttacagctacagcgactccggcaggctgaccggcgttcacaccaccgcagcgaatctggatatccgcatcccgtatgccacggacccggcaggtaaccgcctgcccgacccggagctgcacccggacagcaccctcagcatgtggccggataaccgtatcgcccgtgacgcgcactatctttaccggtatgaccgtcacggcaggctgacagagaaaaccgacctcatcccggaaggggttatccgcacggatgatgagcggactcaccggtaccattacgacagtcagcaccggctggtgcactacacgcggacacaatatgaagagccgctggtcgaaagccgctatctttacgacccgctgggccgcagggtggcaaaacgggtgtggcgacgtgaacgggacctgacgggctggatgtcgctgtcacggaaaccgcaagtgacctggtacggctgggacggcgaccggctgaccacaatacagaacgacagaacccgcatccagacratttatcagccggggagcttcacgccactcatcagggttgaaaccgccaccggtgagctggcgaaaacgcagcgccgcagcctggcggatgcgcttcagcagtccggcggcgaagacggtggcagtgtggtgttcccgccggtgctggtgcagatgctcgaccggctggaaagtgaaatcctggctgaccgggtgagtgaggaaagccgccgctggctggcatcgtgcggcctgactgtggcgcagatgcaaagccagatggacccggtatacacgccggcgcgaaaaatccacctgtaccactgcgaccatcgcggcctgccgctggcccttatcagtaaggaaggggcaacagaatggtgcgcagaatacgatgagtggggcaacctgctgaatgaagagaacccgcatcagctgcagcagcttatccgcctgccggggcagcagtatgatgaggagtccggcctgtattacaaccgccaccgctattatgacccgctgcaggggaggtatatcactcaggatccgattgggctgaaggggggatggaacctgtatacatatccgctgagcccggtgaatggcatggatccattaggattatatgaatttaaatcaaaaaatatagatgatattggaatatttgcattggcaatgtgtaatggagaatcaattaacgagaataaagaatatggtggactaatatgtaagaagcaaggtgaatatttccccatgaatccgataagttcaaatgataatgatagtgtagacttgcgaaatataaaatgccctgaaggttcagagagagtaggcgattatcacactcacggtttttactctgacgataaaggaaataaagtaacaaaagaaaatgatgtttatgatagtctaaatttttcaagcaaagatttaacgaattcttatatgaatggaatgggaaaaaaagaatgcagtagttacttgggaacaccaaataacacctatctaaaatataatcccaaagctaaagggaatggagttacaattatcaggcaagggagtaattaa

SEQ ID NO: 6878 - DNA, 384 bp, Escherichia coli
atggaaggttcaagaatgaaataccgcatcgctttagctgtttctctctttgctcttagtgccggtagttatgccactaccctgtgtcaggaaaaggagcaaaatatccttaaggagatcagctatgccgaaaaacaccaaaaccagaatcgtattgacggtctgaataaagccctgagtgaagtccgggccaactgttcagatagccagctgcgtgccgatcatcagaagaaaatcgcaaagcagaaagatgaggtggcggaacgccagcaagatttagccgaggcgaagcaaaaaggcgatgccgataagattgccaaacgcgaacggaaactggcagaagcgcaggaagagctgaaaaagctggaagcgcgcgactactaa

SEQ ID NO: 6879 - DNA, 216 bp, Escherichia coli
atgccggtaattaaagtacgtgaaaacgagccgttcgacgtagctctgcgtcgcttcaagcgttcctgcgaaaaagcaggtgttctggcggaagttcgtcgtcgtgagttctatgaaaaaccgactaccgaacgtaagcgcgctaaagcttctgcagtgaaacgtcacgcgaagaaactggctcgcgaaaacgcacgccgcactcgtctgtactaa

SEQ ID NO: 6880 - DNA, 3888 bp, Escherichia coli
atgatggaaattctgcgtggttcgcctgcactgtcggcattccgaatcaacaaactgctggcacgttttcaggctgccaggctcccggttcacaatatttacgccgagtatgtccattttgctgacctcaatgcgccgttaaacgatgatgagcacgcacaacttgaacgcctgctgaaatatggcccggcactcgccagccacgccccgcaaggcaaactcctgctggtgaccccgcgtcctggcaccatctctccctggtcttcgaaagcgaccgatattgcccataactgcgggctacaacaggtaaaccgccttgagcgcggcgttgcttactatatagaagccggtacgctgaccaatgaacaatggcagcaggttaccgctgaactgcacgaccgcatgatggaaacggtcttttttgctttagatgatgcagagcagttgtttgcccaccatcaaccgactccggttaccagcgttgatttgctggggcagggccgtcaggcgctgatcgacgctaacctgcgtcttggcttggctctggcggaagatgaaattgactatctgcaggatgctttcacaaagcttggtcgtaacccgaacgacatcgaactgtatatgtttgcccaggcgaactccgagcactgccgccacaaaatttttaacgccgactgggttatcgatggtgaacagcagccgaaatcgctgttcaagatgatcaaaaatactttcgaaaccacgccagatcacgttctctctgcttataaagataacgccgccgtaatggaaggttctgaagtgggccgctactttgctgaccacgaaacgggccgctacgatttccatcaggaaccggcgcatattctgatgaaagtcgaaactcacaaccacccgacggcgatttctccgtggccgggcgcggcgaccggttccggcggtgaaatccgcgatgaaggtgccaccgggcgcggcgcaaagccgaaagcgggtctggttggtttctccgtttccaacctgcgaattcctggcttcgaacagccgtgggaagaagatttcggtaagcctgagcgcattgtcaccgcgctggacatcatgaccgaaggcccgctgggcggcgcggcgtttaacaacgaatttggtcgtccggcactgaacggctacttccgtacttatgaagaaaaagtgaacagccacaacggcgaagagctgcgcggttatcacaaaccgatcatgctggcgggcgggatcggcaacattcgcgccgatcacgtacaaaaaggcgagatcaacgtcggtgcgaagctggtcgttctcggcggcccggcaatgaacatcggtcttggcggtggtgcagcgtcttctatggcgtctggtcagtctgatgccgacctcgactttgcttccgtacagcgcgacaacccggagatggagcgtcgctgccaggaagtgatcgaccgttgctggcagcttggtgatgccaacccaatcctgtttatccacgacgttggcgctggcggtctttctaacgccatgccggaactggtgagcgacggcgggcgcggcggtaaatttgaactgcgcgagattctaagcgacgaaccgggcatgagcccgctggaaatctggtgtaacgaatcccaggaacgctacgtgctggcggttgctgccgatcaattaccgctgtttgacgaactgtgtaagcgtgagcgcgcaccctacgcggtgattggtgaagcgaccgaagaactgcatctttctctgcacgatcgtcattttgataatcagccgatcgatctgccgctggacgtcctgcttggtaaaacgccgaagatgacccgcgatgtacaaacgctgaaagcgaaaggcgacgcgctggcccgtgaagggatcaccattgcagacgcggtgaaacgtgtgctgcatctgccgactgtggcggaaaaaaccttcctggtgaccattggcgaccgcagcgtaaccggcatggtagcgcgcgatcagatggtggggccgtggcaggtgccggtcgctaactgcgcggtcactaccgccagcctcgacagctactacggtgaagcgatggcgattggcgagcgtgcgccggttgcgctgctggatttcgccgcctctgcccgtctggcggtcggtgaagcgttaaccaacatcgccgcaacacaaattggcgatatcaaacgcatcaaactttccgccaactggatggcggcggcaggccaccctggtgaagatgcgggcctgtatgaagccgttaaagccgtgggcgaagagctttgtccggcgctgggcctgacgatcccggtgggtaaagactccatgtcgatgaaaacccgctggcaggaaggtaacgaagagcgcgaaatgacgtcgccgctgtcgctggtgatttctgcatttgcccgcgtggaagatgtacgtcacaccatcacgccgcagctttctaccgaagataacgcactgctgctgattgatttgggcaaaggcaataacgcgctgggcgcaacggcgctggcgcaggtttttcgtcagcttggcgacaaaccggcagatgtacgcgatgtcgcgcaactgaaaggcttctatgacgcgattcaggcgctggttgcacagcgtaagctgctggcgtatcacgaccgctctgatggcggcctgctggtaacgctggcggaaatggcctttgctggtcattgtggcattgacgcggatatcgccactctgggtgacgatcgcctggcggcgttgtttaacgaagaactgggtgcggtgattcaggttcgtgccgctgaccgtgaagcggtcgagtccgtactggcacagcatgggcttgctgattgtgtccattatgtagggcaggcggtttccggtgaccgttttgtgattaccgccaacgggcagactgtattcagcgaaagccgcaccacgttgcgtgtctggtgggcagaaactacctggcagatgcagcgcctgcgtgacaacccggagtgtgccgatcaggagcatcaggcgaaatctaacgacgccgatccgggcctgaatgtaaaactgtcgttcgatatcaacgaagatgtggcagcaccgtatattgccactggcgcacgtccgaaagttgccgtactgcgtgagcagggcgtgaactcgcatgttgaaatggcggcagctttccaccgtgcaggctttgatgctatcgacgtgcatatgagtgacctgctgaccggacgcacgggcctggaagatttccacgccctggtcgcgtgcggtggtttctcctacggtgatgtgctgggtgccggtgaaggttgggcgaagtcaatcctgttcaatgaccgtgtacgcgatgagtttgcaaccttcttccaccgtccgcaaacgctggcgctgggggtatgtaacggttgccagatgatgtctaatctgcgtgaactgatcccaggtagtgagttgtggccacgttttgtgcgcaatacctccgatcgctttgaagcgcgtttcagcctggttgaagtaacccaaagcccgtctctgctgttgcaggggatggtgggctcgcaaatgccgattgctgtctctcatggtgaagggcgcgtggaagtgcgtgatgcggcgcatctggcggcactggaaagcaaagggctggtggcactgcgctatgtcgataacttcggcaaagtcactgaaacctacccggctaacccgaacggttcaccgaacggtattacggcagtcacgactgaaagtggtcgagtcaccattatgatgccgcacccggaacgtgttttccgtactgtcagcaactcctggcatccggaaaactggggcgaggatggcccatggatgcgcattttccgcaatgcgcgtaagcagttggggtaa

SEQ ID NO: 6881 - DNA, 723 bp, Escherichia coli
atgggacacaagcccttataccggcagattgccgatcgcattcgtgaacaaattgcgcgtggcgagcttaaacctggcgatgcgttacccactgaatcagcgctacaaacagagtttggcgtcagccgggttacggtgcgtcaggctttgcgccagctagtcgagcagcagatcctcgaaagcattcagggcagcgggacttacgtcaaagaagagcgggtcaattacgatatttttcagttaaccagttttgatgaaaaactgtcggaccgtcacgtcgatacacacagtgaagttctgatattcgaagtgattccggctgacgattttcttcagcaacagctacaaatcaccccgcaggatcgtgtgtggcatgtgaagcgcgtgcgctatcgcaagcaaaagccaatggcgctggaagaaacctggatgccgcttgcgttgttcccggatctcacctggcaggtcatggaaaattcgaaatatcactttatcgaagaagtgaagaaaatggttatcgatcgtagcgaacaggaaatcattcctctgatgccaaccgaagagatgagccgtctgcttaatatcagccagacaaagccgattcttgaaaaagtatcgcgtggatatttagttgatggtcgggtgtttgaatatagccgcaacgcttttaataccgatgactataaatttaccctgatagcgcagcgaaaatcatcgcgataa

SEQ ID NO: 6882 - DNA, 2181 bp, Escherichia coli
atgagcacgtcagacgatatccataacaccacagccactggcaaatgcccgttccatcagggcggtcacgaccagagtgcgggggcgggcacaaccactcgcgactggtggccaaatcaacttcgtgttgacctgttaaaccaacattctaatcgttctaacccactgggtgaggactttgactaccgcaaagaattcagcaaattagattactacggcctgaaaaaagatctgaaagccctgttgacagaatctcaaccgtggtggccagccgactggggcagttacgccggtctgtttattcgtatggcctggcacggcgcggggacttaccgttcaatcgatggacgcggtggcgcgggtcgtggtcagcaacgttttgcaccgctgaactcctggccggataacgtaagcctcgataaagcgcgtcgcctgttgtggccaatcaaacagaaatatggtcagaaaatctcctgggccgacctgtttatcctcgcgggtaacgtggcgctagaaaactccggcttccgtaccttcggttttggtgccggtcgtgaagacgtctgggaaccggatctggatgttaactggggtgatgaaaaagcctggctgactcaccgtcatccggaagcgctggcgaaagcaccgctgggtgcaaccgagatgggtctgatttacgttaacccggaaggcccggatcacagcggcgaaccgctttctgcggcagcagctatccgcgcgaccttcggcaacatgggcatgaacgacgaagaaaccgtggcgctgattgcgggtggtcatacgctgggtaaaacccacggtgccggtccgacatcaaatgtaggtcctgatccagaagctgcaccgattgaagaacaaggtttaggttgggcgagcacttacggcagcggcgttggcgcagatgccattacctctggtctggaagtagtctggacccagacgccgacccagtggagcaactatttcttcgagaacctgttcaagtatgagtgggtacagacccgcagcccggctggcgcaatccagttcgaagcggtagacgcaccggaaattatcccggatccgtttgatccgtcgaagaaacgtaaaccgacaatgctggtgaccgacctgacgctgcgttttgatcctgagttcgagaagatctctcgtcgtttcctcaacgatccgcaggcgttcaacgaagcctttgcccgtgcctggttcaaactgacgcacagggatatggggccgaaatctcgctacatcgggccggaagtgccgaaagaagatctgatctggcaagatccgctgccgcagccgatctacaacccgaccgagcaggacattatcgatctgaaattcgcgattgcggattctggtctgtctgttagtgagctggtatcggtggcctgggcatctgcttctaccttccgtggtggcgacaaacgcggtggtgccaacggtgcgcgtctggcattaatgccgcagcgcgactgggatgtgaacgccgcagccgttcgtgctctgcctgttctggagaaaatccagaaagagtctggtaaagcctcgctggcggatatcatagtgctggctggtgtggttggtgttgagaaagccgcaagcgccgcaggtttgagcattcatgtaccgtttgcgccgggtcgcgttgatgcgcgtcaggatcagactgacattgagatgtttgagctgctggagccaattgctgacggtttccgtaactatcgcgctcgtctggacgtttccaccaccgagtcactgctgatcgacaaagcacagcaactgacgctgaccgcgccggaaatgactgcgctggtgggcggcatgcgtgtactgggtgccaacttcgatggcagcaaaaacggcgtcttcactgaccgcgttggcgtattgagcaatgacttcttcgtgaacttgctggatatgcgttacgagtggaaagcgaccgacgaatcgaaagagctgttcgaaggccgtgaccgtgaaaccggcgaagtgaaatttacggccagccgtgcggatctggtgtttggttctaactccgtcctgcgtgcggtggcggaagtttacgccagtagcgatgcccacgagaagtttgttaaagacttcgtggcggcatgggtgaaagtgatgaacctcgaccgtttcgacctgctgtaa

SEQ ID NO: 6883 - DNA, 837 bp, Escherichia coli
atggaaatgctcgaagagcaccgctgttttgaaggctggcagcaacgctggcgacacgactccagtaccttaaactgcccgatgacgttcagtatctttctccctccacctcgtgatcacactccgccaccagtgctgtactggctttccggattaacctgcaatgacgagaacttcaccaccaaggcgggtgcccagcgggtagcggcggaactggggattgtactggtgatgccagacaccagcccgcgcggcgaaaaggttgccaacgacgatggctacgatttaggccagggcgcaggcttttatcttaatgccacgcaaccgccgtgggcgacgcattaccggatgtatgattatctgcgcgatgaattaccggcgctggttcagtcgcaatttaatgtcagcgaccgctgcgccattagcggtcactcaatgggtggtcacggtgcgctgattatggcgctgaaaaatccgggtaaatacaccagcgtttcggcctttgcgccaattgtgaatccgtgcagcgtcccgtggggaatcaaagcgtttagcagctatttaggtgaggacaaaaatgcatggctggaatgggacagttgcgcactgatgtatgccagtaacgcgcaggatgcgatcccgacgcttatcgatcagggcgataatgatcagtttcttgccgaccagttgcaacctgcggtactggcagaagccgcgcgccagaaagcgtggccgatgacgctgcgtattcagccgggatatgatcacagttactacttcatcgcctcttttatagaggatcacctgcgcttccatgcgcagtatttactgaagtga

SEQ ID NO: 6884 - DNA, 4617 bp, Escherichia coli
atggcagataatccagacccttcatcgctcctgccggacgtgttttcaccggcgacccgcgactggtttcttcgcgcctttaaacagccgaccgctgtccagccgcaaacctggcatgtggcggcgcgaagcgaacatgcgctggtgattgcaccgaccggctccgggaaaacgctggcagcatttctctacgccctcgatcggctcttccgcgaaggcggcgaagatacccgcgaggcgcataagcgtaaaacctcacgcatcctctatatttcaccgataaaagccctgggcaccgacgttcagcgcaacttgcagatcccgttgaagggtattgccgatgaacggcggcggcgcggcgaaacggaagtcaatcttcgcgtagggatccgtactggcgatacgcctgcacaggaacgcagcaaactcacccgtaatccgccggatattctgatcaccacacccgaatcactctatctgatgctgacctcccgcgcgcgcgaaacgctacgcggcgtcgaaacggtaattattgatgaagtccacgcggtagcgggcagtaaacgtggtgcgcatctggcgttaagtctggagcggctcgatgcgctgctccacacctcagcacagcgaattggcctttctgccactgtgcgctcagccagcgatgtggcagcatttcttggtggcgatcgcccggttacggtagtcaacccgcccgcaatgcgccatccgcagatacgaattgtcgtaccggtcgccaatatggatgatgtctcatcggtcgccagcggcaccggcgaagacagccatgccggccgggaaggctccatctggccatatattgaaacgggtatccttgatgaagtgttgcgccatcgctcgaccattgtctttactaattcgcgggggctggcggaaaaactgacggcacgattaaatgagctttacgccgcacgcttacagcgttccccgtctatcgccgttgatgcggcccatttcgagtcgacctccggcgcaacctctaaccgtgtacaaagtagcgacgtttttattgcccgctcacaccacggctccgtctctaaagaacaacgagcaatcaccgaacaggcgctgaaatcgggtgaattacgctgcgtggtcgcaacctccagtcttgaactggggattgatatgggcgcggtggatctggtgattcaggtggcaacgccgctttctgttgccagtgggttacaacgcattggtcgcgccggacatcaggttggcggtgtatctaaagggctgtttttcccccgtacccggcgtgatttagtcgattccgcagtcattgtagagtgtatgttcgcaggcaggctggaaaacctgacaccaccgcataatcctctcgacgtccttgcgcagcaaaccgttgccgccgcggcgatggatgcattacaggtagacgaatggtactcccgcgtacgccgtgccgcaccgtggaaagatctgccaagacgtgtttttgacgccacgctggatatgctttccgggcgctatccctctggcgatttttctgcttttcgccccaaactggtctggaacagggagaccgggatattgaccgcccgacctggcgctcaattgttggcggttaccagcggcggcaccattccggatcgtggcatgtatagcgtgttattacccgaaggtgaagaaaaggccggttcgcggcgggtgggtgaactggatgaggagatggtatatgagtcgcgggtgaacgacattatcactctcggcgctacctcatggcggatccagcaaatcacccgcgatcaggtgattgtgactcctgctccgggtcgttctgcccggctccccttctggcgtggtgaaggtaacggacgtccggctgaattaggcgagatgatcggcgattttcttcatttgctggcggatggcgcgttcttttccgggactattcccccgtggctggcagaagaaaatacgatcgccaatattcaggggttgattgaggagcagcgcaacgcgacgggcatcgttccggggagtcgccatctggtcctcgaacggtgccgtgatgaaattggtgactggcgtattattttgcactctccctatggaagacgggtgcatgaaccctgggcggtggcgattgccgggcgaatacatgcgctatggggcgctgacgcgtcggtggtcgccagtgatgacggcattgttgcacgtattcctgacaccgatggtaaattgcccgatgccgcgatttttttgtttgaaccagaaaagttgctgcaaattgtccgcgaggcggtaggcagctcggcacttttcgccgcccgttttcgcgaatgcgccgcgcgggcattattaatgccggggcgcactccgggccatcgcaccccgctttggcaacaacggctgcgcgccagtcagttgctggaaatcgctcagggatatccggattttccggtcattctcgaaaccctacgcgaatgtctgcaagatgtttatgatcttcccgcactggaacgtttgatgcgtcgcctgaacggtggcgaaattcaaatatccgatgtaacgaccactacgccctcgcctttcgccacaagtttattgttcggctatgtcgcggaatttatgtaccagagcgacgccccgctggcagagcgccgggcatccgtactgtcgctggacagcgagttactgcgcaatctactcggacaggtcgatccgggggaattactcgacccgcaggtcattcgccaggtggaagaagagttgcaacgactggctcctggcagaagagcgaaaggtgaagaaggattgttcgacctgctgcgcgaactggggccaatgaccgttgaagacctggcgcaacggcatacaggcagcagtgaagaggttgcgtcgtatctggaaaatcttcttgcagtaaaacgaatcttcccagcgatgattagcggacaggagcgtcttgcctgtatggatgatgccgccaggctgcgtgatgccctcggcgtacgactaccagagtcattgccagagatttatttacatagagtcagttacccgcttcgcgacctctttctgcgctatctccgggctcatgctctggtcacggctgaacaactggctcatgagtttagtctcggtattgccattgtcgaagagcagcttcagcaactgcgtgaacagggtctggtgatgaatctgcaacaagacatctgggtgagcgatgaagtatttcgtcgtctgcgtttgcgctcgctgcaagccgccagagaagcgacgcgtcccgttgcagccacgacctatgcgcgattgctgctggaacgtcagggcgtattacccgccaccgatggtagcccggcgctctttgcctcaacatcgccaggcgtttatgagggcgtagatggcgtgatgcgggtgatcgaacagcttgccggagtcggtttacccgcctcactctgggaaagccagatcctgcctgcccgcgtacgcgactattcgtcagaaatgctcgatgaattactggcaaccggtgcggttatctggtcggggcaaaaaaaactgggtgaagatgacggcctggtggcactgcatctacaggaatatgctgcagaatcgttcactcccgccgaagcggatcaggcgaatcgttcggcgctgcaacaagcgatagtcgctgttctggctgacggaggagcctggtttgcacaacaaatcagccaacggatacgcgacaaaatcggcgaatcggttgatctctctgccctgcaagaggcgttatgggcgctggtctggcaaggcgtcatcaccagcgacatttgggcaccgttacgcgccctcacccgcagcagttccaacgcacgcacctcaactcgccgcagtcaccgggctcgtcgtggacgtcctgtctatgcgcaacccgtctcgccgcgggtatcttacaacacaccaaatctggctggacgctggtcgttattgcaggtggagccactaaacgataccgaaaggatgctggcgctggcggaaaatatgctcgaccgctacggcatcatcagtcgtcaggcggtgatagccgaaaatatccctggcgggtttccatcgatgcaaacgctttgtcgaagtatggaagactccgggcgaattatgcgaggtcgttttgtagaaggtctgggtggcgcgcaattcgctgaacgtctgactattgaccgattgcgcgatctggcgacacaagccacgcaaacgcgccactatacaccagtggcgctctctgccaacgatccggctaatgtgtggggaaatcttctgccctggcctgcacatccggcaacgctggttccaacgcgtcgggcgggtgcgctggtggtcgtttctggcggcaaattgttactctatctggcgcaaggtggcaaaaaaatgctggtctggcaggaaaaagaggaattactcgccccagaggttttccacgcgctgactaccgcactgcgtcgcgaaccacggctgcgctttacgctaacagaagtgaatgatctaccggtccggcaaacgccgatgtttacgctgctgcgtgaggcgggattttcaagttcgccacaagggctggattggggatag

SEQ ID NO: 6885 - DNA, 861 bp, Escherichia coli
atgagaaaggtaacttccctctcgcgggggaagttacctttctttttttttgccttacggaaattggagctaactatgtcaatcgaatctctcaatgcgttctcaatggattttttctccctgaaaggtaaaaccgcaattgttaccggtgggaatagcggtttaggccaggcatttgccatggcgttggccaaagctggcgcaaatatctttattcctagtttcgtcaaagataacggcgaaacaaaggaaatgattgaaaaacagggtgttgaggtggacttcatgcaggtgggtatcaccgcagaaggcgcgccgcagaagattatcgctgcttgctgtgagcgtttcggtacagttgatattctggttaacaatgccggtatttgtaagctgaataaggtgctggacttcggtcgtgccgactgggatccgatgattgatgtgaacctgaccgccgcattcgagttaagctatgaagctgcaaaaattatgatcccgcagaaaagcggcaaaattattaatatctgttcattgttctcttacttaggtggacaatggtcacctgcatattctgccactaaacatgctcttgccgggttcaccaaagcttattgtgatgaactaggtcaatataatattcaggtaaatggtatcgcccctggctattatgcaacagatattacgctggcgacacgcagtaatccagaaaccaatcagcgcgttcttgatcatattccggcaaaccgttggggcgatactcaggatttaatgggcgcagccgtattcctcgcaagtccggcatcgaattatgtcaacgggcatttattagtggttgatggcggttatttagtgcgctaa

SEQ ID NO: 6886 - DNA, 624 bp, Escherichia coli
atgtcaacgattattatggatttatgtagttacacccgactaggtttaaccgggtatctgttgagtagaggggttaaaaaaagagaaatcaacgacattgaaaccgttgatgaccttgccatagcttgtgattcacagcgcccttcagtggtgtttattaatgaggactgtttcatccacgatgcttctaacagtcagcgtatcaagctcatcattaatcaacatcccaatacgttatttatcgtttttatggcaattgccaatgttcattttgatgaatatctattggtcagaaaaaatttattgatcagttctaaatcgattaaaccggaatctctcgacgatatccttggcgatattctgaaaaaagagacaacgataacctcgtttttaaatatgccgacgttatcattgagccgaaccgaatcgagtatgttgcgaatgtggatggcaggtcagggaaccattcaaatctctgaccaaatgaatatcaaagccaagaccgtttcatcgcataaaggtaatattaaacgtaagatcaaaacgcataataaacaggttatctaccatgtcgtccgactgacggataatgtgactaatggtatttttgtcaacatgcgctaa

SEQ ID NO: 6887 - DNA, 459 bp, Escherichia coli
atgacaacacagacgcagcacgacctcgcacccgctaaccaacccgaatttgaactgaccgtcacgccggtccccgatgaacagcgtatcgatttctggccacagtactttggcgctatcccgcagtggctactcctggagccgcatatcttcgcctggatggaccgcttctgtgagggctacagcggtggtatctggtcgttctacaccctcagcaatggcggcgcatttatgtcccccgagcctgacaacgatgagacatggcgtctgtttaactgcctgaacggtaacgatgcccaaatgagtgcagaagcagcaggtattgctgtctgcctgattgcgtatagccaccatgcctgccgtacagaatgtgacgcgatgaccgcacactattaccgcctgcgggagtatgccatgcaacatccagaggctcacgccattctgcgtattatcgactga

SEQ ID NO: 6888 - DNA, 1257 bp, Escherichia coli
atgggtagtaatatacatggaattagttgcactgcaaataattatttgaaacaggcctggaacgatataaaaaatgagtacgaaaaaaatcaaacatattcaatcacgctttttgaaaacacactggtgtgttttatgcggttatacaatgaactcagacgtaaagtaaatgaagaggatactccatgtctggaatgtgaatcactagaaaaagaatttgaggaaatgcagaatgataatgatctatcattatttatgagaatattgcgtactaatgatacacaaatttattcaggggtttcaggaggtattacatatactatacaatatgttcgagatattgatattgttagagtgtccttgccgggcagagcttcagagtctatcacagattttaaaggttattattggtataactttatggagtatattgaaaacattaatgcgtgtgatgatgttttttctgagtattgttttgatgatgaaaatataagtgtccagccagagcggataaatacgccgggaatatctgatttggattctgacattgatttgtctggtatatcttttattcagcgtgaaactaaccaggcattaggattaaaatatgctcctgtagatggcgatggatattgtctgttaagagctatactggttttaaaacaacatgattattcatgggcgctggtcagttataagatgcaaaaggaagtttacaacgaattcattaaaatggttgataaaaaaacgatcgaggctcttgttgatacggcattctataatctcagggaagatgtaaagacgttatttggcgttgatctacaatctgacaaccaaattcaggggcagagtagtcttatgtcatggagctttctgttttttaaaaaacaattcattgatagttgcttgaataacgaaaaatgtatcctgcatttacccgagtttatatttaatgataacaagaacttgcttgctttagataccgacacgtcggataggattaaagcggtgaagaattttcttgttgttctttcagatagcatttgctcattatttattgttaatagtaatgtggcatcaatctccttggggaatgaatccttttcaacagatgaagatcttgagtatggttatttaatgaacactggcaatcattatgacgtttacctccctcctgaactttttgctcaggcttacaagttaaacaataaggaaatgaatgcgcaactcgactatttaaatcgttatgcaatttaa

SEQ ID NO: 6889 - DNA, 351 bp, Escherichia coli
ttgaatgacaaaaaatgcatactgcatttacccgagtttatatttaatgataacaaggcgcgccttgttttagacaccgacccagagaagaggattaatgaggtgaaaaatttcctcactgctctttcagatagcatttgctcattatttattgttaatagtaatgtggcatcaatctccttagggaatgaatccttttcaacagatgaagatcttgagtatggttatttaataaacactggcaatcattatgacgtttacctccctcctgaactttttgctcaggcttacgagttaaacaataaggaaaggaatgcgcaaattggttttttaactcgttatgcaatttaa

SEQ ID NO: 6890 - DNA, 1551 bp, Escherichia coli
atgaagagatcgatatcgtttcgtcccacattgctcgcgctcgtccttgccacaaatttcccggttgcgcacgccgccgtaccaaaagatatgctggtgattggtaaggccgccgatccacaaaccctcgacccggcggtaacaatagataataacgactggacagtgacctacccgtcttatcagcggctggttcagtacaaaacggacggtgataaaggctcaaccgacgttgaaggcgatctggcaagtagctggaaagcgtctgacgatcaaaaagagtggacgttcaccctgaaagataatgctaaatttgccgatggcacacctgtcactgccgaagcagtaaaactttcttttgagcggctactaaaaatcggccaggggccagcagaagcatttcccaaagatttaaagattgatgctcccgacgaacatacggtgaagtttacccttagccaaccattcgcaccgttcctctacacgctggcgaatgacggtgcatccattatcaatccggcggtcttaaaggaacatgcagcggatgatgctcgcggcttcctcgcgcaaaataccgccggttccggaccatttatgctgaaaagctggcaaaaaggtcagcaattagttctggtgccaaatccgcattacccaggcaataaaccgaacttcaaacgggtatcggtaaaaattattggtgaaagtgcctcccgtcgcctgcagctctcccgtggcgacattgacattgccgatgcgctgccggtggatcaactcaacgccctgaagcaggaaaataaagtcaatgtggcagagtatccgtcactgcgcgttacctatctgtatctgaataacagcaaagcgcctcttaatcaggcggatctgcgtcgggccatttcctggtctaccgattatcagggcatggttaacggcattctgagtggtaacggaaaacagatgcgcggcccgattccggaaggcatgtggggctacgatgcgacggcaatgcaatacaaccatgacgaaacgaaagccaaagccgaatgggataaagtgacgagcaaacccaccagcctgacgtttctctactccgataacgatccgaactgggagcctattgctctggcgacacaatccagtctcaacaagctgggcatcattgtgaagctggaaaagctggcgaacgccaccatgcgcgacagagtgggtaaaggtgattacgacattgcgattggcaactggagtccggattttgccgacccgtatatgtttatgaattactggtttgagtcagacaaaaaaggtctgccgggtaaccgctcgttctatgaaaacagtgaggtcgataagttactgcgcaatgcgcttgcgaccaccgaccagacgcagcgtacccgggactaccagcaggcacagaaaatcgtcattgatgacgctgcttatgtgtacctgttccagaaaaactaccaactggcgatgaacaaagaggtgaaaggctttgtgttcaatcccatgctggaacaggtcttcaatatcaataccatgagtaaataa

SEQ ID NO: 6891 - DNA, 582 bp, Escherichia coli
atgtcggataccaccgaactggttgatttagccgtaatcttccctgatctggagatcgaattgaaatacgcctgcgctgataacatcacaggtaaagctatttatcagcaagcgcgttgtctgttacacaaggatgcgattaccgcgctggcgaaaagtatcagcatcgcccagctgtcagggttacaactggtgatttacgatgcgtatcgcccacaacaagcacaggcgatgttgtggcaagcctgcccagacccgcaatatgttgttgatgtgacggtcggttctaatcacagccgtggcacggcgatcgacctgacgcttcgtgatgagcacgggaacatcctcgatatgggcgcagggttcgatgaaatgcacgagcgctcccatgcctatcacccttccgtcccgcccgccgctcagcgcaatcggctgttgctgaatgcgataatgactggtggcggttttgtcggtatctccagcgaatggtggcacttcgaattaccccaggcagcgagttaccctctgctcgctgatcaattctcttgttttatatcccctggcacacagcacgtcagttaa

SEQ ID NO: 6892 - DNA, 1050 bp, Escherichia coli
atgcgcacgttattttctcaacaacagtggattgatatgaaggtactggttaccggcgccaccagcggcttaggtcgaaacgcggtagagtttttatgccagaaaggcatcagcgtgcgagcgaccggtcgcaacgaggcaatgggcaaattgctggaaaaaatgggcgcagagtttgttccggcggatctgaccgagctggtttcatcacaagctaaagtgatgctcgcgggcattgatacgctgtggcactgctccagctttacctcaccctgggggacacaacaggctttcgatctggctaacgttcgcgccactcgccgcctgggtgaatgggctgtcgcctggggtgtgcgtaactttattcatatctcttccccctccctgtacttcgattatcaccaccatcgcgatattaaagaagattttcgccctcaccgcttcgccaacgagtttgcccgcagcaaagcagccagcgaagaagtgatcaatatgctttcgcaggcgaatccacaaacgcgctttactattctgcgcccacaaagtctgttcggaccgcacgataaagtctttattccccgtctggcgcatatgatgcaccactacggcagtattctgttaccgcatggcggcagtgcgctggtcgatatgacctactatgaaaatgccgtgcacgcaatgtggctggcaagccaggaagcctgcgataagctaccttccgggcgtgtgtacaacatcaccaacggcgagcatcgcacactgcgcagcatcgtgcagaagctgatcgacgagttgaatattgactgtcgtattcgttccgtcccctacccgatgctggatatgatcgcccgcagcatggagcgtttaggccgcaagtcagcaaaagagccgccgctgacccactacggcgtctccaagttgaattttgactttacgctggatattacgcgtgcgcaggaagagttaggttatcagccggtcatcaccctggatgaaggtatcgagaaaactgccgcctggctacgcgaccacggaaaactgccgcgctaa

SEQ ID NO: 6893 - DNA, 447 bp, Escherichia coli
gtgcgcagggattatatgtcagtgtatgactatcccgtaccaaccacaccgtggctgaatacggcacccggtttatttattgacgattatacctcgacagcctccagtacagtgtcttccctgagccggacactgatttatgactatgagcagaaccctgattccggcaacaatgtggtggcgctggcagcaaaagcaggatacagcacatggtggatatccaatcaaggaaaactgggggagcatgacacacgcatctctgttattgcttctgatgcggagcatgccactttcctcaagaaaggcagcttcgcttcccgtaaaacagatgacaaactgttgttacaggaaacagaacgtgcgctggcggatacatcctctccgaagataattttcctgcacatgatgggttctcatccaaatccgtgtgacagccttaactcctag

SEQ ID NO: 6894 - DNA, 450 bp, Escherichia coli
atgcaggaagagcccggcgattgccatcagcctcacaaccccgctagaaccggttcagaacctacagaaaacactacaggagaaagcaaagtgaaccgccccgtgtttcctgtttatcattttctggtcagtgccgcgattctggtattcgtggtgattttctggcggacacaccatcgcgaccaccgtaactggctggctctacggctattcgtattatgctctgtaaaccgttggccattgcggatggttaaaggaacagttgtggggacaactgacacattacgtgaaatgcagcgttatgaacaactgagtagcacggggctgacaactggaaaatccagccgggagcaccgttatatgatacgattgttattgtcactggtgagagtgtgcgcagggattatatgtcagtgtatgactatcccgtaccaaccacaccgtggctga

SEQ ID NO: 6895 - DNA, 1062 bp, Escherichia coli
atgcatttacgtcatctgttttcatcgcgcctgcgtggttcattactgttaggttcattgcttgttgtttcatcattcagtacgcaggccgcagaagaaatgctgcgtaaagcggtaggtaaaggtgcctacgaaatggcttatagccagcaagaaaacgcgctgtggctcgccacttcgcaaagccgcaaactggataaaggtggcgtggtttatcgtcttgatccggtcactctggaagtgacgcaggcgatccataacgatctcaagccgtttggtgccaccatcaataacacgactcagacgttgtggtttggtaacaccgtaaacagcgcggtcacggcgatagatgccaaaacgggcgaagtgaaaggccgtctggtgctggatgatcgtaagcgcacggaagaggtgcgcccgctgcaaccgcgtgagctggtagctgacgatgccacgaacaccgtttacatcagtggtattggtaaagagagcgtgatttgggtcgttgatggcgggaatatcaaactgaaaaccgccatccagaacaccggtaaaatgagtaccggtctggcgctggatagcgaaggcaaacgtctttacaccactaacgctgacggcgaattgattaccatcgacaccgccgacaataaaatcctcagccgtaaaaagctgctggatgacggcaaagagcacttctttatcaacattagccttgataccgccaggcagcgtgcatttatcaccgattctaaagccgcagaagtgttagtggtcgatacccgtaatggcaatattctggcgaaggttgcggcaccggaatcactggctgtgctgtttaaccccgcgcgtaatgaagcctacgtaacgcatcgtcaggcaggtaaagtcagtgtgattgacgcgaaaagctataaagtggtgaaaacgttcgatacgccgactcatccaaacagcctggcgctgtctgccgatggcaaaacgctgtatgtcagtgtgaaacaaaaatccactaaacagcaggaagctacccagccagacgatgtgattcgtattgcgctgtaa

SEQ ID NO: 6896 - DNA, 1290 bp, Escherichia coli
atggaaacgactcaaaccagcacgattgcgtcgaaagactctcgtagtgcctggcgcaagacagacaccatgtggatgctgggcctttacggcacggcaatcggcgcgggcgtgctgttcctgccaatcaacgccggtgttggcggtatgatcccgctgatcatcatggctatccttgcgttcccgatgacgttttttgctcaccgcggcctgactcgcttcgtactgtctggtaaaaacccgggcgaagacatcaccgaggttgtagaagaacactttggtattggcgcaggtaaactgattaccctgctctacttcttcgctatctacccgatcctgctggtttatagcgtggcaatcaccaataccgttgaaagcttcatgtctcaccagctgggtatgacgccaccgccgcgtgcgattctgtcgctgatcctgatcgtgggtatgatgaccatcgttcgcttcggtgagcagatgatcgttaaagcgatgagtattctggtattcccgtttgttggcgtactgatgctgctggctctgtacctgatcccgcagtggaacggcgctgcactggaaacgctgtctctggacactgcatctgcaaccggaaacggtctgtggatgaccctgtggctggcaattccggtaatggtgttctcgttcaaccactctccgatcatctcttctttcgccgttgcgaagcgtgaagagtacggcgatatggcagaacagaaatgctcgaagatcctggcattcgcacacatcatgatggtgctgaccgtaatgttcttcgtcttcagctgtgtactgagcctgactccggcagacctggctgcggctaaagagcagaacatctcgattctgtcttacctggctaaccactttaacgcaccggttatcgcgtggatggctccgattatcgcgattatcgctatcaccaaatccttcctcggtcactacctgggcgcacgtgaaggcttcaacggtatggtgattaaatctctgcgtggtaaaggtaagtctatcgaaatcaacaagctgaaccgtatcactgcgctgttcatgctggtaacgacctggattgttgccaccctgaacccgagcatcctgggtatgattgaaaccctgggcggtccaatcatcgcgatgatcctgttcctgatgccgatgtacgcaattcagaaagtaccggcaatgcgtaagtacagcggtcacatcagcaacgtattcgttgtcgtgatgggtctgattgcaatctccgcaatcttctactctctgttcagctaa

SEQ ID NO: 6897 - DNA, 1368 bp, Escherichia coli
atgattagcgtattcgatattttcaaaatcggcattggcccttccagttctcataccgttggaccaatgaaagcgggtaaacaatttaccgacgatctgattgcccgtaacctgcttaaagacgtgacccgcgtggtggttgacgtgtacggctcgctctctctgaccggtaaaggccaccacactgatatcgccattattatgggcctggcgggtaacctgccggataccgtggatatcgattccatccccagttttattcaggatgtgaatactcatggtcgcctgatgctggcaaacggtcagcatgaagtggagttcccggttgatcagtgcatgaacttccacgccgacaacctttctctgcatgaaaacggtatgcgcattaccgcgctggcgggcgataaagtcgtttacagccagacttactactctattggcggtggctttatcgttgatgaagagcattttggccagcaggatagcgcaccggttgaagttccttatccgtacagttcagcagccgatctgcaaaaacattgtcaggaaaccgggctgtcactctctggcctgatgatgaaaaacgagctggcgctgcacagcaaagaagagctggaacagcacctggcgaacgtctgggaagtcatgcgcggcggtattgagcgcggtatttccaccgaaggcgtgttgcctggcaaactgcgcgttccacgccgtgctgcggcactacgccggatgctggtcagccaggataaaaccaccactgacccgatggcggttgttgactggatcaacatgtttgcactggcagtgaacgaagagaacgctgctggcggtcgcgtggtgactgcgccgactaacggtgcgtgcgggattatcccggcagttctggcgtactacgacaagtttatccgcgaagtgaacgctaactcactggctcgttacctgctggtagccagcgccattggttctctttataagatgaacgcgtcgatttctggtgctgaagtgggttgccagggtgaagttggcgtggcgtgctcaatggcggcggctggtctggcagaactattaggcgcaagcccggcgcaggtgtgcatcgcggcggaaatcgccatggagcacaacctcggtctgacgtgtgacccggtcgccggacaggtacaggtgccatgcatcgagcgtaacgccattgcggcagtaaaagcggtgaacgccgcacgtatggcgctgcgccgtaccagcgagccgcgcgtctgcctcgataaagttatcgaaaccatgtacgaaacaggtaaagatatgaacgccaagtaccgcgaaacctctcgcggcggcctggcaatgaagatcgttgcctgcgattaa

SEQ ID NO: 6898 - DNA, 897 bp, Escherichia coli
atgaccgatttacacaccgatgtagaacgctacctacgttatctgagcgtggagcgccagcttagcccgataaccctgcttaactaccagcgtcagcttgaggcgatcatcaattttgccagcgaaaacggcctgcaaagctggcagcaatgtgatgtgacgatggtgcgcaattttgctgtacgcagtcgccgtaaagggctgggagcagcaagtctggcgttacggctttctgcgctacgtagcttttttgactggctggtcagccagaacgaactcaaagctaacccggcgaaaggtgtttcggcaccgaaagcgccgcgtcatctgccgaaaaacatcgacgtcgacgatatgaatcggctgctggatattgatatcaatgatcccctcgctgtacgcgaccgtgcaatgctggaagtgatgtacggcgcgggtctgcgtctttctgagctggtggggctggatattaaacacctcgacctggagtctggtgaagtgtgggttatggggaaaggcagcaaagagcgccgcctgccgattggtcgcaacgctgtggcgtggattgagcactggcttgatttgcgcgacctgtttggtagcgaagacgacgcgctttttctgtcgaaactgggcaagcgtatctccgcgcgtaatgtgcagaaacgctttgccgaatggggcataaaacaagggctgaataatcacgttcatccgcataaattacgtcactcgttcgccacgcatatgctggagtcgagcggcgatcttcgtggtgtgcaggagctgctgggtcatgccaacctctccaccacgcaaatctatactcatcttgattttcaacaccttgcctcggtgtacgatgcggcgcatccacgcgccaaacgggggaaataa

SEQ ID NO: 6899 - DNA, 717 bp, Escherichia coli
atgcgtttttaccggcctttggggcgcatctcggcgctcacctttgacctggatgataccctttacgataaccgtccggtgattttgcgcaccgagcgagaggcgcttacctttgtgcaaaattatcatccggcgctgcgcagcttccagaatgaagatctgcaacgcctgcgccaggcggtacgggaagcggaacccgagatttatcacgacgtgacgcgctggcgttttcgttcgattgaacaagcgatgctcgacgccgggctgagtgccgaagaagccagtgcaggcgcacacgcagcaatgatcaactttgccaaatggcgcagccgaatcgacgtcccgcagcaaactcacgacaccttaaaacagctggcgaagaaatggccgctggtggcgatcaccaacggtaacgcccagccggagctgtttggtttgggggattattttgagtttgtgctgcgcgctggcccgcacgggcgctcaaaaccgttcagcgatatgtactttttggctgcggaaaaactcaacgtgccgatcggcgagatcttacatgttggggacgatctcaccactgacgtgggtggggcaattcgcagcggaatgcaggcttgttggatcagaccggaaaatggcgatctgatgcaaacctgggacagccgtttactgccgcatctggaaatttcccggttggcatctctgacctcgctgatataa

SEQ ID NO: 6900 - DNA, 1374 bp, Escherichia coli
atggaaagtaagaacaagctaaagcgtgggctaagtacccgccacatacgctttatggcactgggttcagcaattggcaccgggctgttttacggttcggcagacgccatcaaaatggccggtccgagcgtgttgttggcctatattatcggtggtatcgcggcgtatatcattatgcgtgcgctgggggaaatgtcggtacataacccggccgccagctctttctcgcgttatgcgcaggaaaacctcggcccgctggcaggttacattaccggctggacctactgctttgaaatccttattgtcgccatcgccgatgtgaccgcttttggtatctatatgggtgtctggttcccgacggtgccgcactggatttgggtactgagcgtggtgctgatcatttgcgccgtaaacctgatgagcgtgaaggtattcggtgagctggaattctggttctcgttctttaaagtcgccaccatcatcatcatgattgtcgccggtttcggcatcatcatctgggggattggcaacggcgggcaaccgaccggtattcataacctgtggagcaacggcggcttcttcagtaacggctggcttggcatggtaatgtcgttgcaaatggtgatgtttgcttacggtgggatcgaaattatcgggattaccgccggtgaagcgaaagatcctgagaaatcgataccgcgtgcgattaactccgtgccgatgcgtattctggtgttctacgtcggtacgctgttcgtcattatgtctatctacccgtggaatcaggttggcactgccggtagcccgttcgtgctgacgttccagcatatgggcattacctttgccgccagcattcttaactttgttgtgctgactgcttcgctgtcggcaattaacagtgatgtatttggcgtaggccgtatgctccacggtatggcagagcagggcagcgcgccgaaaattttcagcaaaacgtcgcgtcgcggtattccgtgggttacggtgctggtgatgactaccgcgctgctgtttgcggtgtatctgaactacatcatgccggaaaacgtcttcctggtgatcgcttcgctggcaaccttcgccacggtgtgggtgtggattatgatcctgctgtcgcaaattgccttccgtcgccgtttgccgccagaagaagttaaggcgctgaaatttaaagtgccgggtggggtagcaacgaccatcggcgggctgattttcctgctctttattatcgggttgattggttatcacccggatacgcgtatctcgctgtatgtcggtttcgcgtggattgttgtgctgttgattggctggatgtttaaacgccgccacgatcgtcagctggctgaaaaccagtaa

SEQ ID NO: 6901 - DNA, 1818 bp, Escherichia coli
atgatgttaaatgcatggcacctgccggtgcccccatttgttaaacaaagcaaagatcaactgctcattacactgtggctgacgggcgaagacccaccgcagcgcattatgctgcgtacagaacacgataacgaagaaatgtcagtaccgatgcataagcagcgcagtcagccgcagcctggcgtcaccgcatggcgtgcggcgattgatctctccagcggacaaccccggcggcgttacagtttcaaactgctgtggcacgatcgccagcgttggtttacaccgcagggcttcagccgaatgccgccggcacgactggagcagtttgccgtcgatgtaccggatatcggcccacaatgggctgcggatcagattttttatcagatcttccctgatcgttttgcgcgtagtcttcctcgtgaagctgaacaggatcatgtctattaccatcatgcagccggacaagagatcatcttgcgtgactgggatgaaccggtcacggcgcaggcgggcggatcaacgttctatggcggcgatctggacgggataagcgaaaaactgccgtatctgaaaaagcttggcgtgacagcgctgtatctcaatccggtgtttaaagctcccagcgtacataaatacgataccgaggattatcgccatgtcgatccgcagtttggcggtgatggggcgttgctgcgtttgcgacacaatacgcagcagctgggaatgcggctggtgctggacggcgtgtttaaccacagtggcgattcccatgcctggtttgacaggcataatcgtggcacgggtggtgcttgtcacaaccccgaatcgccctggcgcgactggtactcgtttagtgatgatggcacggcgctcgactggcttggctatgccagcttgccgaagctggattatcagtcggaaagtctggtgaatgaaatttatcgcggggaagacagtattgtccgccactggctgaaagcgccgtggaatatggacggctggcggctggatgtggtgcatatgctgggggaggcgggtggggcgcgcaataatatgcagcacgttgccgggatcaccgaagcggcgaaagaaacccagccggaagcgtatattgtcggcgaacattttggcgatgcacggcaatggttacaggccgatgtggaagatgccgccatgaactatcgtggcttcacattcccgttgtggggatttcttgccaataccgatatctcttacgatccgcagcaaattgatgcccaaacctgtatggcctggatggataattaccgcgcagggctttctcatcaacaacaattacgtatgtttaatcagctcgacagccacgatactgcgcgatttaaaacgctgctcggtcgggatattgcgcgcctgccgctggcggtggtctggctgttcacctggcctggtgtaccgtgcatttattacggtgatgaagtaggactggatggcaaaaacgatccgttttgccgtaaaccgttcccctggcaggtggaaaagcaggatacggcgttattcgcgctgtaccagcgaatgattgcgctgcgtaagaaaagtcaggcgctacgtcatggcggctgtcaggtgctgtatgcggaagataacgtggtggtatttgtccgcgtgctgaatcagcaacgtgtactggtggcaatcaaccgtggcgaggcctgtgaagtggtgctacccgcgtcaccgtttctcaatgccgtgcaatggcaatgcaaagaagggcatgggcaactgactgacgggattctggctttgcctgccatttcggctacggtatggatgaactaa

SEQ ID NO: 6902 - DNA, 1005 bp, Escherichia coli
atgtccgggttttatcataagcatttcctgaaattactcgatttcacgccagctgaactcaacagcctgctgcagttagccgcgaagctgaaagccgataagaaaagcggtaaagaagaagccaaactcactggtaaaaacatcgcgctcatcttcgaaaaagactcgactcgtacccgatgctctttcgaagttgccgcatatgaccagggtgctcgcgttacttatctcggcccaagcggcagccagattggtcataaagagtcgattaaagacactgcccgcgtgcttggtcgcatgtatgacggtattcagtatcgcggctatggtcaggagattgtcgaaacactggcggaatacgctagcgtgccggtatggaatggcctgaccaatgagttccatcccacgcagctgctggcggatcttctcaccatgcaggagcatttgcccggcaaagcgttcaacgaaatgacgctggtctatgcaggtgacgcgcgtaacaacatgggcaattcgatgctcgaagctgcggcgcttaccggtctggatttgcgtctggtcgcgccacaagcgtgctggccggaagctgcgctggttacggaatgccgcgccctggcacagcaaaatggtgggaatattacgctgactgaagatgtcgcgaagggagttgaaggtgctgactttatctataccgatgtgtgggtgtcgatgggggaagcaaaagagaaatgggcggaacggattgcattgctgcgtgaatatcaggtgaacagcaagatgatgcagttgaccggtaacccggaggtcaaattcctccactgcctgcccgcgtttcatgacgaccaaacgacgcttggcaagaaaatggcggaagaatttggcctacatggcggtatggaagtcactgatgaggtcttcgaatctgccgccagcattgtttttgatcaggcggaaaaccgtatgcatactatcaaagcggtgatggtcgcgacgctcagtaaataa

SEQ ID NO: 6903 - DNA, 270 bp, Escherichia coli
atgtctctaagtactgaagcaacagctaaaatcgtttctgagtttggtcgtgacgcaaacgacaccggttctaccgaagttcaggtagcactgctgactgcacagatcaaccacctgcagggccactttgcagagcacaaaaaagatcaccacagccgtcgtggtctgctgcgcatggtttctcagcgtcgtaaactgctcgactacctgaaacgtaaagacgtagcacgttacacccagctcatcgagcgcctgggtctgcgtcgctaa

SEQ ID NO: 6904 - DNA, 930 bp, Escherichia coli
atgagtattcgcataatcccgcaagatgagctgggttcaagcgagaaacgtacggcggatatgattccgccgttattgttccctcggctcaagaatttatacaaccgccgcgccgagcgtctgcgcgagctggcagaaaataatcctctgggtgattacctgcgctttgctgcgcttatcgcccacgcccaggaagtggtgctgtacgaccatccgctggagatggatctgactgcgcgcattaaagaagccagcgcacaaggcaagcccccgctggatattcacgttctgccgcgtgataagcactggcaaaagctgctgatggcgctgattgctgagctgaaacctgaaatgagcggcccggcgctggcagtgattgagaatctggagaaggcatcgactcaggagctggaagatatggccagcgcgctgtttgcctctgatttctcgtccgtcagcagcgataaagcgccgtttatctgggctgcactgtcgctctactgggcgcagatggccaatctgatccccggcaaagcccgcgctgaatacggcgagcaacgtcaatattgcccggtttgtggttctatgccggtgtccagcatggtgcaaattggcaccactcaggggctacgttacctgcactgcaacctgtgtgaaactgaatggcacgtagtgcgcgtaaaatgcagcaactgcgagcagagcggcaaactgcattactggtcgctggatgacgaacaggccgcgattaaagccgaaagctgcgatgactgcgacacttacctgaaaattctctatcaggaaaaagatccaaaaatcgaagccgtagcagatgacctcgcctctctggtactggacgcacgaatggagcaagaaggctatgcccgcagttccatcaacccgttcctgtttccgggtgaaggagagtaa

SEQ ID NO: 6905 - DNA, 636 bp, Escherichia coli
atgaaacgacgtgacaccatcgtgcgctacaccgcgccggaacgtatcaaccactggatcaccgccttctgcttcatcctggcggcggtgagcgggctgggctttttgttcccgtccttcaactggttgatgcaaatcatgggcacaccgcagctggcgcgaattctgcacccgtttgtcggcgtggttatgtttgcctcgttcatcatcatgtttttccgttactggcatcacaacctaatcaatcgggatgatatcttttgggcgaagaatattcgtaagatcgtcgtcaacgaggaagtaggtgacaccgggcgttataacttcggtcagaaatgcgttttctgggcggcgattattttcctggttctgctgctggtgagcggcgtgattatctggcgtccttattttgcgcctgctttctcaatcccggtgatccgattcgcgttaatgctgcattcatttgccgcagtggcgttaattgtggttatcatggtgcatatctacgccgccctttgggtgaaaggcacgattaccgccatggtggaaggatgggttaccagcgcctgggcgaagaaacatcacccgcgctggtaccgtgaggtccgcaagacaacggaaaagaaagctgaatga

SEQ ID NO: 6906 - DNA, 909 bp, Escherichia coli
atgcggatgaatatgtctgactttgccactttctttgccgtggcccgtaatcaaagctttcgtgcagcgggcgatgagttaggcttatcctcgtccgccattagccatagtattaaaacactggaacaacgtcttaaaattcgcttattcaatcggacaacccgaagcgtatcgttaacggaagcgggttctaatctctatgaacgattgcgcccagctttcgacgaaattcagatcatgttagatgagatgaatgattttcgtctgacaccgacaggaacgctcaaaatcaatgccgcccgggtagctgcacgtatatttttaatgtctttactggttggtttcacacgtgaatatcctgatattaaagtcgagctcacaactgacgactctcttgtcgatatcgtccaacagggctttgacgctggcgttcgacttagttgcatcgtcgaaaaagatatgatcagcgtggcgatcggcccgccagtgaaattatgtgtagcagcaacgccagagtactttgcaagatatggcaaaccccgccatcctcatgatctgcttaatcatcaatgtgttgtttttcgttatcccagcggcaaacctttccactggcaatttgcaaaggagctggaaattgctgtcgcaggaaatatcattctggatgatgttgatgctgaactggaggccgttttgatgggtgctggtatcgggtatctgctctatgaacagatcaaggagtaccttgatactggtcgtttagaatgtgtactggaagactggagcacagagcgtccaggcttccagatctattatccaaaccgccagtatatgtcctgcggcttgcgcgcatttctcgattatgtaaaaacgggtcagatctgccagagtcagcgtcaccgaccacaataa

SEQ ID NO: 6907 - DNA, 2361 bp, Escherichia coli
ttgtcagcaacctgcttaatatcccttcctccctttcacccgaaagggaggcacaccagattcctctcatttaaaatcgcccctcctccagcatctatacttatctttttgctctattttctcactggaggagtcatgcggtggatcctgttcatcctcttctgcctgctgggcgcacctgcccacgcggtatccatacccggcgttacaaccacaacgacaacggactcaacgactgaaccggccccggaaccggatatcgaacaaaaaaaagcggcctatggcgcactggcggatgtgctggataatgacacctcgcgtaaagagttgatcgaccagttgcgcaccgttgccgctacgccccctgctgaaccggtaccaaaaatagtgccgccgacgctggtcgaagagcaaaccgtgctgcaaaaggtcaccgaagtcagccgccattatggtgaagccctttccgcccgcttcgggcaactttatcgcaatatcaccggctccccgcataagccgtttaatccacaaaccttcagcaatgcgctgacccatttttcaatgttagcggtattagtgtttggtttttactggctgattcgcctgtgcgcactgccgctgtatcgcaaaatgggtcagtgggcgcggcaaaaaaatcgtgagcgcagcaactggttgcagcttccggcgatgattatcggggcgtttattatcgacctgctgttactggccctgacattatttgtcggccaggtattaagcgacaacctgaatgcaggcagtcgcaccatcgctttccaacaaagtttgtttctcaacgcctttgccctcattgaatttttcaaagccgtactacgcctgattttttgcccaaacgtggcggagctgcgcccgttcacgattcaggacgagagcgcccgttactggagtcgtcgcctgagctggttaagcagtttgataggttatggcctgattgtggccgtgccgattatctctaatcaggtgaatgtacagataggtgcgctggcgaacgtcatcattatgctgtgcatgaccgtctgggcgttgtacctgatctttcgtaataaaaaagagattacccagcatttgctcaacttcgcggagcattcgctggcctttttcagcctgtttatccgcgcctttgcgctggtgtggcactggctggcaagcgcctattttatcgtgctgtttttcttttcgttgttcgatccgggcaacagcctgaaatttatgatgggtgcaacggtgcgcagcctggcgattattggtatcgcagcgtttgtttccggtatgttttcccgctggctggcgaaaaccatcactctctcgccacatactcagcgtaactatccggagctgcaaaaacggttgaatggctggctgtcggcggcgctgaaaacggcgcgtattctgacagtctgcgtggcggtaatgttgctgttgagcgcatggggattgttcgatttctggaactggctgcaaaacggcgcggggcagaaaaccgtagatatcctgatccgtatcgcactcattcttttcttctcggcggttggctggacggtgctcgccagtttgatcgaaaaccggctggcttcggatattcatggccgcccgctacccagcgcccgcacgcgtaccctgcttacgctgtttcgtaacgcgctggcggtgattatcagtaccatcaccatcatgattgtgttgtcggaaatcggcgtcaatatcgcgccattgctggcaggtgccggggcattaggtctggctatctcgtttggttcgcaaacgctggtgaaagatattatcaccggggtatttattcagtttgaaaacggcatgaacactggagatttggtgactatcgggccgttgaccggcacagtggaacggatgtcgattcgctccgtgggcgtacgacaggataccggggcgtatcacatcattccgtggtcttcgataaccacctttgctaactttgtccgcggcattggttcggtggtggcaaattatgatgttgatcgccatgaagatgctgataaagccaatcaggcactgaaagatgcggtagcggaattaatggaaaacgaagaaattcgcgggctgattattggtgaaccgaattttgccgggattgtcggcttaagcaataccgcgtttacactgcgtgtttcgttcaccacgctgccactcaaacagtggacggtacgctttgccctcgacagccaggtgaaaaaacatttcgacctggcgggcgttcgcgcgccagtgcagacttatcaggtgctgcctgctccgggcgcgaccccggctgaaccgttaccgccgggggaaccaacgctttaa

SEQ ID NO: 6908 - DNA, 471 bp, Escherichia coli
atggatattcgtaagattaaaaaactgatcgagctggttgaagaatcaggcatctccgaactggaaatttctgaaggcgaagagtcagtacgcattagccgtgcagctcctgccgcaagtttccctgtgatgcaacaagcttacgctgcaccaatgatgcagcagccagctcaatctaacgcagccgctccggcgaccgttccttccatggaagcgccagcagcagcggaaatcagtggtcacatcgtacgttccccgatggttggtactttctaccgcaccccaagcccggacgcaaaagcgttcatcgaagtgggtcagaaagtcaacgtgggcgataccctgtgcatcgttgaagccatgaaaatgatgaaccagatcgaagcggacaaatccggtaccgtgaaagcaattctggtcgaaagtggacaaccggtagaatttgacgagccgctggtcgtcatcgagtaa

SEQ ID NO: 6909 - DNA, 1104 bp, Escherichia coli
gtggttggtaaagtaagcggattttcttttccgccccagctttcaggattatcccttagtatgttgaaaaaatttcgtggcatgttttccaatgacttgtccattgacctgggtactgcgaataccctcatttatgtaaaaggacaaggcatcgtattgaatgagccttccgtggtggccattcgtcaggatcgtgccggttcaccgaaaagcgtagctgcagtaggtcatgacgcgaagcagatgctgggccgtacgccgggcaatattgctgccattcgcccaatgaaagacggcgttatcgccgacttcttcgtgactgaaaaaatgctccagcacttcatcaaacaagtgcacagcaacagctttatgcgtccaagcccgcgcgttctggtttgtgtgccggttggcgcgacccaggttgaacgccgcgcaattcgtgaatccgcgcagggcgctggtgcccgtgaagtcttcctgattgaagaaccgatggctgccgcaattggtgctggcctgccggtttctgaagcgaccggttctatggtggttgatatcggtggtggtaccactgaagttgctgttatctccttgaacggtgtggtttactcctcttctgtgcgcattggtggtgaccgtttcgacgaagctatcatcaactatgtgcgtcgtaattacggttctctgatcggtgaagccaccgcagaacgtatcaagcacgaaatcggttcggcttatccgggcgatgaagtccgtgaaatcgaagttcgtggccgtaacctggcagaaggtgttccacgcggttttaccctgaactccaatgaaatcctcgaagcactgcaggaaccgctgaccggtattgtgagcgcggtaatggttgcactggaacagtgcccgccggaactggcttccgacatctccgagcgcggcatggtgctcaccggtggtggcgcactgctgcgtaaccttgaccgtttgttaatggaagaaaccggcattccagtcgttgttgctgaagacccgctgacctgtgtggcgcgcggtggcggcaaagcgctggaaatgatcgacatgcacggcggcgacctgttcagcgaagagtaa

SEQ ID NO: 6910 - DNA, 318 bp, Escherichia coli
atggctgaatggagcggcgaatatatcagcccatacgctgagcacggcaagaagagtgaacaagtcaaaaagattacggtttccattcctcttaaggtgttaaaaatcctcaccgatgaacgcacgcgtcgtcaggtgaacaacctgcgtcacgctaccaacagcgagctgctgtgcgaagcgtttctgcatgcctttaccgggcaacctttgccggatgatgccgatctgcgtaaagagcgcagcgacgaaatcccggaagcggcaaaagagatcatgcgtgagatggggattaacccggagacgtgggaatactaa

SEQ ID NO: 6911 - DNA, 165 bp, Escherichia coli
gtgcaccaaaagcaaaaactcactgacgcgggtttgaaactgatggcaaccgcaaaaatgcctgatgcgctacgcttatcaggcctacgccatctctgcaatatattgaatttgcgtgcttttgtaggcaggataaggcgttcacgccgcatccggcatgaataa

SEQ ID NO: 6912 - DNA, 591 bp, Escherichia coli
atgcagtctgaacgtatttatttggtatgggcccatcctcgtcatgattcattgaccgcacatattgctgatgcgatccatcagcgggcaatggagcggaaaatacaggtgacggaactcgatttatatcggcgtaatttcaacccagtgatgacgccggaagatgaaccagactggaagaatatggataaacgttattctccagaggttcatcagctttattcagagctgcttgaacatgacacgttagtggtggtttttcctctctggtggtacagcttcccggcaatgctaaaaggatatattgacagagtatggaataatgggctggcttatggagatgggcacaaattaccattcaataaagttcgttgggtggcgctggttggaggagacaaagaatcatttgtccagatgggctgggaaaaaaatataagcgattatttaaaaaatatgtgcagttatcttggtattgaagatgccgatgtcactttcttgtgtaatacagtggtattcgatggggaagaacttcacgcgagctattatcagtcgttattatctcaggtacgggatatggtagatgcactataa

SEQ ID NO: 6913 - DNA, 852 bp, Escherichia coli
atgatgaaacttattcctcgcagtagtgatatttcacctggcattgatggaatttgcccggggccttttcctccgaacggatttaccgtacttacagatgcagcatatggtaacggagactgtttcggtttgtactggcctattggtcaggagcataaactacctatagtgtgcgaaacgtaccatgacgaatggcgaatcgtacctgccttttccagcattaagaagttcgaagaatggctggaagtgaatgatgatgatccccatgaaaatggcatcagcatcgaagatcaagactttgcagcaaatctcttccgtgttgctcggaaatgtctttcaacgggaaggcttgatgacgcactgccactgttacagcgagcaacagaacaattgcctgaagtcagcgaatattggttagcactggcaatccagtatcgccgatgtaaaaaaacagaagctgcagcacaggctgcgcttaatgcttatcttggcaattgggcatttggtgttcctgacaataaagtcattcatttgctgtcacaggccgcagatgtcccgaatttccaggatgatcctgtgattcagtgcattaaagaacaaggattagatcttagctttggaggaacaaaggaaaataataattaccccttgatgcagatgtgtgttgatacttattttgcgcagagaaaaccgcttcaggcattaaccctgttacataattatgcctggataatgtccagtgaaacgactgcatttcaggaacgctatgattttaatatcgatgaatggcgggcaaaattcaggcagttatgtttagagtattttggcgatagtcgtacacagttcacttaa

SEQ ID NO: 6914 - DNA, 1149 bp, Escherichia coli
gtgtctgacgagagcgacgacaaaacagaagcccccacacctcaccgactagaaaaagcgcgggaagaggggcaaatcccgcgttcccgtgaactgacctcactgctgattttgctggtgggcgttagtgttatctggtttggcggtgtgtcgctggcccgtcgattgtcgggcatgctctccgctgggctgcattttgatcacagtattatcaatgacccgaatctgatcctcgggcagattattctgctgatcagagaagccatgctggcgctgctgccgctgattagcggcgtggtgctggtggcgctcatttctccggtcatgctgggagggctggtatttagcggcaaatccttgcagccgaagttttccaaactcaacccgctaccgggcattaaacggatgttctcggctcagactggcgcggagttgcttaaagcaattttgaaaaccatcctggttggcagcgtgacggggttttttctctggcatcactggccgcagatgatgcgcttgatggccgagtctccgattaccgccatgggtaatgcgatggatttggtagggctatgcgcactgctggtggtgcttggtgtcattccaatggtgggatttgacgtctttttccaaatattcagccacctgaaaaagctgcgtatgtcacggcaggatattcgtgatgagttcaaacaaagcgaaggtgaccctcatgttaaagggcggatccgtcagatgcagcgagctgctgcacggcgtcggatgatggccgatgtgccgaaagcggatgtcattgtcaataacccgacccactattcggtagcgttgcagtatgacgaaaacaaaatgagcgcaccgaaagtggtcgctaaaggtgcagggctggtcgcgctgcgcattcgtgaaattggcgctgaaaataacgtcccgacgcttgaagcgccgccgctggcgcgagcgctgtatcgacatgcggagattggtcaacaaatcccgggtcaactgtacgccgcggtggcggaagtgctggcctgggtctggcaactgaaacgctggcgtctggctggtggacagcgccctgtacaacctactcatcttccggtgccggaagccctggattttattaacgagaaaccgacccatgagtaa

SEQ ID NO: 6915 - DNA, 912 bp, Escherichia coli
atgcaaaagtttgataccaggaccttccagggcttgatcctgaccttacaggattactgggctcgccagggctgcaccattgttcaaccattggacatggaagtcggcgcgggaacctctcacccaatgacctgtctgcgcgagctggggccagaaccgatggcggctgcttatgttcagccttctcgtcgcccgaccgatggtcgctacggcgaaaaccccaaccgtttacagcactactatcagttccaggtggtcattaagccatcgccggacaatattcaggagctgtacctcggttctctgaaagagctgggcatggacccgactattcacgacatccgtttcgtggaagataactgggaaaacccgacgctgggtgcctggggactgggctgggaagtgtggctgaacggcatggaagtgacgcagttcacttacttccagcaggttggtggtctggagtgtaaaccggttaccggcgagatcacctacggtctggaacgtctggccatgtacattcagggcgtagacagcgtttacgacctggtctggagcgacggcccgctgggtaaaaccacctacggcgacgtgttccatcagaacgaagtggagcagtccacttacaacttcgaatacgcggatgtggacttcctgttcacctgcttcgagcagtacgagaaagaagcgcagcagctgctggcgctggaaaatccgctgccgctgccagcctacgagcgtattctgaaagccgcccacagcttcaacctgctggatgcgcgtaaagccatctccgtcaccgagcgtcagcgctacattctgcgcattcgcaccctgaccaaagcagtggcagaagcatactacgcttcccgtgaagccctcggcttcccgatgtgcaacaaagataagtaa

SEQ ID NO: 6916 - DNA, 2145 bp, Escherichia coli
atggaaatgacatcagcgtttacccttaatgttcgtctggacaacattgccgttatcaccatcgacgtaccgggtgagaaaatgaataccctgaaggcggagtttgcctcgcaggtgcgcgccattattaagcaactccgtgaaaacaaagagttgcgaggcgtggtgtttgtctccgctaaaccggacaacttcattgctggcgcagacatcaacatgatcggcaactgcaaaacggcgcaagaagcggaagctctggcgcggcagggccaacagttgatggcggagattcatgctttgcccattcaggttatcgcggctattcatggcgcttgcctgggtggtgggctggagttggcgctggcgtgccacggtcgcgtttgtactgacgatcctaaaacggtgctcggtttgcctgaagtacaacttggattgttacccggttcaggcggcacccagcgtttaccgcgtctgataggcgtcagcacagcattagagatgatcctcaccggaaaacaacttcgggcgaaacaggcattaaagctggggctggtggatgacgttgttccgcactccattctgctggaagccgctgttgagctggcaaagaaggagcgcccatcttcccgccctctacctgtacgcgagcgtattctggcggggccgttaggtcgtgcgctgctgttcaaaatggtcggcaagaaaacagaacacaaaactcaaggcaattatccggcgacagaacgcatcctggaggttgttgaaacgggattagcgcagggcaccagcagcggttatgacgccgaagctcgggcgtttggcgaactggcgatgacgccacaatcgcaggcgctgcgtagtatcttttttgccagtacggacgtgaagaaagatcccggcagtgatgcgccgcctgcgccattaaacagcgtggggattttaggtggtggcttgatgggcggcggtattgcttatgtcactgcttgtaaagcggggattccggtcagaattaaagatatcaacccgcagggcataaatcatgcgctgaagtacagttgggatcagctggagggcaaagttcgccgtcgtcatctcaaagccagcgaacgtgacaaacagctggcattaatctccggaacgacggactatcgcggctttgcccatcgcgatctgattattgaagcggtgtttgaaaatctcgaattgaaacaacagatggtggcggaagttgagcaaaattgcgccgctcataccatctttgcttcgaatacgtcatctttaccgattggtgatatcgccgctcacgccacgcgacctgagcaagttatcggcctgcatttcttcagtccggtggaaaaaatgccgctggtggagattattcctcatgcggggacatcggcgcaaaccatcgctaccacagtaaaactggcgaaaaaacagggtaaaacgccaattgtcgtgcgtgacaaagccggtttttacgtcaatcgcatcttagcgccttacattaatgaagctatccgcatgttgacccaaggtgaacgggtagagcacattgatgccgcgctagtgaaatttggttttccggtaggcccaatccaacttttggatgaggtaggaatcgacaccgggactaaaattattcctgtactggaagccgcttatggagaacgttttagcgcgcctgcaaatgttgtttcttcaattttgaacgacgatcgcaaaggcagaaaaaatggccggggtttctatctttatggtcagaaagggcgtaaaagcaaaaaacaggtcgatcccgccatttacccgctgattggcacacaagggcaggggcgaatctccgcaccgcaggttgctgaacggtgtgtgatgttgatgctgaatgaagcagtacgttgtgttgatgagcaggttatccgtagcgtgcgtgacggggatattggcgcggtatttggcattggttttccgccatttctcggtggaccgttccgctatatcgattctctcggcgcgggcgaagtggttgcaataatgcaacgacttgccacgcagtatggttcccgttttaccccttgcgagcgtttggtcgagatgggcgcgcgtggggaaagtttttggaaaacaactgcaactgacctgcaataa

SEQ ID NO: 6917 - DNA, 1458 bp, Escherichia coli
atggccaaaaattatgcggcgctggcacgctcggtgatagcggcactgggcggcgttgataacatctcggcggtcacgcactgtatgacgcggttgcgctttgttatcaaagatgatgcacttatcgacagcccgacgttaaaaaccatccccggcgtgctcggcgtggtacgtagtgacaaccagtgtcaggtgattatcggcaataccgtttcacaagcctttcaggaagtcgtcagcctgctgccgggagatatgcagcccgcacagcccgtgggtaaacccaaactcacgctacgtcgcattggtgcggggatcctcgatgcgctgatcggcaccatgtcaccgctgatcccggcgattatcggcggatcgatggtcaaactgctggcaatgatcctcgagatgagcggcgtgctgacaaaaggatcgccgaccttaaccattctgaatgtgattggtgacggtgctttcttcttcctgccgctgatggtcgcgcatctgccgcgcatcaaatttaaaaccaatatgtcgctggcgattgccatcgcgggtgtgctggtacatccgagttttattgaactgatggcgaaagcggcccagggtgaacatgtcgaatttgccctgattccggtcaccgcggtgaaatacacctacacggtgatcccggcgctggtgatgacctggtgcctgtcatatatcgaacgctgggtggacagcattacaccggcggtgaccaaaaacttcctcaaaccaatgctgattgtgttgattgccgcaccgctggcaatcctgctgattggcccgattggtatctggatcggtagcgccatttcggcgctggtttacaccattcatggttatctgggctggctttcagtcgccattatgggcgcgctgtggcctctgctggtaatgaccgggatgcaccgcgtctttacgccaaccatcattcagaccattgccgaaaccggcaaagaagggatggtcatgccgtcagagatcggcgctaacctgtcgctgggcggttcatcactggcagtggcgtggaaaacgaaaaacccggaactgcgtcagacggcgctggctgcggcggcatcagccattatggcggggatttccgaaccggcgttatatggcgtggcgatccgcctgaaacgtccgcttatcgccagtcttatcagcggttttatttgcggcgcggttgccggtatggcggggcttgccagccactcaatggcagcgccggggctatttaccagcgtgcagttcttcgatccggcgaatccaatgagcatcgtctgggtgttcgcggtcatggcgctggcggtggtgctgtcgtttatcctcacactgttgctcggctttgaggatattcctgttgaggaagcggctgcccaggcgcgaaagtatcagagcgtacaaccgaccgtcgccaaagaagtaagtcttaattga

SEQ ID NO: 6918 - DNA, 1350 bp, Escherichia coli
atgctggataaaattgttattgccaaccgcggcgagattgcattgcgtattcttcgtgcctgtaaagaactgggcatcaagactgtcgctgtgcactccagcgcggatcgcgatctaaaacacgtattactggcagatgaaacggtctgtattggccctgctccgtcagtaaaaagttatctgaacatcccggcaatcatcagcgccgctgaaatcaccggcgcagtagcaatccatccgggttacggcttcctctccgagaacgccaactttgccgagcaggttgaacgctccggctttatcttcattggcccgaaagcagaaaccattcgcctgatgggcgacaaagtatccgcaatcgcggcgatgaaaaaagcgggcgtcccttgcgtaccgggttctgacggcccgctgggcgacgatatggataaaaaccgtgccattgctaaacgcattggttatccggtgattatcaaagcctccggcggcggcggcggtcgcggtatgcgcgtagtgcgcggcgacgctgaactggcacaatccatctccatgacccgtgcggaagcgaaagctgctttcagcaacgatatggtttacatggagaaatacctggaaaatcctcgccacgtcgagattcaggtactggctgacggtcagggcaacgctatctatctggcggaacgtgactgctccatgcaacgccgccaccagaaagtggtcgaagaagcgccagcaccgggcattaccccggaactgcgtcgctacatcggcgaacgttgcgctaaagcgtgtgttgatatcggctatcgcggtgcaggtactttcgagttcctgttcgaaaacggcgagttctatttcatcgaaatgaacacccgtattcaggtagaacacccggttacagaaatgatcaccggcgttgacctgatcaaagaacagctgcgtatcgctgccggtcaaccgctgtcgatcaagcaagaagaagttcacgttcgcggccatgcggtggaatgtcgtatcaacgccgaagatccgaacaccttcctgccaagtccgggcaaaatcacccgtttccacgcacctggcggttttggcgtacgttgggagtctcatatctacgcgggctacaccgtaccgccgtactatgactcaatgatcggtaagctgatttgctacggtgaaaaccgtgacgtggcgattgcccgcatgaagaatgcgctgcaggagctgatcatcgacggtatcaaaaccaacgttgatctgcagatccgcatcatgaatgacgagaacttccagcatggtggcactaacatccactatctggagaaaaaactcggtcttcaggaaaaataa

SEQ ID NO: 6919 - DNA, 1629 bp, Escherichia coli
gtgatagctgtcgtaaagctgttaccgactggcgaagatttcgccagtcacgtctacccttgttatacctcacaccgcaaggagacgatcatgaccaataatcccccttcagcacagattaagcccggcgagtatggtttccccctcaagttaaaagcccgctatgacaactttattggcggcgaatgggtagcccctgccgacggcgagtattaccagaatctgacgccggtgaccgggcagctgctgtgcgaagtggcgtcttcgggcaaacgagacatcgatctggcgctggatgctgcgcacaaagtgaaagataaatgggcgcacacctcggtgcaggatcgtgcggcgattctgtttaagattgccgatcgaatggaacaaaacctcgagctgttagcgacagctgaaacctgggataacggcaaacccattcgcgaaaccagtgctgcggatgtaccgctggcgattgaccatttccgctatttcgcctcgtgtattcgggcgcaggaaggtgggatcagtgaagttgatagcgaaaccgtggcctatcatttccatgaaccgttaggcgtggtggggcagattatcccgtggaacttcccgctgctgatggcgagctggaaaatggctcccgcgctggcggcgggcaactgtgtggtgctgaaacccgcacgtcttaccccgctttctgtactgctgctaatggaaattgtcggtgatttactgccgccgggcgtggtgaacgtggtcaatggcgcaggtggggtaattggcgaatatctggcgacctcgaaacgcatcgccaaagtggcgtttaccggctcaacggaagtgggccaacaaattatgcaatacgcaacgcaaaacattattccggtgacgctggagttgggcggtaagtcgccaaatatcttctttgctgatgtgatggatgaagaagatgcctttttcgataaagcgctggaaggctttgcactgtttgcctttaaccagggcgaagtttgcacctgtccgagtcgtgctttagtgcaggaatctatctacgaacgctttatggaacgcgccatccgccgtgtcgaaagcattcgtagcggtaacccgctcgacagcgtgacgcaaatgggcgcgcaggtttctcacgggcaactggaaaccatcctcaactacattgatatcggtaaaaaagagggcgctgacgtgctcacaggcgggcggcgcaagctgctggaaggtgaactgaaagacggctactacctcgaaccgacgattctgtttggtcagaacaatatgcgggtgttccaggaggagatttttggcccggtgctggcggtgaccaccttcaaaacgatggaagaagcgctggagctggcgaacgatacgcaatatggcctgggcgcgggcgtctggagccgcaacggtaatctggcctataagatggggcgcggcatacaggctgggcgcgtgtggaccaactgttatcacgcttacccggcacatgcggcgtttggtggctacaaacaatcaggtatcggtcgcgaaacccacaagatgatgctggagcattaccagcaaaccaagtgcctgctggtgagctactcggataaaccgttggggctgttctga

SEQ ID NO: 6920 - DNA, 1941 bp, Escherichia coli
atgagattaacgacgaaattttcggcctttgttacgctgctcaccgggttaacaatttttgtgactttgctgggctgttcgctaagtttctacaacgccattcagtataagtttagtcatcgcgttcaggcggtggcgacggcgattgatacccaccttgtgtcgaatgacttcagcgtattaaggccacaaattaccgaattaatgatgtcggcagatatcgttcgtgtagacctgctccatggtgataaacaggtttataccctggccagaaatggtagttatcgtccagttggctccagcgatctgtttcgcgaactgagcgttccgttgataaagcatccggggatgtcgttgcgtctggtttatcaggatccgatgggcaactatttccattcgttgatgaccaccgcgccgctcacgggggcgattggctttatcattgttatgctcttcctggcggtacgctggttacaacggcaacttgccgggcaagaattgctggaaacccgggctactcgtatcttaaacggtgagcgtggctctaatgtgttgggaaccatctatgaatggccgcccagaaccagcagtgcgctggatacgctgcttcgtgaaattcagaacgcacgcgaacaacacagccgtcttgatacgctgatccgctcttatgccgcccaggacgtgaaaaccggcctcaataaccgactctttttcgataatcagttagcaacgttactggaagatcaggagaaagtaggtacccacgggatcgtgatgatgattcgtctgccggatttcaatatgttgagcgatacctgggggcacagccaggttgaagaacagttcttcactctgacgaatctgctgtcgacatttatgatgcgctaccctggcgcactgctggcgcgttaccaccgcagtgattttgctgcgctgttaccgcaccggacgttaaaagaggcagagagcatcgccggtcagttaatcaaagccgttgataccttgccgaacaataaaatgctcgatcgcgacgatatgatccacattggtatctgcgcctggcgtagtggtcaggataccgagcaggtaatggaacatgcagagtctgccacgcgtaatgcgggattgcagggcggcaatagctgggctatttacgatgactcgttgcctgaaaaaggacgcggtaatgttcgctggcgtacgcttatcgagcaaatgctcagtcgcggcggcccgcgcctttatcaaaaaccggcggttactcgcgaaggtcaggttcatcatcgcgaactcatgtgccgcatcttcgatggtaatgaagaggttagctcggcggagtatatgccgatggtcttgcagtttggcttatcggaagagtatgaccgtctgcaaatcagccgtcttattccactattgcgttactggccagaggaaaatctggcgattcaggttaccgttgagtcgctgattcgcccgcgttttcagcgttggctgcgcgatacgttaatgcaatgtgaaaaatcacaacgaaaacgcataattattgaacttgcagaggccgatgtaggtcaacatatcagtcgtttacaacctgttattcgtttagtgaatgctttaggggtacgggtagccgtcaaccaggctggtttgacgctggtaagtaccagttggatcaaagaacttaatgttgagttactcaagctccatccggggctggtcagaaacattgagaagcgaacggagaaccagctgctggttcaaagcctggtggaagcctgctccgggaccagcacccaggtttacgccaccggcgtgcgttcgcgaagcgagtggcagaccctgattcagcgcggtgttacaggcgggcaaggggattttttcgcgtcctcacagccacttgatactaacgtgaaaaaatattcacaaagatactcggtttaa

SEQ ID NO: 6921 - DNA, 906 bp, Escherichia coli
atgaaccccgcagtggataatgagtttcagcaatggctttcccaaatcaatcaggtatgcggaaattttaccggacgcctgctgactgagcgttacacgggtgtactggacacgcattttgccaaaggactaaagctgagtaccgtgacaaccagcggggtgaatttatcccgcacctggcaggaagtaaaaggcagcgacgatgcctggttttacaccgtttttcagcttagtggtcaggcaataatggagcaggatgagcgtcaggtgcagattggcgctggcgatattacgttactcgatgcctcacgcccctgttcgctttactggcaggagtcttctaaacagatttcattacttttgccacgcactctgctggaacaatattttccccatcaaaaacctatctgcgcagaaagactggacgctgacttacccatggtgcaactcagtcatcgcctgttacaggagagcatgaataatccggcactttctgaaacagaaagtgaagctgcgctacaggcgatggtgtgtctgctgcgcccggtacttcatcagcgggaatctgttcaacctcgtcgtgaacgtcagtttcaaaaagtggttacgttgatagacgataatattcgcgaagagatattacgcccggagtggatagccggagagacaggtatgtcagtacgtagtttgtaccgaatgtttgccgataaaggtttggtagtcgcgcaatatattcgtaaccgtcgtctcgatttttgtgcagatgcgattcgccatgccgcagatgatgaaaaactggcaggcatcggctttcattggggattttctgaccagagtcatttttcaacggtatttaagcaacgctttgggatgacgccaggcgagtatcgacgtaaattccgctaa

SEQ ID NO: 6922 - DNA, 702 bp, Escherichia coli
gtgaagaaatgcgtaataaaaatatacattgcgcctcctgaaaaaataaattttttatgctattacgtatatttgtatctatttcaatggaatgacaacgtgaatattaattaccctgctgaatatgaaattggagatatcgtctttacatgtataggtgctgccttatttggtcaaatatcagctgcatcaaattgctggagtaatcacgtcgggatcattatcggtcataacggtgaagacttcctggttgcagaaagccgggttcccctttcaaccatcaccacgctatctcgttttattaaacgttcgtctaatcaacgctatgctataaagcgattagacgctgggctgacagaacgacaaaaacaacgaattgttgaacaggttccctcccggctacgcaaactttaccacaccggttttaaatacgaatcttcgcgccagttctgttcaaaatttgtttttgatatttataaagaagcgctatgtattccggtgggtgaaatagagacgtttggagaattgttaaatagcaatccgaatgcaaaactcactttctggaaattctggttcctgggttctattccgtgggagcgtaaaaccgtcacgccagccagtttgtggcatcatccgggtttggtgttgattcatgcggagggagtggaaacgcctcagccggaactgaccgaggcggtataa

SEQ ID NO: 6923 - DNA, 783 bp, Escherichia coli
atgaaaaaactggtgctatcgctctctctggttctggccttctccagcgcaactgcggcgtttgctgcgattccgcaaaacatccgcatcggtaccgacccgacctatgcgccatttgaatcaaaaaattcacaaggcgaactggttggcttcgatatcgatctggcaaaggaattatgcaaacgcatcaatacgcaatgtacgtttgtcgaaaatccgctggatgcgttaatcccgtccttaaaagcgaagaagattgacgccatcatgtcatcgctttccattacggaaaaacgtcagcaagaaatagccttcaccgacaaactgtacgctgccgattctcgtttggtggtggcgaaaaattctgacattcagccgacagtcgagtcgctgaaaggcaaacgggtaggcgtattgcagggcaccacccaggagacgttcggtaatgaacattgggcaccaaaaggcattgaaatcgtctcgtatcaggggcaggacaacatttattctgacctgactgccggacgtattgatgccgcgttccaggatgaggtcgctgccagcgaaggtttcctcaaacaacctgtcggtaaagattacaaattcggtggcccgtctgttaaagatgaaaaactgtttggcgtagggaccggcatgggcctgcgtaaagaagataacgaactgcgcgaagcactgaacaaagcctttgccgaaatgcgcgctgacggtacttacgagaaattagcgaaaaagtacttcgattttgatgtttatggtggctaa

SEQ ID NO: 6924 - DNA, 369 bp, Escherichia coli
atgtggttacttgaccagtgggcagagcgccatatagcagaagcgcaagcgaaaggtgagtttgataacctggcaggtagcggcgaaccattgatactggatgatgattctcacgtgccaccggaattacgtgcggggtatcgcttgctgaagaatgccggttgcttaccgccagaacttgagcaacggagagaagcaattcagcttctggatattctcaaaggtatccgtcacgatgatccgcaatatcaagaggttagccgtcgattgtcattactggaattgaagctgcgacaagctggattgagtaccgattttttacgcggcgattatgctgacaagttgttggacaaaatcaacgataactag

SEQ ID NO: 6925 - DNA, 1734 bp, Escherichia coli
gtgaatattcaggctcttctctcagaaaaagtccgtcaggccatgattgcggcaggcgcgcctgcggattgcgaaccgcaggttcgtcagtcagcaaaagttcagttcggcgactatcaggctaacggcatgatggcagttgctaaaaaactgggtatggcaccgcgacaattagcagagcaggtgctgactcatctggatcttaacggtatcgccagcaaagttgagatcgccggtccaggctttatcaacattttccttgatccggcattcctggctgaacatgttcagcaggcgctggcgtccgatcgtctcggtgttgctacgccagaaaaacagaccattgtggttgactactctgcgccaaacgtggcgaaagagatgcatgtcggtcacctgcgctctaccattattggtgacgcagcagtgcgtactctggagttcctcggtcacaaagtgattcgcgcaaaccacgtcggcgactggggcactcagttcggtatgctgattgcatggctggaaaagcagcagcaggaaaacgccggtgaaatggagctggctgaccttgaaggtttctaccgcgatgcgaaaaagcattacgatgaagatgaagagttcgccgagcgcgcacgtaactacgtggtaaaactgcaaagcggtgacgaatatttccgcgagatgtggcgcaaactggtcgacatcaccatgacgcagaaccagatcacctacgatcgtctcaacgtgacgctgacccgtgatgacgtgatgggcgaaagcctctacaacccgatgctgccaggaattgtggcggatctcaaagccaaaggtctggcagtagaaagcgaaggggcgaccgtcgtattccttgatgagtttaaaaacaaggaaggcgaaccgatgggcgtgatcattcagaagaaagatggcggctatctctacaccaccactgatatcgcctgtgcgaaatatcgttatgaaacactgcatgccgatcgcgtgctgtattacatcgactcccgtcagcatcaacacctgatgcaggcatgggcgatcgtccgtaaagcaggctatgtaccggaatccgtaccgctggaacaccacatgttcggcatgatgctgggtaaagacggcaaaccgttcaaaacccgcgcgggtggtacagtgaaactggccgatctgctggatgaagccctggaacgtgcacgccgtctggtggcagaaaagaacccggatatgccagccgacgagctggaaaaactggctaacgcggttggtattggtgcggtgaaatatgcggatctctccaaaaaccgcaccacggactacatcttcgactgggacaacatgctggcgtttgagggtaataccgcgccatacatgcagtatgcatacacgcgtgtattgtccgtgttccgtaaagcagaaattgacgaagagcaactggctgcagctccggttatcatccgtgaagatcgtgaagcgcaactggcagctcgcctgctgcagtttgaagaaaccctcaccgtggttgcccgtgaaggcacgccgcatgtaatgtgtgcttacctgtacgatctggccggtctgttctctggcttctacgagcactgcccgatcctcagcgcagaaaacgaagaagtgcgtaacagccgtctaaaactggcacaactgacggcgaagacgctgaagctgggtctggatacgctgggtattgagactgtagagcgtatgtaa

SEQ ID NO: 6926 - DNA, 747 bp, Escherichia coli
atggaacaagcgcatacccagctgattgcccaactgaacgagcgtattttagcggcggataacacgccgctttatattaagtttgccgaaacggtaaaaaatgccgtgcgcagcggggtgctggagcatggcaatattttgcccggtgagcgtgatttaagtcagttaaccggcgtttcgcgcattacggtgcgcaaggcgatgcaggcgctggaagaagagggtgtggtgacgcgttcgcgcggttacggcacgcagatcaacaacatcttcgaatactcgttgaaagaagcgcgaggtttttctcagcaggtggtattgcgcgggaaaaagcccgatacgctatgggttaacaagcgtgtcgtgaaatgtcccgaagaagtcgcgcagcagctggcggtcgaagcaggaagtgatgtctttttgcttaagcgtattcgctatgtcgatgaagaagcggtatcgattgaggaatcgtgggttccggcgcatttaattcatgatgttgatgccatcgggatttcactttatgactatttccgcagccagcacatttacccacaacgtacgcgttcccgcgttagcgcccggatgccggatgccgagtttcagtcacatattcagttagatagcaaaataccggtgctggtgatcaagcaagtggcgcttgaccaacagcaacggcctattgagtacagcattagccactgtcgcagcgatctatacgtttttgtgtgcgaggagtag

SEQ ID NO: 6927 - DNA, 828 bp, Escherichia coli
atgaaaccaatgcagctaagaattaccagtcgaaaaaaactcacctctctattatgcgctcttgggctaatttccatcgttgcaatttatccgcgtcagacggtgaattttttctattcgacagcagttcagattacagactacatccacttctacggttatcgcccggttaaatctttcgctattcgcattcctgccagttacaccattcacggaatagatgtttcgcgctggcaggagcggatcgactggcagcgggtggcaaaaatgcgcgacaatggtatccgcttacagtttgcttttattaaggcgacggaaggcgaaaagctggtggacccctatttttcgcgtaactggcaactaagccgcgaaaatggcctgctgcgtggggcgtatcattatttctccccgtcggtatccgcttcagttcaggcgagattatttctgcaaacggtggatttctcacaaggcgatttccctgccgtgctggacgtagaagaacggggaaaattatcggcaaaagaattacgcaagcgggtaagtcagtggctaaaaatggtcgaaaaaagtacggggaaaaagccgattatttactcaggagccgttttttatcacaccaatctggcgggctatttcaatgaatatccgtggtgggtggctcactactatcaacgtcgtccggacaatgacggaatggcctggcgcttctggcagcattccgaccgtggacaggtagatggcatcaatggtccggtggattttaatgtatttaatggcacggtggaggagttgcaggcattcgttgatgggattaaagaaacgccttaa

SEQ ID NO: 6928 - DNA, 609 bp, Escherichia coli
atgaaactcgtcggtagctacaccagcccgtttgtacgcaaactttctattctgttgttagaaaagggcataactttcgaatttattaatgaactgccctataacgcggacaacggcgtggcgcaatttaacccgttaggaaaagtgccggtgctggtgaccgaagagggcgaatgctggtttgattcgccgatcatcgctgaatatattgaattaatgaatgtcgctccggcgatgttgccgcgcgatccgctggagtcgttgcgggtgcgcaaaattgaggcactggcggatggcattatggatgccgggctggtatcggtgcgtgaacaggcgcgtccagcggcgcagcagtctgaagatgaattgttacgccagcgggagaaaatcaaccgcagtctggatgtgctggaaggatatctggtcgatggcacactcaaaaccgatacggtcaatctggcgactatcgccattgcctgtgccgtcggatatctcaatttccgccgcgttgcgccaggttggtgtgtcgaccgcccacacttagtcaaactggtcgaaaacctgtttagccgcgaaagttttgctcgcaccgaaccgccaaaggcttga

SEQ ID NO: 6929 - DNA, 837 bp, Escherichia coli
gtgcaattttgttcaagtgacgagtttgcgagcaaaacgatgattaagtggccctggaaagtacaagaatcagcacatcaaactgcccttccctggcaggaagcactatcgatcccccttttaacgtgtctgacggaacaggaacaaagcaaattagtcactcttgccgaacgttttttacagcaaaagcggcttgttcctttacagggctttgaactggattcattaagaagctgccggatagcacttctattttgcctacccgttctggagttaggactggaatggctggatggttttcatgaagtcttaatttatcctgcgccatttgtggtcgatgatgaatgggaagacgatatcggtctggtgcataaccaacgtattgttcagtcaggtcagagctggcagcaagggcctatcgttttgaactggttggatatacaagattcttttgatgcttctggttttaacctgattattcatgaagtcgctcataagctggacacccgtaacggcgatcgcgccagcggagttccctttattccgttgcgtgaggttgctggctgggaacacgatcttcatgctgcaatgaacaacattcaggaagaaatcgaattggttggcgagaatgcggcgagcattgatgcttatgcagccagcgatcctgctgaatgttttgccgtactttctgaatatttctttagcgccccagaactttttgctcctcgtttcccttcattgtggcaacgtttctgccaattttatcaacaagatcctttgcagagactgcatcacgctaatgatacagactcgttttcggcgacgaatgttcattaa

SEQ ID NO: 6930 - DNA, 1182 bp, Escherichia coli
atgaaatggatagttccgtcccattcgtttgtttttcatggtacaggtgagagatattttcttatttgtgtggtgaatgtgttgttaacgattataacgctaggtatctatttaccatgggcattaatgaaatgtaagcgttatctttatgctaatatggaagttaacggacaacgattttcttatggaattaccggtgggaatgtttttgttagttgtcttttttttgtttttttctatttcgcaatcttaatgacagtgtcagcagatatgccgcttgttggttgtgttttgactttgttactgttggttttgcttatatttatggcagcaaaaggactgcgtcatcaggccttaatgaccagtctcaacggcgtaagatttagttttaattgctctatgaaagggttctggtgggtgacctttttcttgccgattttaatggccattgggatggggactgttttctttatctcgacaaagatgctacctgccaatagttcaagtagtgttattatatccatggttctgatggcaatagttggtattgtttccattggtatttttaatggtactttatatagtctggtaatgagttttctctggagtaataccagtttcggtatacatcgtttcaaggtgaaattagatactacgtattgtataaaatatgccattctcgcatttttagctttattgccttttctcgctgttgctggttatattatcttcgatcaaatattaaatgcgtatgatagttctgtatatgcaaatgatgacattgagaatttacagcaatttatggaaatgcaacgtaaaatgataatcgcgcagttaatctattattttgggattgctgttagcacaagttatttaacggtgtctttgcgaaaccattttatgagcaacctgtcactgaatgatgggcgtattcgttttcgcttaactttaacgtaccacggtatgctttatcgcatgtgtgcgttggtggtgatatccgggattacgggcggtctggcttatccactgctgaaaatatggatgattgactggcaggcaaaaaatacgtatttgctgggcgatttggatgaccttcctttaatcaataaagaagaacaaccagataaaggcttcttagccagtatttcacggggagttatgccttctttaccatttctgtaa

SEQ ID NO: 6931 - DNA, 708 bp, Escherichia coli
atgagcagtttccagttcgagcaaataggcgttattcgctcgccctataaagaaaagttcgccgttccgcgccagccaggtctggtaaaaagcgccaacggcgaactgcatctcattgctccctacaaccaggccgacgccgttcgcggcctggaagcgttcagccatttatggatccttttcgtctttcatcaaacgatggaaggcggctggcgtccgactgtgcgtccaccgcgcctcggcggtaacgccagaatgggggttttcgcaacacgctctactttccgccctaacccaattggcatgtcgctggtagagctgaaagaggttgtttgccataaagacagcgtgattctgaagctcggcagtctggatctggtcgatggtacgccggtagtggatatcaaaccgtatctcccctttgccgaatcgcttcccgatgccagtgccagctatgcgcaaagtgcgccagctgcagagatggcggtgagttttaccgcagaggtcgaaaagcagcttttgacgctggagaagcgttatccgcagttaacgctgtttatccgcgaagtactggcgcaggacccgcgcccggcctatcgtaaaggtgaggaaacgggcaaaacctatgccgtctggctacatgattttaacgttcgctggcgcgtcaccgacgcaggttttgaagtctttgcgctggaaccgcgttaa

SEQ ID NO: 6932 - DNA, 1026 bp, Escherichia coli
atggcaacaataaaagatgtagcgaaacgagcaaacgtttccactacaactgtgtcacacgtgatcaacaaaacacgtttcgtcgctgaagaaacgcgcaacgccgtgtgggcagcgattaaagaattacactactcccctagcgcggtggcgcgtagcctgaaggttaaccacaccaagtctatcggtttgctggcgaccagcagcgaagcggcctattttgccgagatcattgaagcagttgaaaaaaattgcttccagaaaggttacaccctgattctgggcaatgcgtggaacaatcttgagaaacagcgggcttatctgtcgatgatggcgcaaaaacgcgtcgatggtctgctggtgatgtgttctgagtacccagagccgttgctggcgatgctggaagagtatcgccatatcccaatggtggtcatggactggggtgaagcaaaagctgacttcaccgatgcggtcattgataacgcgttcgaaggcggctacatggccgggcgttatctgattgaacgcggtcaccgcgaaatcggcgtcatccccggcccgctggaacgtaacaccggcgcaggccgccttgccggttttatgaaggcgatggaagaagcgatgatcaaggtgccggaaagctggattgtgcagggtgactttgaacctgaatccggttatcgcgccatgcagcaaatcctgtcgcagccgcatcgccctactgccgtcttctgtggtggcgatatcatggcaatgggcgcactttgtgctgctgatgaaatgggcctgcgcgtcccgcaggatgtttcgctgatcggttatgataacgtgcgcaacgcgcgctattttacgccggcgctgaccacgatccatcagccaaaagattcgctgggtgaaacagcgttcaacatgctgttggatcgtatcgtcaacaaacgtgaagaaccgcagtctattgaagtgcatccgcgcttgattgaacgccgctccgtggctgacggcccgttccgcgactatcgtcgttaa

SEQ ID NO: 6933 - DNA, 1983 bp, Escherichia coli
atgaaaaccgtcgtttttgcctaccacgatatgggatgcctcggtattgaagccctgctggctgccggttacgaaattagcgccatttttacccatactgataatcccggtgaaaaagccttttatggttcggtggctcgtctggcggcggaaagaggcattccggtttatgcgccggataacgttaatcatccgctgtgggtggaacgcattgcccaactgtcgccagatgtgattttctctttttattatcgccatcttatttacgacgaaattttgcagctcgctcccgcaggtgcatttaatctgcatggttcgctgttaccaaaatatcgtggtcgcgcgccgctgaactgggtgctggtcaacggtgaaacggaaactggcgttacattgcaccgaatggtgaaacgtgccgatgccggggccattgtggcgcaactgcgcattgccattgcgccagacgatatcgctattacgctgcatcataaattgtgccatgccgcgcgccagctactggaacagacattacccgccattaaacacggtaatattctggaaatcgcccagcgcgaaaacgaagccacctgttttggtcgcagaacgccggatgacagtttccttgaatggcataaaccggcatccgtactgcacaacatggtacgtgccgttgccgatccgtggccgggtgccttcagctatgttggcaatcagaaattcaccgtctggtcgtcgcgtgttcatcctcatgccagcaaagcacagccggggagcgtgatttctgttgcgccactgctgattgcctgtggcgatggcgcgctggaaatcgtcaccggacaggcgggcgacggcattactatgcagggctcgcaattagcgcagacgctgggcctggtgcaaggttcacgcttgaatagccagcctgcctgcaccgcccgacgccgtacccgggtactcatcctcggggtgaatggctttattggcaaccatctgacagaacgcctgctgcgcgaagatcattatgaagtttacggtctggatattggcagcgatgcgataagccgttttctgaatcatccgcattttcactttgttgaaggcgatatcagtattcattccgaatggattgagtatcatgtcaaaaaatgtgatgtcgtcttgccgctggtggcgatagccacgccgattgaatatacccgcaacccgctgcgcgtatttgaactcgattttgaagagaatctgcgcattatccgctactgcgtgaagtaccgtaagcgaatcatcttcccgtcaacttcagaagtttatgggatgtgtagcgataaatacttcgatgaggaccattctaatttaatcgtcggcccggtgaataaaccacgctggatttattcggtatcaaaacaattacttgatcgggtgatctgggcctatggcgaaaaagagggtttacagttcaccctcttccgcccgtttaactggatgggaccacgactggataaccttaatgcagcgcgaattggcagctcccgcgctattacgcaactcattctcaatctggtagaaggttcaccgattaagctgattgatggcggaaaacaaaaacgctgctttactgatattcgcgatggtatcgaggcgttataccgcattatcgaaaatgcgggaaatcgctgcgacggtgaaattatcaacattggcaatcctgagaacgaagcgagcattgaggaactgggcgagatgctgctggcgagcttcgaaaaacatccgctgcgccatcatttcccaccgtttgcgggctttcgcgttgtcgaaagtagcagctactacggcaaaggatatcaggacgtagagcatcgtaaaccgagcatccgcaatgcccaccgctgcctggactgggagccgaaaattgatatgcaggaaaccatcgacgaaacgctggatttcttcctgcgcaccgttgatcttacggataaaccatcatga

SEQ ID NO: 6934 - DNA, 204 bp, Escherichia coli
atgtttggtaacttaggacaggcaaaaaaatatctcggccaggcggcgaagatgttgattggcattccagactacgacaactacgtcgagcatatgaagaccaaccatcccgacaagccgtacatgagctatgaagaattcttccgcgaacgccagaacgcgcgctacggcggcgatggtaaaggcggtatgcgctgttgttaa

SEQ ID NO: 6935 - DNA, 960 bp, Escherichia coli
atgggctgggatacagaaacgaaaatgagcacttacgaaaaggaaactgaggtaatgaaaaaattcagcggcattattccaccggtatccagcacgtttcatcgtgacggaacccttgataaaaaggcaatgcgcgaagttgccgacttcctgattaataaaggggtcgacgggctgttttatctgggtaccggtggtgaatttagccaaatgaatacagcccagcgcatggcactcgccgaagaagctgtaaccattgtcgacgggcgagtgccggtattgattggcgtcggttccccttccactgacgaagcggtcaaactggcgcagcatgcgcaagcctacggcgctgatggtatcgtcgccatcaacccctactactggaaagtcgcaccacgaaatcttgacgactattaccagcagatcgcccgtagcgtcaccctaccggtgatcctgtacaactttccggatctgacgggtcaggacttaaccccggaaaccgtgacgcgtctggctctgcaaaacgagaatatcgttggcatcaaagacaccatcgacagcgttggtcacttgcgtacgatgatcaacacagttaagtcggtacgcccgtcgttttcggtattctgcggttacgatgatcatttgctgaatacgatgctgctgggcggcgacggtgcgataaccgccagcgctaactttgctccggaactctccgtcggcatctaccgcgcctggcgtgaaggcgatctggcgaccgctgcgacgctgaataaaaaactactacaactgcccgctatttacgccctcgaaacaccgtttgtctcactgatcaaatacagcatgcagtgtgtcgggctgcctgtagagacatattgcttaccaccgattcttgaagcatctgaagaagcaaaagataaagtccacgtgctgcttaccgcgcagggcattttaccagtctga

SEQ ID NO: 6936 - DNA, 2016 bp, Escherichia coli
atggctgaactgactgcgcttcacacattaacagcgcaaatgaaacgtgaagggatccgccgcttgctggtgttgagcggggaagagggttggtgttttgagcatactcttaagttgcgtgatgccttacctggcgactggctgtggatttcgccgcggccagatgctgaaaaccactgttctccctcggcactacaaactttacttgggcgcgagttccggcatgcggtattcgacgcccgccacggctttgatgccgctgcctttgccgcacttagcggaacgttgaaagcgggaagctggctggttttgttactccctgtatgggaagagtgggaaaaccaacctgatgccgactcgctgcgctggagtgattgccctgaccctattgcgacgccgcattttgtccagcatctcaaacgcgtacttacggcggataacgaggctatcctctggcggcaaaaccagccattctcgttggcgcattttactccccgtactgactggtaccccgcgactggcgcaccacaaccagaacaacagcaactcttaaagcagctaatgaccatgccgccgggcgtggcagcggtaacggctgcgcgtgggcgcggtaagtcggcgttggcagggcaactcatttctcgtattgcgggcagagcgattgtcaccgcgcccgcaaaagcgtcaacggatgtactggcacaatttgcgggcgagaagtttcgctttattgcgccggatgccttgttagccagcgatgagcaagccgactggctggtggtcgatgaagccgcagccatacctgcgccattgttgcatcaactggtatcgcgttttcctcgaacgttgttaaccactacggtgcagggctacgaaggcaccggacgtggttttttgctgaaattttgcgctcgctttccgcatttacaccgttttgaactgcaacagccgatccgctgggcgcagggatgcccgctggaaaaaatggtcagcgaggcactggtttttgacgatgaaaacttcacccatacaccacaaggcaatattgtcatttccgcatttgaacagacgttatggcaaagcgatccagaaacgccgttaaaggtttatcagctcttgtctggtgcgcactatcggacttcgccgctggatttacgccggatgatggatgcaccagggcaacattttttacaggcggctggcgaaaacgagattgccggggcgctgtggctggtggatgagggtggattatctcaacaactcagtcaggcggtatgggcaggttttcgtcgcccgcggggtaatctggtggcccagtcgctggcggcgcacggcaacaatccactggcggcgacattgcgtggacggcgggtcagccggatagcagttcatccggctcgtcagcgggaaggcacagggcggcaacttattgctggtgctttgcaatatacgcaagacctcgactatctttcggtgagttttggttacaccggggagttatggcgtttctggcaacgctgcggttttgtgctggtgcggatgggtaatcatcgggaagccagcagcggttgctatacggcgatggcgctgttaccgatgagtgatgcgggtaaacagctggctgaacgtgagcattaccgtttacgtcgcgatgcgcaagctctcgcgcagtggaatggcgaaacgcttcctgttgatccactaaacgatgccgtcctttctgacgacgactggcttgaactggccggttttgctttcgctcatcgtccgctattaacgtcgttaggttgcttattgcgtctgttacaaaccagtgaactggcattaccggcgctgcgtgggcgtttacagaaaaacgccagtgatgcgcagttatgtaccacacttaaactttcaggccgcaagatgttactggtccgtcagcgggaagaggccgcgcaggcgctgttcgcacttaatgatgttcgcactgagcgtctgcgcgatcgcataacgcaatggcaattatttcactga

SEQ ID NO: 6937 - DNA, 654 bp, Escherichia coli
atgtctgagccgatgatgtggctgctggttcgtggcgtatgggaaacgctggcaatgaccttcgtatccggtttttttggctttgtgattggtctgccggttggcgttctgctttatgtcacgcgtccggggcaaattattgctaacgcgaagctgtatcgtaccgtttctgcgattgtgaacattttccgttccatcccgttcattatcttgcttgtatggatgattccgtttacccgcgttattgtcggtacatcgattggtttgcaggcagcgattgttccgttaaccgttggtgcagcaccgtttattgcccgtatggtcgagaacgctctgctggagatcccaaccgggttaattgaagcttcccgcgcaatgggtgccacgccgatgcagatcgtccgtaaggtgctgttaccggaagcgctgccgggtctggtgaatgcggcaactatcaccctgattaccctggtcggttattccgcgatgggtggtgcagtcggtgccggtggtttaggtcagattggctatcagtatggctacatcggctataacgcgacggtgatgaatacggtactggtattgctggtcattctggtttatttaattcagttcgcaggcgaccgcatcgtccgggctgtcactcgcaagtaa

SEQ ID NO: 6938 - DNA, 1206 bp, Escherichia coli
ttgttatcgccgatccgtctttctccccttcccgccttgcgtcaggataacgatttcctttacgaccaaggagcgcccatggaacaacgccacatcaccggcaaaagccactggtatcatgaaacgcaatccagtactacggagtatgacgttctgcctctggtcccggaagccgcaaaggtcagcgatccctttctactcgacgtgatccttgaaaaagaaacgctggcccccttcctttcatggctggaccctgcgcgtgttcttgcagtggatttgttccctgaccagcttaccgtgacccgttcacagaccttcaccgcttatgaacgcttgtcgacggccctgacggttgctcaggtttgcggcgtccagcggttatgtaactactattcggcgcgacttacgccgctccccgggcctgattccaccagggaaagtaatcatcggttggcacaaatcacgcaatatgcccgccaactggctagctcgccttctattatcgacaaccgatcgcgccagcatctgaatgacgtcggtcttactgcctgggactgtgtgatcattagccaaatcattggttttattggctttcaggcgcggacaattgcgacatttcaggcttatctcgggcatccggtacgctggttacccgggctggagatacaaaactacgccgacgcgtcactgtttgctgatgaatcattacgctggcgaagcagctatgaggtggaaaaactacctgaagagcacacaaaaagttcaactgcagaactttgccaactggccgaaatactctctctccaccctatttcactttcccttctcgaaaagttgttaaacagcacacggggcaatacacagccggataatcagcttgcggcgttgttatgcgcgcgtataaatggcagtcctgcttgttttgccacctgtatggattcatcaaatgaatataaaaaaatcagcacccttatgcgcaagggcgaaaatgaaattaaccaatgggctgaccgtcattctgttgagcgcgctaccgttcaggcgatacaatggctgacccgagcacccgatcgctttagcgccgcccagttcagccctttactcgaacacgaaaaatcatcaacgcagattattaatctgctggtatggagcgggctgtgtggctggataaatcgcttaaaaatcgcgttgggtgagacatattaa

SEQ ID NO: 6939 - DNA, 1194 bp, Escherichia coli
atgacaacattacttaacccctattttggtgagtttggcggcatgtacgtgccacaaatcctgatgcctgctctgcgccagctggaagaagcttttgtcagtgcgcaaaaagatcctgaatttcaggctcagttcaacgacctgctgaaaaactatgccgggcgtccaaccgcgctgaccaaatgccagaacattacagccgggacgaacaccacgctgtatctcaagcgtgaagatttgctgcacggcggcgcgcataaaactaaccaggtgctggggcaggcgttgctggcgaagcggatgggtaaaaccgaaatcatcgccgaaaccggtgccggtcagcatggcgtggcgtcggcccttgccagcgccctgctcggcctgaaatgccgtatttatatgggtgccaaagacgttgaacgccagtcgcctaacgtttttcgtatgcgcttaatgggtgcggaagtgatcccggtgcatagcggttccgcgacgctgaaagatgcctgtaacgaggcgctgcgcgactggtccggtagttacgaaaccgcgcactatatgctgggcaccgcagctggcccgcatccttatccgaccattgtgcgtgagtttcagcggatgattggcgaagaaaccaaagcgcagattctggaaagagaaggtcgcctgccggatgccgttatcgcctgtgttggcggcggttcgaatgccatcggcatgtttgctgatttcatcaatgaaaccaacgtcggcctgattggtgtggagccaggtggtcacggtatcgaaactggcgagcacggcgcaccgctaaaacatggtcgcgtgggtatctatttcggtatgaaagcgccgatgatgcaaaccgaagacgggcagattgaagaatcttactccatctccgccggactggatttcccgtctgtcggcccacaacacgcgtatcttaacagcactggacgcgctgattacgtgtctattaccgatgatgaagcccttgaagccttcaaaacgctgtgcctgcacgaagggatcatcccggcgctggaatcctcccacgccctggcccatgcgttgaaaatgatgcgcgaaaacccggataaagagcagctactggtggttaacctttccggtcgcggcgataaagacatcttcaccgttcacgatattttgaaagcacgaggggaaatctga

SEQ ID NO: 6940 - DNA, 1362 bp, Escherichia coli
atgatgcaaaccgttttagcgaaaatcgtcgcagacaaggcgatttgggtagaagcccgcaaacagcagcaaccgctggccagttttcagaatgaggttcagccgagcacgcgacatttttatgatgcgctacagggtgcgcgcacggcgtttattctggagtgcaagaaagcgtcgccgtcaaaaggcgtgatccgtgatgatttcgatccagcacgcattgccgccatttataaacattacgcttcggcaatttcggtgctgactgatgagaaatattttcaggggagctttaatttcctccccatcgtcagccaaatcgccccgcagccgattttatgtaaagacttcattatcgacccttaccagatctatctggcgcgctattaccaggccgatgcctgcttattaatgctttcagtactggatgacgaccaatatcgccagcttgccgccgtcgctcacagtctggagatgggggtgctgaccgaagtcagtaatgaagaggaacaggagcgcgccattgcattgggagcaaaggtcgttggcatcaacaaccgcgatctgcgtgatttgtcgattgatctcaaccgtacccgcgagcttgcgccgaaactggggcacaacgtgacggtaatcagcgaatccggcatcaatacttacgctcaggtgcgcgagttaagccacttcgctaacggttttctgattggttcggcgttgatggcccatgacgatttgcacgccgccgtgcgccgggtgttgctgggtgagaataaagtatgtggcctgacgcgtgggcaagatgctaaagcagcttatgacgcgggcgcgatttacggtgggttgatttttgttgcgacatcaccgcgttgcgtcaacgttgaacaggcgcaggaagtgatggctgcggcaccgttgcagtatgttggcgtgttccgcaatcacgatattgccgatgtggtggacaaagctaaggtgttatcgctggcggcagtgcaactgcatggtaatgaagaacagctgtatatcgatacgctgcgtgaagctctgccagcacatgttgccatctggaaagcattaagcgtcggtgaaaccctgcccgcccgcgagtttcagcacgttgataaatatgttttagacaacggccagggtggaagcgggcaacgttttgactggtcactattaaatggtcaatcgcttggcaacgttctgctggcggggggcttaggcgcagataactgcgtggaagcggcacaaaccggctgcgccggacttgattttaattctgctgtagagtcgcaaccgggcatcaaagacgcacgtcttttggcctcggttttccagacgctgcgcgcatattaa

SEQ ID NO: 6941 - DNA, 1773 bp, Escherichia coli
atgcgtacagaatattgtggacagctccgtttgtcccacgtggggcagcaggtgactctgtgtggttgggtcaaccgtcgtcgtgatcttggtagcctgatcttcatcgatatgcgcgaccgcgaaggtatcgtgcaggtatttttcgatccggatcgtgcggacgcgttaaagctggcctctgaactgcgtaatgagttctgcattcaggtcacgggcaccgtacgtgcgcgtgacgaaaaaaatattaaccgcgatatggcgaccggcgaaatcgaagtgctggcgtcctcgctgactatcatcaaccgcgcagatgttctgccgcttgactctaaccacgtcaacaccgaagaagcgcgtctgaaataccgctacctcgacctgcgtcgtccggaaatggctcagcgcctgaaaacccgcgctaaaatcaccagcctggtgcgccgttttatggatgaccacggcttcctcgacatcgaaactccgatgctgaccaaagccacgccggaaggcgcgcgtgactacctggtgccttctcgtgtgcacaaaggtaaattctacgcactgccgcaatccccgcagttgttcaaacagctgctgatgatgtccggttttgaccgttactatcagatcgttaaatgcttccgtgacgaagacctgcgtgctgaccgtcagcctgaatttactcagatcgatgtggaaacttctttcatgaccgcgccgcaagtgcgtgaagtgatggaagcgctggtgcgtcatctgtggctggaagtgaagggtgtggatctgggcgatttcccggtaatgacctttgcggaagcagaacgccgttatggttctgataaaccggatctgcgtaacccgatggaactgactgacgttgctgatctgctgaaatctgttgagtttgctgtatttgcaggtccggcgaacgatccgaaaggtcgcgtagcggctctgcgcgttccgggcggcgcatcgctgacccgtaagcagatcgacgaatacggtaacttcgttaaaatctacggcgcgaaaggtctggcttacatcaaagttaacgaacgcgcgaaaggtctggaaggtatcaacagcccggtagcgaagttccttaatgcagaaatcatcgaagacatcctggatcgtactgccgcgcaagatggcgatatgattttcttcggtgccgacaacaagaaaattgttgccgacgcgatgggtgcactgcgcctgaaagtgggtaaagaccttggtctgaccgacgaaagcaaatgggcaccgctgtgggttatcgacttcccgatgtttgaagacgacggtgaaggcggcctgacggcaatgcaccatccgttcacctcaccgaaagatatgacggctgcagaactgaaagctgcaccggaaaatgcggtggcgaacgcttacgatatggtcatcaatggttacgaagtgggcggtggttcagtacgtatccataatggtgatatgcagcagacggtgtttggtattctgggtatcaacgaagaggaacagcgcgagaaattcggcttcctgctcgacgctctgaaatacggtactccgccgcacgcaggtctggcattcggtcttgaccgtctgaccatgctgctgaccggcaccgacaatatccgtgacgttatcgccttcccgaaaaccacggcggcagcgtgtctgatgactgaagcaccgagctttgctaacccgactgcactggctgagctgagcattcaggttgtgaagaaggctgagaataactga

SEQ ID NO: 6942 - DNA, 4710 bp, Escherichia coli
gtgaacacaatacacttgcgctgtctcttcaggatgaatcccctggtctggtgcctgtgggctgatgttgcagcaaagctaaggtcgcttaaacgctactcagtattcacttttcagaggatgaaatttatgaacaggaccagtccctattattgtcgccgctcagtactttccttattgatatctgccttgatatatgccccgcccgggatggctgccttcactactaatgttattggtgtggtaaacgatgagactgtagatggcaaccaaaaagtggatgaacgaggtacaacaaataacactcatattatcaaccatggccagcagaatgttcatggcggggtatctaatggaagtcttattgaatctggtggatatcaagatataggaagtcataacaattttgtggggcaggctaataatacaaccattaacggtggcagacagtcaattcatgacgggggtatttccacaggtacgacaatcgagagtggcaatcaggacgtttataaagggggtatcagcaatggaacgacaattaagggcggtgcttcacgcgtagagggagggagtgcgaatggaatactcattgatggtggtagccagatagtaaaagttcaagggcatgctgatggtacaacgataaataagtctggctctcaggacgtagtacaaggaagtctggcaacgaacacaaccataaatggtggtcgacagtatgttgaacagagcacagtagaaacaacaaccattaaaaatggcggtgagcaaagagtatatgagagccgtgcgctggacacgacgattgaaggcggaactcagtctctgaatagtaagtcaacggcaaaaaatacgcatatctattctggtggcacgcaaattgttgataacaccagcacctcggatgttattgaagtttattctggtggcgtgcttgatgttaggggtggtacggcaacaaatgttacccagcacgatggtgcaattttaaaaactaacactaacggtacgacggtgagcggtacgaatagtgaaggtgcattctccatccacaatcacgtggcagacaatgtgttgctggaaaacggtggtcatttagacataaacgcatatggttcggcaaacaagacgattattaaagataaaggaacaatgtcagttttaaccaatgctaaagctgatgcgacccgaatagataatggcggggttatggatgttgcaggaaacgcgacaaataccataattaatggtggcacacagaatattaataattatggcatagccacaggcaccaatatcaacagcggaacgcaaaatatcaaaagcggcgggaaagctgacacaacaattatatcctccgggagccggcaggttgttgagaaagatggtacggcaattggcagcaatattagcgccggaggctcgctgattgtctataccggcggtattgcacatggggttaaccaggagacgggcagtgctttagttgccaacacgggtgcagggactgatatcgaaggatacaacaagctctctcacttcactattaccggaggggaggctaattatgttgtgctggaaaataccggcgaactgacggtagtggctaaaacctcggcgaaaaatactaccattgatactggcggtaagctgattgtccagaaggaggctaaaacagatagcaccagacttaataatggcggcgttctggaggttcaggacggtggtgaggctaagcatgttgagcaacaatccggcggcgcattaattgcttccacgacctccggaacacttatcgaaggaaccaacagttatggtgatgctttctacatcaggaattcagaagctaaaaatgtagtgctggaaaacgctggctcattaacagtcgtcactggttcccgcgcagttgacacgattattaatgccaacggcaaaatggatgtttatggaaaagatgttggcactgtactcaatagtgctggcacccaaacaatatatgccagtgccacttctgataaagcaaatatcaaaggtggcaagcaaacggtatatggtttagccactgaagcaaatatcgaaagtggtgaacaaattgttgatggtgggtcaacagagaaaacacacatcaatggtggcacgcaaaccgttcagaattatggtaaggcaatcaataccgatatcgtctctggcctacaacaaattatggcaaacgggacagcggaaggttccattattaatgggggttcacaggtagttaatgagggcggcctggctgaaaactcggtgcttaatgacggcggcacactcgatgtgcgggagaaaggcagcgcaacggggatacagcagagtagccagggcgctttggttgcaaccaccagggcgacgcgggtcacaggaacacgcgcggatggcgtcgcgttcagcatcgagcagggtgcggcgaacaatatcctgctggcaaatggcggcgtgttaaccgtggagtcagacacctcttctgacaaaacacaggtcaatatgggcggacgggagatcgtcaaaacaaaagccactgcgacaggcacgacgctcaccggcggtgaacaaattgtcgagggtgtggcgaatgagacaacaattaacgacggcggaatacaaacagtttcagctaacggagaggcaataaaaacaaagatcaatgaaggcggtacgctgacagtcaacgataatggcaaagcgacagatatcgtccagaacagcggtgccgctctccagacgagcacggctaacggtattgaaatcagcggtactcaccagtacggtactttttccatttccggcaatttagcgaccaatatgttgctggaaaatggcggtaatttattggtattagcaggtaccgaagctcgcgactccacggttggcaagggtggggcaatgcaaaacctgggtcaggactccgccacaaaggttaactctggcgggcaatatacccttgggcggtcaaaagatgagtttcaggctctggcccgggcagaagatctccaggtcgctggcggtacggcaatcgtctacgcaggtacgctggcggatgcatcggtcagtggcgcgacaggaagcctgtcgttaatgacgccacgggataatgttacgccagttaaactcgaaggggcggtccggattaccgatagcgcgacattgactctgggaaatggcgtcgataccacgcttgccgacctgacggctgccagccggggcagtgtctggcttaacagcaataattcctgtgcaggtaccagcaactgcgaatatagagtaaacagtttgctactcaacgacggtgatgtttatttgtcagcacaaacagcagcgcctgccacaactaacggtatctacaatacgctgacaaccaatgaactttccggtagcggtaatttctacctgcataccaacgttgcaggctcccggggcgatcaactggtcgtcaacaacaacgccactggtaattttaaaatctttgttcaggataccggcgtcagcccacagtctgacgacgcgatgacgctggtgaaaacagggggaggggatgcttcgtttacgctgggcaataccggcggtttcgttgatcttgggacctatgagtatgtcctgaaaagtgacggcaacagcaactggaacctgaccaatgatgtcaaacccaacccggaccccatcccaaatccaaagccagacccaaaacccgatccaaagccagacccaaatccaaaaccagaccctactcccgatccaacgccgacacccgttccggagaaacgcattacgccttctacggcagccgtactcaatatggcagcaacattaccgttggtatttgatgctgagctaaacagtattcgcgagcggttgaacataatgaaagcgagtccacacaacaataatgtctggggggcgacgtataacacccgtaataatgtcaccaccgatgcgggtgccgggtttgagcagacgctgaccggaatgacagtggggatcgacagccgtaatgatattcctgaaggaattaccacgctaggcgcttttatgggctattcccattcacatatcggttttgatcgcggaggacatggcagtgtgggcagttattctctgggcggctatgccagttgggaacatgaaagtggtttctatctggacggtgtcgtgaagctgaaccgttttaaaagtaacgtagcaggtaaaatgagcagcggtggagccgccaatggcagttaccacagcaacgggctgggcggtcacattgaaaccgggatgcgatttaccgatggtaactggaacctgacgccgtatgcatcgttaacggggttcaccgctgataaccccgaatatcatttatccaatggcatgaaatcgaaatcagtcgatacccgcagtatatatcgtgaactgggcgcaacgctgagttacaacatgcgtctggggaacggtatggaagttgagccgtggctgaaggcggctgtgcgcaaagaatttgtcgatgataaccgggtgaaagtgaatagtgacggtaatttcgtcaattatttgtcgggcagacgtggaatataccaggcaggtattaaagcctcattcagcagtacgttaagcgggcatcttggggtggggtatagccatagtgccggtgtggaatccccgtggaacgcggtagctggtgtgaactggtcgttctga

SEQ ID NO: 6943 - DNA, 1200 bp, Escherichia coli
atgtaccaacctgtcgctctatttattggcctgcgttacatgcgtgggcgtgcagcggatcgcttcggtcgtttcgtctcctggctttctaccatcggcattaccctcggggtgatggcgctggtcacagtattgtcagtgatgaacggctttgagcgcgagctgcaaaacaacatccttggcctgatgccacaggcaattctctcttctgagcatggctctcttaacccgcagcaactcccagaaacggcagtcaaactggacggcgttaatcgcgtcgcacctattactaccggtgatgtggtactgcaaagcgcgcgcagcgtggcggtcggggtgatgctcggtatcgacccggcgcaaaaagatccacttacaccgtatctggtcaatgtgaaacaaactgacctcgagccggggaaatataatgtcatcctcggcgaacaacttgcctcacagctaggcgttaatcgcggtgatcaaatccgcgtgatggtaccatctgccagccagttcacgccgatggggcgtattccaagccagcgcctgttcaatgtgattggcactttcgccgccaacagtgaagtcgatggctatgaaatgctggtgaatattgaggatgcctcgcgtctgatgcgttatccggcaggcaatattaccggctggcgtttgtggctggatgagccgctgaaagtcgactcattaagtcagcaaaaactgcctgaaggcagcaaatggcaggactggcgtgatcgtaaaggcgagttgttccaggccgtacgcatggaaaaaaatatgatgggtttactgctgagcctgattgtcgccgttgcggcgtttaacattattacctcactagggctgatggtaatggagaagcagggcgaagtagcgatcctgcaaacgcaaggcttaactccgcgacaaatcatgatggtctttatggtgcaaggggccagcgccgggattatcggtgcgatcctcggagcggcgcttggcgccctgcttgccagccagttaaataatctgatgccgataatcggcgtcctgcttgatggcgcggcgctgccggtggctatcgaacctttacaggtcattgttattgcgctggtggcgatggctatcgcgctgctgtctacgctttacccttcatggcgcgctgccgccactcaacccgctgaggctttacgttatgaataa

SEQ ID NO: 6944 - DNA, 450 bp, Escherichia coli
atgggtctgttcaattttgtgaaagatgccggagaaaaactctgggacgcggttacaggtcagcacgataaagacgatcaggcgaagaaggtgcaggagcatctgaacaaaaccggtataccggatgccgataaagtgaatattcaaattgccgacggcaaagcgacggtcactggtgacggcctgagtcaggaggcgaaggagaaaatccttgttgcggtggggaatatttccggtattgccagtgtcgatgatcaggtgaaaacggcgacaccagccactgccagccagttttataccgttaagtctggcgacactctgagtgccatttccaaacaggtctacggtaacgctaatctgtacaataaaatcttcgaagcgaataaaccgatgctaaaaagcccggataaaatttatccggggcaagtgttgcgtattccggaagagtag

SEQ ID NO: 6945 - DNA, 696 bp, Escherichia coli
atgtccattgcggtaaccaccaccgatccgacaaataccggcgtcagtaccaccagcagtagttcgctcacgggcagcaacgccgcagatttacaaagcagttttctgactttgctggtggcgcagctgaaaaaccaggacccgaccaatccaatggaaaacaacgagctgacgtcgcaattggcacaaatcagcacggtcagcgggattgaaaaactcaataccacgctcggatctatttccggacagattgataacagccagtcgttacaggccagtaacctgatcggtcacggcgtgatgatccccggcaccactgttcttgcgggaaccggcagtgaagaaggggctgtgaccacgaccacgccgtttggtgttgagctgcaacaggcggcagacaaagttacggccaccatcaccgataaaaatggcgcggttgtgcgcaccattgatattggtgaactgaccgccggagttcacagtttcacctgggacggtacgttgactgatggcagcactgcgccgaacggttcttacaatgtagcgattagcgccagtaacggtggtacacaactggttgcccagccgctgcagtttgctctggtgcagggtgtgatccgcggcaacagcggtaatacgctggatctcggcacttacggcaccaccaccctcgacgaagtacggcagataatttaa

SEQ ID NO: 6946 - DNA, 867 bp, Escherichia coli
gtgatgaataattctgaaggtttgaagtcgtttcagcaatcgcttgctgatctgccgcaatgggtatcagagcggcttctgcagcaaattaaccagttaactaactacgagccagtgatcggcattatgggtaaaaccggtgttgggaagagcagtctgtgcaatgccctgtttgccggagatatatcaccggtcagcgatgtggcggcctgtacacgtgagccactgcgctttcgcctgcaagtcggcgaccgctatataacgctgatggatctgcccggcgtgggcgaaagtggcgctcgcgataccgagtatgctgcgctgtaccgcgaacagcttcctcgcctcgacctggtactgtggctgattaaggccgatgaccgggcgctgacggtggatgaacatttttatcatcaggtgattggagaggtataccggcataaggtgctgtttgttatcagccagtcggataaggccgaacctaccagcggtgggggacagttgtccacggcgcagaagcagaatatcagccgcaaaatctgcctgctgcatgagctgttccagcccgtccatccggtgtgtgctgtgtcggtccgtctacaatgggggcttaaggtgatggccgagcggatgattaagtgcctgccacgtgaggccaccagcccggtggtgtcgcaactccatccttcctttcgcacgacggtagtccgggaacaggctcgtagcgattttggtgaaaccgtcggggccgtactcgatagcatcagtgcctttcccctgatacccgccccggtgcgggccgtcattcaggccgtgcgcaccacggtggtgtcagtggcccgcgccgtctgggatttcttcttctga

SEQ ID NO: 6947 - DNA, 921 bp, Escherichia coli
atggaatataaaattcactcgcgtgtgtctcatattgcctgttgtcgccactatttcatcgcgaggaaagatatgaacggcttacttcgtatccgtcagcgttaccaggggcttgcccagagtgataaaaaactggcggattatctgctgctacaacctgatacggcgcgccatttaagctctcagcaactggccaacgaagccggagtcagtcagtccagcgtcgtgaagttcgcgcaaaaactcggctataaaggttttccggcgcttaagttggcgttgagtgaagcgctggcaagccagccggaatcaccctccgtgcccattcataaccaaatccgcggtgatgatccgttacggctggtcggcgaaaaactgattaaagaaaatactgccgctatgtacgcaacgctaaacgttaatagtgaagagaaactgcatgaatgcgtaacaatgttgcgctctgcgcggcggataattctgaccggtattggcgcttcgggtctggtggcgcaaaactttgcctggaagctgatgaagattggcttcaatgctgccgcagtgcgcgatatgcatgcgctactcgcaacagtacaggcgtcgtcccctgacgatctgttattagccatttcctacaccggtgtacgacgcgagttaaacctggcggcagatgagatgctgcgagtgggcggaaaagtgctggcgattaccggctttactccgaatgccctgcaacagcgtgcttctcattgcctgtataccattgccgaagaacaagcgacaaacagtgcttcaatctctgcttgtcacgctcagggaatgttaacggatttgctgttcattgcgctgattcagcaggatctggaactggcaccagaacgtattcgtcatagtgaagcgctggtgaaaaaactggtctga

SEQ ID NO: 6948 - DNA, 1014 bp, Escherichia coli
atgtctgaaggctggaacattgccgtcctgggcgcaactggcgctgtgggcgaagccctgcttgaaacgctggctgaacgtcagttcccggttggggaaatttatgcactggcacgtaacgaaagcgcaggcgaacaactgcgctttggtggtaagacaatcaccgtgcaggatgccgctgaattcgactggacgcaggcgcagctggcattttttgtcgcaggcaaagaagctaccgctgcctgggttgaagaagcgaccaactcaggttgcctggtgatcgacagcagtggattgtttgctctcgaacccgacgtaccgctggtggtgccggaagtaaacccgtttgtactgacagattaccggaaccggaatgtcatcgccgtaccagacagtctgaccagccagctgctggcggcactgaaaccgttaatcgatcagggcggtttatcacgtatcagcgttaccagcctgatttcagcctccgcccagggcaaaaaagcggtcgatgcgttagcggggcagagtgcgaaattgctcaacggcattccgattgacgaagaagatttcttcgggcgtcagctggcgttcaacatgctgccgttactgccggatagcgaaggtagcgtgcgtgaagaacgtcgtatcgttgacgaagtacgcaaaatcctgcaggacgaagggctgatgatttcggctagcgtcgtccaggcaccggtattctacggtcatgcccagatggtcaactttgaagctctgcgtccactggcagcagaagaagcgcgtgatgcgtttgttcaaggcgaagatattgtgctctctgaagagaacgaattcccaactcaggtaggtgatgcttcgggtacgccgcatctttctgttggctgcgtgcgtaatgactacggtatgccggagcaagtccagttctggtcggtggccgataacgttcgctttggcggcgcgctgatggcagtaaaaatcgccgagaaactggtgcaggagtatctgtactaa

SEQ ID NO: 6949 - DNA, 1137 bp, Escherichia coli
gtgaaaatccttgttgatgaaaatatgccttatgcccgcgacttatttagccgtttgggtgaggtgaccgcggttcccgggcgtccaatccccgtcgctcaactggcagacgcggatgcgctgatggtgcgttcggtcacgaaagtgaatgaatctttgctggcaggaaaacccattaaatttgttggcactgccactgcggggaccgaccatgtcgatgaagcatggttgaagcaggcgggaattggtttttccgctgcacctggctgtaatgcgattgcggtggtggaatatgttttctcctccctgctgatgcttgccgaacgcgatggattttcactgtacgaccgtacggtggggatcgtgggcgttggtaacgttggacgtcgattgcaggcgcgactggaagcgttagggattaaaaccttactttgcgatccgcctcgcgccgaccgtggggatgagggtgatttccgctcgctggatgagttagtccagcgcgcggatattctgactttccatacgccactctttaaagatggtccgtacaaaacgctacatctggcggatgaaaaactgatccgtagcctgaagcccggagcgattctgattaacgcctgccgtggcgcagtcgtcgataatactgcgttgctgacctgcctgaatgaaggccagaagttaagcgtagtgctggatgtctgggaaggcgaaccggaactcaacgtcgagctgctgaaaaaagtggatatcggcacgtcgcatatcgcaggctataccctggaaggtaaagcacgcggtactacgcaagtgtttgaagcttatagcaagtttattgggcatgaacagcacgttgcgctggatacattactgcctgcgccagagtttggtcgcattacgctgcatggcccgctcgatcaaccgacgctgaaaaggctggtgcatttggtgtatgatgtgcgccgcgatgacgcaccgctgcgtaaagtcgccgggataccgggtgagttcgataaactgcgcaaaaactatcttgagcgccgtgaatggtcatctctgtatgtaatttgtgatgacgccagtgcggcatcattgctgtgtaaactgggttttaacgccgttcatcatccggcacgttaa

SEQ ID NO: 6950 - DNA, 1479 bp, Escherichia coli
atgactttatggattaacggtgactggataacgggccagggcgcatcgcgtgtgaagcgtaatccggtatcgggcgaggtgttatggcaaggcaatgatgccgatgccgctcaggtcgagcaggcttgtcgggcagcccgtgcggcgtttccgcgctgggcgcggctttcatttgctgaacgtcatgccgttgtcgaacgctttgccgcactgctggaaagcaataaagccgaattaaccgcgattattgccagagaaacgggtaagccgcgctgggaagcggcaaccgaagtgacggcgatgatcaataaaatcgcgatatcaattaaggcgtatcacgttcgtaccggcgagcagcgtagtgaaatgccggacggcgcggcgagcctgcgacatcgcccgcacggcgtgctggcggtgtttgggccgtataatttccctggtcatttgccgaacggacatatcgttccggcattgctggcaggtaacaccattatctttaaacccagcgaactgacaccgtggagtggcgaagcggtaatgcgtttatggcagcaggctggcttgccgccaggcgtgctgaacctggtgcagggcgggcgtgaaacgggtcaggcgctgagtgcgctggaggatctcgacggtttgctgtttaccggtagcgccaatacaggctaccagttgcatcgccagctctccggtcagccggagaaaattctcgcccttgagatgggcggtaataatccgctaattatcgatgaggtggcggatatcgacgcggctgtccatctgaccattcagtcggcgtttgtcacagccggtcaacgctgcacctgcgcccgccgtttattgctgaaaagcggggcgcagggcgatgcgtttcttgctcgtctggttgccgtcagccagcgattaacgccgggcaactgggatgacgaaccgcagccgtttattggcgggctgatttctgaacaggccgcacagcaggtggttactgcatggcagcaactggaagcgatgggcggacgacccctgcttgcgccgcgcttattacaagcagggacatcgttgctgacgccggggatcattgaaatgacaggcgttgctggcgtaccagatgaagaggtgttcggaccgttattgcgcgtctggcgttatgatactttcgatgaagcgattcgaatggcgaataacactcgcttcggactctcttgcggtctggtttcccccgagcgggaaaagttcgatcaactgttgctggaggcgcgggcggggattgttaactggaacaaaccgcttaccggtgctgccagtaccgcgccattcggcggcattggtgcttccggtaaccatcgccccagcgcctggtatgccgcagattactgcgcatggccgatggcgagcctggagtcggactcgttaacattgcccgccacgcttaaccccgggctggatttttccgatgaggtggtgcgatga

SEQ ID NO: 6951 - DNA, 1860 bp, Escherichia coli
atgagcaaaggaacgaccagccaggatgccccgttcgggacattattgggctacgccccaggtggggtagcaatctactcttcagattacagttctctcgatccgcaggaatacgaagatgacgccgtattccgtagctatatcgacgacgaatatatgggccacaagtggcaatgcgttgaatttgctcgccgttttctctttctgaattacggtgtggtctttactgacgtgggtatggcgtgggagattttctcgctgcgcttcctgcgagaagtggttaatgacaacatcctgccattgcaggcatttcctaacggctcgccgcgtgcgccggtcgcgggtgcgcttcttatctgggataaaggcggtgaatttaaagacactggccatgtcgccatcattacccaattgcatggcaacaaagtccgtattgcggaacagaacgtgattcattccccgttgccgcaagggcaacagtggacgcgcgagctggagatggtggtcgaaaacggctgctataccctgaaagacacttttgatgacaccaccattctgggctggatgatccagacggaagatactgaatacagcttaccgcagccggaaattgcaggcgagctgctgaaaatcagcggagcgcgcctggaaaacaaaggccagtttgacggtaaatggctggatgaaaaagatccgctgcaaaacgcctatgtgcaggccaacggtcaggtgatcaatcaggatccttatcattactacaccattaccgagagtgccgagcaggagctaattaaagccaccaacgagctgcacctgatgtatcttcacgcaaccgacaaggtgctgaaagatgacaacctgctggcgctgttcgacatcccgaaaatcctctggccacgtttgcgtctctcctggcagcgtcgccgtcaccatatgatcactggtcgtatggatttctgcatggatgagcgtggcctgaaggtttacgagtacaacgccgactccgcctcctgtcataccgaagcgggcttgatcctcgaacgttgggcggagcagggctataaaggcaacggcttcaatccggcggaagggctgattaacgaattggctggtgcctggaaacacagtcgtgcacgtccgtttgtccatatcatgcaggacaaagatatcgaggaaaactatcacgcgcagtttatggagcaggcgctgcaccaggcgggctttgaaacgcgtatcttgcgtggattggatgaactgggctgggatgctgccgggcaactgattgatggggaagggcgactggttaactgcgtgtggaaaacctgggcgtgggaaaccgcgtttgatcagattcgtgaagttagcgaccgtgagtttgctgcggtgccaatccgtaccggtcatccgcaaaacgaagtgcgtcttatcgacgtattgctgcgcccggaagtgctggtctttgagccgctgtggacggtgatccccggcaacaaagcgattctgccgatcctctggtcgctgttcccgcaccatcgttacctgctggataccgatttcactgttaatgatgaactggtgaaaacaggttacgcagtgaaaccgatcgccggtcgctgtggcagcaatatcgacctcgtcagccatcatgaagaggtgctggacaaaaccagcggtaaatttgccgagcagaaaaacatctatcagcaactgtggtgtttgccgaaagtggacggtaaatacattcaggtatgtaccttcaccgttggcggcaactacggtgggacgtgtttgcgcggtgatgaatcactggtcatcaaaaaagagagtgatattgaaccgttaattgtggtgaaaaagtaa

SEQ ID NO: 6952 - DNA, 1383 bp, Escherichia coli
atggaaaagaaactgggactgagcgcactcaccgcgctggtattaagctcaatgctgggcgcgggtgttttcagtctgccgcaaaatatggcggcagttgccagcccggcagcactgctcatcggctggggtattactggcgctggcattttattgctggcctttgccatgctgatcctcacgcgcattcgtcccgaacttgacggcggtatctttacctatgcccgcgaagggtttggcgagctaatcggcttttgttccgcatggggatactggctgtgcgcagtcatcgccaacgtctcctatctggtgatcgttttttccgcgttaagcttttttacggacacgccggaattgcgcctgtttggcgatggtaatacctggcaatcgatagtcggtgcatcggctttattgtggattgttcactttttgatcctgcgcggggtgcaaaccgctgccagcattaacctggtggcgacactggcaaaattgttgccgctgggtctgtttgttgtgctggcgatgatgatgttcaaactggataccttcaagctcgacttcaccggacttgcacttggcgtacccgtttgggaacaggtgaaaaacaccatgctgatcaccctgtgggttttcattggtgtggaaggtgccgtggttgtttctgcgcgtgcgcgtaataaacgtgatgttggcaaagcgacactgctggcggttctctccgctctgggcgtttacttgctggtaacgctgctttcgctgggtgtggtggcacgtcctgaactggctgaaattcgtaacccgtcaatggccggtctgatggtggaaatgatgggaccatggggcgaaatcatcatcgctgccggtttgatcgtttccgtttgcggcgcgtacttaagctggaccatcatggcagcagaagtaccgttcctggccgccactcataaagcattcccgcgcatttttgcgcgccagaacgcacaagctgcgccatccgcctcactgtggttgaccaacatctgcgtgcaaatttgtctggtactcatctggctgaccggttccgattacaacacgttgctgaccatcgcctcagaaatgattctggtgccctatttcctggtcggcgcgttcttgctgaaaatcgcaacccgtccactgcataaagcggtaggtgtcggtgcctgcatttatggcttatggttattgtacgcctctggtccaatgcacttgctgttatccgttgttctgtatgcaccggggctgctggttttcctgtacgcgcgcaaaacgcatacccatgataatgtactgaaccgtcaggaaatggtgctgattggcatgctgttaattgcctcagttccggcgacctggatgctggtgggataa

SEQ ID NO: 6953 - DNA, 327 bp, Escherichia coli
atgccaaaacctggcatcttaaagagtaaaagtatgttttgtgtgatttatcgaagcagcaagcgtgaccagacctatttatatgtcgaaaaaaaagacgatttttcgcgtgttcctgaggaactgatgaaaggttttggtcagcctcagttagcgatgattctgccgctggatgggcggaagaaactggtcaatgccgatattgaaaaggttaaacaggcattaaccgagcaaggttactatttgcagttaccgccaccacccgaagatttgctgaagcaacatctttccgtcatggggcagaaaacagacgacactaacaaataa

SEQ ID NO: 6954 - DNA, 660 bp, Escherichia coli
atgtatcaacatcacaactggcaaggtgcgctgctggattatccggtgagtaaagtagtctgtgttggcagtaactatgccaaacatattaaagagatgggcagcgcagtgcccgaagagccagtgctgtttattaaaccagaaacggcactgtgcgatctgcggcagccattggcgatcccatccgatttcggttcagttcatcatgaagtcgaactggcggtgttgattggcgcgacactgcgtcaggctacggaagagcatgtccgcaaagccattgccggttatggcgtggcgctcgatctgacattgcgtgatgttcagggaaaaatgaagaaagccgggcagccgtgggaaaaggctaaagcgtttgataactcttgtccgctttccgggtttattcccgcggcggaatttaccggcgacccgcaaaatacaacgctgagcctgagcgtaaacggcgaacaacgccagcaaggtacgactgcggacatgatccataaaatcgttccgctgatcgcttatatgagcaagttttttaccctcaaggccggtgacgttgtgttgacaggcacgcctgatggcgtcggcccgttgcaaagcggtgatgagctgacagtcactttcgatgggcattctttgacaactcgcgttttgtaa

SEQ ID NO: 6955 - DNA, 993 bp, Escherichia coli
atgaaaataaagaacattctactcaccctttgcacctcactcctgcttaccaacgttgctgcacacgccaaagaagtcaaaataggtatggcgattgatgatctccgtcttgaacgctggcaaaaagatcgagatatctttgtgaaaaaggcagaatctctcggcgcgaaagtatttgtacagtctgcaaatggcaatgaagaaacacaaatgtcgcagattgaaaacatgataaaccggggtgtcgatgttcttgtcattattccgtataacggtcaggtattaagtaacgttgtaaaagaagccaaacaagaaggcattaaagtattagcttacgaccgtatgattaacgatgcggatatcgatttttatatttctttcgataacgaaaaagtcggtgaactgcaggcaaaagccctggtcgatattgttccgcaaggtaattacttcctgatgggcggctcgccggtagataacaacgccaagctgttccgcgccggacaaatgaaagtgttaaaaccttacgttgattccggaaaaattaaagtcgttggtgaccaatgggttgatggctggttaccggaaaacgcattgaaaattatggaaaacgcgctaaccgccaataataacaaaattgatgctgtagttgcctcaaacgatgccaccgcaggtggggcaattcaggcattaagcgcgcaaggtttatcagggaaagtagcaatctccggccaggatgcggatctcgcaggtattaaacgtattgctgccggtacgcaaactatgacggtgtataaacctattacgttgttggcaaatactgccgcagaaattgccgttgagttgggcaatggtcaggaaccaaaagcagataccacactgaataatggcctgaaagatgtcccctcccgcctcctgacaccgatcgatgtgaataaaaacaacatcaaagatacggtaattaaagacggattccacaaagagagcgagctgtaa

SEQ ID NO: 6956 - DNA, 600 bp, Escherichia coli
atgctttcgctgcttttaccctctaccattaggctaattgcgacgagaaagggacgacctatgaatactaacgtttttcgactgctcctgctgggaagcctgttcagccttagcgcctgtgtgcagcaaagtgaagtgcgacagatgaaacacagcgtcagcacgctgaaccaggagatgacgcaactcaatcaagaaacagtcaaaatcactcagcaaaacaggctgaatgcaaaatccagcagtggggtttaccttctgcctggagcgaaaacaccggcaagactggaaagccagatcggtactttacgtatgtcgctggtgaatattacgcctgatgcagatggcaccacccttacactacgtattcagggtgagtcgaatgatcccttgcccgcattcagcggaactgttgaatatgggcaaattcagggaacaatagacaactttcaggaaatcaatgtgcagaatcaattgattaatgcccctgccagcgtcctcgcccccagcgatgttgatattccgttacagttaaaggggatttctgtggatcagttaggctttgtacgtatccacgacattcaacctgttatgcagtaa

SEQ ID NO: 6957 - DNA, 1122 bp, Escherichia coli
atgcgttttgttgatgaatatcgcgcgccggaacaggtgatgcagttaattgagcatctgcgcgaacgtgcttcacatctctcttacaccgccgaacgccctctgcggattatggaagtgtgtggcggtcatacccacgctatctttaaattcggcctcgaccagttactgccggaaaacgttgagtttatccacggtccggggtgcccggtgtgcgtactgccgatgggtagaatcgacacctgcgtggagattgccagccatccggaagtcatcttctgtacctttggcgacgccatgcgcgtgccggggaaacagggatcgctgttgcaggcaaaagcacgcggtgccgatgtgcgcatcgtttactcgccgatggatgcgttgaaactggcgcaggagaatccaacccgcaaagtggtgttcttcggcttaggttttgaaaccactatgccgaccaccgctatcactctgcaacaggcgaaagcgcgtgatgtgcagaatttttacttcttctgccagcacattacgcttatcccgacgttgcgcagtttgctggaacagccggataacggtatcgatgcgttcctcgcgccgggtcacgtcagtatggttatcggcaccgacgcctataattttatcgccagcgattttcatcgtccgctggtggttgctggattcgaaccccttgatctactacaaggcgtggtcatgctggtgcagcagaaaatagcggcccacagcaaggtagagaatcagtatcgtcgagtggtaccggatgccggtaacctgctggcgcaacaggcgattgccgatgtgttctgtgtcaacggcgacagcgaatggcgcggcttaggcgtgattgaatcttctggcgtgcacctgacgccggattatcaacgattcgatgccgaagcacatttccgcccggcaccgcagcaggtctgcgatgacccgcgcgcgcgttgtggtgaggtattaacgggcaaatgtaagccgcatcaatgcccgctgtttggtaacacctgtaatcctcaaaccgcgtttggtgcgctgatggtttcctccgaaggagcgtgcgccgcgtggtatcagtatcgtcagcaggagagtgaagcgtga

SEQ ID NO: 6958 - DNA, 1167 bp, Escherichia coli
atgaaaatcaccatttccggtactggctatgtaggcttgtcaaacgggcttctaatcgcacaaaatcatgaggttgtggcattagatattttaccgtcacgcgttgctatgctgaatgatcggatatctcctattgttgataaggaaattcagcagtttttgcaatcagataaaatacactttaatgccacattagataaaaatgaagcctaccgggatgctgattatgtcatcatcgccactccaaccgactatgatcctaaaactaattatttcaatacatccagtgtagaatcagtaattaaagacgtagttgagataaatccttatgcggttatggtcatcaaatcaacggttcccgttggttttaccgcagcgatgcataagaaatatcgcactgaaaatattatattctccccggaatttctccgtgagggtaaagccctttacgataatctccatccttcacgtattgtcatcggtgagcgttcagaacgcgcagaacgtttcgctgctctgttacaggaaggcgcgattaagcaaaatatcccgatgctgtttaccgactccactgaagcagaagcgattaaactttttgcaaacacctacctggcgatgcgcgtggcgtactttaacgaactggatagctatgcagaaagtttaggtctgaattcccgtcaaataatcgaaggcgtttgtctcgacccacgtattggcaaccattacaacaatccgtcgtttggttatggtggttattgtctgccgaaagataccaagcagttactggcgaactaccagtctgtgccgaataacctgatctcggcaattgtcgatgctaaccgcacgcgtaaagattttattgccgatgccattttgtcacgcaagccgcaagtggtgggtatttatcgtctgattatgaagagcggttcagataacttccgtgcgtcttctattcaggggattatgaaacgtatcaaggcgaaaggtgttgaagtgatcatctacgagccagtgatgaaagaagactcattcttcaactctcgcctggaacgtgatctcgccaccttcaaacaacaagccgacgtcattatctctaaccgaatggcagaagagcttaaggatgtggcagataaggtatacacccgcgatctctttggcagcgactaa

SEQ ID NO: 6959 - DNA, 3150 bp, Escherichia coli
atgcctaatttctttatcgatcgcccgatttttgcgtgggtgatcgccattatcatcatgttggcaggggggctggcgatcctcaaactgccggtggcgcaatatcctacgattgcaccgccggcagtaacgatctccgcctcctaccccggcgctgatgcgaaaacagtgcaggacacggtgacacaggttatcgaacagaatatgaacggtatcgataacctgatgtacatgtcctctaacagtgactccacgggtaccgtgcagatcaccctgacctttgagtctggtactgatgcggatatcgcgcaggttcaggtgcagaacaaactgcagctggcgatgccgttgctgccgcaagaagttcagcagcaaggggtgagcgttgagaaatcatccagcagcttcctgatggttgtcggcgttatcaacaccgatggcaccatgacgcaggaggatatctccgactacgtggcggcgaatatgaaagatgccatcagccgtacgtcgggcgtgggtgatgttcagttgttcggttcacagtacgcgatgcgtatctggatgaacccgaatgagctgaacaaattccagctaacgccggttgatgtcattaccgccatcaaagcgcagaacgcccaggttgcggcgggtcagctcggtggtacgccgccggtgaaaggccaacagcttaacgcctctattattgctcagacgcgtctgacctctactgaagagttcggcaaaatcctgctgaaagtgaatcaggatggttcccgcgtgctgctgcgtgacgtcgcgaagattgagctgggtggtgagaactacgacatcatcgcagagtttaacggccaaccggcttccggtctggggatcaagctggcgaccggtgcaaacgcgctggataccgctgcggcaatccgtgctgaactggcgaagatggaaccgttcttcccgtcgggtctgaaaattgtttacccatacgacaccacgccgttcgtgaaaatctctattcacgaagtggttaaaacgctggtcgaagcgatcatcctcgtgttcctggttatgtatctgttcctgcagaacttccgcgcgacgttgattccgaccattgccgtaccggtggtattgctcgggacctttgccgtccttgccgcctttggcttctcgataaacacgctaacaatgttcgggatggtgctcgccatcggcctgttggtggatgacgccatcgttgtggtagaaaacgttgagcgtgttatggcggaagaaggtttgccgccaaaagaagctacccgtaagtcgatggggcagattcagggcgctctggtcggtatcgcgatggtactgtcggcggtattcgtaccgatggccttctttggcggttctactggtgctatctatcgtcagttctctattaccattgtttcagcaatggcgctgtcggtactggtggcgttgatcctgactccagctctttgtgccaccatgctgaaaccgattgccaaaggcgatcacggggaaggtaaaaaaggcttcttcggctggtttaaccgcatgttcgagaagagcacgcaccactacaccgacagcgtaggcggtattctgcgcagtacggggcgttacctggtgctgtatctgatcatcgtggtcggcatggcctatctgttcgtgcgtctgccaagctccttcttgccagatgaggaccagggcgtgtttatgaccatggttcagctgccagcaggtgcaacgcaggaacgtacacagaaagtgctcaatgaggtaacgcattactatctgaccaaagaaaagaacaacgttgagtcggtgttcgccgttaacggcttcggctttgcgggacgtggtcagaataccggtattgcgttcgtttccttgaaggactgggccgatcgtccgggcgaagaaaacaaagttgaagcgattaccatgcgtgcaacacgcgctttctcgcaaatcaaagatgcgatggttttcgcctttaacctgcccgcaatcgtggaactgggtactgcaaccggctttgactttgagctgattgaccaggctggccttggtcacgaaaaactgactcaggcgcgtaaccagttgcttgcagaagcagcgaagcaccctgatatgttgaccagcgtacgtccaaacggtctggaagataccccgcagtttaagattgatatcgaccaggaaaaagcgcaggcgctgggtgtttctatcaacgacattaacaccactctgggcgctgcatggggcggcagctatgtgaacgactttatcgaccgcggtcgtgtgaagaaagtttatgtcatgtcagaagcgaaataccgtatgctgccggatgatatcggcgactggtatgttcgtgctgctgatggtcagatggtgccattctcggcgttctcctcttctcgttgggagtacggttcgccgcgtctggaacgttacaacggcctgccatccatggaaatcttaggccaggcggcaccgggtaaaagtaccggtgaagcaatggagctgatggaacaactggcgagcaaactgcctaccggtgttggctatgactggacggggatgtcctatcaggaacgtctctccggcaaccaggcaccttcactgtacgcgatttcgttgattgtcgtgttcctgtgtctggcggcgctgtacgagagctggtcgattccgttctccgttatgctggtcgttccgctgggggttatcggtgcgttgctggctgccaccttccgtggcctgaccaatgacgtttacttccaggtaggcctgctcacaaccattgggttgtcggcgaagaacgcgatccttatcgtcgaattcgccaaagacttgatggataaagaaggtaaaggtctgattgaagcgacgcttgatgcggtgcggatgcgtttacgtccgatcctgatgacctcgctggcgtttatcctcggcgttatgccgctggttatcagtactggtgctggttccggcgcgcagaacgcagtaggtaccggtgtaatgggcgggatggtgaccgcaacggtactggcaatcttcttcgttccggtattctttgtggtggttcgccgccgctttagccgcaagaatgaagatatcgagcacagccatactgtcgatcatcattga

SEQ ID NO: 6960 - DNA, 2559 bp, Escherichia coli
atgcaaaggaaaactctattgtcggcctgtattgcattagctctgagtggtcagggttgggcggcagatatcacagaggtagaaaccaccacaggtgaaaagaaaaataccaatgtgacttgtccggcagacccaggaaaactcagtccggaagagcttaaacgcttaccctctgaatgctctcctttagtcgaacaaaacctgatgccatggctttccacaggcgctgctgcgttaatcacggccttagccgtagtggaactaaacgacgatgatgatcatcatcatcgcaacaattctccactcccaccgacaccccctgatgatgaatcagacgacactccagttcccccaactcctggcggagatgagataataccggacgatccggatgatacgcctacacctcccaaaccggtttcgtttaataatgacgttattctcgataaaacagaaaaaacgttaactattcgcgattcagtttttacttataccgagaatgctgacgggactatatctctgcaagatagcaatggtcgtaaggcaacgattaatctttggcagattgatgaagcgaataacactgttgcccttgaaggggtgagcgcagatggcgcaacgaagtggcaatataatcacaacggtgagcttgttattacgggtgataatgccacagtaaacaacaatggcaaaaccaccgttgacggtaaagattccaccggtacggaaatcaacggtaataacgggaaagtgattcaggacggcgatctggatgtcagcggcggcggtcacggtattgatatcaccggtgacagcgcgacggtggataacaagggcaccatgaccgtcaccgatccggagtccatgggtatccagatcgacggtgacaaggccatcgtcaataacgaaggcgagagcaccatcaccaacggtggcaccggcacccagattaatggtgatgacgccacggcaaacaacaacggcaaaaccaccgttgacggcaaggattccaccggtacggaaatcaacggtaataacggaaaagttattcaggacggcgatctggatgtcagcggcggcggtcacggtattgatatcaccggcgacagcgcaacggtggataacaagggcaccatgaccgtcaccgatccggagtccatcggtatccaggttgacggcgaccaggcggttgttaacaacgaaggcgagagcgccatcaccaacggtggcaccggcacgcagattaacggtgatgacgccacggcaaacaacaacggcaaaaccaccgttgacggcaaggattccaccggtacggaaattgctggcaataacgggaaggtgattcaggacggcgatctggatgtcagcggcggcggtcacggtattgatatcaccggcgacagcgcaacggtggataacaagggcaccatgaccgtcaccgatccggagtccatcggtatccagattgacggcgaccaggccatcgtcaataacgaaggcgagagcactatcaccaatggcggcaccggcactcagatcaacggtaacgacgccaccgcgaataacagtggaaaaaccactgttgatggaaaagattccacgggtaccaaaatcgcgggcaatatcggcattgtaaatctggatggtagcctgactgttacaggcggtgcgcatggtgttgagaacattggtgacaacggcacggttaacaacaaaggagatattgttgtttccgatactggatcgattggcgtgctcatcaacggtgagggggcaacagtatccaatacgggtgatgttaacgttagcaatgaagcgacagggttcagcatcacaaccaacagtgggaaggtttcgctggcaggcagtatgcaggttggcgatttctcgaccggggtagatcttaatggcaacaataacagcgtgacgctggcggcaaaagatctaaaagtggtcgggcagaaagcgacgggcataaacgtttctggcgatgcgaatacagtgaatatcactggtaacgttctggttgataaggataaaaccgcagacaatgcggcggaatatttcttcgatccatccgtgggtatcaacgtttacggcagtgataataacgtgacgctggatggaaagttaactgttgtatcagacagtgaggttacttctcgtcagagtaatttatttgatggcagcgcagagaaaacgtcaggtctggttgtgattggcgatggcaataccgttaatatgaatggtggacttgaactgattggagagaaaaacgcgcttgcagatgggtcgcaggttacttccttgcgcacaggatatagttataccagcgttattgtcgttagtggtgagtcgtcggtatatctgaatggagatacgacaatcagcggagaattccctctggggtttgccggggttattcgggtacaggataaagctttgctggaaattggcagtggcgctacgctaacaatgcaggatattgacagttttgaacatcatgggacaagaaccctggatttgcccctatatttccagacatctgttatcacttaa

SEQ ID NO: 6961 - DNA, 237 bp, Escherichia coli
atgagcactatcgaagaacgcgttaagaaaattatcggcgaacagctgggcgttaagcaggaagaagttaccaacaatgcttctttcgttgaagacctgggcgcggattctcttgacaccgttgagctggtaatggctctggaagaagagtttgatactgagattccggacgaagaagctgagaaaatcaccaccgttcaggctgccattgattacatcaacggccaccaggcgtaa

SEQ ID NO: 6962 - DNA, 585 bp, Escherichia coli
atgaataaagttacaaaaacagctattgcgggcttacttgcgcttttcgcaggtaatgccgctgcaaccgatggtgaaatagtttttgatggcgagattttaaaatccgcttgtgaaatcaatgactctgataagaaaattgaagttgctcttggtcactataatgccgaacagtttcgtaatattggcgagcgtagcccaaaaattccattcactattcctttagttaactgcccaatgactgggtgggagcacgataacggcaacgttgaagcgtctttccgtctatggctggaaacgcgagataatggcaccgtccctaacttccctaatctggcaaaagtaggctcttttgctggcatagcggcaacaggtgtgggtatccgtattgacgatgcggaaagcggaaacattatgccactgaatgctatgggcaatgataacacggtttatcagatcccggcggaatccaatggtattgtcaatgttgacctcatcgcttactacgtatcaaccgtagttccatcagaaatcaccccaggggaagcagacgctatcgttaacgtaacgctggattaccgttaa

SEQ ID NO: 6963 - DNA, 696 bp, Escherichia coli
atgtcaaaacgaacattcgcggtgatattaaccttgttgtgtagcttctgtattggccaggcgcttgcaggaggaatcgttttacagcgaacgcgagtgatctatgatgccagccgcaaagaggctgcgttacctgtcgcaaacaaaggcgcagaaacgccttatttactgcaatcatgggtagataatatagatggtaaaagccgtgccccatttattataaccccaccgctatttcgtcttgaggctggcgatgactcatcactgcgaattattaaaacagctgataacctgcctgaaaataaagagtcgctgttctacattaatgttcgtgccattccagcaaagaaaaaatcagatgatgttaatgctaacgagttgacgctggtatttaaaacacggatcaaaatgttttatcgccccgcacacctgaagggacgggtaaacgatgcgtggaaatcactggaatttaaacgtagtgaccattcactcaatatatataacccaactgaatattacgtcgtatttgccggactggcagtcgataaaaccgatctcacaagcaaaattgaatatatcgcgcccggagaacataaacagttaccacttcctgcatctggcggaaagaacgtgaaatgggctgcgatcaatgattatggcggcagttccgggacagaaactcgtccactgcaataa

SEQ ID NO: 6964 - DNA, 1083 bp, Escherichia coli
atgaagccttctatcgttgccaaactggaagccctgcatgaacgccatgaagaagttcaggcgttgctgggtgacgcgcaaactatcgccgaccaggaacgttttcgcgcattatcacgcgaatatgcgcagttaagtgatgtttcgcgctgttttaccgactggcaacaggttcaggaagatatcgaaaccgcacagatgatgctcgatgatcctgaaatgcgtgagatggcgcaggatgaactgcgcgaagctaaagaaaaaagcgagcaactggaacagcaattacaggttctgttactgccaaaagatcctgatgacgaacgtaacgccttcctcgaagtccgagccggaaccggcggcgacgaagcggcgctgttcgcgggcgatctgttccgtatgtacagccgttatgccgaagcccgccgctggcgggtagaaatcatgagcgccagcgagggtgaacatggtggttataaagagatcatcgccaaaattagcggtgatggtgtgtatggtcgtctgaaatttgaatccggcggtcatcgcgtgcaacgtgttcctgctacggaatcgcagggtcgtattcatacttctgcttgtaccgttgcggtaatgccagaactgcctgacgcagaactgccggacatcaacccagcagatttacgcattgatactttccgctcgtcaggggcgggtggtcagcacgttaacaccaccgattcggcaattcgtattactcacttgccgaccgggattgttgttgaatgtcaggacgaacgttcacaacataaaaacaaagctaaagcactttctgttctcggtgctcgcatccacgctgctgaaatggcaaaacgccaacaggccgaagcgtctacccgtcgtaacctgctggggagtggcgatcgcagcgaccgtaaccgtacttacaacttcccgcaggggcgcgttaccgatcaccgcatcaacctgacgctctaccgcctggatgaagtgatggaaggtaagctggatatgctgattgaaccgattatccaggaacatcaggccgaccaactggcggcgttgtccgagcaggaataa

SEQ ID NO: 6965 - DNA, 456 bp, Escherichia coli
atgtcaacgccggataatcgttctgttaatttttttagcttgtttcgccggggacagcattactcaaagacgtggccgctggaaaaacgccttgccccggtctttgtcgaaaatcgcgttatcaagatgacgcgttatgcgatccgttttatgccgccgatcgccgtatttactctctgctggcagattgccctgggcggtcagcttgggccggcagttgccactgccctgttcgccttaagtttacccatgcagggattgtggtggctgggcaagcgttctgtcacgccattaccccctgcaatccttaactggttttatgaagttcgcggtaaattgcaggagtctggacaggtgttggcacccgttgaaggcaagcctgattaccaggcattagctgacacgcttaagcgcgccttcaaacaactggataaaactttccttgatgatttgtaa

SEQ ID NO: 6966 - DNA, 2298 bp, Escherichia coli
atgaaatggctatgttcagtaggaatcgcggtgagtctggccctgcagccagcactggcggatgatttattcggcaaccatccattaacgcccgaagcgcgggatgcgttcgtcaccgaactgcttaagaaaatgacagttgatgagaaaattggtcagctgcgcttaatcagcgtcggcccggataacccgaaagaggcgatccgcgagatgatcaaagacggtcaggttggggcgattttcaacaccgtaacccgtcaggatatccgcgccatgcaggatcaggtgatggaattaagccgcctgaaaattcctcttttctttgcttacgacgtgctgcacggtcagcgcacggtgttcccgattagcctcggtctggcctcgtcttttaacctcgatgcagtgaaaacggtcggacgtgtctctgcttatgaagcggcagatgatggcctgaatatgacctgggcaccgatggtcgatgtctcgcgcgatccgcgctggggacgtgcttccgaaggttttggcgaagatacgtatctcacctcaacaatgggtaaaaccatggtggaagcgatgcagggtaaaagcccggcagatcgctactcggtgatgaccagcgtcaaacactttgccgcatacggcgcggtagaaggcggtaaagagtacaacaccgtcgatatgagtccgcagcgcctgtttaatgattatatgccgccgtacaaagcggggctggacgcaggcagcggcgcggtgatggtggcgctgaactcgctgaacggcacgccagccacctccgattcctggctgctgaaagatgttctgcgcgaccagtggggctttaaaggcatcaccgtttccgatcacggtgcaatcaaagagctgattaaacatggcacggcggcagacccggaagatgcggtgcgcgtggcgctgaaatccggaatcaacatgagcatgagcgacgagtactactcgaagtatctgcctgggttgattaaatccggcaaagtgacgatggcagagctggacgatgctgcccgccatgtactgaacgttaaatatgatatggggttgtttaacgacccatacagccatttggggccgaaagagtctgacccggtggataccaatgccgaaagccgcctgcaccgtaaagaagcgcgtgaagtggcgcgcgaaagcttggtgttgctgaaaaaccgtctcgaaacgttaccgctgaaaaaatcggccaccattgcggtggttgggccactggcggacagtaaacgtgacgtgatgggcagctggtccgcagccggtgttgccgatcaatccgtgaccgtactgaccgggattaaaaatgccgtcggtgaaaacggtaaagtgctgtatgccaaaggggcgaacgttaccagtgacaaaggcattatcgatttcctgaatcagtatgaagaagcggtcaaagtcgatccgcgttcgccgcaagagatgattgatgaagcggtgcagacggcgaaacaatctgatgtggtggtggctgtagtcggtgaagcacaggggatggcgcacgaagcctccagccggaccgatatcactattccgcaaagccaacgtgacttgattgcggcgctgaaagccaccggtaaaccgctggtgctggtgctgatgaacgggcgtccgctggcgctggtgaaagaagatcagcaggctgatgcgattctggaaacctggtttgcggggactgaaggcggtaatgcaattgccgatgtattgtttggcgattacaacccgtccggcaagctgccaatgtccttcccgcgttctgtcgggcagatcccggtgtactacagccatctgaataccggtcgcccgtataatgccgacaagccgaacaaatacacttcgcgttattttgatgaagctaacggggcgttgtatccgttcggctatgggctgagctacaccactttcaccgtctctgatgtgaaactttctgcgccgaccatgaagcgtgacggcaaagtgactgccagcgtgcaggtgacgaacaccggtaagcgcgagggtgccacggtagtgcagatgtacttgcaggatgtgacggcttccatgagtcgccctgtgaaacagctgaaaggctttgagaaaatcaccctgaaaccgggcgaaactcagactgtcagcttcccgatcgatattgaggcgctgaagttctggaatcaacagatgaaatatgacgccgagcctggcaagttcaatgtctttatcggcactgattccgcacgcgttaagaaaggcgagtttgagttgctgtaa

SEQ ID NO: 6967 - DNA, 495 bp, Escherichia coli
atgaagaccaacaggagtctggtcgtcatagtgtcactaattaccgccacattactgctgactgcatgcgcccaacctgaacaatcatcattagctggcgactggttactgacccctaaagataaaaccagaggattaacgggtagcattgcggtaaatattgcacctttccggtgtaagacaaattgccgtggtgataacttacctgataatacccgccgctggcagttgtcaggcgggaacgaaaaagaacttacttatcttcataatatgtcagcacaagaaaaggtcggtttaaatcccggttggcaatgctacacctcattttttatgcgggtttgccagggcaagcccggcactcgaccgatagtcaatgaggattatgtcagcgaaagcggattttttggctcgatgatgcatgtcgggattattgagttacgacgctgccagtcagaaaattgccagcaagaattgaaagcgataaatacacattaa

SEQ ID NO: 6968 - DNA, 1113 bp, Escherichia coli
atggtaaatgttcgtcagcccagggatgtcgcacaaattctgctttcggtgctgtttttagccatcatgattgtggcatgtctgtggattgttcaaccctttattctcggctttgcatgggccggtacggtggttatcgccacctggccggtattgttacgtttgcaaaagatcatgtttggccgccgctctctcgccgttctggtgatgacgctgttattagtgatggtgtttatcatccctattgctttgctggttaacagtatcgtcgacggcagcggcccgctaattaaagccatttccagcggtgacatgacgttacccgatctggcgtggcttaataccattccggtgattggcgcgaagctgtatgcaggctggcacaacttgctggatatgggggggacggcgatcatggcgaaagtccgcccttatattggcaccaccaccacctggttcgttgggcaggcggcgcatatcgggcgctttatggtgcattgtgcgctgatgcttctcttcagtgccctgctgtactggcgcggtgaacaggtggcacaaggcattcgccattttgcaacccgtctggcaggcgttcgcggagatgccgccgtgctgctggcggcacaggctatccgcgcggtggcgctgggtgtggtggtgacggcgttagtacaggcagtgcttggcggtatcggcctcgccgtatccggcgtaccttatgcaacgttgctaacggtgttaatgatcctctcctgccttgtccagcttggcccgttgccggtactgattccggcgattatctggctctactggactggcgataccacctggggaacggtattgttagtgtggagcggtgtggttggcacgctggataacgtcatccgcccaatgttaattcgcatgggtgccgatttaccgctgatcctgattctctctggcgttattggtggtttgattgctttcgggatgatcggtctgtttattggtccggttctgttagccgtttcctggcgtctgtttgccgcgtgggtggaagaagtcccgccgccgacggaccaaccggaagaaattctcgaagaacttggcgaaatcgagaaaccgaataagtaa

SEQ ID NO: 6969 - DNA, 504 bp, Escherichia coli
atgaccggtatgacgaatgtaacaaagctggccagcgagccgtcaggccaggaatttctggtatttacccttggtgatgaagagtacggtattgatatcctgaaagtgcaggagatccgtggctacgatcaggtaacacggattgcgaacacgccagcgtttatcaaaggcgtcacgaatctgcgcggcgttattgtgccgattgttgacttacgaattaagttcagccaggtggatgtggactataacgacaacacggtagttatcgtcctgaatctcggacagcgggtggtcggcatcgtggttgacggcgtctcagacgtgctttcattgacggcggagcaaattcgtccggcaccggaatttgccgtgacgctttcaacagaatatctcactggactgggcgcactgggcgaccggatgttgattctggtgaacatcgaaaaactgctgaacagcgaagagatggcgctgttagatagcgcggcgtcagaagtggcgtaa

SEQ ID NO: 6970 - DNA, 1443 bp, Escherichia coli
atggtcagtaagccatttcagcgcccgttttcgctggcaacccgcctgaccttttttatcagcctggccaccatcgcggcgtttttcgcctttgcatggatcatgatccactcagtaaaagttcattttgccgagcaggatattaatgatttaaaagagattagcgccacccttgaacgggtactaaatcaccctgacgaaacgcaagcccgacgcttaatgacgctggaagatatcgtcagtggttattccaatgtgttgatttccctggcagatagtcagggtaaaacggtgtatcactcccccggtgcgccggatatccgcgagtttacgcgtgacgccatacccgataaagacgctcagggtggcgaggtgtatctcctttccggcccgacgatgatgatgccaggccacggtcacgggcatatggaacacagcaactggcggatgattaacttgccggttggcccgttggtggacggcaaaccgatttatacgctctacatcgcgctttcgatcgattttcatcttcattacataaatgatttgatgaataaacttattatgaccgcatcggtaatcagcatcctgatcgtctttatcgtactgttggcggtacataaaggtcacgcgccgatccgcagcgtcagccgtcaaatccagaatattacctcgaaagatctcgacgttcgcctcgacccgcagaccgtgcccattgagctggaacagctggtactgtcgttcaaccatatgatcgagcgtattgaggatgtctttacccgccagtccaatttctcagcggatatcgctcacgaaattcgcacaccaattacgaatctcataacgcaaaccgaaatcgccctcagccagtcgcgcagccagaaggagctggaagatgtgctctactctaatctcgaagagctgacgcgaatggcgaaaatggtcagcgatatgctgtttctcgctcaggccgataacaaccagctaatccccgaaaagaaaatgctcaacctggcggatgaagtcggcaaagtgttcgattttttcgaggcgttagcggaagatcgcggcgtggagttgcggtttgttggcgacaagtgtcaggtcgcgggcgatccgctgatgctgcgtcgggcgctaagcaacctgctttcgaacgccctgcgttatacgccaaccggagagacaattgtagtgcgctgtcagacggtcgatcacctggtgcaagttatcgtcgaaaaccccggtacgcccattgcgcccgagcacttaccgcgattgtttgaccgtttctatcgcgttgacccctcccgccagcgaaaaggtgaaggtagcggtattggcctggcgatagtgaaatcgattgttgtcgcgcataaaggcacggttgcggtaacgtcggatgcgcgggggacaaggtttgttatcacattacccgcttaa

SEQ ID NO: 6971 - DNA, 891 bp, Escherichia coli
atgcgtaagttcattttcgtattgctgacactgcttttggtcagccctttttcctttgcgatgaaaggtattatctggcaaccacaaaaccgagatagtcaggttaccgatacccagtggcaggggctgatgagtcagttacgtttgcaaggcttcgatacccttgttttgcaatggacccgttacggcgatgcatttacccagccagaacagcgcacgttattgtttaagcgggccgcagctgcgcaacaggctggtctgaagcttattgtcgggctgaacgccgatccggaattttttatgcaccagaaacagtcgtccgcagcgctggaaagctatcttaatcgcctgctggctgccgatctccagcaagccagattatggagcgccgcgcctggcataacgccggatggctggtacatcagcgcggaaattgacgacctgaactggcgcagcgaagccgcccgtcagcctttgctaacatggttaaacaacgcgcagcggctgattagcgatgtttcagcaaaaccggtttatatcagtagttttttcgccggaaacatgtcgcccgatggctatcgccaactgctggaacacgttaaagcaaccggcgttaatgtctgggtacaggatggcagcggcgtggataaactgaccgctgaacagcgtgaacgttatttacaggccagcgccgattgccaaagtcccgcccctgccagcggcgttgtttatgaactttttgtcgccggcaaaggcaaaacctttacagcgaaaccgaaaccggacgcagaaattgcctcgctgttagcgaaacgttcctcttgcggtaaagacactctctatttctctctgcgctatttgcccgtcgcgcacggcattctcgagtattaa

SEQ ID NO: 6972 - DNA, 1956 bp, Escherichia coli
atggcaatggtggcagccgttgtcctggtgttcgtttttattttttgcaccgttttgctgttccatctggtccagcagaatcgctataacacggctacgcaactggaaagcattgctcgctctgtccgcgaacccttatcttcagctattttgaaaggcgatattcccgaagcggaagctattcttgccagcattaaaccggcaggcgtggtcagccgtgccgatgtagtgctgcctaaccagttccaggcgctgcgtaaaagttttattccagagcgcccggtgccggtaatggttactcgcctgtttgagctaccggttcaaatctcgctgggcgtttactcgctcgaacgtccggcaaacccgcagccaattgcctatctggtactacaggcggattccttccgtatgtataagttcgtgatgagcaccctctcaacgttagtgaccatttacttacttttgtcgcttatcctgaccgtcgccatcagctggtgcattaaccgcctgattttgcatccgttacgcaatattgctcgcgaacttaacgccatcccagccaaggagcttgttggtcaccaactggcattaccgcgtctgcatcaggacgatgaaatcggtatgttggtgcgcagttacaacctcaaccagcaattgctgcagcgccattatgaagaacagaacgaaaatgcgatgcgcttcccggtgtcggatttgccgaacaaagccttgctgatggagatgctggagcaggttgtcgcgcgtaaacaaaccaccgcgctgatgatcatcacctgtgaaaccctgcgtgatactgcgggcgtgctgaaagaggcgcaacgagaaattctgctgctgacgctggtggaaaaactcaaatcggtactgtcgccacgtatgatcctcgcgcagattagcggttatgactttgctgtcattgccaacggtgtacaggaaccgtggcacgcaatcaccttaggtcagcaagtgctcactatcatgagcgagcgcctgccgattgaacgtattcaactccgtccgcactgtagcattggcgtggcgatgttctacggcgatctcaccgccgaacagctttacagtcgcgctatttctgcggcatttaccgctcgccataaaggcaagaatcagattcagttctttgatccgcagcagatggaagccgcccagaagcggttgacggaagagagcgatatccttaatgcactggaaaatcatcagtttgctatttggttacagccacaggtcgagatgaccagcggtaaactggtcagtgcggaagtgttactgcgtatccagcaaccggatggcagttgggacctgccggatggcttaatcgatcgcattgagtgctgtgggctgatggttaccgtcggtcactgggtgctggaagagtcctgtcgattgcttgcagcctggcaagagcgcggcattatgctgcccttgtcggtaaacctctctgcgctgcaactgatgcacccgaatatggtggcggatatgctggaactgttaacccgctatcgcattcagccgggaacactgattctggaagtgacagaaagccgacgtattgacgaccctcatgctgcggtggcaatcctccgtccgctgcgcaatgccggagttcgggtggcgctggatgatttcggcatgggctacgcagggctgcgtcagctgcagcatatgaaatcgttgccaatcgacgtactgaaaatcgacaaaatgtttgttgaaggcttgccgggagatagcagcatgattgctgcaattatcatgctggcgcagagcctgaacttacaaatgattgccgaaggcgtggagactgaagcacaacgcgactggctggcaaaagcgggcgttggtattgcccagggcttcctttttgctcgcccactccctattgaaatcttcgaagagagttacctggaagaaaagtag

SEQ ID NO: 6973 - DNA, 684 bp, Escherichia coli
atgacggcaattgccccggttattaccattgatggcccaagcggtgcagggaaaggcaccttgtgtaaggctatggcggaagcgttgcaatggcatctgctggactcgggtgcaatttatcgcgtactggcattggcggcattacatcaccatgttgatgttgcgtcggaagatgcgctggtaccgctggcatcccatctggatgtacgttttgtgtcgaccaatggcaatctggaagtgatcctcgaaggggaagatgtcagcggcgaaattcgtactcaggaagtggcgaatgcagcttcacaagtcgcggcattcccacgcgttcgtgaagcattattgcgtcgccaacgcgcgtttcgcgaattaccaggtctgattgccgatggccgcgacatgggaacggtggtattccctgatgcaccagtgaaaattttccttgacgcctcctcggaagaacgtgcgcatcgccgcatgctacagttgcaggagaagggctttagtgttaactttgagcgccttttggccgagatcaaagaacgcgacgaccgcgatcgtaaccgagcggtagcgccactggttccggcagccgatgctttagtgttggattccaccaccttaagcattgagcaagtgattgaaaaagcgctacaatacgcgcgccagaaattggctctcgcataa

SEQ ID NO: 6974 - DNA, 1272 bp, Escherichia coli
atgcagcacaacacactatcgaaacacaatcagaaattgccgtttacacgctacgacttcggctgggttttattatgcataggcatggcgattggtgccggaaccgtgctgatgccagtacaaattggcttgaagggaatttgggtatttattaccgcagcgatcattgcttatcctgccacctgggtagtgcaggacatttatttaaaaaccctttctgaaagcgattcctgtaatgactacaccgatattatcagtcattacctggggaagaactggggaattttcctcggggttatctactttttgatgattatccacgggatttttatctactctctctccgtggttttcgacagcgcctcgtacctgaaaaccttcggtttaaccgatgccgatctttcacaatctctactttataaagtcgctattttcgccgtactggtggcgattgcgtctggtggtgaacgattactgtttaagatttccgggccaatggtggtggtcaaagtagggattattgtcgtgttcggttttgcgatgatcccgcactggaatttcgccaatataaccgccttcccgcaagcctccgtctttttccgcgatgtcttgcttaccattccattttgcttcttttctgcagtatttattcaggtacttaacccaatgaatattgcctatcgtaaacgggaagcggataaagtactggcaacccggctcgcgctgcgtacccaccgaattagttatatcacgctcatcgcggtgatcctgttttttgccttttcgtttaccttctcaattagccacgaagaagccgtttctgcctttgaacaaaatatctcagcactggcgctggccgcgcaggtgatccctgggcatatcattcatatcacctctacggtgcttaatatctttgccgtactgaccgcattctttggcatttatctcggtttccacgaggccattaaaggcattattctcaatctgttaagccgaattattgataccaagaaaattaactcacgcgtgctgactctggcgatctgcgcttttatcgtcattacgttgacgatttgggtttcgtttcgtgtatcggtgctggtgttctttcagttgggaagcccgttatatggtattgtgtcgtgcctcattccgtttttcctgatctataaagtcgcacaactggaaaaacttcgcggatttaaagcctggctgattctgctgtacggcattttgctatgcttgtcgccactgttgaagctgattgagtaa

SEQ ID NO: 6975 - DNA, 1257 bp, Escherichia coli
atgacccttttagcactcggtatcaaccataaaacggcacctgtatcgctgcgagaacgtgtatcgttttcgccggataagctcgatcaggcgcttgacagcctgcttgcgcagccgatggtgcagggcggcgtggtgctgtcgacgtgcaaccgcacggaactttatcttagcgttgaagagcaggacaacctgcaagaggcgttaatccgctggctttgcgattatcacaatcttaatgaagaagatctgcgtaaaagcctctactggcatcaggataacgacgcggttagccatttaatgcgtgttgccagcggcctggattcactggttctgggggagccgcagatcctcggtcaggttaaaaaagcgtttgccgattcgcaaaaaggtcatatgaaggccagcgaactggaacgcatgttccagaaatctttctctgtcgcgaaacgcgttcgcactgaaacagatatcggtgccagcgctgtgtctgtcgcttttgcggcttgtacgctggcgcggcagatctttgaatcgctctctacggtcacagtgttgctggtaggcgcgggcgaaactatcgagctggtggcgcgtcatctgcgcgaacacaaagtacagaagatgattatcgccaaccgcactcgcgaacgtgcccaaattctggcagatgaagtcggcgcggaagtgattgccctgagtgatatcgacgaacgtctgcgcgaagccgatatcatcatcagttccaccgccagcccgttaccgattatcgggaaaggcatggtggagcgcgcattaaaaagccgtcgcaaccaaccaatgctgttggtggatattgccgttccgcgcgatgttgagccggaagttggcaaactggcgaatgcttatctttatagcgttgatgatctgcaaagcatcatttcgcacaacctggcgcagcgtaaagccgcagcggttgaggcggaaactattgtcgctcaggaaaccagcgaatttatggcgtggctgcgagcacaaagcgccagcgaaaccattcgcgagtatcgcagccaggcagagcaagttcgcgatgagttaaccgccaaagcgttagcggcccttgagcagggcggcgacgcgcaagccattatgcaggatctggcatggaaactgactaaccgcttgatccatgcgccaacgaaatcacttcaacaggccgcccgtgacggggataacgaacgcctgaatattctgcgcgacagcctcgggctggagtag

SEQ ID NO: 6976 - DNA, 1758 bp, Escherichia coli
atggaaaattcacgcatccctggggaacatttttttaccaccagtgataatacagcgttgttttatcggcactggcccgctttacagcccggggcgaaaaaggtcatcgtcttatttcatcgcgggcatgaacattctggtcgtctacaacatctcgttgatgaactggcgatgccagatactgctttttatgcctgggatgcccgagggcatggaaaaagttcggggccgcgtggttatagcccatctcttgcgcgttcagtgcgggatgtcgatgaatttgtccgttttgctgccagcgacagccaggttggactggaagaggtggtagtgatcgcgcaaagcgtcggcgcagtgctggttgccacatggattcatgattatgcacctgcaattcgcgggctggtgctggcttctccggcctttaaggttaaattgtatgtgccgctggcacgtcctgcgctggcgttatggcatcgtctgcgtggtctgttttttattaattcctatgtgaaaggacgctatttgacccacgatcggcaacggggggcgagtttcaataatgatccgctgatcacacgggcgattgccgttaatatcttgctcgatctctacaaaacgtctgaacgtattattagagatgcggcggcgattacgctccccacgcaacttctgatatcaggcgatgactatgtggtgcatcgccaaccgcagattgatttttatcagagattacgtagccctctgaaagagctgcatctgctgccaggcttttatcacgacacgttgggtgaagagaacagggcgctggcatttgaaaaaatgcaaagctttattagtcgtttatatgctaacaaatcgcaaaaatttgattatcagcatgaagactgcacaggaccatcagcggatcgatggcggctactttctggtggacccgtgccattatcgccggttgatttagcgtatcgctttatgcgaaaggcgatgaaattgttcgggacgcactcttcgggcctgcatctcggaatgagcaccggctttgattcaggcagttcgctggattatgtctatcaaaatcaaccgcaaggtagtaacgcattcgggcgtttagtcgacaaaatctacctgaacagtgttggctggcgcggtattcgccagcgcaaaacccatttacaaatactgattaaacaagccgttgccgatctccacgccaaaggtttagccgtccgcgtggttgacattgccgcagggcatgggcgctatgtactggatgcgctggcaaacgagcctgccgtaagcgatattttgttacgtgattacagcgagttaaatgttgcacaggggcaagagatgattgctcaacggggaatgtctgggcgggtgcgttttgaacagggcgatgcgtttaacccggaggaactcagcgcgttaactccgcggcctacgctggcgattgtctctggcctgtatgagctttttcccgaaaatgagcaggtaaaaaactcactcgcaggtcttgccaatgccatcgaaccgggcggcattctcatctacaccgggcagccgtggcaccctcaactggagatgattgccggggtgttaaccagtcataaagatggtaaaccgtgggtaatgcgcgtgcgttcgcaaggggagatggattcactcgtgcgtgatgccggatttgataaatgcacacaacggattgatgagtggggtatttttacggtttcgatggcggtgcgtcgtgataactga

SEQ ID NO: 6977 - DNA, 984 bp, Escherichia coli
gtgttaaaaaaatgtctgcccctgctgttgctgtgcacagcgcccgttttcgctaaacccgttctgactgtttatacctacgattccttcgccgccgactgggggcctggtccggtggttaaaaaagcctttgaagccgactgtaattgcgaactgaaactggtggcgctggaagatggcgtttcgcttctcaaccgtctacggatggaaggcaaaaacagtaaagccgatgtggtgctggggctggataacaacctgttagacgccgccagtaaaaccggactgtttgccaaaagcggtgtggcagcggatgccgttaacgttcccggcggctggaataatgacactttcgtaccgtttgattatggctacttcgccttcgtttatgacaagaacaaactgaaaaacccgccacaaagcctgaaagaactggttgagagcgatcaaaactggcgggtgatttatcaggatccgcgcaccagtacaccggggctgggtctgttgctatggatgcaaaaagtctatggcgatgacgccccacaagcctggcagaaactggcgaagaaaacggtcacggtcaccaaaggctggagcgaagcctacggcctgtttttaaaaggtgaaagcgatctggtactgagttacaccacctctccggcttatcacattctcgaagagaagaaagataactacgccgccgcgaacttcagcgaaggtcactatctgcaagtggaagtcgccgcccgcaccgctgccagcaagcagccggagctggcgcaaaaattcctccagtttatggtttctccggctttccagaatgcgatcccaaccggcaactggatgtatccggtggcaaacgtcacgctgcctgccggttttgaaaaattgaccaaacccgcaaccacgttggagttcacgccagccgaagtggcggcacaacgtcaggcatggattagcgaatggcaacgcgccgtcagccgttaa

SEQ ID NO: 6978 - DNA, 1656 bp, Escherichia coli
atgccatctgctcgtctgcaacaacagttcatccgcctgtggcaatgctgcgagggtaaatcgcaggacacaacgctcaacgaactggcagcgttattgagctgctcgcgtcgtcatatgcgcaccctgctcaacaccatgcaggatcgcggctggctgacgtgggaagcggaagtcgggcgcggtaaacgctcgcgtctgacattcctctataccgggctggcgcttcagcaacagcgggcggaagacctgctggagcaggatcgtatcgatcaactggtgcagttggttggcgacaaagcgactgtgcggcaaatgctggtttctcatctgggccgcagcttccgccaggggcggcacatcctgcgcgtgctctactatcgtccgttgcgtaatctgctacctggcagcgcattgcgccgttccgaaacccatatcgcccggcaaatcttcagttcgctaacgcgcataaatgaggaaaatggggaactggaagcagacatcgcccaccactggcagcaaatttcaccgcttcactggcgtttctttttgcgtccaggagtccattttcaccatggtcgtgaactggaaatggacgatgtgatcgcctctttaaaacgaatcaatacgctgccgctctattcgcatattgctgacattgtgtcgccgacgccctggacgctggatatccatctcacgcaaccggaccgctggttaccgttactgctggggcaagttccggcgatgatcctgccgcgcgaatgggaaaccctcagtaactttgccagccatcccatcggcaccggtccgtatgcggtgattcgcaacagcaccaatcaactgaaaattcaggcattcgatgacttcttcggttaccgggcattaatcgacgaagttaacgtctgggttctgccggaaattgccgacgagccagccggagggctgatgctaaaaggtccacagggcgaggaaaaagagattgaaagccgcctggaggaaggttgctactatttactgttcgacagccgcacccatcgcggggcgaatcagcaagtcagggactgggtaagctatgtgctttctccaactaatctggtctatttcgctgaggaacagtaccagcaactgtggttcccggcttatggactgctcccccgttggcaccatgcccgcaccataaagagcgaaaaaccggctggcctggaaagcctcaccctaaccttttatcaggatcacagtgagcatcgggtgattgccgggatcatgcagcagattctggcaagtcaccaggtcacgctgaaaatcaaagagatcgactacgatcagtggcatacaggagagatcgaaagtgatatctggctaaacagcgccaactttaccctgccgctggacttctctgttttcgcacatttatgcgaagtgccactgctacaacattgcattcccattgactggcaagccgacgctgctcgctggcgcaatggcgagatgaatctggcgaactggtgccagcaactggtcgccagcaaagcgatggtgccattattgcaccactggctgatcattcaggggcaacgcagtatgcgcggcctgcgcatgaataccctcggctggttcgattttaaatcagcgtggtttgcgccaccggatccatga

SEQ ID NO: 6979 - DNA, 363 bp, Escherichia coli
atgtattatggcgcgctatccatccgggcagaggcctggctgattgtttcccccgaagtcaccaagatcatggccaaagaacaaacggaccgtacgacattagatctgttcgcgcacgagcgtcgaccgggacgaccgaaaactaatccgctttcgcgcgatgaacagctgcgtattaataaacgcaaccagctaaaacgcgacaaagtacgtggccttaagcgtgtcgaactgaagctgaacgcggaagctgtcgaggcgctgaacgagctggcggagtcgcgcaatatgagccgtagcgaactgatcgaagagatgttaatgcagcaactggcggcgctgcgtagtcagggcatcgtttaa

SEQ ID NO: 6980 - DNA, 765 bp, Escherichia coli
atgaaattgaatatccgcgcgcaaactgcacaaaaccagcacaataattctcccatcgttcttgtccacggtctgtttggcagcctcgacaaccttggcgtactggctcgcgatctggtaaacgatcacaatatcatccaggttgatatgcgtaaccacggtctttcaccgagagatccggtaatgaattacccggcgatggcgcaggatcttgttgatactctggatgcacagcagatcgacaaagcaacatttatcggtcactccatgggcggtaaagcggtaatggcacttactgcactagcctccgatcgcatcgataaactggtggcgatcgatatcgcgccggtcgactatcacgtacgccgtcatgatgagatttttgcggctatcaacgcggtcagtgaatcggacgcacaaactcgccagcaagcagcagcaataatgcgccagcatcttaatgaagaaggggtgattcagtttctgctgaaatcttttgttgacggggagtggcgctttaacgtgccggtattgtgggatcagtatccgcatattgtaggttgggagaaaatcccggcatgggatcaccctgccctgtttatccctggcggcaattctccgtatgttagcgagcagtaccgtgatgatttactggctcaatttccacaggcacgggcgcatgtgattgcaggcgcgggtcactgggtccatgctgaaaaaccggatgcggtattacgcgctatccgtcgctatctcaatgattaa

SEQ ID NO: 6981 - DNA, 1116 bp, Escherichia coli
atggcgagcgtacagctgcaaaatgtaacgaaagcctggggcgaggtcgtggtatcgaaagatatcaatctcgatatccatgaaggtgaattcgtggtgtttgtcggaccgtctggctgcggtaaatcgactttactgcgcatgattgccgggcttgagacgatcaccagcggcgacctgttcatcggtgagaaacggatgaatgacactccgccagcagaacgcggcgttggtatggtgtttcagtcttacgcgctctatccccacctgtcagtagcagaaaacatgtcatttggcctgaaactggctggcgcaaaaaaagaggtgattaaccaacgcgttaaccaggtggcggaagtgctacaactggcgcatttgctggatcgcaaaccgaaagcgctctccggtggtcagcgtcagcgtgtggcgattggccgtacgctggtggccgagccaagcgtatttttgctcgatgaaccgctctccaacctcgatgctgcactgcgtgtgcaaatgcgtatcgaaatctcccgtctgcataaacgcctgggccgcacaatgatttacgtcacccacgatcaggtcgaagcgatgacgctggccgacaaaatcgtggtgctggacgccggtcgcgtggcgcaggttgggaaaccgctggagctgtaccactatccggcagaccgttttgtcgccggatttatcggttcgccaaagatgaacttcctgccggtaaaagtgaccgccaccgcaatcgatcaagtgcaggtggagctgccgatgccaaatcgtcagcaagtctggctgccagttgaaagccgtgatgtccaggttggagccaatatgtcgctgggtattcgcccggaacatctactgccgagtgatatcgctgacgtcatccttgagggtgaagttcaggtcgtcgagcaactcggcaacgaaactcaaatccatatccagatcccttccattcgtcaaaacctggtgtaccgccagaacgacgtggtgttggtagaagaaggtgccacattcgctatcggcctgccgccagagcgttgccatctgttccgtgaggatggcactgcatgtcgtcgactgcataaggagccgggcgtttaa

SEQ ID NO: 6982 - DNA, 477 bp, Escherichia coli
atgaaacagctttcctttttacccggcgagatgacgccacaggaccggcgtctcattcagcgggcgctcagggctctggaccgccacctgcatgagcccggcgtagccttcacctctacccacgccgtacgtgaatggctgcgactgcatatggccgcgcttgagcgggaagagttccgggtgttgtatctggacaaccagaatcagttgattgcccatgaaacgctcttcaccggcacgattaaccgcaccgaggtgcatccccgggaggtggtcaaacgtgctctgcacttcaacgcggcggcggtgatactcgcgcataaccatccttccggcgagacgacacctagccaggccgacaaaaccctcacgcagcgactggttcaggtgcttcagctggtggatatccgtgtccctgaccatctgattgtcggtggcaggcaaatctattcgttcgcagaacacggtctgctttga

SEQ ID NO: 6983 - DNA, 270 bp, Escherichia coli
atgctgcgttacagacgaatggttcaattattctttcccctaagtccgaatgtggacatatataatttatggagaaaaacacgcatcaaattcataaaagcacagtatttcaacatgttgcagataattttgtttttgaagcatacgcataataaatatcacaaacacaaaccagataaatatcctatgaatatgcaacaaagttttaattattcaatttatagcagcgcaaccaaactccaaaaaataataaccaacagctataaataa

SEQ ID NO: 6984 - DNA, 3594 bp, Escherichia coli
atgaagtttttaccctatatttttcttctctgttgtggtctttggtcgaccataagtttcgcagacgaagattacatcgaatatcgtggcatcagtagtaacaaccgtgtcacacttgatccactacgtctgagcaacaaggaattacgttggttagcgagcaaaaaaaatcttgtgattgcagtacataagtcccaaacggctacgttgttgcataccgattcgcagcaacgggttcgtggtattaatgctgattatttaaatcttttaaaaagagcgttaaatatcaaattaacactccgggaatacgcagatcatcaaaaagcaatggacgcgcttgcagaaggtgaagtcgatatagtgttatcacatttagttacttcgccgcctcttaataatgacattgctgcaaccaaaccattgataattacctttccggcgctggtaaccacccttcacgactcaatgcgaccgcttacctcaccaaaaccagtaaatattgctcgggtagcaaattaccccccagacgaggtaattcatcaatcatttccaaaagcaacaattatctcttttacaaatttatatcaggcattagcatccgtctcagctgggcacaatgattactttattggtagtaacatcattaccagcagtatgatttcccgctatttcactcactccttaaatgtagtgaaatattataactcgccgcgtcaatataattttttcttgaccagaaaagaatctgtcattcttaatgaagtactcaatagatttgttgatgctttaacaaatgaagttcgctatgaagtatcacaaaattggcttgatacaggaaacctggcctttctgaacaaaccattagaactcactgaacatgaaaaacagtggattaagcagcatcccaatttaaaggtgctggaaaatccttactcgcccccctattctatgacggatgaaaatggctcggttcggggcgttatgggggacattcttaatattattaccttgcaaacaggtttaaatttttctccgatcaccgtttcacacaatatccatgctggaacacagcttagccccggaggatgggatataatacctggcgctatttatagtgaagatcgagaaaataatgttttatttgctgaagccttcataacaacgccttacgtttttgtcatgcaaaaagcgcctgacagtgaacaaacattaaaaaaaggaatgaaagttgccattccatattattatgagctgcattcgcaattaaaagagatgtatccggaggttgaatggatacaggtcgataatgccagcgctgcatttcacaaggttaaggaaggtgaacttgatgctctggtcgcgacacagctaaattcgcgttacatgatcgatcattactatcctaatgaactttatcattttcttattcctggcgttccgaatgcatcgctttcgttcgcttttcctcgcggagaaccggaacttaaggatattattaataaagcactgaatgcaattcccccaagcgaagttctgcgcctgacggaaaaatggattaaaatgcccaatgtgaccattgacacatgggacctatatagcgagcaattttatattgttacgacattatccgttttattagttggcagtagccttttatggggattctacctgttacgctcagttcgtcgtcgtaaagtcattcagggtgatttagaaaaccaaatatcattccgaaaagcactctcggattccttaccgaatccaacttatgttgtaaactggcaaggtaatgtcattagtcataatagtgcttttgaacattatttcactgcggattactacaaaaatgcaatgttaccattagaaaacagtgactcaccctttaaagatgttttttctaatgcgcatgaagtcacagcagaaacgaaagaaaatcgaacaatatacacacaggtatttgaaattgataatggcatcgagaaaagatgcattaatcactggcatacattatgcaatcttcctgcaagtgacaatgcagtatatatttgtggttggcaagatattactgaaacgcgtgatctaattaatgcactcgaggtagaaaaaaataaagcgataaaggctaccgtagcaaaaagtcagtttctggcaacgatgagtcacgaaataagaacaccaataagctctattatgggcttcctggaacttctgtcgggttctggtcttagcaaggagcaacgggtggaggcgatttcacttgcctacgccaccggacaatcactcctcggcttaattggtgaaatccttgatgtcgacaaaattgaatcgggtaactatcaacttcaaccacaatgggtcgatatccctactttagtccagaacacttgtcactctttcggtgcgattgctgcaagcaaatcgatcgcattaagttgcagcagtacgtttcctgaacattacctggttaagatcgaccctcaggcgtttaagcaggtcttatcaaatttactgagtaatgctctcaaatttaccaccgagggggcagtaaaaattacgacctccctgggtcacattgatgacaaccacgctgttatcaaaatgacgattatggattctggaagtggattatcgcaggaagaacaacaacaactgtttaaacgctacagccaaacaagtgcaggtcgtcagcaaacaggttctggtttaggcttaatgatctgcaaagaattaattaaaaatatgcagggcgatttgtcattagaaagtcatccaggcataggaacaacatttacgatcacaatcccggtagaaattagccagcaagtggcgactgtcgaggcaaaagcagaacaacccatcacactacctgaaaagttgagcatattaatcgcggatgatcatccgaccaacaggctattactcaaacgccagctaaatctattaggatatgatgttgatgaagccactgatggtgtgcaagcgctacacaaagtcagtatgcaacattatgatctgcttattactgacgttaatatgccgaatatggatggttttgagttgactcgcaaactccgtgagcaaaattcttccttacccatctgggggcttacagccaacgcacaggctaacgaacgtgaaaaagggttaagttgcggcatgaacttatgtttgttcaaaccgttgaccctggatgtactgaaaacacatttaagtcagttacaccaagttgcgcatattgcacctcagtatcgccaccttgatatcgaagccctgaaaaataatacggcgaacgatctacaactgatgcaggagattctcatgactttccagcatgaaacgcataaagatctacccgctgcgtttcaagcactagaagctggcgataacagaactttccatcagtgtattcatcgcatccacggtgcggctaacatcctgaatttgcaaaagttgattaatattagccatcagttagaaataacacctgtttcagatgacagtaagcctgaaattcttcagttgctgaactctgtaaaagaacacattgcagagctggaccaggagattgctgttttctgtcagaaaaatgactaa

SEQ ID NO: 6985 - DNA, 1317 bp, Escherichia coli
atgaaaccgttacattatacagcttcagcactggcgctcggactggcgttaatggggaatgcacaggcagtgacgaccattccgttctggcattctatggaaggggaactgggtaaagaggtggattctctggcccaacgttttaacgccgaaaacccggattacaaaattgtaccgacctataaaggcaactacgaacagaatttaagcgcggggattgccgcatttcgtaccggcaacgcgccggctattttgcaggtttatgaagttggcaccgccaccatgatggcgtcgaaagccattaaaccggtgtatgacgtgtttaaagaggcagggattcagttcgatgagtcgcagtttgtgccgacggtttcaggttactactccgacagcaaaacgggccacttactctcccagccattcaacagctcgacccccgttctctattacaacaaagacgccttcaagaaagcaggattagacccggaacagccgccgaaaacctggcaggatctggcggactatgccgcgaaactgaaagcctccggcatgaagtgcggctacgccagcggctggcagggctggatccaactggaaaactttagcgcctggaacggtctgccgtttgccagcaaaaacaacggctttgacggcacggacgcggtgctggagttcaataagccggagcaggtgaaacacatcgccatgctcgaggagatgaacaagaagggcgacttcagctacgtcggtcgtaaggatgaatccaccgagaagttctataacggtgattgcgcgatgaccaccgcctcttccggttctcttgccaacattcgcgagtacgccaaatttaactacggcgtaggcatgatgccttacgacgccgatgcgaaagatgcgccacaaaacgccattatcggcggagccagcctgtgggtgatgcagggtaaagataaagaaacgtataccggtgtggcgaagttcctcgatttcctcgcgaagccagaaaacgctgccgagtggcatcagaaaaccggttatctgccaatcaccaaagcagcgtatgacctgacccgtgagcagggcttttatgagaaaaacccaggggcggataccgcgacgcgtcagatgctgaataagccgccgttgccgttcaccaaagggctgcgtctgggcaacatgccgcagatccgcgtgattgtggatgaagagctggagagcgtgtggaccggtaagaagacaccacagcaggcactggataccgccgttgagcgtggaaatcagttgctgcgccgctttgagaaatcgacgaagtcttaa

SEQ ID NO: 6986 - DNA, 1254 bp, Escherichia coli
atgacattctccctttttggtgacaaatttacccgccactccggcattacgctgttgatggaagatctgaacgacggtttacgcacgcctggcgcgattatgctcggcggcggtaatccggcgcagatcccggaaatgcaggactacttccagacgctactgaccgacatgctggaaagtggcaaagcgactgatgcactgtgtaactacgacggtccacaggggaaaacggagctactcacactgcttgccggaatgctgcgcgagaagttgggttgggatatcgaaccacagaatattgcactaacaaacggcagccagagcgcgtttttctacttatttaacctgtttgccggacgccgtgccgatggtcgggtcaaaaaagtgctgttcccgcttgcaccggaatacattggctatgctgacgccggactggaagaagatctgtttgtctctgcgcgtccgaatattgaactgctgccggaaggccagtttaaataccacgtcgattttgagcatctgcatattggcgaagaaaccgggatgatttgcgtctcccggccgacgaatccaacaggcaatgtgattactgacgaagagttgctgaagcttgacgcgctgggcaatcaacacggcattccgctggtgattgataacgcttatggcgtcccgttcccgggtatcatcttcagtgaagcgcgcccgctatggaatccgaatatcgtgctgtgcatgagtctttccaagctgggtctacctggctcccgctgcggcattatcatcgccaatgaaaaaatcatcaccgccatcaccaatatgaacggcattatcagcctggcacctggcggtattggtccggcgatgatgtgtgaaatgattaagcgtaacgatctgctgcgcctgtctgaaacagtcatcaaaccgttttactaccagcgtgttcaggaaactatcgccatcattcgccgctatttaccggaaaatcgctgcctgattcataaaccggaaggagccattttcctctggctatggtttaaggatttgcccattacgaccaagcagctctatcagcgcctgaaagcacgcggcgtgctgatggtgccggggcacaacttcttcccagggctggataaaccgtggccgcatacgcatcaatgtatgcgcatgaactacgtaccagagccggagaaaattgaggcgggggtgaagattctggcggaagagatagaaagagcctgggctgaaagtcactaa

SEQ ID NO: 6987 - DNA, 1293 bp, Escherichia coli
ttgctacaaggcgctggctggttattgttgctggccccgtttttcttcttcacctatggatctcttaatcagttcaccgcggttcaggaccttaacagccatgatatccccagtcaggtattcggttgggaaacggcgatcccttttcttccctggactattgttccttactggagtctggatcttttatatggattttcgctgttcgtttgtagcacgacattcgaacagcgccgacttgtccaccggcttattctggcaacggtaatggcctgctgcggttttttgctctatccgctgaagtttagttttatccgtcctgaagtgagtggggtgacgggatggctattttcgcaacttgaactgtttgatctgccttataaccagtctccttcgctgcatattattctctgctggctactttggcgtcactttcgtcagcatctggctgagaggtggcgtaaagtctgcggcggatggtttttactcatcgccatttcgacgctgacgacctggcagcatcattttattgatgtcatcacagggctggcggtaggtatgttgattgactggatggtgcccgtcgaccgtcgttggaattatcagaaacctgatcaacgtcgaatcaaaatagcactgccctatgtcgtaggcgcgggctcgtgcattgtattgatggagctaatgatgatgattcagttatggtggtcagtctggttatgttggccagtattatcgctactcataattggccgtgggtacggtgggcttggcgcgataacaacagggaaagatagtcaggggaaactaccgcccgccgtttactggctgacattgccctgccgcatcgggatgtggctgtctatgcgttggttttgtcgtcgcctggagccggtgagcaaaatgactgctggtgtttatttaggggcgtttccacgacatattccggcacagaatgcggttctggacgtcacctttgaattccctcgcggacgagccacaaaagatcgactctatttttgtgtaccgatgctggatctggtggttccggaagagggggagctccgacaggccgtggcgatgctggaaacattacgcgaagagcaaggcagcgttctggtccattgtgcattgggattatcgcgcagtgcgctggtggtggcggcatggttgttatgttacggacactgtaaaaccgttaatgaagcgattagctatattcgagccagacgcccgcagattgtgctgacagacgagcacaaagcgatgctgagattatgggaaaacaggtaa

SEQ ID NO: 6988 - DNA, 1374 bp, Escherichia coli
gtgaccgctttttctaccctgaatgttttgcctcccgcccaactcacgaaccttaatgagttgggttatttaaccatgacgccggtgcaggccgccgcgcttccggcgatccttgccggaaaagatgttcgcgtgcaggcgaaaaccggcagcggcaaaacggcggcttttggcctcggcttgttacagcaaattgatgcgtcgctatttcaaacccaggctttagtgctgtgtcctacgcgtgaactggcggatcaggtggcaggtgaattgcgtcggctggcgcgttttctgccaaataccaaaattttgacgttgtgcggtggtcaaccgttcggtatgcagcgtgattcgttgcaacatgcgccgcatattatcgtggcaacgccggggcgtttgctggatcacctgcaaaaaggcacggtatcactggatgcgttgaatacgctggtgatggatgaggccgaccgcatgctggatatgggatttagcgatgccattgatgatgtcatccgttttgcgcctgcatctcgacagacgcttctgttttcggcaacctggccggaagccatcgctgcaatcagcggacgagtgcaacgcgatcctttggcgattgaaattgactcaacagatgctttgccacccattgaacaacaattttatgagacatccagcaaaggcaaaattcctctgttgcaacggttattaagcttgcatcagccatcctcttgcgtggtgttttgcaataccaaaaaagattgccaggctgtctgcgacgcgctgaatgaagtagggcaaagtgcattgtcattacacggcgatttggagcaacgcgatcgcgatcagaccctggtacgttttgctaacggtagcgcccgtgtactggtcgcgactgatgttgctgcgcgtggtctggatattaaatcgcttgagctggtggtgaactttgagctggcgtgggaccctgaagttcatgtacatcgcatcggtcgtacagctcgtgcaggaaatagcggtctggcgatcagtttctgtgctccggaagaagcacagcgggccaatatcatttctgacatgttgcagataaaacttaactggcaaacgccgccagctaatagttccattgcgacgctggaagcagaaatggcaacgttgtgtatcgatggcgggaaaaaagccaaaatgcgcccgggtgatgtattaggtgcactgacaggagatatcgggcttgatggcgcagatattggcaaaatcgccgtgcatccggcgcatgtctatgtcgcggtccgtcaggctgttgctcataaagcatggaaacagttacagggcgggaagattaaaggaaaaacgtgccgggtgcggttattaaaataa

SEQ ID NO: 6989 - DNA, 471 bp, Escherichia coli
atgtggctaatgagtcaggacagtaaagttttctttcgtatattcctcggtatcggtctggtactgatcctcatttctgttgttgtcttttataaccagttcacctatagcaaagacgcgattcataccgaaggcgtcattgttgataccgtctggcactccagtcattctcatcgcacgggtaaagatggttcgtggtatcccgtcgttgcctttcgaccgacgccagattacacgctaattttcaattcgagtatcggcagcgatttttatgaagacagcgaaggcgataaagttaatgtttattattctcccgggcatcctgaaaaggctgagataaataacccgtgggttaatttttttaaatgggggtttatcggcattatgggcgttatttttatcgccgtcggtttattaataagtatgccctcctctaaaaaatcacgcaggaaacggaagtcccgcccatga

SEQ ID NO: 6990 - DNA, 336 bp, Escherichia coli
atgaaaaaacaaattgagggtatgacaatgaaaaaagtattagctctggttgttgccgctgctatgggtctgtcttctgccgcctttgctgcagagactacgaccacacctgctccgactgcgacgaccaccaaagcagcgccggcgaaaactacacatcataaaaaacagcataaagcagcacctgcccagaaagcgcaggcggctaaaaagcatcataaaaatacgaaagctgaacagaaagcccctgaacaaaaagcgcaggcagcgaagaaacacgccaagaaacacagccatcagcaaccggcaaaacctgctgcacaacccgcagcgtaa

SEQ ID NO: 6991 - DNA, 822 bp, Escherichia coli
atgcgtacaaccattgctgtagtgttgggtgcaattagtttgacgtctgcttttgtgtttgcagataaaccagacgttgccagatcggcaaacgatgaggtcagcaccctgttttttggtcatgatgatcgtgtgccagtgaatgacacgacccaatcaccgtgggatgcggttgggcaactggaaacggccagcggcaatttatgtacggcgacgctgattgcacccaatctggcattaacggcaggacactgtttattgacacctccaaagggtaaagccgataaagcagtggcgctgcgttttgtgtcaaataaaggtctttggcgctatgagatccacgacatagaaggccgcgttgatccgacactgggaaagcggttaaaagcagatggggatggttggattgtacctcccgcagccgcgccgtgggacttcggattgattgtgctacgtaatcccccttctggcattacgccgttgccgttatttgagggagataaagccgcgcttaccgccgcattaaaagcggcaggtcgtaaagtgactcaggcaggctaccctgaagatcatctcgatacgttgtacagtcatcaaaactgtgaagtgactggctgggcgcaaacgtcggtgatgtcacatcagtgcgataccttgccgggtgacagcggttcgcctctgatgttgcataccgatgacggctggcaattaattggggtgcaaagttcggctcctgccgcgaaagatcgctggcgcgccgataaccgggccatttctgttaccggttttcgcgacaagctggatcaactgtcgcaaaaataa

SEQ ID NO: 6992 - DNA, 948 bp, Escherichia coli
gtgcctgatatgaagctttttgctggtaacgccaccccggaactagcacaacgtattgccaaccgcctgtacacttcactcggcgacgccgctgtaggtcgctttagcgatggcgaagtcagcgtacaaattaatgaaaatgtacgcggtggtgatattttcatcatccagtccacttgtgcccctactaacgacaacctgatggaattagtcgttatggttgatgccctgcgtcgtgcttccgcaggtcgtatcaccgctgttatcccctactttggctatgcgcgccaggaccgtcgcgtccgttccgctcgtgtaccaatcactgcgaaagtggttgcagacttcctctccagcgtcggtgttgaccgtgtgctgacagtggatctgcacgctgaacagattcagggtttcttcgacgttccggttgataacgtatttggtagcccgatcctgctggaagacatgctgcagctgaatctggataacccaattgtggtttctccggacatcggcggcgttgtgcgtgcccgcgctatcgctaagctgctgaacgataccgatatggcaatcatcgacaaacgtcgtccgcgtgcgaacgtttcacaggtgatgcatatcatcggtgacgttgcaggtcgtgactgcgtactggtcgatgatatgatcgacactggcggtacgctgtgtaaagctgctgaagctctgaaagaacgtggtgctaaacgtgtatttgcgtacgcgactcacccgatcttctctggcaacgcggcgaacaacctgcgtaactctgtaattgatgaagtcgttgtctgcgataccattccgctgagcgatgaaatcaaatcactgccgaacgtgcgtactctgaccctgtcaggtatgctggccgaagcgattcgtcgtatcagcaacgaagaatcgatctctgccatgttcgaacactaa

SEQ ID NO: 6993 - DNA, 774 bp, Escherichia coli
atgaaatctgccacctctgcgcaaagaccttaccaggaagtcggggcgatgatccgcgatctgatcataaagacgccgtacaatcctggcgaacggctgccgccggagcgtgaaattgcagaaatgcttgatgtcacgcggacggtggtacgtgaagcgctgatcatgctggagatcaaagggctggtggaagtacgccggggtgccggtatctatgttcttgataactcaggcagccagaacacagacagtccggatgccaacgtctgcaacgatgccggtccttttgagctgttacaggcgcggcagttattggagagcaacatcgccgagtttgccgctttgcaggctacccgcgaagatatcgtcaaaatgcgtcaggcattgcaactggaagagcgtgaactggcttccagtgcgccgggcagcagcgaaagcggtgacatgcagttccatctcgctattgccgaagcaacgcataacagcatgctggtggagctgttccgtcagtcctggcagtggcgggaaaacaatccaatgtggatccagttgcacagccatctggatgacagcctgtatcgcaaagagtggttgggcgatcacaaacagatcctcgccgcgttaatcaaaaaagatgcccgagcggcgaagctggcaatgtggcagcatctggaaaacgttaagcaacgtctgctggaattctcgaacgttgacgatatttattttgatggctatctgtttgattcatggccgctggataaagtcgacgcctga

SEQ ID NO: 6994 - DNA, 1854 bp, Escherichia coli
atgagacgatttctgacgacgctgatgatactcctggtcgtgctggtggccgggttatctgcgttagtgttgctggtgaatccgaatgatttccgcgactatatggtcaagcaagttgctgcacgtagcggttatcaattgcagctcgacgggccactgcgttggcacgtctggccgcagcttagtatcctctccgggcgaatgtctctcaccgcccagggcgcaagccagccactggttcgcgccgacaacatgcgtctggacgtggcgcttttaccactactgagtcatcaactgagcgttaagcaggtgatgctaaaaggggcagtgatccaactgacgccgcagacggaagcggtgcgcagtgaagacgctccggttgcaccgcgcgacaataccttgccggatctgtcagacgatcgcggatggtcgtttgatatatccagtcttaaggtggcggacagcgtgctggtgttccagcatgaagatgacgagcaggtgacaatccgcaatattcgcctgcaaatggaacaagatccccaacatcgtggttcatttgagttctccgggcgggttaatcgcgatcagcgcgatctcacgatatcccttaacggtacggtagatgcttctgattatccgcatgatttaacggcggctattgaacaaattaactggcagttgcagggtgccgatttaccaaaacaaggtattcaggggcaggggagtttccaggcccagtggcaggagtcacataaacgcctttcatttaaccaaattagtttgaccgccaatgatagtacgctaagcgggcaagcacaggttacgctgacagagaaaccggaatggcagctgaggctgcaattcccgcaactgaatcttgacaacctcatcccgcttaatgaaaccgcgaatggtgaaaacggtgccgcgcagcaggggcagagccaatcaacgttgccgcgcccggtcatttcttcgcgtattgatgaaccggcctatcagggactgcaaggctttacggctgatattttgttgcaggccagtaacgtgcgctggcgcggaatgaattttacagatgttgccacgcaaatgaccaacaagtcgggtttgctggaaattactcaactgcagggcaaacttaacggtggacaggtttcactgccgggcacgctggacgcgacatcaataaatccgcggataaacttccagccacggctggaaaacgttgagattggtaccattctgaaggcgtttaactatccgatttcgttgaccggaaaaatgtcactggctggtgatttctccggtgctgacatagatgccgacgcattccgccacaactggcaaggacaggcacatgtcgaaatgaccgacacgcgcatggaagggatgaacttccagcagatgattcagcaagcggtagagcgtaatggcggtgatgtgaaggccgctgaaaactttgataacgtgacgcggcttgaccgctttaccaccgatttgacgttgaaggatggcgtcgtgacgttaaacgacatgcaaggtcaatcgcctgtgctggcgctgacaggggaaggcatgttgaatctggcagatcaaacctgcgacacccagtttgatattcgggtcgtgggtggctggaacggggaaagcaaactgattgatttcctgaaagaaacgccagtaccgctgcgggtttatggcaactggcagcaactcaattacagcctgcaagtggatcagttactgcgcaaacatctacaggacgaagcgaaacgtcgcctgaatgactgggccgagcggaataaagattcccgtaatggcaaagatgtgaagaagttgctggagaagatgtag

SEQ ID NO: 6995 - DNA, 1461 bp, Escherichia coli
atgactactattgttgacagcaatctgccggttgcccgcccgtcatgggatcattctcgtctggaatcacgcattgtgcatctcggttgcggggcgtttcaccgcgcgcaccaggcgctgtatacccatcatctgctggaaagcaccgacagcgactggggcatctgcgaagttaacctgatgccaggcaacgaccgcgtgctgatcgaaaacctgaaaaaacagcaactgctgtacaccgtagcggaaaaaggcgcagagagcaccgagctgaaaattatcggttcgatgaaagaagcgctgcatccggaaatcgatggctgcgaaggtattctcaacgcgatggcgcgtccgcaaacggcgattgtctctctaacggtcacggaaaaaggctactgcgctgatgcggcaagcggtcaactggatctcaataacccgctgatcaagcacgatctggaaaacccgactgcgccgaagtccgcgattggttacatcgtcgaagcgttgcgtctgcgtcgtgaaaaagggttgaaagcgtttacggtgatgtcctgcgataacgtgcgtgaaaacggtcatgtggcgaaggtcgcggtactggggctggctcaggcgcgtgacccgcagctggcggcatggattgaagaaaatgtcaccttcccgtgcaccatggttgaccgcatcgttccggcggcgacgccagaaaccttacaggaaattgctgaccagctgggtgtttacgacccgtgcgccattgcctgcgaaccgttccgtcagtgggtgattgaagataacttcgttaatggtcgcccggattgggataaagtgggcgcacagttcgttgcagacgttgtgccgttcgaaatgatgaagctgcgtatgctgaacggcagccactcttttctggcgtacctcggttacctcggcggctatgaaaccattgccgacaccgtgactaacccggcttatcgcaaagcggcctttgccctgatgatgcaggaacaagcgccaacgctgtcgatgccggaaggtacagacctgaacgcctatgcgacgctgctgatcgagcgtttcagcaacccgtctctgcgtcaccgtacctggcagattgcgatggacggcagccagaagttaccgcagcgtctgctggacccggtgcgtctgcacctgcaaaacggcggcagctggcgtcacctggcgctgggcgtggctggctggatgcgttacacccagggcgtggatgagcagggtaatgccattgacgtggtcgacccgatgctggcggagttccagaagatcaacgcgcagtatcagggcgcagaccgcgtgaaagcgctgctgggcctgagcggtatttttgccgatgatctgccgcagaatgccgactttgttggcgcagtgacggcggcatatcagcagctgtgcgaacgcggtgcgcgcgagtgtgtggctgcgctgtaa

SEQ ID NO: 6996 - DNA, 384 bp, Escherichia coli
atgcaaatacctcgcatgtcgcttcgccagctagcctggtccggcgctgttttacttctggtcggcacgctgttgctggcctggtccgcggttcgccagcaagagtctacgctggcgattcgtgccgttcatcaaggcacaacgatgccagacggtttttcaatctggcatcaccttgacgctcatggcattcctttcaaaagtatcacccccaaaaacgacactctgttaattacatttgactccagcgaccagagcgccgccgcaaaagcggtcctcgacagaacattgccccatggctacatcattgcgcagcaggacaataacagtcaggctatgcagtggctgacccggttacgggataactctcatcgcttcggataa

SEQ ID NO: 6997 - DNA, 360 bp, Escherichia coli
atggtatccgcactcatcaccgtcgccgttatcgcctggtgtgcgcaactggccttaggcggctggcaaatttctcgttttaaccgtgccttcgacacactatgccagcaagggcgggttggcgtgggccgttccagcgggcgctttaaaccgcgggtcgtggtcgccatcgcgctggacgatcagcagcgcatcgtcgacaccttgtttatgaaaggactgaccgtcttcgcccgaccgcaaaaaattcccgcaattaccggtatgcatgcgggtgatttacagcccgatgtgatctttccccatgatccactatcacagaatgctctatcattggcgcttaaactgaaacgtggataa

SEQ ID NO: 6998 - DNA, 1050 bp, Escherichia coli
atggcaacaggcacgcagcccgatgctgggcagatcctcaactcgctgattaacagtattttgttaatcgatgacaacctggcgatccattacgccaaccctgccgcgcaacaactgctcgcccaaagctcccgcaaattgtttggtacaccgttaccggaactgttgagctacttctcattaaatatcgagctgatgcaagaaagtctggaggcggggcaaggttttaccgataacgaagtgacgctggtcatcgacgggcgctcgcatatcctttctgtgacggcccagcgtatgccggacggcatgatcctgctggagatggctccgatggataaccagcgccgcttaagtcaggaacagctacagcacgcccagcaggttgctgcccgtgatttagtgcgcggcctggcacatgagattaaaaatccgcttggcggtttacgtggcgcggcgcagctgctcagcaaagcgttacctgacccatcactactcgaatataccaaagtgattatcgaacaggcggaccggctgcgaaatctggtcgaccgtctgttggggccgcagctgcccggtacgcgcgttaccgaaagtattcacaaagtggctgaacgcgtggtaacgctggtgtcgatggaactgccggacaacgtgcggttgattcgtgattacgatcccagcctaccggaactggcgcacgacccggatcaaattgaacaggtcttgctgaatattgtgcgcaatgcgctacaggcgctggggccggaaggcggtgaaatcattctgcgtacccgcaccgcgtttcaactgaccttacacggcgagcgctaccggctggcggcgcggattgatgtggaagataacgggccgggcattccgcctcatttgcaggatacgctgttttacccgatggtcagcggccgcgaaggtggcaccgggcttggcttatccatcgctcgtaatttgattgatcagcattcaggcaaaattgaatttaccagttggccagggcataccgagttctcggtttacctgcctatcaggaaataa

SEQ ID NO: 6999 - DNA, 162 bp, Escherichia coli
atgtcactggaaaatgcccctgacgatgtcaaactggctgtcgatttgattgtgctgctggaggaaaatcagatccctgccagtaccgtgctgcgcgcgctggatattgtaaagcgtgattatgaaaagaaattaacgcgcgatgatgaggcggaaaagtga

SEQ ID NO: 7000 - DNA, 528 bp, Escherichia coli
gtgaaaaccgccctgctgctggaaaaactggaaggacagctcgctacgctgcgtcagcgttgtgccccggtgtcacagttcgccacgctaagtgctcgtttcgacaggcatctttttcagactcgtgcgacaacactacaggcttgtctcgacgaggcgggcgataatctggctgcgcttcgtcatgcagttgagcagcaacagctgccgcaagtggcctggctggcggaacatctggcggcacaactggaagccatcgcgcgtgaagcctccgcctggtcattgcgcgagtgggacagtgcaccaccgaaaattgcccgctggcagcgtaaacgtattcagcatcaggattttgagcggcggctacgtgagatggttgccgaacgcagagcccgtctggcgcgggtgaccgatctcgtggaacagcaaacgctgcatcgtgaagtggaagcctatgaagcgcgcctggcacgctgccgccatgcgctggaaaaaatcgaaaacaggttagcgcgtttaacccgctag

SEQ ID NO: 7001 - DNA, 2286 bp, Escherichia coli
atgaatcagaatctgctggtgacaaagcgcgacggtagcacagagcgcatcaatctcgacaaaatccatcgcgttctggattgggcggcagaaggactgcataacgtttcgatttcccaggtcgagctgcgctcccacattcagttttatgacggtatcaagacctctgacatccacgaaaccattatcaaggctgccgcagacctgatctcccgtgatgcgccggattatcagtatctcgccgcgcgcctggcgatcttccacctgcgtaaaaaagcctacggccagtttgagccgcctgcgctgtacgaccacgtggtgaaaatggtcgagatgggcaaatacgataatcatctgctggaagactacacggaagaagagttcaagcagatggacacctttatcgatcacgaccgtgatatgaccttctcttatgctgccgttaagcagctggaaggcaaatatctggtacagaaccgcgtgaccggcgaaatctatgagagcgcccagttcctttatattctagttgccgcgtgcttgttctcgaactacccgcgtgaaacgcgcctgcaatatgtgaagcgtttttacgacgcggtttccacatttaaaatttcgctgccgacgccaatcatgtccggcgtgcgtaccccgactcgtcagttcagctcctgcgtactgatcgagtgcggtgacagcctggattccatcaacgccacctccagcgcgattgttaaatacgtttcccagcgtgccgggatcggcatcaacgccgggcgtattcgtgcgctgggtagcccgattcgcggtggtgaagcgttccataccggctgcattccgttctacaaacatttccagacagcggtgaaatcctgctctcagggcggtgtgcgcggcggtgcggcaacgctgttctacccgatgtggcatctggaagtggaaagcctgctggtgttgaaaaacaaccgtggtgtggaaggcaaccgcgtgcgtcatatggactacggggtacaaatcaacaaactgatgtatacccgtctgctgaaaggtgaagatatcaccctgttcagcccgtccgacgtaccggggctgtacgacgcgttcttcgccgatcaggaagagtttgaacgtctgtataccaaatatgagaaagacgacagcatccgcaagcagcgtgtgaaagccgttgagctgttctcgctgatgatgcaggaacgtgcgtctaccggtcgtatctatattcagaacgttgaccactgcaatacccatagcccgtttgatccggccatcgcgccagtgcgtcagtctaacctgtgcctggagatagccctgccgaccaaaccgctgaacgacgtcaacgacgagaacggtgaaatcgcgctgtgtacgctgtctgctttcaacctgggcgcaattaataacctggatgaactggaagagctggcaattctggcggttcgtgcacttgacgcgctgctggattatcaggattacccgatcccggccgccaaacgtggagcgatgggtcgtcgtacgctgggtattggtgtgatcaacttcgcttactacctggcgaagcacggtaaacgctactccgacggcagcgccaacaacctgacgcataaaaccttcgaagccattcagtattacctgctgaaagcctctaatgagctggcgaaagagcaaggcgcgtgcccgtggtttaacgaaaccacttacgcgaaagggatcctgccgatcgatacctataagaaagatctggataccatcgctaatgagccgctgcattacgactgggaagctctgcgtgagtcaatcaaaacgcacggtctgcgtaactccacgctttctgctctgatgccgtccgagacttcttcgcagatctctaacgccactaacggtattgaaccgccgcgcggttacgtcagcatcaaagcgtcgaaagacggtattttgcgccaggtggtgccggactacgagcacctgcacgacgcctatgagctgctgtgggaaatgccgggtaacgatggttatctgcaactggtgggtatcatgcagaaatttatcgatcagtcgatctctgccaacaccaactacgatccgtcacgcttcccgtcaggaaaagtgccgatgcagcagttgctgaaagacctgctcaccgcctacaaattcggggtcaaaacactgtattatcagaacacccgtgacggcgctgaagacgcacaagacgatctggtgccgtcaatccaggacgatggctgcgaaagcggcgcatgtaagatctga

SEQ ID NO: 7002 - DNA, 1284 bp, Escherichia coli
gtgaacacattttcagtttcccgtctggcgctggcattggcttttggcgtgacgctgaccgcctgtagctcaaccccgcccgatcaacgtccttctgatcaaaccgcgcctggtacctcttctcgcccgattctgtcggcaaaagaagcgcagaatttcgatgctcaacactattttgcatccctgacaccaggtgctgcagcgtggaatccttccccgattaccctgcctgcgcaacctgactttgttgtcggcccggcgggcactcaaggtgtaacgcataccacgattcaggcggcggtagatgcggcaattatcaagcgtaccaacaagcgccagtatattgccgtgatgcctggtgagtatcagggaacggtatatgtccctgccgctccgggtggaattactctgtacggtacaggtgaaaaaccgattgatgtgaagattgggctttcccttgatggtggcatgagccctgccgactggcgtcacgacgtcaacccgcgcggcaaatatatgccaggtaaaccagcgtggtatatgtacgatagctgccagagcaaacgcagcgacagtatcggtgttctctgctctgcggtcttctggtcacaaaacaatggcctgcaactgcaaaatctgaccatcgaaaacacgctgggcgatagcgtagatgcaggtaaccatccggcggtggcactgcgtactgatggtgaccaggtacagattaacaacgttaacattctcggtcgtcagaacaccttctttgtcaccaacagcggtgtgcagaaccgtctggaaacgaatcgtcagccgcgtacgctggtgaccaacagctacattgaaggggatgtggatatcgtttctggtcgcggcgcagtggtgttcgataacaccgaattccgcgtggtgaactcacgtactcagcaagaagcgtatgtgtttgcaccggctacgctgtccaacatttactacggtttcctcgccgtaaacagccgtttcaatgctttcggtgatggtgtggcgcaactgggccgctcgctggatgttgatgccaataccaacggtcaggtggtgatccgtgatagcgccatcaacgaaggttttaacacggctaaaccgtgggccgatgcggtgatctctaatcgtccgtttgcgggtaataccggcagcgtagatgataacgacgaaatacagcgcaatctgaatgacactaactacaaccgcatgtgggaatacaataaccgcggcgtgggtagtaaagtggttgcagaggcgaagaagtaa

SEQ ID NO: 7003 - DNA, 501 bp, Escherichia coli
atgacagaatcaacatcccgtcgcccggcatatgctcgcctgttggatcgtgcggtacgcattctggcggtgcgcgatcacagtgagcaagaactgcgacgtaaactcgcggcaccgattatgggcaaaaatggcccagaagagattgatgctacggcagaagattacgagcgcgttattgcctggtgccatgaacatggctatctcgatgacagccgatttgttgcgcgctttatcgccagccgtagccgcaaaggttatggacctgcgcgtattcgccaggaactgaatcagaaaggtatttcccgcgaagcgacagaaaaagcgatgcgtgaatgtgacatcgactggtgcgcactggcgcgcgatcaggcgacgcgaaaatatggcgaacctttgccaactgtcttttcagaaaaagttaagatccagcgttttctgctctatcgtggctatctgatggaagatatccaggagatttggcgaaattttgccgactga

SEQ ID NO: 7004 - DNA, 405 bp, Escherichia coli
atggatcaggtcgttgtttttcaaaagatgtttgagcaagtgagaaaagagcaaaacttctcctggttttattcagaattaaaacatcaccgtattgcacattacatttattatctggctacggataacatcagaattattactcacgatgatacggttttgttattaagaggaaccaggaacctgttaaaagttagtacgaccaagaaccctgctaaaataaaagaggccgcattgcttcatatttgcggaaaatctacatttcgggaatactgttcaacactggcaggcgcgggcgttttccggtgggttactgatgttaatcataacaaacgcagttactacgccattgataatacgcttttatatattgaagatgtagaaaataataaaccattaatctag

SEQ ID NO: 7005 - DNA, 1542 bp, Escherichia coli
atgcaactgaattccaccgaaatcagcgaactgatcaagcagcgcattgctcagttcaatgttgtgagtgaagctcacaacgaaggtactattgtttctgtaagtgacggtgttatccgcattcacggcctggccgattgtatgcagggtgaaatgatctccctgccgggtaaccgttacgctatcgcactgaacctcgagcgcgactctgtaggtgcggttgttatgggtccgtacgctgaccttgccgaaggcatgaaagttaagtgtactggccgtatcctggaagttccggttggccgtggcctgctgggccgtgtggttaacactctgggtgcaccaatcgacggtaaaggtccgctggatcacgacggcttctctgctgtagaagcaatcgctccgggcgttatcgaacgtcagtccgtagatcagccggtacagaccggttataaagccgttgactccatgatcccaatcggtcgtggtcagcgtgaattgatcatcggtgaccgtcagacaggtaaaaccgcactggctatcgatgccatcatcaaccagcgcgattccggtatcaaatgtatctatgtcgctatcggccagaaagcgtccaccatttctaacgtggtacgtaaactggaagagcacggcgcactggctaacaccatcgttgtggtagcaaccgcgtctgaatccgctgcactgcaatacctggcaccgtatgccggttgcgcaatgggcgaatacttccgtgaccgcggtgaagatgcgctgatcatttacgatgacctgtctaaacaggctgttgcttaccgtcagatctccctgctgctccgtcgtccgccaggacgtgaagcattcccgggcgacgttttctacctccactctcgtctgctggagcgtgctgcacgtgttaacgccgaatacgttgaagccttcaccaaaggtgaagtgaaagggaaaaccggttctctgaccgcactgccgattatcgaaactcaggcgggtgacgtttctgcgttcgttccgaccaacgtaatctccattaccgatggtcagatcttcctggaaaccaacctgttcaacgccggtattcgtcctgcggttaacccgggtatttccgtatcccgtgttggtggtgcagcacagaccaagatcatgaaaaaactgtccggtggtatccgtaccgctctggcacagtatcgtgaactggcagcgttctctcagtttgcatccgaccttgacgatgcaacacgtaagcagcttgaccacggtcagaaagtgaccgaactgctgaaacagaaacagtatgcgccgatgtccgttgcgcagcagtctctggttctgttcgcagcagaacgtggttacctggcggatgttgaactgtcgaaaattggcagcttcgaagccgctctgctggcttacgtcgaccgtgatcacgctccgttgatgcaagagatcaaccagaccggtggctacaacgacgaaatcgaaggcaagctgaaaggcatcctcgattccttcaaagcaacccaatcctggtaa

SEQ ID NO: 7006 - DNA, 1227 bp, Escherichia coli
atgtcaccctgtgaaaatgacacccctataaactggaaacgaaacctgatcgtcgcctggctaggctgttttcttaccggtgccgccttcagtctggtaatgcccttcttacccctctacgttgagcagcttggcgttaccggtcactccgccctgaatatgtggtccggtattgtcttcagcattacatttttattttcggccatcgcctcaccgttttggggtggactcgccgaccgtaaaggccgaaaactcatgctattacgctctgccctcggcatgggcatcgtgatggtgttgatggggctggcacaaaatatctggcagtttttgatcctgcgggcgcttcttgggttacttggcggatttgtccccaacgctaatgctcttatcgccacacaagtaccgcgtaataaaagcggctgggcgctgggtacgctctccacaggcggcgttagtggtgcgttgctcggcccaatggctggcggcctgctcgccgatagctacggcttacgtccggtattctttattaccgccagtgtgctcatactctgctttttcgtcaccctgttttgcatcagagaaaaattccagccggtcagcaaaaaagagatgctgcacatgcgggaagtggtgacatcacttaaaaacccgaaactggtactcagcctgtttgtcactacgttaatcatccaggtggcgacgggctcaattgcccccattctgacgctgtatgtccgcgaactggcgggtaacgtcagtaacgtcgcctttatcagtggcatgatcgcctcggtgccaggcgtggcggctctgctaagtgcaccacgactcggcaaacttggcgatcgaatcggacccgaaaagatcctgattacagcgctgatcttttctgtactgctgttgatcccaatgtcttacgttcagacgccattgcaacttgggattttacgttttttgctcggtgccgccgatggtgcactactccccgccgtacagacactgttggtttacaactcgagcaaccagatcgccgggcgtatcttcagctataaccaatcgtttcgtgatattggcaacgttaccggaccattgatgggagcagcgatttcagcgaactacggtttcagagcggtatttctcgtcaccgctggcgtagtgttattcaacgcagtctattcatggaacagtctacgtcgtcgtcgaataccccaggtatcgaactga

SEQ ID NO: 7007 - DNA, 780 bp, Escherichia coli
atgaatcaggttgccgttgtcatcggtggtgggcaaaccttaggcgcgttcctgtgccacggtctggctgccgaggggtatcgcgtcgcggttgtcgatattcagagcgacaaagccgcaaatgtggcacaagaaattaacgccgaatatggtgaaagtatggcgtacggttttggtgctgacgccactagcgagcaaagcgttctggcgctctctcgtggggtagatgaaatctttggtcgcgtggatttgctggtctacagcgccggaatagcaaaagcagcctttatcagcgacttccagctcggcgattttgaccgttcgctacaggtgaatctggtgggttatttcctgtgtgcgcgtgaattttcgcgtttgatgatccgcgacgggattcaggggcgcattattcagatcaactcgaaatccggcaaagtgggcagcaaacacaactctggctacagcgcagcgaaatttggtggcgtcgggctgactcaatcactggcgctggatctggcggagtacggcattacggtgcattcactgatgctcggtaacctgctgaaatcgccgatgttccagtcactgttgccacaatacgcgaccaagctgggtatcaaaccggatcaagtcgagcagtattacatcgacaaagtaccgctcaaacgcggctgcgattatcaagatgtgctgaatatgctgctgttctacgccagtcctaaggcgtcgtactgcaccggacagtcgatcaatgtcaccggcggtcaggtgatgttctga

SEQ ID NO: 7008 - DNA, 960 bp, Escherichia coli
atgagtctgaatttccttgattttgaacagccgattgcagagctggaagcgaaaatcgattctctgactgcggttagccgtcaggatgagaaactggatattaacatcgatgaagaagtgcatcgtctgcgtgaaaaaagcgtagaactgacacgtaaaatcttcgccgatctcggtgcatggcagattgcgcaactggcacgccatccacagcgtccttataccctggattacgttcgcctggcatttgatgaatttgacgaactggctggcgaccgcgcgtatgcagacgataaagctatcgtcggtggtatcgcccgtctcgatggtcgtccggtgatgatcattggtcatcaaaaaggtcgtgaaaccaaagaaaaaattcgccgtaactttggtatgccagcgccagaaggttaccgcaaagcactgcgtctgatgcaaatggctgaacgctttaagatgcctatcatcacctttatcgacaccccgggggcttatcctggcgtgggcgcagaagagcgtggtcagtctgaagccattgcacgcaacctgcgtgaaatgtctcgcctcggcgtaccggtagtttgtacggttatcggtgaaggtggttctggcggtgcgctggcgattggcgtgggcgataaagtgaatatgctgcaatacagcacctattccgttatctcgccggaaggttgtgcgtccattctgtggaagagcgccgacaaagcgccgctggcggctgaagcgatgggtatcattgctccgcgtctgaaagaactgaaactgatcgactccatcatcccggaaccactgggtggtgctcaccgtaacccggaagcgatggcggcatcgttgaaagcgcaactgctggcggatctggccgatctcgacgtgttaagcactgaagatttaaaaaatcgtcgttatcagcgcctgatgagctacggttacgcgtaa

SEQ ID NO: 7009 - DNA, 951 bp, Escherichia coli
atgaacgagttagacggcatcaaacagttcaccactgtcgtggcagacagcggcgatattgagtccattcgccattatcatccccaggatgccaccaccaatccttcgctgttactcaaagctgccggattatcacaatatgagcatttaatagacgatgctatcgcctggggtaaaaaaaatggcaagacccaggaacaacaggtggtcgcagcgtgtgacaaactggcggtcaatttcggtgctgaaatcctcaaaatcgtacccggtcgcgtgtcaacagaagttgatgcacgcctctcttttgataaagaaaagagtattgagaaggcgcgccatctggtggacttgtatcagcaacaaggcgttgagaaatcacgcattctgatcaagctggcttcgacctgggaaggaattcgcgcggcagaagagctggaaaaagaaggtattaactgcaacctgacgctgctgttttcttttgcacaggcacgggcctgtgcggaagcaggcgtttttctgatttcgccgtttgtcgggcgtatttatgactggtatcaggcacgcaagccgatggacccgtatgtggtggaagaagatccgggcgttaaatcggtgcgcaatatctacgactactataagcaacaccactatgaaaccattgtgatgggcgcgagcttccgtcgcaccgaacaaatcctcgccttaaccggctgcgatcgactgactatcgcaccgaatttactgaaggagctgcaggaaaaagtttcgccagtggtacgtaaattaatcccaccttctcagacgttcccacgcccagctcccatgagcgaagcggagttccgttgggagcacaatcaggatgcgatggcggtagaaaaactgtctgaaggcattcgtctgttcgccgttgatcaacgcaaactggaagatcttcttgccgccaaactataa

SEQ ID NO: 7010 - DNA, 369 bp, Escherichia coli
atgttcgacggcataagtttaaccgaacatcagcgtcagcagatgcgagatcttatgcaacaggcccggcacgaacagcctcctgttaatgttagcgaactggagacaatgcatcgccttgtcaccgcagaaaattttgatgaaaacgctgtgcgcgcacaggcagaaaaaatggcgaatgagcaaattgctcgtcaggttgagatggcaaaagtccgcaaccaaatgtatcgcctgttaacgccggagcagcaagcggttttaaacgagaaacatcaacaacgaatggagcagttgcgtgacgtgacgcaatggcaaaaaagttcatcgttgaagctattgagtagtagcaactcacgttcccagtag

SEQ ID NO: 7011 - DNA, 1425 bp, Escherichia coli
atgaaaaaaaccacattagcactgagtgcactggctctgagtttaggtttggcgttatctccgctctctgcaacggcggctgagacttcttcagcaacgacagcccagcagatgccaagccttgcaccgatgctcgaaaaggtgatgccttcagtggtcagcattaacgtagaaggtagcacaaccgttaatacgccgcgtatgccgcgtaatttccagcagttcttcggtgatgattctccgttctgccaggaaggttctccgttccagagctctccgttctgccagggtggccagggcggtaatggtggcggccagcaacagaaattcatggcgctgggttccggcgtcatcattgatgccgataaaggctatgtcgtcaccaacaaccacgttgttgataacgcgacggtcattaaagttcaactgagcgatggccgtaagttcgacgcgaagatggttggcaaagatccgcgctctgatatcgcgctgatccaaatccagaacccgaaaaacctgaccgcaattaagatggcggattctgatgcactgcgcgtgggtgattacaccgtagcgattggtaacccgtttggtctgggcgagacggtaacttccgggattgtctctgcgctggggcgtagcggcctgaatgccgaaaactacgaaaacttcatccagaccgatgcagcgatcaaccgtggtaactccggtggtgcgctggttaacctgaacggcgaactgatcggtatcaacaccgcgatcctcgcaccggacggcggcaacatcggtatcggttttgctatcccgagtaacatggtgaaaaacctgacctcgcagatggtggaatacggccaggtgaaacgcggtgagctgggtattatggggactgagctgaactccgaactggcgaaagcgatgaaagttgacgcccagcgcggtgctttcgtaagccaggttctgcctaattcctccgctgcaaaagcgggcattaaagcgggtgatgtgatcacctcactgaacggtaagccgatcagcagctttgccgcactgcgtgctcaggtgggtactatgccggtaggcagcaaactgaccctgggcttactgcgcgacggtaagcaggttaacgtgaacctggaactgcagcagagcagccagaatcaggttgattccagctccatcttcaacggcattgaaggcgctgagatgagcaacaaaggcaaagatcagggcgtggtagtgaacaacgtgaaaacgggcactccggctgcgcagatcggcctgaagaaaggtgatgtgattattggcgcgaaccagcaggcagtgaaaaacatcgctgaactgcgtaaagttctcgacagcaaaccgtctgtgctggcactcaacattcagcgcggcgacagcaccatctacctgttaatgcagtaa

SEQ ID NO: 7012 - DNA, 666 bp, Escherichia coli
atgttagatttgtttaaagcaattggcctggggctggtggtgttgctgccgttagctaacccattaacaactgtcgcgttatttcttggcctggcaggcaacatgaacagtgccgaacgtaatcgtcagtcgttgatggcctcggtgtacgtatttgccatcatgatggtggcgtattacgccgggcaactggtgatggatacatttggcatttcgattcccggtctgcgaattgcaggcggcttaatcgtcgcgtttatcggttttcggatgctctttccgcaacagaaagcgattgattcaccggaggcgaaaagcaagtcggaagagctggaagatgaacccagtgccaatattgcctttgtgccgctggcaatgccaagtactgccggtccgggaaccatagcgatgattattagctcggcgtccacagtgcgtcagagttcaaccttcgctgattgggtactgatggttgcgccgccgctgatctttttcctggtggcggttattttgtggggaagcctacgcagctccggcgcaattatgcggctggtgggcaagggtggcattgaagcgatctcccgtctgatgggattcctgctggtatgtatgggtgtgcagtttattattaacggcatcctggaaatcattaaaacgtaccattaa

SEQ ID NO: 7013 - DNA, 333 bp, Escherichia coli
atgttttctataaaaccaggacccagaaatttacctatcgacaaccccacattgttatcatggaacattactgacggggatctaaattccaaattaaatacattagaatatctaaactgtataacaaatattattaattcttgtggagtttaccctcaaggattaaaagacagagaaattatatcaacttttcacgcagaaaaagttattaatgatctgttaaaaaacgattataaaatttccctttctccagatacaacttaccgagagttgaataaagcagcacagcgtagcattacagcgccagacaggataggagaaagaaaaacatag

SEQ ID NO: 7014 - DNA, 495 bp, Escherichia coli
atgattgaaagaggtgataacagcggtgtttatcagtatggtcgtgctgaacatttcacccacattatatctgacaaaccttccccaaaagataaatatgttgcatatgctattaacattcctgactatgagctggcagccgatgtatataatattaacgtgacgtcaccttccggacagcaagaaacatttaaaatattaatcaatctagaacatctacggcaaacacttgaacgtaaatctcttactgctgttcagaaatcacaatgtgaaatcatcacccccaaaaaacctggcgaagcgattcttcatgcttttaatgccacctaccagcagatcagagaaaatatgtctgaatttgcacgttgccattatgggtatatacaaatccctccagtgacaactttccgcgtccgacggaccagaaactcccgaagaagaaaagggttactggtttcatgcttatcaacccgaagatctttgtaccatccataa

SEQ ID NO: 7015 - DNA, 306 bp, Escherichia coli
atgcagatgcgtcagcgtgatgttgctgcgctcgatgcaaaatacacgaaggagttagctgatgcgaaagctgaaaatgatgctctgcgtgatgatgttgccgctggtcgtcgtcggttgcacatcaaagcagtctgtcagtcagtgcgtgaagccaccaccgcctccggcgtggataatgcagcctccccccgactggcagacaccgctgaacgggattatttcaccctccgggaacgactggtaatgatgcaggcccaacttgaaggtgctcagcaatacataaccgagcagtgtttaaagtaa

SEQ ID NO: 7016 - DNA, 627 bp, Escherichia coli
atgatgaacttcaacaatgttttccgctggcatttgcccttcctgttcctggtcctgttaaccttccgtgccgccgcagcggacacgttattgattctgggtgatagcctgagcgccgggtatcgaatgtctgccagcgcggcctggcctgccttgttgaatgataagtggcagagtaaaacgtcggtagttaatgccagcatcagcggcgacacctcgcaacaaggactggcgcgccttccggctctgctgaaacagcatcagccgcgttgggtgctggttgaactgggcggcaatgacggtttgcgtggttttcagccacagcaaaccgagcaaacgctgcgccagattttgcaggatgtcaaagccgccaacgctgaaccattgttaatgcaaatacgtctgcctgcaaactatggtcgccgttataatgaagcctttagcgccatttaccccaaactcgccaaagagtttgatgttccgctgctgcccttttttatggaagaggtctacctcaagccacaatggatgcaggatgacggtattcatcccaaccgcgacgcccagccgtttattgccgactggatggcgaagcagttgcagcctttagtaaatcatgactcataa

SEQ ID NO: 7017 - DNA, 3324 bp, Escherichia coli
gtgacggaacaacatagcgtatttaacaagtattcaacgggcacatcgaattcatttatttttaataacgatgtcagtagcataacagggttagtcgctcaatcgaatagcacaattatcaatactgacagcggcatcattgatttgtatggtcgtggtagtgtcggcatgcttgctatagcagattcaacagcagaaaatcagggtaaaattacactggattctatgtgggtagatgcaaatgacactaccgcaatgcgagatatagctagcaacagcgccattgacttcggtacaggtgtgggagttggtactgatagttatagtggtgcagggaaaaatgcaacagcaattaaccaattgggcggtgttataactatttataacgccggcgcaggtatggcggcctatggcgccagcaatacagttattaaccaggggacgattaacctcgaaaaaaatggtaattatgacgatagtctggcagcaaatactctggtagggatggctgtttatgagcatggtactgctatcaacgaccagacgggtgttatcaatatcaatgttggtactggtcaggcgttttataacgatggcacaggaacaattgttaactatggtacaatctgcactttcggcgtgtgccaatcggggaatgagtacaataatacagatgatttcacctcactgatctataccggtggcgatacgattacacgaagcggagaaactgtaacgctaaataaatctgctgctgtgactgataagctggctgggaatgttgttaatagcggaacgctttccggtgatcaaattacggtatcaagcggtcttctggaaaataccagcggtggcatcatcaataacttagtaaaacttgacaagggtgccgtcattaaaaatgccggggtgatgacgaataacgtcgatgttagcggtggaatcctcaataatgccggagaaatgactgcgcaaattaccatgaatgctggtgctgatagttcgttagtgaacaacaccggaaccatcaataaaatcgtgcagaacgcgggggtattcaataatagtggcagtgtaacagggcggatgatgtcggctggcggggtctttaataatcaaactgacggggcgattatgagaggtgctgcgctgacaggtactgcagtggcaaataacgaaggaacctggaacctcggaagtagtagtgagggtaacaacaccgggatgctggaagttaataataattcagctttcaataaccgcggcgagtttattcttgataacgacaagaatgctgtgcacatcaaccagtccggtacgctttataataccggtcacatgaacatcagtaattcttcccacaacggagccgttaatatgtggggcggaaatggtcgttttatcaatgacggaacgattgatgtttctgcgaagtcactggtagtcagcgctaataatgccggcgatcagaatgccttcttctggaaccaggataacggggtcatcaacttcgatcacgacagcgccagtgccgtgaaagtcacccacagcaactttattgcccagaatgacggcatcatgaacatcagcggcaccggtgctgtggctatggaaggtgataagaacgcgcagctggttaacaatggcaccatcaacctcggtaccgcaggcactactgacacgggtatgatcggtatgcaactcgatgccaacgccacggcggatgcggtaatcgaaaacaacggcaccatcaatatcttcgccaatgactcgtttgcatttagcgtactgggtacagtaggtcatgtggttaacaacggcacggtggtgattgccgatggggttacgggttctggactgatcaagcagggcgacagcatcaatgttgaaggtatgaacggtaacaacggtaatagcagcgaagtgcattatggcgactatacgttgccggatgtgccgaagcccaatacggttagtgtaacgtcgggaagtgatgaggctggtggcagcatgaacaacctcaacggctatgtcgtcggtaccaacgttaacggcagcgccgggaagctgaaggttaacaatgccagcatgaacggcgtggagattaacacgggctttaccgctggtacggcagacaccactgtgagttttgataacgtagtggaaggtagcaacctgaccgacgctgacgccatcacctcaacgtccgtggtatggactgccaaaggcagcaccgatgccagcggtaacgttgacgtcaccatgagcaaaaatgcctacaccgatgtggcaacagatgcctcggtgaatgacatcgcgaaagcactggatgcgggttacaccaacaacgaactgtttaccagcctgaacgtcggcacgactgctgaactgaacagtgctctgaaacaggtcagcggtagccaggcgaccacggtattccgcgaagcgcgcgtgttaagcaaccgctttagtatgctggcagatgccgcgccgaaagtgggtaacggtctggcgttcaacgttgtcgcgaaaggcgatccgcgtgccgagttaggtaataataccgaatacgacatgctggcattgcgtaaaactatcgacctgagcgaaagccagacgatgagtctggagtacggtatcgctcgtctcgatggtgatggtgcgcagaaagcgggtgataatggcgttacaggcggttatagccagttttttggcctgaaacatcagatgtcgttcgataacggcatgaactggaataacgccttgcgttacgacgttcacaaccttgacagcagccgctcgattgcatttggcaacacgaacaaaacggctgataccgacgtgaaacagcagtacctggagttccgcagcgaaggggcgaagactttcgaaccgagcgaaggactgaaggttacgccatatgcgggtgtaaaactgcgtcacacactggaaggtggctatcaggagcgcaatgccggagactttaacctgaatatgaacagtggcagcgaaacggcggtggacagcatcgtcgggctgaaactggactacgcaggtaaagacggctggagcgctagcgctacgctggaaggcgggccgaacctgagctacgcgaagagccagcgtacggcaagcctggcaggcgcaggcagtcagcactttaacgtcgatgacggtcagaagggcggcggcatcaatagcctgacaagcgtcggcgtgaagtacagcagcaaagaaagttcgctgaatctggatgcgtacaactggaaagaggatggcatcagcgataaaggcgtgatgctgaacttcaagaaaacgttctaa

SEQ ID NO: 7018 - DNA, 1701 bp, Escherichia coli
gtgattgttaaacgacccgtctcggccagtctggcccgggcctttttttacattgtgctgctgtcgattctttccacgggtatcgctctgctaactctggcgagcagtttgcgcgacgctgaggctatcaatattgccggatcgctgcgtatgcagagttaccgcctgggctacgacttgcaaagtggcagtccacaactcaatgcacatcgccagttatttcagcaggcactgcattcaccggtattaaccaacctcaacgtctggtatgtgccagaagcagtaaaaactcgctatgcgcatctgaatgccaactggctggagatgaataatcggctcagcaagggcgatttgccgtggtatcaggccaatattaataattatgttaatcagatagacctgttcgtactggctttacagcactacgctgaacgcaaaatgctgctggtggtggcgatttccctggctggcggcatcggtattttcacgctggtcttttttactttgcgccgcatacgccatcaggtggttgccccgctgaatcagctggttaccgccagtcagcgtattgaacacgggcagttcgactcgccgccgctggataccaacctgccgaatgagcttggtctgcttgcaaaaacctttaaccagatgtcgagcgagctgcataaattgtaccgttcgctggaagcgtcagtagaagaaaagacccgcgatctccacgaggccaagcgtcgtctggaggtgttgtatcagtgttcgcaggcgctgaacactagccagattgatgtgcattgtttccgccatattttgcagattgttcgcgacaatgaagcggctgaatatctggagttaaatgtcggtgaaaactggcggattagcgaagggcaaccaaacccggaattgccgatgcagattttaccggtgacaatgcaagagacggtttacggcgaactgcactggcaaaatagtcacgtttcatcatcagaaccgctgcttaacagcgtttcgtcgatgctgggacgcggtttgtactttaatcaggcgcagaagcattttcagcaattattgttgatggaagaacgtgcgaccatcgcccgcgaattgcacgactcgctggctcaggtactttcttacttacgtatccagttgacgttactgaagcgttcgataccggaagataacgccaccgcacaaagtatcatggccgatttttcccaggcgttgaatgatgcttatcggcagttacgcgagctgttgactactttccgcctgacgctgcagcaggcggatctcccctccgcattgagggaaatgctggatacgttacaaaatcaaaccagcgccaaactgaccctcgactgccgtctgccaaccctggcactggatgcgcaaatgcaggtgcatttgttgcaaattattcgcgaagcggtgctgaatgcgatgaagcacgccaacgccagcgaaatcgccgtcagttgcgtcaccgcgccggacggcaatcacacggtttatatccgtgataacgggattggtatcggtgaaccgaaagaacccgaaggtcattatggtctgaatatcatgcgcgaacgcgcggaacggctaggtgggacgctgactttttcacaaccttccggcggcggcacgttagtgagtattagctttcgctctgcggagggtgaggaaagtcagttaatgtaa

SEQ ID NO: 7019 - DNA, 1446 bp, Escherichia coli
atgcaggaaatctatcgttttatcgacgatgcgattgaagccgatcgccaacgttataccgatattgccgatcaaatctgggatcatccagaaacacgttttgaagagttctggtcagcggagcatctggcttcggcgctggaatctgcaggcttcaccgttacccgcaacgtaggcaatatcccaaatgcctttattgcttcgtttggtcaaggcaaaccggttatcgccctgctgggagaatatgacgccctggcaggtttaagtcagcaagcaggttgcgcgcaacctacatccgtgacgcccggtgaaaatggtcacggttgcggacacaatttgctgggaaccgccgcctttgccgctgcaatagccgtcaagaaatggctggaacaatatgggcaaggcggcacggtgcgcttttatggttgtcctggcgaagaaggcggctcgggtaaaacgttcatggttcgcgagggggtatttgatgatgtggatgcggcactcacctggcacccggaagcctttgccggtatgttcaatacccgcacgctggcaaacattcaggcatcatggcgctttaaagggatcgcagcacatgccgcgaattcccctcatttgggacgcagcgcccttgatgccgtaacgttgatgaccactggcaccaacttcctcaacgaacatattattgaaaaagcgcgcgtacactatgccatcacaaatagcggcgggatctcgcccaacgtggtccaggcgcaggcagaagtgctttatcttatccgcgcccccgaaatgaccgacgtgcagcatatttatgatcgggtcgccaaaatcgccgaaggtgcggcattgatgaccgaaaccacggttgaatgccgcttcgacaaagcctgttccagttatctcccgaatcgcaccttagaaaatgccatgtaccaggccctatcccattttggtaccccggaatggaactccgaagaactggcttttgcgaaacaaattcaggctacgctcacctccaacgatcggcaaaacagtctgaataatatcgccgcaaccggtggcgaaaacggcaaggtttttgcactacgtcatcgtgaaacggtactggcgaatgaagtcgctccatatgccgccaccgataacgtgcttgcggcatcgactgatgtcggcgacgtcagttggaaactgcctgttgcccagtgtttcagcccctgttttgccgtcggtacaccgctacatacgtggcaactggttagccaggggcgaacatctattgctcataaaggaatgctgctggcggcgaaaactatggcagcaaccacagtcaatctcttccttgattcagggctattgcaagaatgccaacaagagcatcagcaagtaacggacacgcaaccgtatcactgccctatcccgaaaaacgtgacaccgtcacctttaaaataa

SEQ ID NO: 7020 - DNA, 1041 bp, Escherichia coli
atggtctggttagcgaatcccgaacgttacgggcagatgcaataccgctattgcggaaaaagtggtttacgcctgcccgcgttatcgctcggtttatggcacaatttcggtcacgttaacgcgctggaatcacagcgtgcgatcctgcgtaaagcgtttgatttgggcattacgcactttgatttagccaacaattacgggccgcctccaggaagcgcagaagagaactttggtcgcctgctgcgggaggattttgccgcttatcgcgatgaactgattatctctaccaaggctggctacgatatgtggcccggcccttacggctctggcggttcacgtaaatacctgctcgccagcctcgaccaaagcctgaagcgtatggggcttgagtatgtcgatatcttttactctcatcgcgtcgatgaaaatacgccgatggaagaaaccgcctctgcgctggctcatgcggtacaaagcggtaaggcgctgtatgtcgggatctcctcttactcgccagagcggacgcaaaaaatggtcgagttgctgcgcgagtggaaaattccgctgttaattcatcaaccttcgtacaatttactgaaccgctgggtggataaaagcggcctgctggataccctgcaaaataacggcgtgggctgtattgcctttactcctctggctcagggattgctgaccggaaaatatctcaacggcattccgcaagattcacggatgcatcgtgaagggaataaagttcgtggtctgacaccgaaaatgcttaccgaagccaacctcaacagcctgcgcttattgaatgaaatggcacagcagcgtggacaatcaatggcgcaaatggcgttaagctggttgctgaaagatgatcgcgtgacgtcggtattgattggtgccagccgcgcggagcaactagaggagaacgtgcaggcgctgaataatctgacatttagcaccaaggagctggcgcagattgatcagcatatcgccgatggcgagctgaatctgtggcaggcgtcttccgataaatga

SEQ ID NO: 7021 - DNA, 1455 bp, Escherichia coli
atgaataataagggctccggtctgaccccagctcaggcactggataaactcgacgcgctgtatgagcaatctgtagtcgcattacgcaacgccattggcaactatattacaagtggcgaattacctgatgaaaacgcccgcaaacaaggtctttttgtctatccatcactgaccgtaacctgggacggtagcacaaccaatccccccaaaacgcgcgcatttggtcgctttacccacgcaggcagctacaccaccacgattactcgccctactctctttcgttcgtatcttaatgaacaacttacgttgctgtatcaggattatggtgcgcatatctcagtgcaaccctcgcagcatgaaatcccttatccttatgtcatcgatggctctgaattgacacttgatcgctcaatgagcgctgggttaactcgctacttcccgacaacagaactggcgcaaattggcgatgaaactgcagacggcatttatcatccaactgaattctccccgctatcgcattttgatgcgcgccgcgtcgatttttccctcgcacggttgcgccattataccggtacgccagttgaacattttcagccgttcgtcttgtttaccaactacacacgttatgtggatgaattcgttcgttggggatgcagccagatcctcgatcctgatagtccctacattgccctttcttgtgctggcgggaactggatcaccgccgaaaccgaagcgccagaagaagccatttccgaccttgcatggaaaaaacatcagatgccagcatggcatttaattaccgccgatggtcagggtattactctggtgaatattggcgtgggaccgtcaaatgctaaaaccatctgcgatcatctggcagtgctacgcccggatgtctggttgatgattggtcactgtggcggattacgtgaaagtcaggccattggcgattatgtacttgcacacgcttatttacgcgatgaccacgttcttgatgcggttctgccgcccgatattcctattccgagcattgctgaagtgcaacgtgcgctttatgacgccaccaagctggtgagcggcaggcccggtgaggaagtcaaacagcggctacgtactggtactgtggtaaccacagatgacaggaactgggaattacgttactcagcttctgcacttcgttttaacttaagccgggccgtagcaattgatatggaaagtgcaaccattgccgcgcaaggatatcgtttccgcgtgccatacgggacactactgtgtgtttcagataaaccgttgcatggcgagattaaacttcccggccaggctaaccgtttttatgaaggcgctatttccgaacatctgcaaattggcattcgggcgatcgatttgctgcgcgcagaaggcgaccgactgcattcgcgtaaattacgaacctttaatgagccgccgttccgataa

SEQ ID NO: 7022 - DNA, 1593 bp, Escherichia coli
atggctcgactctttaccctttcagaatcaaagtactacctgatggcgctggatgcaggcaccggaagtattcgggctgtgatattcgacctggaaggcaatcaaatagcagtgggacaggcggagtggcggcatctggcagtaccggacgttcctggttctatggaatttgatctcaacaaaaactggcaactggcgtgtgagtgtatgcgccaggcgctgcacaacgccggcatagccccggagtatatcgctgccgtttcggcatgttcgatgcgtgaaggcattgttttatataataatgaaggagccccgatctgggcctgcgccaatgtggatgccagagcggcacgcgaagttagcgaacttaaagaactgcacaacaatacctttgaaaacgaagtttatcgcgcgaccggacaaacactggctttaagtgccatccccagattactttggctggcgcaccatcgttccgatatttaccgtcaggcatcaaccatcaccatgatcagcgactggctggcctatatgctcagcggcgaactggcggtggatccctctaacgctggcaccacgggacttcttgatctaaccacccgtgactggaaacctgcattgctggatatggctggcctacgtgccgatattctttctcctgtcaaagaaaccggcacattgctgggcgtggtaagttcacaagcggcggaactctgcggtctgaaggcgggcactccggtggtcgttggaggaggcgacgtgcagcttggttgccttgggttaggcgttgtgcgtccggcacaaaccgcggttcttggcggcacattctggcagcaagttgtaaatttagccgcgccggtgacagacccagaaatgaacgtgcgcgttaatcctcatgttattcctggcatggtacaagctgaatctataagcttttttaccggactcaccatgcgctggttccgcgatgctttctgtgccgaagaaaaactgattgccgaacgtttaggcatcgacacctatacgctgctggaagagatggccagtcgggtgccgcctgggtcgtggggcgtaatgccgatcttctccgacagaatgcgctttaaaacctggtatcacgctgcgccttcctttattaacttgtccattgacccggataaatgtaacaaagcgacattgttccgtgcgctggaagaaaatgcggcgattgtatcagcgtgtaacttgcagcaaattgctgatttctcgaatattcatccttcatcgttagtctttgcaggcggaggttcaaaagggaaattatggagtcaaattctcgctgatgtctcgggattacccgtcaatattccggtggtcaaagaagccactgcattaggatgtgccattgcagctggcgtcggtgccggaattttttcatcaatggcagaaaccggagaacgcctggttcgctgggaacggacgcacacaccagacccggaaaagcatgaactttatcaggattcacgcgataagtggcaggcagtttatcaggatcagctggggctggttgatcatggactgacgacgtcgttatggaaagcgcctgggttatag

SEQ ID NO: 7023 - DNA, 1539 bp, Escherichia coli
atggcttttgcctcattaattgaacgccagcgcattcgcctgctgctggcgttattattcggtgcctgcggaacgctggccttctctccttacgacgtctggcctgcggcgattatttcgctgatggggcttcaggcgttgacctttaaccgccgtccactccagtctgccgctattggcttttgctggggatttggcctctttggcagcggtattaactgggtctatgtcagcatcgcgacctttggcggaatgcctggcccggttaacatcttcctggtggtgctgctggcggcgtatttgtcgctgtataccggactgtttgctggcgtgctgtcgcgtctgtggccgaaaaccacctggctgcgcgtagcgattgccgcccctgccctctggcaagtgaccgagtttctgcgcggttgggtactgaccggcttcccgtggttacagttcggctatagccagattgatggcccgttaaaagggctggcaccgataatgggcgtggaagccattaacttcctgctgatgatggttagtggcctgctggcactggcgttggtcaaacgcaactggcgtccgctggtggtggccgtcgtgctgtttgcccttcccttcccgctgcgttacatccagtggtttaccccacaaccggagaaaaccattcaggtttcgatggttcagggcgatattccgcaatcgctgaaatgggacgaaggccagcttcttaatacgctgaagatttactacaacgcaacggcaccgctgatgggcaaatcatcgttgattatctggccggagtcggcgataaccgatctggaaattaatcagcaaccgttcctcaaagcactggacggtgagttgcgtgataaaggtagctcgctggtaaccgggattgtcgacgcgcgtctcaataagcagaaccgctacgatacctacaacaccatcatcacgctgggtaaaggtgcgccgtacagctacgaatcagccgatcgctataacaaaaaccatctggtgccgtttggcgagtttgtcccgctggagtcgattctgcgtccgttagcaccgttctttgatctgccgatgtcgtcgttcagccgtgggccatatatccagccgccgctgtcggcaaatggtattgagcttactgcggctatttgctacgagatcattctcggcgagcaagtgcgcgataacttccgcccggataccgactatctgctgactatctccaacgatgcgtggtttggtaaatctattggtccatggcaacacttccagatggcgcgaatgcgtgcgctggagctggcgcgcccactgttgcgcagcaccaacaacggcattacggcggtgattggcccgcagggtgagattcaggcgatgatcccgcagttcacccgcgaggtgttaaccactaacgtgacgccgaccaccggactcacaccatacgcacgtaccggcaactggccgctgtgggtgctgacggcattgtttggttttgctgctgtgttgatgagtctgcgtcagcgacgtaaataa

SEQ ID NO: 7024 - DNA, 879 bp, Escherichia coli
atgagcgacgacaattcacacagtagtgacacgataagcaacaagaagggatttttctccctgttactcagccaacttttccacggtgaaccgaaaaaccgtgacgaactgctggcgctgatccgtgattccgggcagaacgaccttatcgacgaagatacgcgcgatatgctcgaaggggtgatggacatcgcagaccaacgcgttcgcgacatcatgatcccccgctcccagatgattaccctgaaacgcaaccagacgctggacgaatgtcttgatgtcatcatcgagtccgcccactcacgtttcccggtgattagcgaagacaaagatcacattgaagggattctgatggcgaaagacttgctgccgtttatgcgcagcgatgctgaagccttcagcatggacaaagtgttacgtcaggcggttgtcgttcctgaaagtaagcgcgtagaccggatgctgaaagagtttcgctctcagcgttaccacatggcgatcgttattgacgaattcggtggggtttccggtctggtgaccattgaagacatcctggaactgattgttggtgagattgaagacgagtatgacgaagaagatgatatcgacttccgtcagctgagtcgtcatacctggaccgtacgcgcactggcttccattgaagacttcaacgaagcgttcggcacccactttagcgatgaagaagtcgacactatcggtggtctggtgatgcaggcatttgggcatcttccggcgcgtggcgaaactatcgacatcgacggttaccagttcaaagtggcgatggccgacagtcggcgtattattcaggttcatgtcaaaatcccggatgactcaccccagccgaagctggatgaataa

SEQ ID NO: 7025 - DNA, 2244 bp, Escherichia coli
atgaaactgaatgcaacttatataaaaatacgtgataaatggtgggggcttccgctgttcctgccttctttaatcttgcccattttcgcccacattaatactttcgcgcatatttcttccggtgaggtttttctcttttatctgcctctggcactgatgatcagcatgatgatgtttttcagctgggcggcattgccagggatcgccttagggatttttgtccgcaaatatgcagagctgggtttttacgaaacgctatcattaacggctaattttattatcattatcattctctgttggggcggttacagggtctttactccccggcgtaacaacgtttcacatggtgatacccgtttaatttcccagcgtatattctggcagattgtgtttcctgcaacgctgtttctgatacttttccagtttgctgcatttgtaggattactggcgagcagagaaaatctggtcggtgtcatgccttttaacctcgggactttaatcaattatcaggccttactggtgggtaatctgatcggtgtcccgctgtgctacttcatcattcgggtagtgcgaaatccattttatttacgtagctattattcgcaattaaaacagcaggttgatgccaaagtcaccaaaaaagagttcgcgctctggctactggcattaggtgctttattgttgctgttatgcatgccgttaaatgaaaaaagcacaatttttagcaccaattataccttgtcattattgctgcccctgatgatgtggggagcgatgcgctatggttataagctgatttcgctgctctgggcggtcgtgttgatgatcagcatccacagctatcaaaattacattcccatttatcctggctataccacgcagctgaccataacctcctccagttatctggtattctcttttattgtcaattatatggctgtactggcaacccgtcagagagcggtagtcagacgcattcagcggcttgcgtatgtggacccggtggttcatctgccaaatgttcgcgccctgaatcgcgcgttgcgtgatgccccctggtctgcgctttgttatttacgcatccctggcatggaaatgctggttaagaactatggcatcatgctgcggattcaatacaagcaaaaactttctcactggctgtcacccttgctggaaccgggtgaagatgtttatcagctttcgggtaacgatctcgcgctgcgactgaatacagaatcgcaccaggagcgcattaccgcactggatagccatctcaagcaatttcgtttcttttgggatggcatgccgatgcaaccgcagattggcgtcagttactgctatgtgcgctcgccagtgaatcatatctacctgctgctgggagagctaaatacggtcgccgaactttccatcgtgaccaacgccccggaaaatatgcagcgtcgcggggcaatgtatttgcaacgcgaattgaaagataaagtcgcgatgatgaatcgactacagcaggcgctggaacacaaccattttttcctgatggcccagccgattaccggtatgcgtggtgatgtttaccatgaaattcttctgcgcatgaaaggtgagaatgatgaactgatcagccccgatagcttcttgccggtcgcgcacgaatttggtttatcgtcgagtatcgacatgtgggtcattgagcatacgctgcaatttatggctgaaaacagagcgaagatgcccgctcaccgttttgctattaatctgtctccaacctcggtatgtcaggctcgttttcctgttgaagtcagtcagttgctggctaaatatcagattgaagcgtggcaacttatttttgaagtcaccgaaagtaatgctctgaccaatgttaagcaggcgcaaatcaccttgcagcatcttcaggaattaggctgccagattgcgattgatgatttcggcaccggctacgccagctatgcgcggcttaaaaatgtgaatgccgatctgcttaaaattgacggcagttttatccgcaatattgtgtcaaatagtctggattatcagatagtggcatcgatttgccacctggcgcgaatgaagaaaatgctggtagtggcagagtacgttgaaaacgaagagatccgcgaggcggtgctctctttggggatcgattatatgcagggttatcttattggtaagccgcagccgttaattgatacgctgaatgaaatcgaacccattcgcgaaagtgcctga

SEQ ID NO: 7026 - DNA, 1065 bp, Escherichia coli
gtgatctcgccgcgaaaacatcaatattatccattttgctgtaacataattgctttaattgttaataatattttgcaatcaagttatcataatcaaacaacttcacttgtcagcgacaccgcttcgtttttaacatcgcttatggaaaaaaatagtctgtttagtcagcgcatccgtttgcgccaccttcatacattcgtagctgtcgcacaacaaggaactttggggcgcgcggctgaaacccttaatttgagtcaacctgcgctctctaagacattgaatgaactggagcagctgactggcgctcgcttgtttgagcgtggtcgtcagggggcgcaacttaccttacccggcgaacaatttttaacgcatgcagtcagagttcttgacgccatcaacactgccggacggtcgcttcatcgtaaagaaggtcttaataatgatgtcgtcagggttggtgcactacctactgcggcactggggatattaccttcggttataggtcagtttcatcagcaacaaaaagagacgaccttgcaagttgcgacaatgagtaaccctatgattctggcgggtttaaaaaccggggaaatcgatatcggcattggtcggatgtcagatcctgaactgatgaccgggcttaattacgaactgctgtttcttgaatcgttgaagctggttgtccgccctaatcacccgctacttcaggagaacgtaacgctaagccgggtgctggaatggccggtcgttgtatcaccagaaggcactgcgccacgccagcattcagatgcattagtgcagagccagggctgtaaaattccttcgggttgtatcgaaacgctgtctgcttcgctatctcgtcaacttacggttgaatacgattacgtgtggtttgtcccttctggcgctgtaaaagacgacctgcgtcatgccacgctggtggccctgcctgttccgggacatggtgcaggcgaaccgattggaatactgacccgcgtagatgcgacgttctcttctggttgccagttgatgattaacgctattcgaaaatcaatgccgttctga

SEQ ID NO: 7027 - DNA, 168 bp, Escherichia coli
atggctaaaggtattcgtgagaaaatcaagctggtttcttctgctggtactggtcacttctataccactacgaagaacaaacgtactaagccggaaaaactggaactgaaaaaattcgatccagttgttcgccagcacgtgatctacaaagaagcgaaaatcaaataa

SEQ ID NO: 7028 - DNA, 141 bp, Escherichia coli
atgaggccgtttttacaggagtatttaatgcgtcggctgttgcactatctcatcaataatattcgcgagcatctgatgctttatctttttctctggggattgttggcaattatggatctgatctatgtgttttatttttag

SEQ ID NO: 7029 - DNA, 1119 bp, Escherichia coli
atgaaatacgatctcatcattattggcagcggttccgtaggcgctgccgccgggtattatgcaacccgcgccggtttaaacgtgctaatgaccgacgcccatatgccaccgcatcaacacggcagccaccacggcgatacgcgattaattcgccatgcttatggtgaaggcgaaaagtatgtcccgctggtcctccgcgcgcaaacgctgtgggatgaactctcccgccacaacgaagaagatcccatttttgtacgctctggcgtcattaaccttggcccggctgattccacatttctcgccaacgtcgcccacagcgccgaacaatggcaactcaacgttgaaaagctcgatgcgcaagggattatggcccgctggccggaaatacgcgtcccggacaactacatcggcttatttgaaactgattccggttttttgcgcagcgaactggcgattaaaacctggatccaactggcgaaggaagcgggctgtgcgcaactgttcaactgcccggtcaccgcaattcgtcatgacgatgatggcgtaactattgaaacggctgacggtgagtatcaggcgaaaaaagcgattgtctgcgcgggaacatgggtaaaagacctgctcccggagctgcctgtccagcccgtacgcaaagtatttgcctggtatcaggccgatggccgctatagcgtgaagaataaattcccggcgtttaccggtgaactgcccaatggcgatcaatattatggttttccggcagaaaacgacgcgttgaagattggcaaacataacggaggccaggttatccattcagcggatgaacgtgttccgtttgcggaagtggccagtgatgggtcagaagccttcccgttcttgcgcaatgtattgccgggtatcggttgctgcctgtacggcgctgcctgcacctatgataattcgcctgacgaagattttattatcgataccctacccggccacgataatacactgctcattaccggcctgagtgggcacggttttaaatttgcgtcagttttaggggaaatagctgccgattttgcgcaagacaaaaaaagcgattttgatttgacgccattcaggctttcccgcttccaataa

SEQ ID NO: 7030 - DNA, 2637 bp, Escherichia coli
atgtcatatctgaatttaagactttaccagcgaaacacacaatgcttgcatattcgtaagcatcgtttggctggtttttttgtccgactcgttgtcgcctgtgcttttgccgcacaggcacctttgtcatctgccgacctctattttaatccgcgctttttagcggatgatccccaggctgtggccgatttatcgcgttttgaaaatgggcaagaattaccgccagggacgtatcgcgtcgatatctatttgaataatggttatatggcaacgcgtgatgtcacatttaatacgggcgacagtgaacaagggattgttccctgcctgacacgcgcgcaactcgccagtatggggctgaatacggcttctgtcgccggtatgaatctgctggcggatgatgcctgtgtgccattaaccacaatggtccaggacgctactgcgcatctggatgttggtcagcagcgactgaacctgacgatccctcaggcatttatgagtaatcgcgcgcgtggttatattcctcctgagttatgggatcccggtattaatgccggattgctcaattataatttcagcggaaatagtgtacagaatcggattgggggtaacagccattatgcatatttaaacctacagagtgggttaaatattggtgcgtggcgtttacgcgacaataccacctggagttataacagtagcgacagatcatcaggtagcaaaaataaatggcagcatatcaatacctggcttgagcgagacataataccgttacgttcccggctgacgctgggtgatggttatactcagggcgatattttcgatggtattaactttcgcggcgcacaattggcctcagatgacaatatgttacccgatagtcaaagaggatttgccccggtgatccacggtattgctcgtggtactgcacaggtcactattaaacaaaatgggtatgacatttataatagtacggtgccaccggggccttttaccatcaacgatatctatgccgcaggtaatagtggtgacttgcaggtaacgatcaaagaggctgacggcagcacgcagatttttaccgtaccctattcgtcagtcccgcttttgcaacgtgaagggcatactcgttattccattacggcaggagaataccgtagtggaaatgcgcagcaggaaaaaacccgctttttccagagtacattactccacggccttccggctggctggacaatatatggtggaacgcaactggcggatcgttatcgtgcttttaatttcggtatcgggaaaaacatgggggcactgggcgctctgtctgtggatatgacgcaggctaattccacacttcccgatgacagtcagcatgacggacaatcggtgcgttttctctataacaaatcgctcaatgaatcaggcacgaatattcagttagtgggttaccgttattcgaccagcggatattttaatttcgctgatacaacatacagtcgaatgaatggctacaacattgaaacacaggacggagttattcaggttaagccgaaattcaccgactattacaacctcgcttataacaaacgcgggaaattacaactcaccgttactcagcaactcgggcgcacatcaacactgtatttgagtggtagccatcaaacttattggggaacgagtaatgtcgatgagcaattccaggctggattaaatactgcgttcgaagatatcaactggacgctcagctatagcctgacgaaaaacgcctggcaaaaaggacgggatcagatgttagcgcttaacgtcaatattcctttcagccactggctgcgttctgacagtaaatctcagtggcgacatgccagtgccagctacagcatgtcacacgatctcaacggtcggatgaccaatctggctggtgtatacggtacgttgctggaagacaacaacctcagctatagcgtgcaaaccggctatgccgggggaggcgatggaaatagcggaagtacaggctacgccacgctgaattatcgcggtggttacggcaatgccaatatcggttacagccatagcgatgatattaagcagctctattacggagtcagcggtggggtactggctcatgccaatggcgtaacgctggggcagccgttaaacgatacggtggtgcttgttaaagcgcctggcgcaaaagatgcaaaagtcgaaaaccagacgggggtgcgtaccgactggcgtggttatgccgtgctgccttatgccactgaatatcgggaaaatagagtggcgctggataccaataccctggctgataacgtcgatttagataacgcggttgctaacgttgttcccactcgtggggcgatcgtgcgagcagagtttaaagcgcgcgttgggataaaactgctcatgacgctgacccacaataataagccgctgccgtttggggcgatggtgacatcagagagtagccagagtagcggcattgttgcggataatggtcaggtttacctcagcggaatgcctttagcgggaaaagttcaggtgaaatggggagaagaggaaaatgctcactgtgtcgccaattatcaactgccaccagagagtcagcagcagttattaacccagctatcagctgaatgtcgttaa

SEQ ID NO: 7031 - DNA, 219 bp, Escherichia coli
atgtttcattgtcctttatgccagcatgccgcacatgcgcgtacaagccgctatatcactgacacgacaaaagagcgttatcaccagtgtcagaacgtgaattgcagcgccacgttcatcacttatgagtcggtacagcgatacattgtgaagccgggagaagtccacgtcgtaaggccgcacccgttgccgtcagggcagcaaattatgtggatgtaa

SEQ ID NO: 7032 - DNA, 861 bp, Escherichia coli
atgagcattatctccactaaatatctgttacaggacgcccaggccaatggctacgcggtgcctgcttttaacattcataacgccgagacgatccaagcgatcctcgaagtgtgcagtgaaatgcgatcgccggtgatcctcgccggaacgccggggacctttaaacacatcgcgctggaagagatctacgccctgtgtagcgcctattccacaacctacaacatgccactggcgctgcatctcgaccaccacgaatcgctggatgatattcgccgtaaagtccacgcaggtgtgcgcagtgcgatgatcgacggcagccacttcccgtttgccgagaacgtgaagctggtgaaatcggttgttgacttctgccactcacaagattgcagcgtggaagcagaactgggccgcctgggcggtgttgaagatgacatgagcgttgacgccgaaagtgcattcctgaccgatccacaagaagctaaacgctttgtcgaactgactggcgtcgacagcctggcggtagcgattggtacggcgcacggcttatacagcaaaacgccgaagattgatttccagcggctggcggaaattcgtgaagtggtggatgttcctctggtgctgcatggtgccagcgatgttccggatgaatttgtccgtcgcactattgaacttggcgtcacaaaagtgaacgttgccacagaattaaaaatagccttcgctggcgcggttaaagcctggtttgcggaaaatccgcagggtaatgatcctcgttattatatgcgcgtcggaatggatgcgatgaaagaagttgtcagaaataaaattaatgtctgtggttcagcgaatcgaatttcagcataa

SEQ ID NO: 7033 - DNA, 1008 bp, Escherichia coli
atgcccctcgattccacaaacatcaggcagaccatgacagacttaatccaacgccctcgtcgcctgcgcaaatctcctgcgctgcgcgctatgtttgaagagacaacacttagccttaacgacctggtgttgccgatctttgttgaagaagaaattgacgactacaaagccgttgaagccatgccaggcgtgatgcgcattccagagaaacatctggcacgcgaaattgaacgcatcgccaacgccggtattcgttccgtgatgacttttggcatctctcaccataccgatgaaaccggcagcgatgcctggcgggaagatggactggtggcgcgtatgtcgcgcatctgcaagcagaccgtgccagaaatgatcgttatgtcagacacctgcttctgtgaatacacttctcacggtcactgcggtgtgctgtgcgagcatggcgtcgacaacgacgcgactctggaaaatttaggcaagcaagccgtggttgcagctgctgcaggtgcagacttcatcgccccttccgccgcgatggacggccaggtacaggcgattcgtcaggcgctggacgctgcgggatttaaagatacggcgattatgtcgtattcgaccaagttcgcctcctccttttatggcccgttccgtgaagctgccggaagcgcattaaaaggcgaccgcaaaagctatcagatgaacccaatgaaccgtcgtgaggcgattcgtgaatcactgctggatgaagcccagggcgcagactgcctgatggttaaacctgctggagcgtacctcgacatcgtgcgtgagctgcgtgaacgtactgaattgccgattggcgcgtatcaggtgagcggtgagtatgcgatgattaagttcgccgcgctggcgggtgctatagatgaagagaaagtcgtgctcgaaagcttaggttcgattaagcgtgcgggtgcggatctgattttcagctactttgcgctggatttggctgagaagaagattctgcgttaa

SEQ ID NO: 7034 - DNA, 306 bp, Escherichia coli
atggcaactttgttacaacttcattttgcttttaatggcccatttggcgacgcaatggctgagcagcttaaaccacttgctgagtcgattaatcaggaacctggttttctgtggaaggtatggacagaaagtgaaaagaaccacgaagccggtgggatctaccttttcactgatgaaaaaagcgcccttgcctatctggaaaaacatactgcccgactgaaaaatctcggcgttgaggaagttgtcgccaaagttttcgatgtcaatgagccacttagtcaaatcaatcaggcaaaactcgcctga

SEQ ID NO: 7035 - DNA, 978 bp, Escherichia coli
ttgcatatgaaaaaaataatctttgcttttattatattatttgtgtttttactccctatgattattttttaccaaccctgggtcaatgcattaccgtcaacgccccgacacgcaagtcctgagcaattagaaaaaacagttcgttatcttacacaaactgtgcatccacgtagtgccgacaatattgataatctgaataggtccgcagaatatataaaagaggtctttgtcagtagcggtgccagagttacctcgcaggacgtccccattacgggtggcccctacaaaaacattgttgctgattatggtcctgccgatggaccgctgattattattggtgcgcattatgactctgccagcagttatgaaaacgatcaattgacctatacgccgggcgcggatgataacgccagcggtgtggcaggattactcgaactggcacgtttgttacatcagcaagtaccgaaaacaggcgtgcagctggtcgcctatgcgtcggaagaaccgcccttctttcgtagcgatgaaatggggagcgcggtgcatgcagcttcgcttgagcgtccagtgaaattaatgatagcactggagatgattggctattacgactctgcgcctggaagccagaattacccttacccggcaatgtcctggctttatcccgatcggggagactttattgccgtggtcggcagaatacaggatatcaacgccgttcgtcaggtaaaagcggcattgttgtcatctcaggatttatctgtttattctatgaataccccagggtttattcccggtattgatttctctgaccacctgaattattggcaacacgatattcccgccataatgattactgacaccgctttttatcgtaataaacaataccacttgcccggtgataccgcagacagattgaattatcagaaaatggctcaggtagtggatggtgttataactttgttatacaacagtaaataa

SEQ ID NO: 7036 - DNA, 1047 bp, Escherichia coli
atgactgcaccatcccaggtattaaagatccgccgcccagacgactggcaccttcacctccgcgatggcgacatgttaaaaactgtcgtgccatataccagcgaaatttatggacgggctatcgtaatgcccaatctggctccgcccgtgaccaccgttgaggctgccgtggcgtatcgccagcgtattcttgacgccgtacctgccgggcacgatttcaccccattgatgacctgttatttaacagattcgctggatcctaatgagctggagcgcggatttaacgaaggcgtgttcaccgctgcaaaactttacccggcaaacgcaaccactaactccagccacggcgtgacgtcaattgacgcaatcatgccggtacttgagcgcatggaaaaaatcggtatgccgctactggtgcatggtgaagtgacacatgcagatatcgacatttttgatcgtgaagcgcgctttatagaaagcgtgatggaacctctgcgccagcgcctgactgcgctgaaagtcgtttttgagcacatcaccaccaaagatgctgccgactatgtccgtgacggaaatgaacggctggctgccaccatcactccgcagcatctgatgtttaaccgcaaccatatgctggttggaggcgtgcgtccgcacctgtattgtctacccatcctcaaacgtaatattcaccaacaggcattgcgtgaactggtcgccagcggttttaatcgagtattcctcggtacggattctgcgccacatgcacgtcatcgcaaagagagcagttgcggctgcgcgggctgcttcaacgccccaaccgcgctgggcagttacgctaccgtctttgaagaaatgaatgctttgcagcactttgaagcattctgttctgtaaacggcccgcagttctatgggttgccggtcaacgacacattcatcgaactggtacgtgaagagcaacaggttgctgaaagcatcgcactgactgatgacacgctggtgccattcctcgccggggaaacggtacgctggtccgttaaacaataa

SEQ ID NO: 7037 - DNA, 561 bp, Escherichia coli
atgaacaagtttttatttgccgctgcattgatcgtcagtggcctgctcgttggctgtaatcaactcacccaatacaccatcaccgaacaagaaattaaccagtcgcttgcgaaacataataatttctcaaaagatatcggtttacccggcgtggctgacgcccatattgttctgacaaacctgaccagccaaattggtcgcgaagagccgaataaggttaccctaaccggagacgccaatctggacatgaactccctgttcggtagtcagaaagcgaccatgaaactgaagctgaaagcgctgcccgtgtttgataaagaaaaaggtgcgatcttcctgaaagagatggaagtggtcgatgcgacggtacaaccggaaaaaatgcaaacggtgatgcaaacgttgcttccctatttgaaccaggcattacgcaattactttaaccagcaacctgcttacgtcctgcgcgaagatggcagccagggcgaagcaatggcgaaaaaactggcgaaaggcattgaagtgaagccaggcgaaattgtcattccatttactgattaa

SEQ ID NO: 7038 - DNA, 690 bp, Escherichia coli
atgaaaaaaattatcgcattgatgttgtttttgacattctttgcccacgccaacgactccgagcctggcagccagtatttaaaggcagcagaggccggggaccgacgcgcacaatattttcttgccgacagctggtttagctccggcgatttgagcaaagccgaatattgggcacagaaagccgccgacagcggtgatgctgatgcctgcgcgctgctggcgcagatcaaaatcaccaatccggtcagtctggactatccacaagcaaaagttcttgcagagaaagcggcgcaagcgggcagtaaagaaggtgaagtaacgctggcgcatattctggtaaatactcaagcgggtaaaccggattatccaaaggcaatttcgctgttagaaaacgcctcggaagatctggagaacgactctgccgtcgatgcccaaatgctgcttggtttgatttacgccaacggcgtgggcattaaggccgacgatgacaaggcaacctggtatttcaaacgcagctctgcaatttcccgaaccggttattccgagtactgggcgggaatgatgttcttaaacggtgaagaaggttttatcgagaagaacaagcaaaaggcgctgcactggttgaacctgagctgtatggaagggtttgataccgggtgtgaagagtttgaaaaattaaccaacggttaa

SEQ ID NO: 7039 - DNA, 2148 bp, Escherichia coli
atgaaaaaagtcgtcacggtttgcccctattgcgcatcaggttgcaaaatcaacctggtcgtcgataacggcaaaatcgtccgggcggaggcagcgcaggggaaaaccaaccagggtaccctgtgtctgaagggttattatggctgggacttcattaacgatacccagatcctgaccccgcgcctgaaaacccccatgatccgtcgccagcgtggcggcaaactcgaacctgtttcctgggatgaggcactgaattacgttgccgagcgcctgagcgccatcaaagagaagtacggtccggatgccatccagacgaccggctcctcgcgtggtacgggtaacgaaaccaactatgtaatgcaaaaatttgcgcgcgccgttattggtaccaataacgttgactgctgcgctcgtgtctgacacggcccatcggttgcaggtctgcaccaatcggtcggtaatggcgcaatgagcaatgctattaacgaaattgataataccgatttagtgttcgttttcgggtacaacccggcggattcccacccaatcgtggcgaatcacgtaattaacgctaaacgtaacggggcgaaaattatcgtctgcgatccgcgcaaaattgaaaccgcgcgcattgctgacatgcacattgcactgaaaaacggctcgaacatcgcgctgttgaatgcgatgggccatgtcattattgaagaaaatctgtacgacaaagcgttcgtcgcttcacgtacagaaggctttgaagagtatcgtaaaatcgttgaaggctacacgccggagtcggttgaagatatcaccggcgtcagcgccagtgagattcgtcaggcggcacggatgtatgcccaggcgaaaagcgccgccatcctgtggggcatgggtgtaacccagttctaccagggcgtggaaaccgtgcgttctctgaccagcctcgcgatgctgaccggtaacctcggtaagccgcatgcgggtgttaacccggttcgtggtcagaacaacgttcagggtgcctgcgatatgggcgcgctgccggatacgtatccgggataccagtacgtgaaagatccggctaaccgcgagaaattcgccaaagcctggggcgtggaaagcctgccagcgcataccggctatcgcatcagcgagctgccgcaccgcgcagcgcatggcgaagtgcgtgccgcgtacattatgggcgaagatccgctacaaactgacgcggagctgtcggcagtacgtaaagcctttgaagatctggaactggttatcgttcaggacatctttatgaccaaaaccgcgtcggcggcggatgttattttaccgtcaacgtcgtggggcgagcatgaaggcgtgtttactgcggctgaccgtggcttccagcgtttcttcaaggcggttgaaccgaaatgggatctgaaaacggactggcaaatcatcagtgaaatcgccacccgtatgggttatccgatgcactacaacaacacccaggagatctgggatgagttgcgtcatctgtgcccggatttctacggtgcgacttacgagaaaatgggcgaactgggcttcattcagtggccttgccgcgatacttcagatgccgatcaggggacttcttatctgtttaaagagaagtttgataccccgaacggtctggcgcagttcttcacctgcgactgggtagcgccaatcgacaaactcaccgacgagtacccgatggtactgtcaacggtgcgtgaagttggtcactactcttgccgttcgatgaccggtaactgtgcggcactggcggcgctggctgatgaacctggctacgcacaaatcaataccgaagacgccaaacgtctgggtattgaagatgaggcattggtttgggtgcactcgcgtaaaggcaaaattatcacccgtgcgcaggtcagcgatcgtccgaacaaaggggcgatttacatgacctaccagtggtggattggtgcctgtaacgagctggttaccgaaaacttaagcccgattacgaaaacgccggagtacaaatactgcgccgttcgcgtcgagccgatcgccgatcagcgcgccgccgagcagtacgtgattgacgagtacaacaagttgaaaactcgcctgcgcgaagcggcactggcgtaa

SEQ ID NO: 7040 - DNA, 921 bp, Escherichia coli
atgagcaccttaggtcatcaatacgataactcactggtttccaatgcctttggttttttacgcctgccgatgaacttccagccgtatgacagcgatgcagactgggtgattactggcgtgccgttcgatatggccacttctggtcgtgcgggtggtcgccacggtccggcagcgatccgtcaggtttcgacgaatctggcctgggaacacaaccgcttcccgtggaatttcgacatgcgtgagcgtctgaacgtcgtggactgcggcgatctggtatatgcctttggcgatgcccgtgagatgagcgaaaagctgcaggcgcacgccgagaagctgctggctgccggtaagcgtatgctctctttcggtggtgaccactttgttacgctgccgctgctgcgtgctcatgcgaagcatttcggcaaaatggcgctggtacactttgacgcccacaccgatacctatgcgaacggttgtgaatttgaccacggcactatgttctataccgcgccgaaagaaggtctgatcgacccgaatcattccgtgcagattggtattcgtaccgagtttgataaagacaacggctttaccgtgctggacgcctgccaggtgaacgatcgcagcgtggatgacgttatcgcccaagtgaaacagattgtgggtgatatgccggtttacctgacttttgatatcgactgcctggatcctgcttttgcaccaggcaccggtacgccagtgattggcggcctgacctccgatcgcgctattaaactggtacgcggcctgaaagatctcaacattgttgggatggacgtagtggaagtggctccggcatacgatcagtcggaaatcactgctctggcagcggcaacgctggcgctggaaatgctgtatattcaggcggcgaaaaagggcgagtaa

SEQ ID NO: 7041 - DNA, 870 bp, Escherichia coli
gtggtgatgaaaaattttgaagttctgcagccactacagaactccctttccggtctaccgctatgggtatctgaacgtatattgcagcagataaatcagttaacccactacgagccagtgatcggcatcatgggtaaaactggggcgggaaagagtagcctttgcaatgccctgtttgccggtgaagtatcgccggtcagcgatgtagcggcctgtacacgtgatcctttacgctttcgcctgcagattggagaacactttatgaccatcgtggatctgcccggcgtgggcgaaagtggcgttcgcgataccgagtatgctgcgctgtaccgcgaacaacttccccggctcgacctgattctgtggctgattaaggctgatgatcgggcactggcgactgatgagcatttttaccgtcaggtgattggcgaagcataccggcataagatgctgtttgttatcagccagtcagacaaagctgaacccaccagcggtggaaatatcctttccacagagcagaaacaaaatatcagccgcaaaatctgcctgctgcatgagctattccagcccgtgcatccggtgtgtgccgtgtcggttcgcctgcagtggggactaagggtgatggcagagcggatgattaagtgtctgccgcgtgagcccagcagcccggtagtagcgctactgcaacatccctttcggacatgggtagcccgggagcaggcacgtgacgatttcggtgaaaccgtagataccatactcgatacggtaagcacctttccccttattcccgccccggtgcggaccattattcaggccgtgcgttcctcggtggtgtcagtggcccgcgctgtctgggatttcttcttctga

SEQ ID NO: 7042 - DNA, 669 bp, Escherichia coli
gtgtcagaaacaggcaacctgctttgtggcgataaacaaacggcgcaaacatatcgtgctgtggctgggactggcgctggcttgtcttggtcttgccatggtgctctggctgctggtcttgcagaacgtaccggtaggcattgcttacccgatgttaagtctgaattttgtctgggtgacgctggctgcagtaaaactgtggcacgaaccggtatcgccgcgtcactggtgtggggtggcgttcattattggcggcattgtgatcctcgggagtacggtgtaatgggcctgatgtggggattattcagcgtcattattgcctcagttgcgcaattaagcctgggttttgcggcgagtcatctgccgccgatgacgcacttatgggattttatcgcggctctgttagcttttggcctggatgcccggatactgttactcgggctgctgggttatctgctttccgttttttgttggtataaaacgcttcataaacttgcgctaagcaaagcctatgccttgctcagtatgagttatgtgctggtatggattgcttcaatggtacttcccggctgggaagggactttttcgctgaaagcactactgggagtagcctgtattatgagcgggttgatgctgattttcctgcccacgacaaaacaacgttactga

SEQ ID NO: 7043 - DNA, 948 bp, Escherichia coli
atgcaaaatcggctgaccatcaaagatatcgcgcgcttaagcggcgtggggaaatctacagtttcccgggtgctgaataacgaaagcggcgtgagccagctcacccgcgagcgtgttgaagcagtgatgaatcagcatggattttccccttcccgctctgcgcgcgctatgcgtgggcaaagcgataaagtggtcgccatcattgttacccgtctggattcgttgtcagaaaatctcgccgttcaaaccatgctgccagcgttctatgaacaaggttacgacccaatcatgatggaaagtcagttttccccgcaattagttgccgaacatttgggagtgctgaaacggcgtaatatcgacggcgtagtgctgttcggttttactggcataacagaagaaatgttagcccactggcagtcatcgctggttctgctggcgcgtgacgcaaaaggctttgcttcggtctgttatgacgacgaaggggcaatcaaaatcctgatgcaacggctgtatgaccaggggcatcgtaatatcagttatctcggcgtgccgcacagtgacgtgacaaccggtaagcgacgtcacgaagcctacctggcgttctgcaaagcgcataaactgcatcccgttgccgccctgccagggcttgctatgaagcaaggctatgagaacgttgcaaaagtgattacgcctgaaactaccgccttactgtgcgcaaccgacacgctggcacttggcgcaagtaaatacctgcaagagcaacgcatcgacaccttgcaactggcgagcgtcggtaatacgccgttaatgaaattcctccatccggagatcgtaaccgtagatcccggttacgccgaagctggacgccaggcggcttgccagttgatcgcgcaggtaaccgggcgcagcgaaccgcaacaaatcatcatccccgccaccctgtcctga

SEQ ID NO: 7044 - DNA, 1242 bp, Escherichia coli
gtgtctaagcgtcgtgtagttgtgaccggactgggcatgttgtctcctgtcggcaataccgtagagtctacctggaaagctctgcttgccggtcagagtggcatcagcctaatcgaccatttcgatactagcgcctatgcaacgaaatttgctggcttagtaaaggattttaactgtgaggacattatctcgcgcaaagaacagcgcaagatggatgccttcattcaatatggaattgtcgctggcgttcaggccatgcaggattctggccttgaaataacggaagagaacgcaacccgcattggtgccgcaattggctccgggattggcggcctcggactgatcgaagaaaaccacacatctctgatgaacggtggtccacgtaagatcagcccattcttcgttccgtcaacgattgtgaacatggtggcaggtcatctgactatcatgtatggcctgcgtggcccgagcatctctatcgcgactgcctgtacttccggcgtgcacaacattggccatgctgcgcgtattatcgcgtatggcgatgctgacgtgatggttgcaggtggcgcagagaaagccagtacgccgctgggcgttggtggttttggcgcggcacgtgcattatctacccgcaatgataacccgcaagcggcgagccgcccgtgggataaagagcgtgatggtttcgtactgggcgatggtgccggtatgctggtacttgaagagtacgaacacgcgaaaaaacgcggtgcgaaaatttacgctgaactcgtcggctttggtatgagcagcgatgcttatcatatgacgtcaccgccagaaaatggcgcaggcgcagctctggcgatggcaaatgctctgcgtgatgcaggcattgaagcgagtcagattggctacgttaacgcgcacggtacttctacgccggctggcgataaagctgaagcgcaggcggtgaaaaccatcttcggtgaagctgcaagccgtgtgttggtaagctccacgaaatctatgaccggtcacctgttaggtgcggcgggtgcagtagaatctatctactccatcctggcgctgcgcgatcaggctgttccgccaaccatcaacctggataacccggatgaaggttgcgatctggatttcgtaccgcacgaagcgcgtcaggttagcggaatggaatacactctgtgtaactccttcggcttcggtggcactaatggttctttgatctttaaaaagatctaa

SEQ ID NO: 7045 - DNA, 258 bp, Escherichia coli
atggcacataaaaaggctggcggctccacacgtaacggtcgcgattcagaagctaaacgcctgggcgttaagcgtttcggtggcgaatccgttctggcgggtagcatcatcgttcgtcaacgtggtaccaaattccacgctggcgctaacgtaggttgcggtcgtgaccacactctgtttgctaaagcagacggtaaagtgaaattcgaagttaaaggcccgaaaaaccgtaaatttatcagcatcgaagctgaataa

SEQ ID NO: 7046 - DNA, 1005 bp, Escherichia coli
atggagtatccacgcgttatgatacgtttcgctgtgattggtacgaactggatcactcgccagttcgtcgaggccgcccatgagagcggtaaatacaagttaaccgccgtatattcccgcagccttgaacaggcccagcacttcgccaatgatttttctgtcgagcatctgtttacctcgctggaagcgatggcggaaagcgatgccattgacgcggtgtatattgccagcccgaattccctgcatttttcccagacacaacttttccttagccataaaattaatgtgatttgcgagaaaccgctggcgtcgaatctggcggaagtggatgccgccattgcctgtgcgcgggaaaatcaggtggtgctgtttgaggcatttaaaaccgcctgcctgccgaactttcatttgttgcgccaggcgctgccgaaagtcggcaaactgcggaaagtctttttcaactattgccagtattcctcgcggtatcaacgttacctggatggtgagaatcccaacacctttaatccggcattctctaacggttcaattatggatatcggtttttactgtctggcgtcggcggtggcgttatttggtgagccgaaaagcgtgcaggcaaccgccagtttgctggcaagcggcgttgacgcccagggcgtggtggtgatggattacggtgatttcagcgtcaccttgcagcactcaaaagtcagtgattctgtcctggcgagcgagattcagggcgaagcaggatcgctggtgattgaaaaactgtctgaatgccagaaagtgtgcttcgtgccgcgtggcagccaaatgcaggatctcacccagccgcagcatattaataccatgctctacgaagcagagctgttcgctaccctggtggatgagcatctggtggatcatccagggctggcggtcagtcgcatcaccgccaaactgctgaccgagatccgccgccagactggggtgatttttccggcagatagcgtaaaactataa

SEQ ID NO: 7047 - DNA, 672 bp, Escherichia coli
atgctttcaggctgtatctcgtatgctctggtttcccataccgcaaagggtagttcaggaaagtatcaatcgcagtcagacaccatcactgggctatcgcaggcaaaagatagtaatggaacaaaaggctatgtttttgtaggggaatcgctggattaccttatcactgatggtgccgatgacatcgttaagatgctcaatgatccagcacttaaccggcacaatattcaggttgccgatgacgcaagatttgttttaaatgcggggaaaaagaaatttaccggcacaatatcgctttactactactggaataacgaagaagaaaaggcactggcaacgcattatggttttgcctgtggtgttcaacactgtaccaggtcactggaaaacctaaaaggcacaatccatgagaaaaataaaaacatggattactcaaaggtgatggcgttctaccatccatttaaagtgcgattttatgaatactattcacccagaggcattccgggatggtgtttccgcagcattactgccagtgactgttacgctggacatcattactgcaccgctgcaatttctggttgtatatgcagtaaaccaataatcagtaagcgggcaaacgcgtttatgctgtttgcccgcccacagattaattcagcacatacttctcaatag

SEQ ID NO: 7048 - DNA, 2325 bp, Escherichia coli
atgacgccgttacgcgtttttcgtaaaacaacacctttggttaacaccattcgcctgagcctgctgccgctggccggtctctcgttttccgcttttgctgcacaggttaatatcgcaccgggatcgctcgataaagcgctcaatcagtatgccgcacacagcggatttaccctctcggttgacgccagcctgacgcgcggcaagcagagcaacggcctgcacggcgattacgacgtcgagagcggcctgcaacaactgctggacggcagcggactgcaggtaaaaccgctgggaaataacagctggacgctggagcccgcgcccgcaccaaaagaagatgccctgaccgtggtcggcgactggctgggtgatgcgcgtgaaaacgacgtatttgaacatgctggcgcgcgtgacgtgatccgccgtgaggatttcgccaaaaccggcgcaaccaccatgcgtgaggtacttaaccgcatccctggcgtcagcgcgccggaaaacaacggcaccggcagccacgacctggcgatgaactttggcatccggggcctgaacccgcgcctcgccagccgctcgaccgtcctgatggacggcatccccgtccccttcgccccttacggtcagccgcagctttcactggctcccgtttcgctcggcaacatggatgccattgacgtggtacgcggtggtggtgcggtgcgttacggaccgcagagcgtgggcggcgtggtgaactttgttacccgtgccattccgcaggactttggtatcgaggcgggcgtggaaggtcagctcagcccaacctcttcacaaaacaacccgaaagagacgcacaacctgatggtgggcggcacagcggacaacggttttggcaccgcgctgctctactccggcacgcgcggcagtgactggcgcgagcacagcgccacccgcatcgacgacctgatgctgaaaagcaaatatgcgccggatgaggtgcacaccttcaacagcctgctgcaatattacgacggtgaagccgacatgcccggtggcctgtctcgcgcggattacgacgccgatcgctggcaatccacccgcccgtatgaccgcttctggggtcgtcgcaagctggcgagcctgggctaccagttccagccagacagccagcataaattcaacattcaggggttctacacccaaaccctgcgcagcggctacctggagcaaggcaaacgcatcaccctctcgccgcgtaactactgggtgcgcggtattgagccacgctacagccagatctttatgatcggcccttccgcgcacgaagtgggcgtgggctatcgctatttgaatgaatcaacgcatgaaatgcgttactacaccgccaccagcagcgggcagttgccgtccggctcaagcccttacgaccgcgatacgcgttccggcaccgaggcgcacgcctggtatctggatgacaaaatcgacatcggcaactggaccatcacgccgggtatgcgtttcgaacatatcgagtcataccagaacaacgccatcacaggcacgcacgaagaagtgagctataacgcaccgcttccggcgttgaacgtgctctatcacctgactgacagctggaatctttatgcaaacactgaaggctcgttcggcaccgtacagtacagccagattggcaaggctgtgcaaagcggcaatgttgaaccggaaaaagcgcgaacctgggaactcggtacccgctacgacgacggcgcgctgacggcggaaatggggctgttcctgattaactttaacaatcagtacgactccaaccagaccaacgacaccgtcactgcacgtggcaaaacgcgccataccgggctggaaacgcaggcacgttacgatctgggtacgctaacgccaacgcttgataacgtttccatctacgccagctatgcgtatgtgaacgcggaaatccgcgagaaaggcgacacctacggcaatctggtaccattctccccgaaacataaaggcacgctgggcgtggactacaagccaggaaactggacgttcaatctgaacagcgatttccagtccagccagtttgcggataacgccaatacggtgaaagagagcgccgacggcagtaccggccgcattcccggcttcatgctctggggcgcacgcgtggcgtatgactttggcccgcagatggcagatctgaacctggcattcggtgtgaaaaacatcttcgaccaggactacttcatccgctcttatgacgacaacaacaaaggcatctatgcaggccagccgcgcacgctgtatatgcaggggtcgttgaagttctga

SEQ ID NO: 7049 - DNA, 663 bp, Escherichia coli
atgttgcgcattatcgatacagaaacctgcggtttgcagggagggatcgttgagattgcctctgttgatgtcattgacggaaaaatcgtcaaccccatgagccacctggtgcgccccgatcgtcctattagtccacaagcgatggcgattcatcgcatcaccgaagccatggtcgccgataaaccgtggattgaagatgtgatcccacactattacggtagtgaatggtatgtcgcgcataacgccagctttgaccgccgcgtactgcctgagatgcccggtgagtggatttgcactatgaaactggcccgtcgtttgtggcctgggatcaagtacagcaatatggcgttatataaaacacgcaagctcaatgtacagacgccgccgggcctgcatcatcaccgcgcgttgtatgactgttatatcaccgccgcgttgcttatcgatattatgaacacctccggctggacggcagaacagatggccgatatcaccggacgtccgtcgttgatgacgaccttcacctttggcaaataccgtggcaaagcggtttccgacgttgccgaacgcgatccgggctatctgcgctggttatttaataacctggacagcatgagcccggagctgcgtttaacactgaaacattatctggaaaatacttag

SEQ ID NO: 7050 - DNA, 882 bp, Escherichia coli
atgacacgacaaaaagcaacgctcatagggctgatagcgatcgtcctgtggagcacgatggtaggattgattcgcggtgtcagtgaggggctcggcccggtcggcggcgcagctgctatctattcattaagcgggctgctgttaatcttcacggttggatttccgcgtattcggcaaatcccgaaaggctatttactcgccgggagtctgttattcgtcagctatgaaatctgtctggcgctttccttagggtatgcggcgacccatcatcaggcgattgaagtgggtatggtgaactatctgtggcccagcctgacaattctctttgccattctgtttaatggtcagaaaaccaactggttgattgtacctggattattattagccctcgtcggcgtctgttgggtgttaggcggtgacaatgggttacattatgatgaaatcatcaataatatcaccaccagcccattgagttatttcctggcgttcattggtgcgtttatctgggcagcctattgcacagtaacgaataaatacgcacgcggatttaatggaattaccgtttttgtcctgctaacgggagcaagtctgtgggtttactattttcttacgccacaaccagaaatgatatttagcacgcccgtcatgattaaactcatctctgcggcatttaccttaggatttgcttatgctgcatggaatgtcggtatattgcatggcaatgtcaccattatggcggtaggttcgtattttacgcctgtactttcctcagcgcttgcagccgtgctgctcagcgccccgctgtcgttctcgttctggcaaggcgcgctgatggtctgcggcggttccctgctctgctggctggcgacacgtcgtggttaa

SEQ ID NO: 7051 - DNA, 1347 bp, Escherichia coli
atggtcatgagccagaaaaccctgtttacaaagtctgctctcgcagtcgcagtggcacttatctccacccaggcctggtcggcaggctttcagttaaacgaattttcttcctctggcctgggccgggcttattcaggggaaggcgcaattgccgatgatgcaggtaacgtcagccgtaaccccgcattgattactatgtttgaccgcccgacattttctgcgggtgcggtttatattgacccggatgtaaatatcagcggaacgtctccatctggtcgtagcctgaaagccgataacatcgcgcctacggcatgggttccgaacatgcactttgttgcaccgattaacgaccaatttggttggggcgcttctattacctctaactatggtctggctacagagtttaacgatacttatgcaggcggctctgtcgggggtacaaccgaccttgaaaccatgaacctgaacttaagcggtgcgtatcgcttaaataatgcatggagctttggtcttggtttcaacgccgtctacgctcgcgcgaaaattgaacgtttcgcaggcgatctggggcagttggttgctggccaaattatgcaatctcctgctggccaaactcagcaagggcaagcattggcagctaccgccaacggtattgacagtaataccaaaatcgctcatctgaacggtaaccagtggggctttggctggaacgccggaatcctgtatgaactggataaaaataaccgctatgcactgacctaccgttctgaagtgaaaattgacttcaaaggtaactacagcagcgatcttaatcgtgcgtttaataactacggtttgccaattcctaccgcgacaggtggcgcaacgcaatcgggttatctgacgctgaacctgcctgaaatgtgggaagtgtcaggttataaccgtgttgatccacagtgggcgattcactatagcctggcttacaccagctggagtcagttccagcagctgaaagcgacctcaaccagtggcgacacgctgttccagaaacatgaaggctttaaagatgcttaccgcatcgcgttgggtaccacttattactacgatgataactggaccttccgtaccggtatcgcctttgatgacagcccagttcctgcacagaatcgttctatctccattccggaccaggaccgtttctggctgagtgcaggtacgacttacgcatttaataaagatgcttcagtcgacgttggtgtttcttatatgcacggtcagagcgtgaaaattaacgaaggcccataccagttcgagtctgaaggtaaagcctggctgttcggtactaactttaactacgcgttctga

SEQ ID NO: 7052 - DNA, 1200 bp, Escherichia coli
gtgaagatgagagcctgcattaataatcaacagattcgccaccataacaaatgcgtgattctggaactgctgtaccggcaaaagcgcgccaataaatcaacgctggcccggctggcgcaaatttcgattccggcagtcagtaatattttgcaggaactggaaagcgaaaaacgggtggtgaatattgacgatgaaagccagacgcgcgggcatagtagcggtacatggctgattgcgccggaaggtgactggacgctgtgcctgaacgtgacgcccaccagtattgagtgtcaggttgctaatgcttgtttaagtccgaaaggtgaatttgagtatttacagattgatgcaccgacgccgcaggcgctgctgtccgaaatcgaaaaatgctggcatcgccaccgtaaattgtggccggaccataccatcaacctggcgttggcaatccacggtcaggttgatcctgtgaccggcgtgtcgcaaaccatgccgcaagcgccgtggacaacgccggtggaggtgaaatatctgctggaagagaagctcggcattcgggtgatggtcgataatgactgcgtgatgctggcgctggcggagaaatggcaaaataattcgcaggaacgggatttctgcgtgatcaacgttgattacggcattggctcgtcgttcgtgattaacgagcaaatttatcgcggcagtttgtatggtagcggacagattggtcacaccatcgttaatccggatggcgtcgtctgcgactgtggacgttatggctgcctggaaactgtcgcctcgttaagcgcattaaaaaaacaggcgcgggtatggctaaaatcacaaccggttagtactcaacttgatcctgaaaaactgactacagcgcagttaatcgctgcctggcaaagtggagaaccgtggatcaccagctgggttgatcgctctgccaatgccattggtttgagtctgtataacttcctcaacatcctcaatattaatcagatttggttgtacggtcgcagttgtgcctttggtgagaactggcttaatactattattcgccagacaggatttaacccgttcgaccgcgacgaaggaccgagcgtgaaagcgacgcaaattggctttgggcaattaagccgcgcacaacaggtgctgggaattggctatttgtatgttgaggcgcagttacgacagatttga

SEQ ID NO: 7053 - DNA, 1632 bp, Escherichia coli
gtgttaacgctgcttcacctgctttctgccgtcgccctgctggtctgggggactcatattgttcgaaccggcgtaatgcgcgtcttcggcgcgcgtttgcgtactgtccttagccggagcgtcgaaaaaaagccgctcgccttttgcgcggggatcggcgttaccgcactggtacagagcagtaatgccaccaccatgctggtgacctcgtttgtcgctcaggatctggtagccctcgcaccggctctggtcattgtgctgggtgcagatgtcgggacggcgctaatggcgcgtattctcaccttcgacttatcctggctgtcaccgttacttatttttatcggcgtgatttttttcctcggacgcaaacagtcacgcgccgggcaactgggccgcgtcggtattggtcttgggctgattttgctagcgctggagttgattgtgcaggccgtaacgccgatcacccaggcaaacggcgttcaggtgatctttgcctcgctgaccggcgatattctgctggatgcgctgattggcgcgatgttcgccattatcagctactccagccttgctgctgtactgctgaccgcgactctgaccgccgcaggcattatctccttccccgtggcgctctgtctggtgattggtgctaacctcggttccggtctgctggcaatgctcaacaacagtgccgccaatgccgcagcccgccgtgtcgcgctgggtagtctgctgtttaagctggtgggtagcctgattatcctgccgtttgtccatttgctggcagagacaatggggaagttgtcattgccaaaagcggaactggtgatctatttccacgtcttctacaaccttgtacgttgcctggtcatgctgccatttgttgacccgatggcacggttttgcaaaacgattattcgcgatgaaccggaactggatacccagctacggcctaaacatctggatgtcagcgcgctggatacgcccacgcttgctctggcgaacgccgcgcgcgaaaccctgcgcattggcgacgccatggaacagatgatggaagggttgaataaagtgatgcacggtgagccacggcaggagaaagagctgcgtaagctggcagatgatatcaacgttctctacaccgccattaagctgtatctggcgcggatgccaaaagaagagctggcggaggaagagtcgcgccgctgggcagagatcatcgaaatgtcgctcaaccttgaacaggcctccgatatcgtcgagcgcatgggcagcgaaattgctgacaaatcactggcagcacggcgggcattttcgcttgatgggttgaaggaactggatgcgctctatgagcaattgctcagtaatttaaagctggcaatgtcggtgttcttctctggcgatgtcaccagcgctcgtcgtttgcgtcgcagcaaacatcgttttcgcattcttaatcgccgctattcccacgcccacgtcgatcgcctgcatcagcaaaacgtgcagagcattgaaaccagttcgctacatttaggcttactgggagatatgcagcgcctgaactcgctgttttgttcggtggcttacagtgtgctggaacagccggatgaagatgaaggacgggacgagtattaa

SEQ ID NO: 7054 - DNA, 786 bp, Escherichia coli
gtgacgacaataaagttgattgtcaacagcgtcagtaaatccgagcgtgaaagcattatcgccgcgctgcacgggcagtcgatttttaacggtggtgggctgtcgccgttaaataaaatcagcccgtctcatccgccaaaacctgccaccgtggcggtgccggaagagacggagaaaaaagcgcgtgatgtgaatgagaaaacggcgctgctgaagaagaaatccgccaccgagcttggtgagctggcaaccagtatcaacaccattgcccgtgatgcgcatatggaagcgaatctggagatggagattgttccccagggattacgcgtgctgattaaagacgaccagaaccgcaatatgtttgaacgcggcagcgcgaagattatgccgttctttaaaacgctgctggtggagctcgcgccagtgttcgactcgctcgataataaaattattattaccgggcataccgatgcgatggcctacaaaaacaatatctacaacaactggaacctttcgggtgaccgcgcgctttcggctcgtcgggtgctggaagaggccggaatgccggaagataaagtgatgcaggtaagcgcaatggcggaccagatgctgctggattccaaaaatccgcaaagcgcgggcaaccggcgcattgagattatggtgctgaccaaaagtgcgtccgatacgctgtatcaatactttggtcagcatggggataaagtggtgcagccgctggtgcaaaagctggataagcagcaggtgctttcgcagcgaacgcgttaa

SEQ ID NO: 7055 - DNA, 2358 bp, Escherichia coli
atggccagcagcgcattaacattaccttttagtcggattgcgcacgctgtcgatagcgccattccaacaaaatcagacgaaaaggttatctggagcgcctgtacagttaactgtggtagtcgctgcccgctacgtatgcacgtcgtggacggtgaaatcaaatatgtcgaaacggacaataccggcgatgacaattacgacggcctgcaccaggttcgcgcctgcctgcgtgggcgttccatgcgtcgccgtgtctacaatccggaccgcctgaaatatccgatgaaacgagtcggggcgcgcggtgaaggcaaattcgagcgcattagctgggaagaagcctacgacatcatcgcgaccaatatgcagcgcctgatcaaagagtacggcaacgagtctatctatctgaactatggcaccggtacgctgggcggcaccatgacccgctcctggccgccgggaaataccctggtcgcgcggctgatgaactgctgcggcggctatctgaaccattacggcgactactcctccgcgcaaattgcggaaggtttgaactatacctacggcggctgggcagatggcaacagcccgtcggatatcgaaaacagtaagctggtagtgctgtttggtaataaccctggcgaaacgcgaatgagtggcggtggggtgacttactatcttgaacaggcacgccagaaatctaatgcccgcatgatcatcatcgatccgcgctataccgacaccggtgccgggcgcgaagatgagtggatccctattcgtccgggaacagatgccgcactggttaacggtctggcgtacgtcatgatcactgaaaacctggtggatcaggcattcctcgataaatattgcgttggctacgatgagaaaaccctgccagccagtgcgccgaaaaatggccactataaagcttatattctgggtgaagggccagatggcgtggctaaaacgccggaatgggcctcgcaaatcactggtgttccggcagacaaaatcatcaaattggctcgtgaaatcggtagtaccaaaccggcgtttatcagccagggatggggcccgcagcgtcacgctaacggtgaaatcgcaacccgtgctatctcgatgctggcgattctgaccggtaacgttggtattaacggaggcaacagcggcgcgcgtgaaggttcatacagcttaccgtttgtccgtatgccgaccttggaaaacccgatccagaccagcatttcgatgtttatgtggaccgatgccattgaacgtggcccggaaatgacggcgctgcgtgatggtgtacgcgggaaagataagctggatgtgccgatcaaaatgatctggaactatgccggtaactgcctgattaaccagcattctgaaatcaaccgtacccatgaaatccttcaggatgataagaagtgcgagctgattgtggttatcgactgccacatgacctcatcggcgaaatatgctgacatcctgctgcctgactgcaccgcttccgaacagatggactttgcgctggatgcatcctgcgggaatatgtcttacgtgattttcaacgatcaggtgattaaaccgcgctttgaatgtaagaccatctatgaaatgaccagcgaactggcaaaacgtcttggcgttgagcaacagtttactgaaggccgtacccaggaagagtggatgcggcatctgtatgcccagtcgcgggaagcgattcctgaactgccaacgtttgaagagttccgcaagcaggggatctttaaaaagcgcgacccacaagggcatcacgttgcttataaagccttccgtgaagatccgcaggcaaacccactgactacgccatcgggcaaaattgagatttattcgcaggcgctggctgacattgccgctacctgggaattgcctgaaggcgatgtgatcgatccactgccgatctacacgccgggctttgaaagttatcaggatccgctgaacaaacagtatccgctgcagcttacaggtttccactataaatctcgcgttcactcaacttacggcaacgttgatgtgctgaaagcggcttgccgtcaggaaatgtggatcaacccgcttgatgcccaaaaacgcggtatccacaacggcgataaagtcaggatctttaacgatcgtggtgaggttcatattgaggcgaaagtgacgccacgaatgatgccgggtgtggtcgcactgggtgaaggtgcctggtatgacccggatgcaaaacgtgtcgataagggtggttgtattaacgtactgaccactcaacgtccgtctcctctcgctaaggggaatccgtcacatacaaaccttgttcaggttgaaaaggtgtaa

SEQ ID NO: 7056 - DNA, 1152 bp, Escherichia coli
atgcatttgtctttaatgatatctcgtcattatattaacaggatgaaattatcattaatgcatatttcaatattagcagggatacctgaggagtttaaagtgaacatatatatcgggtggcttttcaaattaatccctttgattatgggcttaatttgtatcgcgttaggtggctttgtgctggaaagttcagggcaaagcgagtatttcgtcgcgggtcatgtgctgatttctctggcggccatatgcctggcattattcactaccgcatttattatcatttcgcagctcacgcgcggcgttaatacgttttacaatacattgttccccattattggctatgcggggtcaattatcaccatgatatggggttgggcactgttagcaggcaatgatgtgatggcagacgagtttgtcgccggccatgttattttcggcgttggtatgattgccgcctgtgtatcgacggtggcagcgtcatccggtcactttctgctcattcccaaaaatgcagcggggagcaagagcgacggaacaccggtacaggcttattcttcattaatcggtaactgcctcattgccgttcccgttttactcaccctgctcggtttcatttggtctattacgctgttacgtagtgctgacataactccgcattatgtcgcgggtcacgtattgcttgggttaaccgcaatctgtgcctgtctaattggccttgttgccacaattgtccatcaaacacgtaatacgttttcaactaaagaacactggctgtggtgttattgggttatttttctcggctcaatcacggtactgcaggggatatacgtcttagtcagttccgatgcaagcgcccgactggctcccggcattattcttatttgcctcggaatgatctgttacagcatattctcaaaagtctggctactggcactggtatggagacgtacctgttcgttagccaacagaataccgatgattcccgtcttcacctgcctgttttgccttttcctggcatcgtttcttgcggaaatggcgcagaccgacatgggatattttattccttcgcgagttctggtcggtttgggagcggtatgctttacgttgttctcaatcgtttcaatattagaagcgggttctgctaaaaaataa

SEQ ID NO: 7057 - DNA, 1458 bp, Escherichia coli
atgacgatgcagcttgaagtaattctaccgctggtcgcctatctggtggtggtgttcggtatctcggtttatgcgatgcgtaaacggagcaccggcaccttccttaatgagtatttcctcggcagccgctctatgggcggtattgtgctggcgatgacgctcaccgcgacctatatcagtgccagttcgtttatcggcgggccaggagctgcttataaatacgggctgggctgggtattgctggcgatgattcagcttcctgcagtctggctttcactcggtattctcggcaagaagtttgcgattcttgcgcgccgctacaatgcagtgacgctgaacgatatgctgtttgcccgctaccagagtcgtcttctggtgtggctggcgagtttgagtttgctggttgcgttcgttggtgcgatgaccgtgcagtttatcggcggtgcgcgcctgctggaaaccgcggcgggtattccttatgaaaccgggctgctgatttttggtatcagcattgcgttatataccgcctttggtggctttcgcgccagcgtgctgaacgacaccatgcaagggcttgtgatgctgattggcaccgttgtgctgcttattggcgtagtacatgccgctggcggcttaagtaacgcagtacagaccttgcaaaccatcgatccgcaactggttacgccacaaggcgctgacgatattctgtcgcctgcctttatgacgtcgttctgggtactggtgtgttttggcgtgattggcctgccgcatactgcggtgcgctgtatctcttataaagacagcaaagccgtacatcgggggatcatcatcggtacgattgtggtcgcaattctgatgttcggtatgcacctggccggagcgttaggtcgggcggtgatccccgatctcaccgtaccggacctggtgatcccaacgttaatggtaaaagtgctgccaccgtttgctgccgggatcttcctggctgcaccgatggctgcgatcatgtcgacaattaacgcccaactgctgcaaagttccgctacgatcattaaagatctctatctgaatatccgtccggatcaaatgcaaaacgagacgcgtctgaagcggatgtcggcggtaattacgttagttctcggcgcgttgctgctgcttgccgcctggaagccgccagaaatgatcatctggctgaatttgttggccttcggtgggctggaagccgttttcctgtggccgctggtgctgggtctttactgggaacgcgccaacgccaaaggcgcgctaagtgcgatgatcgttggcggcgtgctgtatgccgtactcgcgacgctgaatattcagtacctgggcttccaccctatcgtgccctcgttactactaagtttgctggctttcctggtcggaaaccgtttcggtacatccgtcccgcaagctaccgttttgactactgataaataa

SEQ ID NO: 7058 - DNA, 942 bp, Escherichia coli
atgaagctgatacgcggcatacataatctcagccaggccccgcaagaagggtgtgtgctgactattggtaatttcgacggcgtgcatcgcggtcatcgcgcgctgttacagggcttgcaggaagaagggcgcaagcgcaacttaccggtgatggtgatgctttttgaacctcaaccactggaactgtttgctaccgataaagccccggcaagactgacccggctgcgggaaaaactgcgttaccttgcagagtgtggcgttgattacgtgctgtgcgtgcgtttcgacaggcgtttcgcggcgttaaccgcgcaaaatttcatcagcgatcttctggtgaagcatttgcgcgtaaaatttcttgccgtaggtgatgatttccgctttggcgctggtcgtgaaggcgatttcttgttattacagaaagctggcatggaatacggcttcgatatcaccagtacgcaaactttttgcgaaggtggcgtgcgcatcagcagcaccgccgtgcgtcaggcccttgcggatgacaatctggctctggcagagagtttactggggcacccgtttgccatctccgggcgtgtagtccacggtgatgaattagggcgcactataggtttcccgacggcgaatgtaccgctgcgccgtcaggtttccccggtgaaaggggtttatgcggtagaagtgctgggcctcggtgaaaagccgttacccggcgtggcaaacatcggaacacgcccaacggttgccggtattcgccagcagctggaagtgcatttgttagatgttgcaatggacctttacggtcgccatatacaagtagtgctgcgtaaaaaaatacgcaatgagcagcgatttgcgtcgctggacgaactgaaagcgcagattgcgcgtgatgaattaaccgcccgcgaattttttgggctaacaaaaccggcttaa

SEQ ID NO: 7059 - DNA, 2817 bp, Escherichia coli
atgagtgactataaatcaaccctgaatttgccggaaacagggttcccgatgcgtggcgatctcgccaagcgcgaacccggaatgctggcgcgttggactgatgatgatctgtacggcatcatccgtgcggctaaaaaaggcaaaaaaaccttcattctgcatgatggccctccttatgcgaatggcagcattcatattggtcactcggttaacaagattctgaaagacattatcgtgaagtccaaagggctttccggttatgactcgccgtatgtgcctggctgggactgccacggtctgccgatcgagctgaaagtcgagcaagaatacggtaagccgggtgagaaattcaccgccgccgagttccgcgccaagtgccgcgaatacgcggcgacccaggttgacggtcaacgcaaagactttatccgtctgggcgtgctgggcgactggtcgcacccgtacctgaccatggacttcaaaactgaagccaacatcatccgcgcgctgggcaaaatcatcggcaacggtcacctgcacaaaggcgcgaagccagttcactggtgcgttgactgccgttctgcgctggcggaagcggaagttgagtattacgacaaaacttctccgtccatcgacgttgctttccaggcagtcgatcaggatgcactgaaagcaaaatttgccgtaagcaacgttaacggcccaatctcgctggtaatctggaccaccacgccgtggactctgcctgccaaccgcgcaatctctattgcaccagatttcgactatgcgctggtgcagatcgacggtcaggccgtgattctggcgaaagatctggttgaaagcgtaatgcagcgtatcggcgtgaccgattacaccattctcggcacggtaaaaggtgcggagcttgagctgctgcgctttacccatccgtttatgggcttcgacgttccggcaatcctcggcgatcacgttaccctggatgccggtaccggtgccgttcacaccgcgcctggccacggcccggacgactatgtgatcggtcagaaatacggcctggaaaccgctaacccggttggcccggacggcacttatctgccgggcacttatccgacgctggatggcgtgaacgtcttcaaagcgaacgacatcgtcgttgcgctgctgcaggaaaaaggcgcgctgctgcacgttgagaaaatgcagcacagctatccgtgctgctggcgtcacaaaacgccgatcatcttccgcgcgacgccgcagtggttcgtcagcatggatcagaaaggtctgcgtgcgcagtcactgaaagagatcaaaggcgtgcagtggatcccggactggggccaggcgcgtatcgagtcgatggttgctaaccgtcctgactggtgtatctcccgtcagcgcacctggggtgtaccgatgtcactgttcgtgcacaaagacacggaagagctgcatccgcgtacccttgaactgatggaagaagtggcaaaacgcgttgaagtcgatggcatccaggcgtggtgggatctcgatgcgaaagagatcctcggcgacgaagctgatcagtacgtgaaagtgccggacacattggatgtatggtttgactccggatctacccactcttctgttgttgacgtgcgtccggaatttgccggtcacgcagcggacatgtatctggaaggttctgaccaacaccgcggctggttcatgtcttccctaatgatctccaccgcgatgaagggtaaagcgccgtatcgtcaggtactgacccacggctttaccgtggatggtcagggccgcaagatgtctaaatccatcggcaataccgtttcgccgcaggatgtgatgaacaaactgggcgcggatattctgcgtctgtgggtggcatcaaccgactacaccggtgaaatggccgtttctgacgagatcctgaaacgtgctgccgatagctatcgtcgtatccgtaacaccgcgcgcttcctgctggcaaacctgaacggttttgatccagcaaaagatatggtgaaaccggaagagatggtggtactggatcgctgggccgtaggttgtgcgaaagcggcacaggaagacatcctcaaggcgtacgaagcatacgatttccacgaagtggtacagcgtctgatgcgcttctgctccgttgagatgggttccttctacctcgacatcatcaaagaccgtcagtacaccgccaaagcggacagtgtggcgcgtcgtagctgccagactgcgctatatcacatcgcagaagcgctggtgcgctggatggcaccaatcctctccttcaccgctgatgaagtgtggggctacctgccgggcgaacgtgaaaaatacgtcttcaccggtgagtggtacgaaggcctgtttggcctggcagacagtgaagcgatgaacgatgcgttctgggacgagctgttgaaagtgcgtggcgaagtgaacaaagtcattgagcaagcgcgtgccgacaagaaagtgggtggctcgctggaagcggcagtaaccttgtatgcagaaccggaactgtcggcgaaactgaccgcgctgggcgatgaattacgatttgtcctgttgacctccggcgctaccgttgcagactataacgacgcacctgctgatgctcagcagagcgaagtactcaaagggctgaaagtcgcgttgagtaaagccgaaggtgagaagtgcccacgctgctggcactacacccaggatgtcggcaaggtggcggaacacgcagaaatctgcggccgctgtgtcagcaacgtcgccggtgacggtgaaaaacgtaagtttgcctga

SEQ ID NO: 7060 - DNA, 981 bp, Escherichia coli
atgaaaaagatacctttaggcacaacggatattacgctttcgcgaatggggttggggacatgggccattggcggcggtcctgcatggaatggcgatctcgatcggcaaatatgtattgatacgattcttgaagcccatcgttgtggcattaatctgattgatactgcgccaggatataactttggcaatagtgaagttatcgtcggtcaggcgttaaaaaaactgccccgtgaacaggttgtagtagaaaccaaatgcggcattgtctgggaacgaaaaggaagtttattcaacaaagttggcgatcggcagttgtataaaaacctttccccggaatctatccgcgaagaggtagcagcgagcttgcaacgtctgggtattgattacatcgatatctacatgacgcactggcagtcggtgccgccattttttacgccgatcgctgaaactgtcgcagtgcttaatgagttaaagtctgaagggaaaattcgcgctataggcgctgctaacgtcgatgctgaccatatccgcgagtatctgcaatatggtgaactggatattattcaggcgaaatacagtatcctcgaccgggcaatggaaaacgaactgctgccactatgtcgtgataatggcattgtggttcaggtttattccccgctagagcagggattgttgaccggcaccatcactcgtgattacgttccgggcggcgctcgggcaaataaagtctggttccagcgtgaaaacatgctgaaagtgattgatatgcttgaacagtggcagccactttgtgctcgttatcagtgcacaattcccactctggcactggcgtggatattaaaacagagtgatttaatctccattcttagtggggctactgcaccggaacaggtacgcgaaaatgtcgcggcactgaatatcaacttatcggatgcagacgcaacattgatgagggaaatggcagaggccctggagcgttaa

SEQ ID NO: 7061 - DNA, 1488 bp, Escherichia coli
atgcaatacatcaagatccatgcgctggataacgtcgcggtcgctttagcagatttggctgaaggcacagaagtcagtgtcgataaccagactgttacgctgcgccaggatgttgctcgtggacataaatttgcgttaacggatatcgcaaaaggggccaatgtcatcaaatatggcctgccgattggttatgcattggcggatattgcggcaggtgttcacgttcacgcccacaatacgcgcacgaatctgagcgatctggatcagtatcgctatcaacctgattttcaggatctgcctgcgcaagcggcagatcgtgaagtgcagatctatcgtcgcgctaacggcgatgtcggggtgcgtaatgagctgtggatcctgccaaccgtgggctgtgtcaacggcatcgcgcggcagatccagaaccgttttctgaaagagaccaacaacgccgaaggtactgacggcgtgttcctcttcagccacacctacggctgctcacagctgggcgacgatcacattaatacccgcaccatgctgcaaaacatggtgcgccacccgaacgcaggcgcagtgctggtgattggtctgggctgtgaaaacaaccaggttgccgcattccgtgaaacgctgggcgatatcgatcctgaacgcgttcatttcatgatctgccaacagcaggatgatgagatcgaagccggaatcgagcatttgcatcagctgtataacgtgatgcgcaacgataaacgcgagccaggcaaactcagcgaactgaagtttggtctggagtgcggtggttctgacggtctttctggtattactgctaacccgatgctggggcgtttctctgactacgtgattgctaacggcggtactaccgtactgaccgaagtgccggagatgtttggcgcagagcagttgctgatggaccattgccgcgacgaagcaacgtttgaaaaactggtcaccatggtcaacgacttcaaacagtactttattgcccatgatcagccgatctatgaaaacccatcgccggggaacaaagcgggcggtatcaccacgctggaagacaaatcacttggctgtacccagaaagcgggttccagcgtcgtggttgacgtgctgcgttacggcgagcgtctgaaaacgccagggctgaacttgttaagtgcgccgggtaacgatgccgtagcgaccagcgccctggcgggtgcgggctgccatatggtgctgttcagtactggtcgtggcacgccgtatggtggatttgtgccgacggtgaaaatcgccaccaacagtgaactggcggcgaagaaaaaacactggatcgactttgacgcgggtcagttgatccacggtaaagcgatgccgcagttgctggaagaatttatcgacaccatcgttgagtttgccaacggtaagcaaacctgtaacgagcgtaacgacttccgcgaactggcgatcttcaaaagcggcgtaacgctataa

SEQ ID NO: 7062 - DNA, 831 bp, Escherichia coli
atgtcgcaggctgctctgaacacgcgaaacagcgaagaagaggtttcttctcgccgcaataatggaacgcgtctggcggggatccttttcctgctgaccgttttaacgacagtgttggtgagcggctgggtcgtgttgggctggatggaagatgcgcaacgcctgccgctctcaaagctggtgttgaccggtgaacgccattacacacgtaatgacgatatccggcagtcgatcctggcattgggtgagccgggtacctttatgacccaggatgtcaacatcatccagacgcaaatagaacaacgcctgccgtggattaagcaggtgagcgtcagaaagcagtggcctgatgaattgaagattcatctggttgaatatgtgccgattgcgcggtggaatgatcaacatatggtagacgcggaaggaaataccttcagcgtgccgccagaacgcaccagcaagcaggtgcttccaatgctgtatggcccggaaggcagcgccaatgaagtgttgcagggctatcgcgaaatggggcagatgctggcaaaggacagatttactctgaaggaagcggcgatgaccgcgcggcgttcctggcagttgacgctgaataacgatattaagctcaatcttggccggggcgatacgatgaaacgtttggctcgctttgtagaactttatccggttttacagcagcaggcgcaaaccgatggcaaacggattagctacgttgatttgcgttatgactctggagcggcagtaggctgggcgcccttgccgccagaggaatctactcagcaacaaaatcaggcacaggcagaacaacaatga

SEQ ID NO: 7063 - DNA, 1401 bp, Escherichia coli
atgagcgttgtgcctgtagccgacgtactccagggccgtgtagccgttgacagcgaagtcaccgtgcgcggatgggtacgtacccgccgagattcaaaagctggcatctccttcctcgccgtttatgacggttcctgctttgatcctgtacaggctgtcatcaataattctctgcccaattacaatgaagacgtcctgcgtctgaccaccggctgctcggtcattgtgacgggtaaagtcgtggcgtcgccgggccaggggcaacaatttgaaattcaggccagcaaggttgaagttgctggttgggttgaagatccagacacttacccgatggcggcaaaacgccacagcattgagtatctgcgtgaagtcgctcacctgcgtccgcgcacaaacctgattggtgccgtcgcgcgcgttcgccatacgctggcgcaggcgctgcatcgcttctttaacgagcagggattcttctgggtttcaacgccactgattaccgcatctgataccgaaggtgcaggcgaaatgttccgcgtttctacgctggatctggaaaacctgccgcgtaacgatcagggcaaagtggatttcgacaaagacttctttggtaaagagtctttcctgaccgtatctggccagttgaacggcgaaacctacgcttgcgcattgtccaaaatttataccttcggcccgactttccgtgctgaaaactccaacaccagccgtcacctggcggaattctggatgctggagccggaagtggcgtttgctaacctgaacgatattgcgggtctggctgaagccatgctgaaatatgtcttcaaagcggttctcgaagaacgcgctgacgacatgaaattcttcgctgaacgcgtagataaagatgccgtttcacgtctggaacgcttcattgaagccgattttgcgcaggtggattataccgacgcagtgaccattctcgaaaactgcggcaggaagtttgaaaacccggtttactggggagtcgatctctcttctgagcatgagcgttatctggcggaagaacactttaaagcaccggtagtggttaaaaactatccgaaagatattaaagcgttctatatgcgccttaacgaagacggtaaaaccgttgcggctatggacgttctggctccgggcatcggtgagatcattggtggctcccagcgtgaagaacgtctggacgtgctggacgagcgtatgctggaaatgggcctgaataaagaagattactggtggtatcgcgatctgcgtcgctacggtactgttccgcattcaggtttcggtcttggttttgaacgtctgattgcttacgtaactggcgtgcaaaacgtacgtgatgtgattccgttcccacgtactccgcgtaacgccagcttctaa

SEQ ID NO: 7064 - DNA, 993 bp, Escherichia coli
atgggctggcatcattgtcagtatcattcatttactgctctggatgttataaataattatgtagcatgtttgctcttaaaccgtgggaaggaggctgtaatggttgccaatattaatctcattaaacaagaaagttattctgttgttaatttagaaaaacaactaatgagtaatgaatcaccgaagcaatcgctattaaatgatttttcacatcgccttaaaatggaaggtgaggaacaactgttccattgtgttaacgaactgaagtatggtttgtcgagtaataatgaatatgacctgtttaaaaatagagaaacctcactgtggaaacgcaaagtaccagaaagcgcagcgctggcaatgacgggaacagtatataaattatttggtagtcgcttactcaacgcccgcaatcagttagataaaaatctcctcgaaatggctatgcaaatggtttatggcaaagatatggtgacaaagtccggggatatattgattgatatacaattaaataaggatggcagcctccagagtaagcactacacatttgatgtaggtgaagttataaacagttataatattgacctctttgtgaatgcttcgagtattaatcaaacttacttacatgataaaaatcctggtgatgttattagcctgtatggcactttagataacattcctcttgtagttaaggaatgcacgggtaaaaatcatcaaattaacgttaaagccaaattgccacaagaacgaagtgaaaaagttgaggatatgtgtgaaagaatgagaggtggcatctctatgtttaatcacaccacaaaaacagctggtaatatagagcataatttgcagctaagttttctcgtggattcacggccgtcgatcaccaataaatactcagccaaagatgtagcgccagacatacttgtattgcccgtcaacgtatatcatgcggattttaaaattaaaatcaataatgcagtagagaagacttag

SEQ ID NO: 7065 - DNA, 930 bp, Escherichia coli
atgaccacgaagaaagctgattacatttggttcaatggggagatggttcgctgggaagacgcgaaggtgcatgtgatgtcgcacgcgctgcactatggcacttcggtttttgaaggcatccgttgctacgactcgcacaaaggaccggttgtattccgccatcgtgagcatatgcagcgtctgcatgactccgccaaaatctatcgcttcccggtttcgcagagcattgatgagctgatggaagcttgtcgtgacgtgatccgcaaaaacaatctcaccagcgcctatatccgtccgctgatcttcgtcggtgatgttggcatgggagtaaacccgccagcgggatactcaaccgacgtgattatcgctgctttcccgtggggagcgtatctgggcgcagaagcgctggagcaggggatcgatgcgatggtttcctcctggaaccgcgcacgaccaaacaccatcccgacggcggcaaaagccggtggtaactacctctcttccctgctggtgggtagcgaagcgcgccgccacggttatcaggaaggtatcgcgctggatgtgaacggttatatctctgaaggcgcaggcgaaaacctgtttgaagtgaaagatggtgtgctgttcaccccaccgttcacctcctccgcgctgccgggtattacccgtgatgccatcatcaaactggcgaaagagctgggaattgaagtacgtgagcaggtgctgtcgcgcgaatccctgtacctggcggatgaagtgtttatgtccggtacggcggcagaaatcacgccagtgcgcagcgtagacggtattcaggttggcgaaggccgttgtggcccggttaccaaacgcattcagcaagccttcttcggcctcttcactggcgaaaccgaagataaatggggctggttagatcaagttaatcaataa

SEQ ID NO: 7066 - DNA, 1182 bp, Escherichia coli
atgcataactcccccgcagtctccagcgcgaaatcgtttgacctgacctcgacggcgtttttaatcgttgcctttctcaccggtattgcgggcgctctgcaaaccccgacactcagtatttttcttaccgatgaagtacatgcccgtccggcgatggtgggattcttctttaccggcagcgctgtcattgggattctggtaagtcagtttctcgccgggcgctctgataagcgcggcgatcgcaaatcgctgattgtcttttgctgcctgttaggcgtgctggcctgcaccctttttgcctggaatcgcaactactttgttttgctattcgttggcgtctttcttagcagctttggctcgaccgctaacccgcaaatgtttgcccttgcccgtgaacatgccgacaaaaccggacgtgaggcggtgatgttcagctcttttttacgcgctcaggtttcactggcatgggtcattggcccaccgctggcttatgccttagcgatgggtttcagctttacggtaatgtatctgagcgcagcggtagcgtttattgtttgcggtgtgatggtgtggctgtttttaccgtcgatgcgaaaagagcttccgctggcgaccggcacgatcgaagcgccgcgccgtaaccgtcgcgatacgctgctgctgtttgtcatttgtacattgatgtggggctcgaacagcctgtacatcatcaacatgccgctatttattatcaacgaactgcatcttcccgagaaactggccggtgtgatgatggggaccgccgccgggctggaaatcccgacgatgttgattgccggatatttcgccaaacgtctgggtaagcgtttcttaatgcgcgttgctgccgtgggtggcgtctgtttttacgcaggaatgctgatggcgcattcacctgtcattctgttgggcttgcagctgctaaatgctatttttattggcattctgggcggcatcgggatgctctattttcaggatctgatgcccggtcaggcgggttcagccaccacgctctataccaacacttcgcgcgtgggctggatcatcgcaggatcagtggcgggcatcgtcgccgagatctggaattatcacgctgtgttctggtttgcgatggtgatgattatcgccactctgttttgcttactgcggattaaagatgtttaa

SEQ ID NO: 7067 - DNA, 504 bp, Escherichia coli
atggcaaccgctggaatgcttctcaaactcaactctcaaatgaaccgcgagttttacgcatccaatctctaccttcacctgagtaactggtgttctgaacagagtctgaacggcaccgccactttccttcgcgcccaggcacagagtaatgtgacccaaatgatgcgcatgtttaactttatgaagagtgtcggcgctacccccatcgttaaagccattgatgttcccggtgaaaaactgaactctctggaagaactgttccaaaaaacgatggaagaatacgagcaacgttctagtacgttggcacagttagccgatgaagcgaaagaactgaatgatgattcaaccgtcaatttcctgcgcgatctggaaaaagaacagcagcatgatggtctgttgctgcaaaccattcttgatgaagtgcgcagtgcgaaacttgcgggtatgtgccctgtgcagaccgaccaacatgttctgaatgtcgtgtcacaccagctgcattga

SEQ ID NO: 7068 - DNA, 339 bp, Escherichia coli
atgcattgcgccgatgaaggttttgagaaaccgctgcctcatctgtttgaagcagcggtttttttaatgggattcaccctgtggggtaaacttgagttcaataagcgcgatggctttttggattgcccgcatggtgaccgggtctgcggcggcgggatggttagtaaagtcgatattcttcagctgactggacattttttcacgaacttcaacgggcgcgattacatcgagaacatccagaatttgtttgataaccaactggcaagcaaccacatcagaaaccaattcctgatcggcattcagcggctgggacatcgtaaactcctgatagcattttga

SEQ ID NO: 7069 - DNA, 1344 bp, Escherichia coli
atgttaaacagtattttagtcatactctgcttgatcgctgtaagtgcgttcttctcgatgtccgagatctcgcttgccgcctcacgcaaaatcaaacttaaactgctggctgatgaaggcaatataaatgcccaacgcgttctgaatatgcaggaaaatcccggcatgttctttaccgtggtccaaatcggtctgaacgcagtggcgattctcggcggtatcgtcggtgatgcggcattttctccagcttttcacagcctgttctcccgctatatgtcggcagagctctctgagcaactgagctttattctctctttctcgttagtgactggcatgtttatcctgtttgcggatttaaccccgaaacgcatcggtatgattgcgccagaagctgtggctttgcgtatcatcaacccgatgcgcttctgcctgtacgtttgcaccccgctggtgtggttcttcaacggcctggcgaacataatcttccgtattttcaaactgccaatggtacgtaaagatgacatcacttctgatgacatctacgcggtagtggaagccggtgcgctggcgggcgtgttacgtaaacaggaacacgagctgattgaaaacgtctttgagctggaatcccgtaccgttccgtcttcaatgacaccgcgtgaaaacgtgatttggtttgatctccacgaagatgagcaaagcctgaagaataaggtggcggaacatccgcactctaagttcctcgtctgtaatgaagatattgaccacatcatcggttatgtcgattctaaagacctgctgaaccgcgtgctggctaaccaaagcctggcactgaacagcggcgtacaaattcgcaacacgctgattgtgccggatacgttaaccctttcagaggcgttggaaagttttaaaaccgcaggtgaagacttcgcggtgatcatgaacgagtacgcgctggtggtggggatcatcaccctcaatgacgtgatgaccacgctgatgggcgatctggtcggtcaggggctggaagagcagattgtcgcccgtgatgagaactcatggctgattgacggcggcaccccaattgacgacgtcatgcgcgtgctggatattgacgagttcccgcagtcgggcaactacgaaaccatcggcggctttatgatgtttatgctgcgtaagatcccgaaacgcaccgattcggtgaaattcgccggctacaaatttgaagtggtggatatcgataactaccgcatcgaccagctgctggtgacccggatcgacagcaaggccaccgccctttcgccaaaactgcctgacgctaaagataaagaagaaagcgtcgcgtaa

SEQ ID NO: 7070 - DNA, 279 bp, Escherichia coli
atgtgctttataaatctgcgatccgtagcagacaccataaatacacagacacggagaatcactatgtttacttattatcaggcagaaaattcaacagcagaacccgctctggttaatgccattgagcaaggccttcgggcacagcatggtgttgtcactgaagatgacattctcatggagctgaccaaatgggttgaagcttctgataacgacatcctcagtgatatctaccagcaaacgatcaattatgtggtcagtggccagcaccctacgctttaa

SEQ ID NO: 7071 - DNA, 1311 bp, Escherichia coli
atgggtcaggttttaccgctggttacccgccagggcgatcgtatcgccattgttagcggtttacgtacgccttttgcccgtcaggcgacggcttttcatggcattcccgcggttgatttagggaagatggtggtaggcgaactgctggcacgcagcgagatccccgccgaagtgattgaacaactggtctttggtcaggtcgtacaaatgcctgaagcccccaacattgcgcgtgaaattgttctcggtacgggaatgaatgtacataccgatgcttacagcgtcagccgcgcttgcgctaccagtttccaggcagttgcaaacgtcgcagaaagcctgatggcgggaactattcgagcggggattgccggtggggcagattcctcttcggtattgccaattggcgtcagtaaaaaactggcgcgcgtgctggttgatgtcaacaaagctcgtaccatgagccagcgactgaaactcttctctcgcctgcgtttgcgcgacttaatgcccgtaccacctgcggtagcagaatattctaccggcttgcggatgggcgacaccgcagagcaaatggcgaaaacctacggcatcacccgagaacagcaagatgcattagcgcaccgttcgcatcagcgtgccgctcaggcatggtcagacggaaaactcaaagaagaggtgatgactgcctttatccctccttataaacaaccgcttgtcgaagacaacaatattcgcggtaattcctcgcttgccgattacgcaaagctgcgcccggcgtttgatcgcaaacacggaacggtaacggcggcaaacagtacgccgctgaccgatggcgcggcagcggtgatcctgatgactgaatcccgggcgaaagaattagggctggtgccgctggggtatctgcgcagctacgcatttactgcgattgatgtctggcaggacatgttgctcggtccagcctggtcaacaccgctggcgctggagcgtgccggtttgacgatgagcgatctgacattgatcgatatgcacgaagcctttgcagctcagacgctggcgaatattcagttgctgggtagtgaacgttttgctcgtgaagcactggggcgtgcacatgccactggcgaagtggacgatagcaaatttaacgtgcttggcggttcgattgcttacgggcatcccttcgcggcgaccggcgcgcggatgattacccagacattgcatgaacttcgccgtcgcggcggtggatttggtttagttaccgcctgtgctgccggtgggcttggcgcggcaatggttctggaggcggaataa

SEQ ID NO: 7072 - DNA, 1248 bp, Escherichia coli
atgaatacgaataaattatctttaagaagaaacgttatatatctggctgtcgttcaaggtagcaattatcttttaccattgcttacatttccatatcttgtaagaacacttggtcctgaaaatttcggtatattcggtttttgccaagcgactatgctatatatgataatgtttgttgaatatggtttcaatctcacagcaactcagagtattgccaaagcagcagatagtaaagataaagtaacgtctattttttgggcggtgatattttcaaaaatagttcttatcgtcattacattgattttcttaacgtcgatgaccttgcttgttcctgaatataacaagcatgccgtaattatatggtcgtttgttcctgcattagtcgggaatttaatctaccctatctggctgtttcagggaaaagaaaaaatgaaatggctgactttaagtagtattttatcccgcttggctattatccctctaacatttatttttgtgaacacaaagtcagatatagcaattgccggttttattcagtcaagtgcaaatctggttgctggaattattgcactagctatcgttgttcatgaaggttggattggtaaagttacgctatcattacataatgtgcgtcgatctttagcagacggttttcatgtttttatttccacatctgctattagtttatattctacgggaatagttattatcctgggatttatatctggaccaacgtccgtagggaattttaatgcggccaatactataagaaacgcgcttcaagggctattaaatcctatcacccaagcaatatacccaagaatatcaagtacgcttgttcttaatcgtgtgaagggtgtgattttaattaaaaaatcattgacctgcttgagtttgattggtggtgctttttcattaattctgctcttgggtgcatctatactagtaaaaataagtatagggccgggatatgataatgcagtgattgtgctaatgattatatcgcctctgccttttcttatttcattaagtaatgtctatggcattcaagttatgctgacccataattataagaaagaattcagtaagattttaatcgctgcgggtttgttgagtttgttgttgatttttccgctaacaactctttttaaagagattggtgcagcaataacattgcttgcaacagagtgcttagttacgtcactcatgctgatgttcgtaagaaataataaattactggtttgctga

SEQ ID NO: 7073 - DNA, 1818 bp, Escherichia coli
atggtcgtaatatggcgggtgctcgtgcgctgtgggcccaccggaatgaccgacgccgatttcggtaagccgattatcgcggttgtgaactcgttcacccaatttgtaccgggtcacgtccatctgcgcgatctcggtaaactggtcgccgaacaaattgaagcggctggcggcgttgccaaagagttcaacaccattgcggtggatgatgggattgccatgggccacggggggatgctttattcactgccatctcgcgaactgatcgctgattccgttgagtatatggtcaacgcccactgcgccgacgccatggtctgcatctctaactgcgacaaaatcaccccggggatgctgatggcttccctgcgcctgaatattccggtgatctttgtttccggcggcccgatggaggccgggaaaaccaaactttccgatcagatcatcaagctcgatctggttgatgcgatgatccagggcgcagacccgaaagtatctgactcccagagcgatcaggttgaacgttccgcgtgtccgacctgcggttcctgctccgggatgtttaccgctaactcaatgaactgcctgaccgaagcgctgggcctgtcgcagccgggcaacggctcgctgctggcaacccacgccgaccgtaagcagctgttccttaatgctggtaaacgcattgttgaattgaccaaacgttattacgagcaaaacgacgaaagtgcactgccgcgtaatatcgccagtaaggcggcgtttgaaaacgccatgacgctggatatcgcgatgggtggatcgactaacaccgtacttcacctgctggcggcggcgcaggaagcggaaatcgacttcaccatgagtgatatcgataagctttcccgcaaggttccacagctgtgtaaagttgcgccgagcacccagaaataccatatggaagatgttcaccgtgctggtggtgttatcggtattctcggcgaactggatcgcgcggggttactgaaccgtgatgtgaaaaacgtacttggcctgacgttgccgcaaacgctggaacaatacgacgttatgctgacccaggatgacgcggtaaaaaatatgttccgcgcaggtcctgcaggcattcgtaccacacaggcattctcgcaagattgccgttgggatacgctggacgacgatcgcgccaatggctgtatccgctcgctggaacacgcctacagcaaagacggcggcctggcggtgctctacggtaactttgcggaaaacggctgcatcgtgaaaacggcaggcgtcgatgacagcatcctcaaattcaccggcccggcgaaagtgtacgaaagccaggacgatgcggtagaagcgattctcggcggtaaagttgtcgccggagatgtggtagtaattcgctatgaaggcccgaaaggcggtccggggatgcaggaaatgctctacccaaccagcttcctgaaatcaatgggtctcggcaaagcctgtgcgctgatcaccgacggtcgtttctctggtggcacctctggtctttccatcggccacgtctcaccggaagcggcaagcggcggcagcattggcctgattgaagatggtgacctgatcgctatcgacatcccgaaccgtggcattcagttacaggtaagcgatgccgaactggcggcgcgtcgtgaagcgcaggacgctcgaggtgacaaagcctggacgccgaaaaatcgtgaacgtcaggtctcctttgccctgcgtgcttatgccagcctggcaaccagcgccgacaaaggcgcggtgcgcgataaatcgaaactggggggttaa

SEQ ID NO: 7074 - DNA, 1131 bp, Escherichia coli
atggcatataccaccttttcacagacgaaaaatgatcagctcaaagaaccgatgttctttggtcagccggtcaacgtggctcgctacgatcagcaaaaatatgacatcttcgaaaagctgatcgaaaagcagctctctttcttctggcgtccggaagaagttgacgtctcccgcgaccgtatagattaccaggcgctgccggagcacgaaaaacacatctttatcagcaacctgaaatatcagacgctgctggattccattcagggtcgtagcccgaacgtggcgctattgccgcttatttctattccggaactggaaacctgggtcgaaacctgggcgttctcagaaacgattcattcccgttcctatactcatatcattcgtaatatcgttaacgatccgtctgttgtgtttgacgatatcgtcaccaacgagcagatccagaaacgtgcggaagggatctccagctattacgatgagctgatcgaaatgaccagctactggcatctgctgggcgaaggtacccacaccgttaacggtaaaactgtgaccgttagcctgcgcgagctgaagaaaaaactgtatctctgcctgatgagcgttaacgcgctggaagcgattcgtttctacgtcagctttgcttgttccttcgcatttgcagaacgcgaattgatggaaggcaacgccaaaattattcgcctgattgcccgcgacgaagccctgcacctgaccggcacccagcatatgctgaatctgctgcgcagcggcgcggacgatcctgagatggcggaaattgccgaagagtgtaagcaggagtgctatgacctgtttgttcaggcagctcaacaggagaaagactgggcggattatctgttccgcgacggttcgatgattggtctgaataaagacattctctgccagtacgttgaatacatcaccaatatccgtatgcaggcagtcggtttggatctgccgttccagacgcgctccaacccgatcccgtggatcaacacttggctggtgtctgataacgtgcaggttgctccgcaggaagtggaagtcagttcttatctggtcgggcagattgactcggaagtggacaccgacgatttgagtaacttccagctctga

SEQ ID NO: 7075 - DNA, 573 bp, Escherichia coli
atgaaactcgtgcacatggccagtggtttagcggttgcgattgcgttggcggcttgcgcagataaaagcgcggatattcagacgccagcaccggctgcaaatacgtctatttcagcaacacaacaaccagctatccagcaaccgaatgtctccggtaccgtctggatccgtcagaaagtcgcactgccgcctgatgctgtgctgaccgtgacactttctgacgcgtcgttagccgatgcaccgtcaaaagtgctggcgcagaaagcggtgcgtactgaaggtaaacagtcaccattcagctttgttctgtcatttaacccggcagatgttcagccgaacgcgcgtattctgttgagtgcggcgattaccgtgaatgacaaactggtatttatcaccgataccgttcagccggtgatcaaccagggcggaactaaagccgacctgacattggtgccggtacagcaaaccgccgtgccggttcaggccagcggtggcgcaacgactaccgtaccttcgacttcaccaactcaggtgaatccgtcttcggcagttccagctcctacgcaatattaa

SEQ ID NO: 7076 - DNA, 471 bp, Escherichia coli
atgaacattattgaagctaacgttgctaccccggacgctcgcgtcgccatcaccatcgcgcgtttcaacaactttatcaatgacagcctgctggaaggtgcaattgacgcactgaaacgtatcggtcaggtaaaagatgaaaacattaccgttgtttgggtgcctggtgcctatgagctgccgctggcggcgggtgcactggctaaaaccggtaaatacgacgcggtgattgcgctgggtacggttattcgtggtggcactgcccactttgaatatgtcgctggtggtgcaagcaacggcctggcgcatgttgcccaggacagcgaaattccggttgcttttggggttctgaccactgaaagcattgaacaagcgatcgaacgtgctggcaccaaagctggcaacaaaggtgcagaagctgcactgaccgcgcttgaaatgattaatgtattgaaagccatcaaggcctga

SEQ ID NO: 7077 - DNA, 420 bp, Escherichia coli
gtgaaacctgctgctcgtcgccgcgctcgtgagtgtgccgtccaggcgctctactcctggcagttgtcccagaacgacatcgctgatgttgaataccagttcctggctgaacaggatgtaaaagacgttgacgtcctgtacttccgtgagctgctggccggggtggcgactaataccgcatacctcgacggactgatgaagccatacctgtcccgcctgctggaagaactgggacaggtagaaaaagcagtactgcgcattgcgctgtacgaactgtctaaacgtagcgatgtgccatacaaagtggccattaacgaagcgatcgaactggcgaaatcgttcggcgcagaagacagccataagttcgtcaacggcgtactcgataaagcagcacctgtgattcgccctaacaaaaagtga

SEQ ID NO: 7078 - DNA, 1488 bp, Escherichia coli
atgaacaaagaaattttggctgtagttgaagccgtatccaatgaaaaggcgctacctcgcgagaagattttcgaagcattggaaagcgcgctggcgacagcaacaaagaaaaaatatgaacaagagatcgacgtccgcgtacagatcgatcgcaaaagcggtgattttgacactttccgtcgctggttagttgttgatgaagtcacccagccgaccaaggaaatcacccttgaagccgcacgttatgaagatgaaagcctgaacctgggcgattacgttgaagatcagattgagtctgttacctttgaccgtatcactacccagacggcaaaacaggttatcgtgcagaaagtgcgtgaagccgaacgtgcgatggtggttgatcagttccgtgaacacgaaggtgaaatcatcaccggcgtggtgaaaaaagtaaaccgcgacaacatctctctggatctgggcaacaacgctgaagccgtgatcctgcgcgaagatatgctgccgcgtgaaaacttccgccctggcgaccgcgttcgtggcgtgctctattccgttcgcccggaagcgcgtggcgcgcaactgttcgtcactcgttccaagccggaaatgctgatcgaactgttccgtattgaagtgccagaaatcggcgaagaagtgattgaaattaaagcagcggctcgcgatccgggttctcgtgcgaaaatcgcggtgaaaaccaacgataaacgtatcgatccggtaggtgcttgcgtaggtatgcgtggcgcgcgtgttcaggcggtgtctactgaactgggtggcgagcgtatcgatatcgtcctgtgggatgataacccggcgcagttcgtgattaacgcaatggcaccggcagacgttgcttctatcgtggtggatgaagataaacacaccatggatatcgccgttgaagccggtaacctggcgcaggcgattggccgtaacggtcagaacgtgcgtctggcttcgcagctgagcggttgggaactcaacgtgatgaccgttgacgacctgcaggctaagcatcaggcggaagcgcacgcagcgatcgacaccttcaccaaatatctcgacatcgacgaagacttcgcgactgttctggtagaagaaggcttctcgacgctggaagaattggcctatgtgccgatgaaagagctgttggaaatcgaaggccttgatgagccgaccgttgaagcactgcgcgagcgtgctaaaaatgcactggccaccattgcacaggcccaggaagaaagcctcggtgataacaaaccggctgacgatctgctgaaccttgaaggggtagatcgtgatttggcattcaaactggccgcccgtggcgtttgtacgctggaagatctcgccgaacagggcattgatgatctggctgatatcgaagggttgaccgacgaaaaagccggagcactgattatggctgcccgtaatatttgctggttcggtgacgaagcgtaa

SEQ ID NO: 7079 - DNA, 1650 bp, Escherichia coli
atgaaaaacatcaatccaacgcagaccgctgcctggcaggcactacagaaacacttcgatgaaatgaaagacgttacgatcgccgatctttttgctaaagacggcgatcgtttttctaagttctccgcaaccttcgacgatcagatgctggtggattactccaaaaaccgcatcactgaagagacgctggcgaaattacaggatctggcgaaagagtgcgatctggcgggcgcgattaagtcgatgttctctggcgagaagatcaaccgcactgaaaaccgcgccgtgctgcacgtagcgctgcgtaaccgtagcaataccccgattttggttgatggcaaagacgtaatgccggaagtcaacgcggtgctggagaagatgaaaaccttctcagaagcgattatttccggtgagtggaaaggttataccggcaaagcaatcactgacgtagtgaacatcgggatcggcggttctgacctcggcccatacatggtgaccgaagctctgcgtccgtacaaaaaccacctgaacatgcactttgtttctaacgtcgatgggactcacatcgcggaagtgctgaaaaaagtaaacccggaaaccacgctgttcttggtagcatctaaaaccttcaccactcaggaaactatgaccaacgcccatagcgcgcgtgactggttcctgaaagcggcaggtgatgaaaaacacgttgcaaaacactttgcggcgctttccaccaatgccaaagccgttggcgagtttggtattgatactgccaacatgttcgagttctgggactgggttggcggccgttactctttgtggtcagcgattggcctgtcgattgttctctccatcggctttgataacttcgttgaactgctttccggcgcacacgcgatggacaagcatttctccaccacgcctgccgagaaaaacctgcctgtactgctggcgctgattggcatctggtacaacaatttctttggtgcggaaactgaagcgattctgccgtatgaccagtatatgcaccgtttcgcggcgtacttccagcagggcaatatggagtccaacggtaagtatgttgaccgtaacggtaacgttgtggattaccagactggcccgattatctggggtgaaccaggcactaacggtcagcacgcgttctaccagctgatccaccagggaaccaaaatggtaccgtgcgatttcatcgctccggctatcacccataacccgctctctgatcatcaccagaaactgctgtctaacttcttcgcccagaccgaagcgctggcgtttggtaaatcccgcgaagtggttgagcaggaatatcgtgatcagggtaaagatccggcaacgcttgactacgtggtgccgttcaaagtattcgaaggtaaccgcccgaccaactccatcctgctgcgtgaaatcactccgttcagcctgggtgcgttgattgcgctgtatgagcacaaaatctttactcagggcgtgatcctgaacatcttcaccttcgaccagtggggcgtggaactgggtaaacagctggcgaaccgtattctgccagagctgaaagatgataaagaaatcagcagccacgatagctcgaccaatggtctgattaaccgctataaagcgtggcgcggttaa

SEQ ID NO: 7080 - DNA, 180 bp, Escherichia coli
gtggggataactatggttggtcaggagcaactggagtcgtcaccattatgccagcatagtgacaatgaacccgaaacgaaacgggaatgttccgtcgttattccagacgactggcaactaacatcgcagcagcaagcctttatagaactgtttgctgaagatgatcagccgaaacaataa

SEQ ID NO: 7081 - DNA, 246 bp, Escherichia coli
atgcgaattgaagtcaccatagcgaaaacttctccattgccagctggggctattgacgccctggctggcgaactttcccgccgtattcagtatgcgtttcctgataatgaaggccacgtatcggtacgttatgccgcagcgaataatttatcggttattggcgcgacaaaagaagataaacagcgcattagtgaaattctccaggaaacgtgggaaagcgccgatgactggtttgtcagcgaataa

SEQ ID NO: 7082 - DNA, 1260 bp, Escherichia coli
atgaccactcaactggaacaggcctgggagctagcgaaacagcgtttcgcggcggtggggattgatgtcgaggaggcgctgcgccaacttgatcgtttacccgtttcaatgcactgctggcagggcgatgatgtttccggttttgaaaacccggaaggttcgctgaccggggggattcaggccacaggcaattatccgggcaaagcgcgtaatgccagtgagctacgtgccgatctggaacaggctatgcggctgattccggggccgaaacggcttaatttacatgccatctatctggaatcagatacgccagtctcgcgcgaccagatcaaaccagagcacttcaaaaactgggttgaatgggcgaaagccaatcagctcggtctggattttaacccctcctgcttttcgcatccgctaagcgccgatggctttacgctttcccatgccgacgacagcattcgccagttctggattgatcactgcaaagccagccgtcgcgtttcggcctattttggcgagcaactcggcacaccatcggtgatgaacatctggatcccggatggtatgaaagatatcaccgttgaccgtctcgccccgcgtcagcgtctgctggcagcactggatgaggtgatcagcgagaagctaaaccctgcgcaccatatcgacgccgttgagagcaaattgtttggcattggcgcagagagctacacggttggctccaatgagttttacatggggtatgccaccagccgccagactgcgctgtgcctggacgccgggcacttccacccgactgaagtgatttccgacaagatttccgccgccatgctgtatgtgccgcagttgctgctgcacgtcagccgtccggttcgctgggacagcgatcacgtagtgctgctggatgatgaaacccaggcaattgccagtgagattgtgcgtcacgatctgtttgaccgggtgcatatcggccttgacttcttcgatgcctctatcaaccgcattgccgcgtgggtcattggtacacgcaatatgaaaaaagccctgctgcgtgcgttgctggaacctaccgctgacgtgcgcaagctggaagcggcgggcgattacactgcgcgtctggcactgctggaagagcagaaatcgttgccgtggcaggcggtctgggaaatgtattgccaacgtcacgatacgccagcaggtagcgaatggctggagagcgtgcgggcttatgagaaagaaattttgagtcgccgcgggtaa

SEQ ID NO: 7083 - DNA, 1314 bp, Escherichia coli
atgataaccaatacaaagcttgacccgattgaaaccgcgtctgttgatgagttacaggcgttgcaaacacagcgtctgaaatggacgctcaaacacgcgtatgaaaatgtgccgatgtatcggcgcaaattcgacgcagcaggcgtacatcctgatgatttcagggaactttcagacctgcgtaaatttccctgtaccaccaaacaggatctgcgcgacaactatccctttgacacctttgccgtgccaatggaacaagtggtgcgcattcatgcttcttcgggaaccacaggtaaaccgacagttgtcggctatacgcaaaacgatattgataactgggccaatattgtagcgcgttctttgcgtgcggcagggggctcgcccaaagacaaaattcatgttgcctatggttacggcctgtttactggtgggctgggtgcgcactatggtgccgaacgtctgggcgctacggtgatcccgatgtctggcgggcagacggaaaaacaagcgcaactgatccgtgattttcaaccagatatgatcatggttacgccatcttattgccttaacctgattgaagagctggagcggcagttgggcggtgatgccagcggttgctcgctgcgggttggagtatttggtgctgagccgtggacacaggccatgcgtaaagagattgagcgtcgcctggggatcaccgcactggatatttatggcctgtcagaagtgatggggccgggggtggcgatggagtgtctggaaactaccgacggcccaaccatttgggaagatcatttctatcctgaaattgttaatcctcatgacggcacaccgcttgccgatggtgaacatggcgaactgttattcaccacgctgaccaaagaagcattgccggtcattcgttaccgcacgcgtgatttaacccgactgttaccaggaacggcgcggactatgcgccgcatggatcgcatcagcggacgcagcgatgacatgttgattattcgcggtgtaaatgtctttccgtcacaactggaagaagagattgtcaaattcgaacatttatcgccgcattaccaactggaggtgaaccgccgggggcatcttgattcactttctgtgaaagtggagttgaaagaaagtagcctgacattgacgcatgagcagcgttgccaggtatgccaccagctgcgccatcggattaagtcgatggtggggatctctaccgatgtgatgatcgttaactgtggcagtatcccgcgttcagaaggcaaggcgtgtcgggtgtttgatctgcgcaatattgttggtgcctga

SEQ ID NO: 7084 - DNA, 1767 bp, Escherichia coli
atgaataattctattaaccataaatttcatcacattagccgggctgaataccaggaattgttagccgtttcccgtggcgacgctgttgccgattatattattgataatgtctctattctcgacctgatcaatggcggagaaatttccggcccaattgtgattaaaggacgttacattgccggtgttggcgcagaatacactgatgctccggctttgcagcggattgatgctcgcggcgcaacggcggtgccagggtttattgatgctcacctgcatattgaatccagcatgatgacgccggtcacttttgaaaccgctaccctgccgcgcggcctgacgaccgttatttgcgaccctcatgaaatcgtcaacgtgatgggcgaagccggattcgcctggtttgcccgctgtgccgaacaggcaaggcaaaaccagtacttacaggtcagctcttgcgtacccgccctggaaggctgcgatgttaacggtgccagttttacccttgaacagatgctcgcctggcgggaccatccgcaggttaccggccttgcagaaatgatggactaccctggcgtaattagcgggcagaatgcgctgctcgataaactggatgcatttcgccacctgacgctggacggtcactgcccgggtttgggtggtaaagaacttaacgcctatattactgcgggtattgaaaactgccacgaaagttatcagctggaagaaggacgccggaaattacaactcggcatgtcgttgatgatccgcgaagggtccgctgcccgcaatctcaacgcgctggcaccgttgatcaacgaatttaacagcccgcaatgcatgctctgtaccgatgaccgtaacccgtgggagatcgcccatgaaggacacatcgatgccttaattcgccgcctgatcgaacaacacaatgtgccgctgcatgtggcatatcgcgtcgccagctggtcgacggcgcgccactttggtctgaatcacctcggcttactggcacccggcaagcaggccgatatcgtcctgttgagcgatgcgcgtaaggtcacggtgcagcaggtactggtgaaaggcgagccgattgatgcgcaaaccttacaggcggaagagtcggcgagactggcacaatccgctccgccatatggcaacaccattgcccgccagccagtttccgccagcgactttgccctgcaatttacgcccggaaaacgctatcgggtcattgacgtcatccataacgaattgattacgcactcccactccagcgtctacagcgaaaatggttttgatcgcgatgatgtgagctttattgccgtacttgagcgttacgggcaacggctggctccggcttgtggtttgcttggcggctttggactgaatgaaggtgcgctggctgcgacggtcagccatgacagccataatattgtggtgatcggtcgcagtgccgaagagatggcgctggcggtcaatcaggtgattcaggatggcggcgggctgtgcgtggtacgtaacggccaggtacaaagtcatctgccgttacccattgccgggctgatgagcaccgacacggcgcagtcgctggcggaacaaattgacgccttgaaagccgccgcccgtgaatgcggtccgttacccgatgagccgtttattcagatggcgtttctttctctgccagtgatccccgcgctaaaactaaccagtcaggggctatttgatggcgagaagtttgccttcactacgctggaagtcacggaataa

SEQ ID NO: 7085 - DNA, 1593 bp, Escherichia coli
atgacggcgaaaacagcaccgaaagtcacgctgtgggagttcttccagcagttaggcaaaaccttcatgttacccgtggcattattgtcgttctgcggcattatgctcggcattggtagttctcttagcagccatgatgtcataaccctgatcccggtcctgggcaaccccgtgttgcaggctatctttacctggatgagtaagattggctcgtttgcttttagtttcctgcctgtcatgttctgtatcgccatcccgctgggcctggcacgcgaaaataaaggcgtagcggcattcgctggcttcatcggttatgcggtaatgaacctcgcggtaaacttctggttgaccaataaaggcattctgccaaccacggatgccgcggttctgaaagccaataacatccagagcattcttgggatccagtcgatcgataccgggatcctcggtgcggtgatcgccggtattatcgtctggatgctgcatgagcgtttccataatatccgcctgccggatgcgctggcattcttcggcggtacgcgcttcgtaccaattatctcctcgctggtgatgggccttgtcggcctggtgattccattagtctggccgattttcgccatgggtattagcggcttgggccatatgataaacagcgcgggtgatttcggaccgatgctgtttggtaccggtgaacgtctgctgttgccgtttggtctgcatcacattctggtggcattaattcgctttaccgacgcaggcggcacgcaggaagtctgcggtcaaaccgtcagcggcgcactgaccatcttccaggcgcaattgagttgcccgaccactcacggtttttctgaaagcgccacgcgtttcctttcgcaaggtaaaatgcctgcgtttctcggcggtctgccaggtgcagcgttagctatgtatcactgcgcgcgcccggaaaatcgccataaaattaaaggtctgctgatttctggcctgatcgcctgcgtcgttggcggcactaccgaaccgctggaattcctgttcctgttcgtagcgccagttctgtatgtcatccacgcgctgttaaccggcctcggcttcaccgtcatgtctgtgctcggcgtcaccatcggtaataccgacggcaatatcatcgacttcgtggtgttcggtattttgcatggtctgtcaaccaagtggtacatggtgccagtggtggcggcaatctggtttgtcgtttactacgtcatcttccgtttcgctatcacccgcttcaatctgaaaaccccggggcgcgatagcgaagttgccagctcaatcgaaaaagccgttgccggtgcgccgggtaaatcaggttacaacgttcctgcaatcctcgaagcattaggcggtgccgacaatattgtcagcctcgataactgcattacccgtctgcgtttgtctgtgaaagatatgtcgcttgttaatgtgcaggcactgaaggacaatcgggcaattggcgtagtacaacttaatcaacataacctgcaggttgttatcgggccacaagttcagtcagtaaaagatgaaatggccggtctgatgcatactgtccaggcataa

SEQ ID NO: 7086 - DNA, 756 bp, Escherichia coli
atgaagcttcgcctgtcggcgcttgctctgggaactacgcttctggtggggtgtgcgagttccggtacagatcagcaagggcgttctgacccgttagaagggttcaaccgcaccatgtacaacttcaacttcaatgtattagacccgtatattgttcgaccggtcgctgtcgcctggcgtgattatgttccgcaaccggcgcgtaacggtttgagcaactttactggcaaccttgaagaacctgcggtgatggttaactacttcttgcagggcgacccttatcaggggatggtccactttacccgctttttcctgaacaccattttggggatgggcggttttattgatgttgcagggatggcgaacccgaaactgcaacggactgaacctcaccgcttcggtagtacgcttggtcattatggcgtgggttatgggccttacgttcagttaccgttctacggtagcttcacgctgcgtgatgacggtggtgatatggcggatggtttttacccggttctttcctggctgacctggccgatgtctgtgggtaaatggacgcttgaagggatcgaaacccgcgctcagctgctggattccgatggtctgctgcgtcagtcgtccgatccttatattatggtgcgcgaagcgtacttccagcgtcatgatttcatcgctaatggcggcgaactcaaaccgcaggaaaatccgaacgcacaagcgattcaggatgatttaaaagatattgattctgaataa

SEQ ID NO: 7087 - DNA, 687 bp, Escherichia coli
atgttgtatgggttttcaggtgttattttacagggtgcgctcgtcacgctggagctggctatcagctctgtagtgctcgctgtaatcatcggtttaattggcgctggcggtaagctctcgcaaaatcggctttcggggctgattttcgaagggtacaccacgctgattcgtggcgtgccggacttagtgttgatgctgctgattttctacggtttgcagattgcgctaaacacggtgacggaggcgatgggcgtcgggcagattgatatcgatccgatggtcgctggtattatcactctcggttttatctacggtgcttattttaccgaaacgttccgtggtgcttttatggcagtgccgaaaggacatatagaggcggcgacggcgttcggttttactcgtgggcaagtgtttcggcggatcatgtttccgtcgatgatgcgttacgccctgccaggcattggcaacaactggcaggtgatcctcaaatctaccgcactggtttcgttactcggcctggaagatgtggtcaaagccacccaactggcaggcaaaagtacctgggaaccgttctatttcgccatcgtctgtggcgtgatttacctggttttcaccactgtttccaatggtgtgctgctgttccttgagcgccgctactccgtgggtgtgaagagggctgacctgtga

SEQ ID NO: 7088 - DNA, 546 bp, Escherichia coli
atgtctgaagctcctaaaaagcgctggtacgtcgttcaggcgttttccggttttgaaggccgcgtagcaacgtcgctgcgtgagcatatcaaattacacaacatggaagatttgtttggtgaagtcatggtaccaaccgaagaagtggttgaaatccgtggcggtcagcgtcgcaaaagcgaacgtaaattcttccctggctacgtcctcgttcagatggtgatgaacgacgcgagctggcacctggtgcgcagcgtaccgcgtgtgatgggcttcatcggcggtacttccgatcgtcctgcgccaatcagcgataaagaagtcgatgcgattatgaaccgcctgcagcaggttggtgataagccgcgtccgaaaacgctgtttgaaccgggtgaaatggtccgtgttaatgatggtccgttcgctgacttcaacggtgttgttgaagaagtggattacgagaaatctcgtctgaaagtgtctgtttctatcttcggtcgtgcgaccccggtagagctggacttcagccaggttgaaaaagcctaa

SEQ ID NO: 7089 - DNA, 489 bp, Escherichia coli
atgctggaagatctgcgcgccaacagctggagtttacgcccgtgctgcatggttcttgcctatcgtgttgctcatttttgttcggtgtggcgcaaaaagaacgtcctcaacaatctgtgggcggccccgctgctggtgctgtatcgcattatcaccgaatgctttttcggttatgaaatccaggctgccgcgaccattggccgccgctttactatccatcacggttacgccgtcgtgatcaataaaaacgtggtagcgggggatgattttaccattcgccacggcgtcactatcggcaatcgtggtgccgataacatggcatgtccacacattggcaacggcgtcgaactcggtgccaacgtcattattcttggtgatatcacgcttggtaacaacgtcaccgtgggcgcgggcagcgtggtgctcgactctgtcccggacaacgcgctggtggtgggagaaaaagcgcgagtgaaggtaattaaatga

SEQ ID NO: 7090 - DNA, 840 bp, Escherichia coli
atgaaaaacaatccgctgatctcaatctatatgccgacctggaaccgccaacaactggcgattcgggcaataaaatcggttttgcgccaggactacagcaactgggagatgatcatcgtggatgattgctccacctcctgggaacaactgcaacagtacgtcaccgccctcaacgatccgcgtatcacttacattcacaacgacattaacagcggggcgtgcgcggtacgtaaccaggcgattatgctggcgcaaggggaatatatcaccgggattgatgacgatgacgaatggacacccaaccgtctgagcgtcttcctcgcccataaacagcaactggtcacacacgcctttttgtacgctaacgactacgtttgccagggcgaagtctattcccaaccggcaagcttgccgctgtatcccaaatcgccgtattcacgccgcctgttctacaaacgcaatatcattggcaaccaggtctttacctgggcatggcgtttcaaagagtgtttgttcgataccgaactgaaagcggcacaggattacgacatcttcctgcggatggtggtggagtacggcgaaccgtggaaagtagaagaggcgacgcagatcctgcatatcaatcacggtgaaatgcagatcacctcgtcaccgaaaaaattctccgggtacttccacttttaccgcaagcacaaagacaaattcgaccgcgccagcaaaaaatatcagctgtttaccctctaccagatccgcaataaacgtatgacctggcgcactttgctgacgctgctgtcggtgcgtaacggcaaacgtctggctgatggtattcgggggcgctaa

SEQ ID NO: 7091 - DNA, 1461 bp, Escherichia coli
atgggaaataatttgttatcagcaaaagcgacactccctgtttatgatcttaataacctggctccaagaattgttcatttaggctttggtgcatttcaccgtgcgcatcagggtgtgtatgccgatattcttgctacggaacatttcagtgactggggatattatgaggtcaacttaatcggcggcgaacagcaaattgccgatttacaacagcaagataatctttataccgttgcggaaatgtcggccgatgtgtggacggctcgcgtcgttggcgtcgttaaaaaagccttgcacgtacagatagatggcttagaaaccgtgttggcagcgatgtgtgaaccgcaaatcgcgattgtctctctgacaatcaccgaaaaagggtatttccactctccggcgaccggacagttaatgctcgatcacccgatggtagctgccgacgtgcaaaatccccaccagccgaaaacagcaacaggggtgattgttgaggcgctggctcgccgtaaagcggcaggacttcccgcatttaccgtcatgtcatgtgacaacatgccagaaaacggtcatgttatgcgtgacgttgtcacttcctacgcacaagccgttgatgtaaaactggcacaatggatcgaagataacgtgactttcccatcaacaatggtggaccgtattgtgcccgcagtgacagaggatacgctggcgaaaatcgaacaacttaccggtgtgcgcgatcctgcgggcgttgcctgtgaacctttccgccagtgggtaatagaagataactttgttgccggacgtccggaatgggaaaaagcgggagccgaactggttagcgatgtgctgccttatgaagagatgaagttgcgcatgctcaacggcagtcattcattcctggcgtatctggggtatcttgcaggatatcagcacattaatgactgtatggaagatgaacattatcgttatgcggcgtatggcttgatgttgcaggaacaagcgccgacgttgaaagtgcagggcgttgatttgcaagattacgctaaccgattaattgcacgctatagcaacccggcgttacgtcatcgaacctggcagattgcgatggatggtagccagaaattgccacagcggatgttggattctgttcgctggcatctggcgcatgacagcaagttcgatctgctggcgctgggcgtcgcgggttggatgcgttatgtcggtggtgttgatgaacagggaaatccgatagaaatcagtgacccactgttacctgttattcagaaggctgtacaaagtagtgccgaagggaaagcgcgcgtccagtcattgctggcgattaaggcgatctttggtgatgatttgccagacaatagtttgtttactgcaagagtgacggaaacgtacttgtctttattagcgcatggcgcgaaagcgaccgtggcaaaatattccgtgaagtaa

SEQ ID NO: 7092 - DNA, 267 bp, Escherichia coli
atgaaaatcaataatattttaaggaatatcttcatgaaatcaaaagacaccctaaagtggttccctgcgcagcttcctgaagtaagaattatcctaggggatgctgtagtggaagtagcaaaacagggaagacctatcaataccagaacattgcttgattacattgaaggaaacataaagaaaacatcatggctggataacaaagaattattacaaacagcgatatcagttcttaaagacaaccaaaatttaaatggtaaaatgtaa

SEQ ID NO: 7093 - DNA, 267 bp, Escherichia coli
atgaaaatcaataatattttaaggaatatcttcatgaaatcaaaagacaccctaaagtggttccctgcgcagcttcctgaagtaagaattatcctaggggatgctgtagtggaagtagcaaaacagggaagacctatcaataccagaacattgcttgattacattgaaggaaacataaagaaaaaatcatggctggataacaaagaattattacaaacagcgatatcagttcttaaagacaaccaaaatttaaatggtaaaatgtaa

SEQ ID NO: 7094 - DNA, 852 bp, Escherichia coli
gtgaaagtactcaacgagctaaggcagttttatcctcttgatgagcttctcagggctgcggagataccgcgcagtacgttttattatcatctaaaggctctcagcaagcctgacaagtatgcggacgttaaaaagcgtattagtgagatttatcacgagaatagaggccgatacggataccgtagggtaacgctgtctcttcatcgagaagggaaacagattaaccataaagctgttcagcgcctgatgggaaccctctcacttaaagcagcgattaaggtcaagcgataccgctcttacagaggagaggtagggcaaaccgcccctaatgttctccaaagagatttcaaggctacgcggccaaacgagaagtgggttaccgatgttactgaatttgcagtcaatgggcgcaagctgtatttgtctccagtaatagatctcttcaacaacgaagttatttcttacagcctttcggaaagaccagtgatgaacatggttgagaatatgctcgatcaggcattcaaaaagcttaatcctcacgagcatcctgttctgcactctgaccagggatggcagtatcgtatgagaagatatcaaaatatccttaaagaacatggtattaaacaaagcatgtccagaaaaggcaattgtctggataatgctgtggtggagtgtttctttggaaccttaaagtcggagtgtttttatcttgatgagttcagtaatataagcgaactgaaggatgctgttacggaatatattgaatactacaacagcagaagaattagcctgaaattaaaaggtctgactccaattgaatatcggaatcagacctatatgcctcgtgtttaa

SEQ ID NO: 7095 - DNA, 2253 bp, Escherichia coli
gtgctgatttacgcatggaaagcgggacgtaacacctggtggtttgcagccacgttaacggtgctggggctatttgtcgttttaaatatcaccctgtttgccagcgactattttactggcgatggtattaacgacgcggttctctataccttaaccaacagcctgaccggtgctggcgtcagcaaatacattttgccgggtatcggcattgtgctggggctgacagcggtgttcggtgcgctgggctggatcctgcgccgtcgtcgccatcatccgcaccattttggttacagcctgctggcgctcttactggcgctgggttcggtggacgccagcccggcatttcgtcagataacggaactggtgaaatcccagtcacgcgacggcgacccggactttgcggcttattataaagagccgtcgaaaactatccctgacccgaaactcaacctggtttatatctacggcgaaagtctcgagcggacctattttgataacgaggctttcccggatctcacgcctgaactgggcgcgttgaaaaatgaaggcctggatttcagccacacgcagcagctgccgggaacagattacacgattgcgggcatggtggcttctcagtgcggcataccgctgtttgccccctttgaaggcaacgcctccgcctctgtctccagcttcttcccgcagaacatctgtctgggagatatcctgaaaaactcgggttatcagaactatttcgtgcagggcgcgaatctgcgttttgccggtaaagatgtgttcctgaagtcgcatggcttcgaccacttatacggctcagaagagctgaaaagcgtggtagccgacccgcactatcgcaacgactggggattctacgacgataccgttctcgatgaagcgtggaaaaagtttgaagagctttcccgctcaggtcagcgattctcactgtttaccctgacagtcgatacccatcacccggatggttttatctctcgtacctgtaaccgcaaaaaatatgattttgacggtaaaccgaatcagtcattcagcgcggtaagttgcagccaggagaacatcgcgacgtttatcaacaaaatcaaagcgtcaccgtggtttaaagataccgtcatcgtcgtctcttctgaccatttagcgatgaacaacacggcgtggaaatacctcaataagcaggatcgcaataacctgttttttgtcattcgtggcgacaagccgcagcaagagacgctggcagtgaagcgtaacacgatggataacggcgcgacggtgctggacattctcggtggcgataactatctcggacttggtcgtagcagtttatccgggcagtcgatgtcggaaatcttcctcaatatcaaagagaaaacattggcgtggaagccagatatcatccgcctgtggaaattccctaaagagatgaaagagttcaccatcgaccagcagaaaaacatgattgccttctcgggtagccatttccgtttgccgctgctgttgcgggtttcagacaaacgcgtggaaccgctgccggaaagcgaatactcagcaccgctgcgtttccagctggccgatttcgctccacgcgacaatttcgtctgggttgaccgttgctacaagatggcacaactctgggctccggaactggcactttccaccgactggtgtgtctcgcaagggcagcttggcggtcagcaaattgttcagcatgttgacaaaacaacatggcagggcaaaacggcatttaaagatacggtcatcgacatggcgcgttacaaaggcaatgtcgatacgctgaagattgttgataacgatattcgctacaaagccgacagtttcatctttaacgtcgccggtgcgccagaagaggtgaaacagtttagcgggatttcccgtccggagtcgtggggccgctggtccaacgcgcagctgggcgatgaagtaaaaatcgagtacaagcatccgctgccgaagaaatttgacctggtgattaccgccaaagcatacggcaataacgccagccgtcctattccggtacgcgtaggcaatgaagaacaaactcttgtgctgggcaatgaagtgaccaccaccacactgcatttcgataacccaaccgatgccgacacactggtaattgtgccgccggaacctgtctcaaccaacgaagggaatatcctcggacactcgccgcgtaagctcgggatcggcatggtggaaattaaagtggtagaacgtgaagggtaa

SEQ ID NO: 7096 - DNA, 1560 bp, Escherichia coli
atgagcactgataataagcaatcattgcccgcgattaccctcgcggcgattggagttgtctacggcgatattggtaccagcccgttatatacacttcgtgaatgtttgtccggccagtttggttttggcgttgaacgcgatgccgtgtttggctttttatcgctgatcttctggctgctaatctttgtggtttccattaaatatctcaccttcgtgatgcgggcagataacgccggtgagggggggatcctgacgttgatgtcgcttgccgggcgtaatacgtcggcgcgaaccacatcaatgctggtgattatggggctaatcggcggcagctttttctatggtgaagtcgtcataacacccgctatttcggtgatgtcagccattgaaggtctggaaatcgtcgccccgcagctggatacctggatagttcccctctcaattatcgttctcactttattatttatgattcaaaaacatggcacggctatggtcggtaagctgtttgcgccgatcatgctgacctggtttttgattctggcaggactggggttacgtagcattattgctaacccggaagtgctgcatgcgctgaatccaatgtgggcggtgcatttcttccttgaatacaaaacggtttcttttattgcattaggggcagtggtgttgtcgattacgggggtcgaggcgctgtatgctgatatggggcactttggtaagttccctattcgcctggcgtggttcaccgtcgtattaccttccttgacccttaattacttcggtcagggagcgctgttgttaaagaacccggaagcgattaagaacccgttcttcctgttggcaccggactgggcgctgatcccgctgctgatcatcgccgcactggcgacggtaattgcctcgcaggcggttatctctggcgtcttctcattgacgcgtcaggcggtacgtctgggatatttgtcgccgatgcgcattattcacacctccgaaatggagtcagggcaaatctatattccgtttgtgaactggatgctctatgtcgcggtcgtgattgtgattgtcagctttgagcactccagcaacctggcggcggcgtacgggattgcggtgaccggaaccatggtgctgacgtctattctctcgactaccgtggcacgtcagaactggcactggaataagtattttgttgcgctgatcctgattgctttcctttgtgtcgatattccattgttcaccgctaacctcgataaactgctctccggcggctggttgccattgagcctcggtactgtgatgtttatcgtgatgaccacctggaagagcgagcgtttccgcttgctgcggcggatgcatgaacatggtaactctctggaagcgatgattgcttcgctggagaaatcaccgcctgttcgcgtgcccgggaccgcggtgtatatgtcgcgtgcaatcaacgtcattccctttgcgctgatgcataaccttaaacataacaaggtattgcatgagcgggtcgattctgttaactctgcgcaccgaagacgctccatatgtccataa

SEQ ID NO: 7097 - DNA, 924 bp, Escherichia coli
atgggttccaccagaaaggggatgctgaacgttctgattgccgccgtgttgtggggaagttcaggggtctgcgcgcaatacatcatggagcaaagccagatgtcgtcgcagtttttgactatgacgcgtttgatattcgccggtttgattctactgacgctgtcatttgttcatggcgataaaatcttttctattattaacaatcataaagatgccattagcctgctgattttttccgtggttggcgcgctaactgtacagctcacttttttgctaaccatcgaaaaatcgaacgcagccacggcaacggtgctgcaattcctctcaccgacgattatcgtcgcctggttctcactggtgcgtaaatcgcgcccgggcattctggttttctgcgctattttgacatcgctggtcgggacttttttattggtgacacacggtaatccgacgtcattatcgatctctcctgccgcgttgttctggggcattgcctcggcatttgctgctgcattctataccacctatccctcaacgctaattgcccgctatggcacgttaccagtcgtcggctggagtatgctgattggcggtctgattctgttgcctttttatgccagacaaggaacaaactttgtcgttaacggcagtttgattctggcgtttttttatttggtggtcattggtacgtccctgacatttagtctgtacctgaaaggagcacaattaattggcggtccaaaagccagcattttgagctgtgcagaaccattaagtagcgcgctactctctttgctgttgctggggatcacgttcacattaccggactggctgggaacgctgctgattctgtcatcggtgattttgatttcaatggattcccgtcgccgcgccagaaaaataaatcgtccggcgcggcataagtga

SEQ ID NO: 7098 - DNA, 1032 bp, Escherichia coli
atgtctgcatttaccccggcaagtgaagtcttgctgcgtcacagtgatgatttcgaacaaagccgtattctgtttgccggagacttacaggatgacctgcccgcgcgtttagataccgcggccagccgtgctcatacccagcaattccaccactggcaggtattaagccgccagatgggggataacgcccgtttcagtctggtcgccacggcggatgacgtcgcagattgcgatacgctgatttactactggccgaagaacaaaccggaagcccagttccagttgatgaatttactttctctgctgccagtggggacagatatttttgtcgttggcgagaaccgcagcggcgtgcgcagcgccgagcagatgctggcagattatgcgccgttgaataaagtcgacagcgctcgtcgctgtggcctctattttggtcgtctggaaaaacagccggtatttgatgcggagaaattctggggcgaatacagcgtcgatggcctgacggtcaaaacgctgcctggcgtgtttagccgcgacggtctggatgtcggtagccagttgctgctctcgacgttaactccgcacacgaaaggtaaagtgctggatgtcggctgtggcgcgggcgtgctttcagttgcctttgcgcgccattcgccgaaaattcgtctcaccttgtgcgatgtctctgccccggcggtagaagccagccgcgcaacacttgcggccaacggtgttgaaggtgaagtctttgccagcaacgtcttttccgaggtgaaaggtcgttttgatatgatcatctccaacccgccgttccacgatgggatgcaaaccagcctggatgcggcgcaaacgctgattcgcggtgcggtgcgtcatcttaatagcggcggcgagctgcgaattgtagcgaacgccttcctgccttatccggacgtgctggatgagacatttggcttccacgaagtgatcgcgcaaacagggcgcttcaaggtgtatcgcgccattatgacccgccaggcgaagaaaggttaa

SEQ ID NO: 7099 - DNA, 2079 bp, Escherichia coli
atgtcatatacaccgatgagtgatctcggacaacaagggttgttcgacatcactcggacactattgcagcagcccgatctggcctcgctgtgtgaggctctttcgcaactggtaaagcgttctgcgctcgccgacaacgcggctattgtgttgtggcaagcgcagactcaacgtgcgtcttattacgcgtcgcgtgaaaaagacacccccattaaatatgaagacgaaactgttctggcacacggtccggtacgcagcattttgtcgcgccctgatacgctgcattgcagttacgaagaattttgtgaaacctggccgcagctggacgcaggtgggctatacccaaaatttggtcactattgcctgatgccactggcggcggaagggcatatttttggtggctgtgaatttattcgttatgacgatcgcccctggagcgaaaaagagttcaatcgtctgcaaacatttacgcagatcgtttctgtcgtcaccgaacaaatccagagccgcgtcgttaacaatgtcgactatgagttgttatgccgggaacgcgataacttccgcatcctggtcgccatcaccaacgcggtgctttcccgcctggatatggacgaactggtcagcgaagtcgccaaagaaatccattactatttcgacattgacgatatcagtatcgtcttacgcagccaccgtaaaaacaaactcaacatctactccactcactatcttgataaacagcatcccgcccacgaacagagcgaagtcgatgaagccggaaccctcaccgaacgcgtgttcaaaagtaaagagatgctgctgatcaatctccacgagcgggacgatttagccccctatgaacgcatgttgttcgacacctggggcaaccagattcaaaccttgtgcctgttaccgctgatgtctggcgacaccatgctgggcgtgctgaaactggcgcaatgcgaagagaaagtgtttaccactaccaatctgaatttactgcgccagattgccgaacgtgtggcaatcgctgtcgataacgccctcgcctatcaggaaatccatcgtctgaaagaacggctggttgatgaaaacctcgccctgaccgagcagctcaacaatgttgatagtgaatttggcgagattattggccgcagcgaagccatgtacagcgtgcttaaacaagttgaaatggtggcgcaaagtgacagtaccgtgctgatcctcggtgaaactggcacgggtaaagagctgattgcccgtgcgatccataatctcagtgggcgtaataatcgccgcatggtcaaaatgaactgcgcggcgatgcctgccggattgctggaaagcgatctgtttggtcatgagcgtggggcttttaccggtgccagcgcccagcgtatcggtcgttttgaactggcggataaaagctccctgttcctcgacgaagtgggcgatatgccactggagttacagccgaagttgctgcgtgtattgcaggaacaggagtttgaacgtctcggcagcaacaaaatcattcagacggacgtgcgtctaatcgccgcgactaaccgcgatctgaaaaaaatggtcgccgaccgtgagttccgtagcgatctctattaccgcctgaacgtattcccgattcacctgccgccactacgcgagcgtccggaagatattccgctgctggcgaaagcctttaccttcaaaattgcccgtcgtctggggcgcaatatcgacagcattcctgccgagacgctgcgcaccttgagcaacatggagtggccgggtaacgtacgcgaactggaaaacgtcattgagcgcgcggtattgctaacacgcggtaacgtgctgcagctgtcattgccagatattgttttaccggaacctgaaacgccgcctgccgcaacggttgtcgccctggagggcgaagatgaatatcagttgattgtgcgcgtgctgaaagaaaccaacggcgtggttgccgggcctaaaggcgctgcgcaacgtctggggctgaaacgcacgaccctgctgtcacggatgaagcggctgggaattgataaatcggcattgatttaa

SEQ ID NO: 7100 - DNA, 1344 bp, Escherichia coli
atggatcagacatattctctggagtcattcctcaaccatgtccaaaagcgcgacccgaatcaaaccgagttcgcgcaagccgttcgtgaagtaatgaccacactctggccttttcttgaacaaaatccaaaatatcgccagatgtcattactggagcgtctggttgaaccggagcgcgtgatccagtttcgcgtggtatgggttgatgatcgcaaccagatacaggtcaaccgtgcatggcgtgtgcagttcagctctgccatcggcccgtacaaaggcggtatgcgcttccatccgtcagttaacctttccattctcaaattcctcggctttgaacaaaccttcaaaaatgccctgactactctgccgatgggcggtggtaaaggcggcagcgatttcgatccgaaaggaaaaagcgaaggtgaagtgatgcgtttttgccaggcgctgatgactgaactgtatcgccacctgggcgcggataccgacgttccggcaggtgatatcggggttggtggtcgtgaagtcggctttatggcggggatgatgaaaaagctctccaacaataccgcctgcgtcttcaccggtaagggcctttcatttggcggcagtcttattcgcccggaagctaccggctacggtctggtttatttcacagaagcaatgctaaaacgccacggtatgggttttgaagggatgcgcgtttccgtttctggctccggcaacgtcgcccagtacgctatcgaaaaagcgatggaatttggtgctcgtgtgatcactgcgtcagactccagcggcactgtagttgatgaaagcggattcacgaaagagaaactggcacgtcttatcgaaatcaaagccagccgcgatggtcgagtggcagattacgccaaagaatttggtctggtctatctcgaaggccaacagccgtggtctctaccggttgatatcgccctgccttgcgccacccagaatgaactggatgttgacgccgcgcatcagcttatcgctaatggcgttaaagccgtcgccgaaggggcaaatatgccgaccaccatcgaagcgactgaactgttccagcaggcaggcgtactatttgcaccgggtaaagcggctaatgctggtggcgtcgctacatcgggcctggaaatggcacaaaacgctgcgcgcctgggctggaaagccgagaaagttgacgcacgtttgcatcacatcatgctggatatccaccatgcctgtgttgagcatggtggtgaaggtgagcaaaccaactacgtgcagggcgcgaacattgccggttttgtgaaggttgccgatgcgatgctggcgcagggtgtgatttaa

SEQ ID NO: 7101 - DNA, 1257 bp, Escherichia coli
atgctccatccgcgagccagaaccatgttgttattatcgctccccgccgtggcaattgggattgcgtccagtcttattctgattgtggtgatgaaaatcgcctcggtattacagaatttgctctggcaacgactgccgggaactctggggatagcccaggattcacccctctggatcatcggtgtattaacgctaacgggtattgcggtggggttggttatccgtttcagccagggtcatgccggaccagaccccgcctgtgaaccgctgatcggcgcaccggttccgccctctgcgctacctggacttatcgtagcattaattctcggtcttgctggcggcgtcagcctggggccggaacatccgatcatgaccgtcaatatcgcccttgcggttgccattggcgctcgtctgttaccgcgcgtcaaccgaatggagtggactattttagcctctgccggaaccatcggcgcactgtttggcactcctgttgcggcggcgttgatattttcgcaaaccttaaatggcagtagtgaagttccgctatgggatcgtctctttgcgccgttaatggcggcagcagctggtgcacttactaccggattatttttccatcctcatttttcactgcccattgctcattacggacagatggaaatgaccgatattctcagcggtgcaattgtcgcggcgattgccatcgcagcagggatggtcgccgtatggtgcttaccacggttgcacgcgatgatgcatcaaatgaaaaatccggtgctcgtgctgggtattggcggatttattctcggtattctgggggttattggtggaccagtttcgctgtttaaagggctggatgagatgcagcagatggtggcaaatcaggctttcagcaccagcgattactttttgctggcggtaattaaacttgccgccctggtcgttgctgccgccagtggctttcgcggtgggcgaatcttcccggcagtgtttgtcggcgtggcattagggttgatgctgcatgagcacgttcccgccgtaccagcggcaataaccgtttcttgcgctattctcggcatcgtgctggtggtaacacgcgatggctggttaagtctttttatggcggcagtcgttgtacccaataccacattgctaccgctgctctgtatcgtcatgcttccggcatggctgttattagcaggtaagccgatgatgatggtcaatcgtccgaagcaacagccaccccacgataacgtttag

SEQ ID NO: 7102 - DNA, 1500 bp, Escherichia coli
atgctaaatttatttgttggccttgatatatacacagggcttttgttattgcttgctctggcatttgtgttgttctacgaagcaatcaatggttttcatgacacggcgaatgcggtggcagccgttatttatactcgtgccatgcaaccacaacttgctgtggtgatggcggcattttttaacttttttggcgtgttattgggcggacttagcgttgcctatgccattgtccatatgttgccaaccgatttgttgctgaatatggggtcaacccacggcctggcgatggtcttttccatgctgctggcggcgattatctggaacctgggaacgtggttcttcggtttaccggcctccagttcgcacaccttgattggtgcgattatcggcatcggtttaaccaacgcgctgttaaccggctcatcggtgatggatgcgttaaacctgcgtgaagtgaccaaaattttctcctcgctgattgtttcccctatcgtcggcctggtcattgcgggaggcctgatattcctgctgcgacgctactggagcgggacgaaaaagcgtgaccgtattcaccgcattccggaagatcgcaaaaagaaaaaaggcaaacgtaaaccgccattctggacgcgtattgcgctgattgtttccgctgcgggcgtggcgttttcgcacggcgcgaacgacggacaaaaagggatcggcctggtaatgctggtactggtggggattgcccctgctggcttcgtcgtcaatatgaatgcgtccggctatgaaattacccgtacccgcgatgccgttaccaacttcgaacactacctgcaacagcatcctgaactgccgcagaagttgattgcgatggaacctccattgcctgcagcatcgactgatggcacgcaagtaacagagtttcactgtcatccggcaaatacctttgatgctattgcgcgcgttaaaacgatgctgccaggcaatatggaaagttacgagccgttaagcgtgagtcagcgcagccagctgcgccgcattatgctgtgcatctctgatacctccgcgaagctagcgaaactgccaggcgtcagtaaagaagaccagaacctgctgaaaaaacttcgcagcgatatgttaagcaccattgagtacgctccggtgtggatcatcatggcggtagcactggcgctcggcattggcaccatgattggctggcgtcgtgtagcgatgaccatcggtgagaagattggtaagcgcggcatgacgtatgcgcaaggcatggcggcacaaatgacggcggcagtgtctatcggtcttgccagttatattgggatgcccgtctccacaacacacgtcctctcgtctgcagttgcagggacgatggtggtggacggcggtgggttacagcgtaaaacggtaaccagcatcctgatggcgtgggtatttactttaccggcggcaatttttctttctggtgggctgtactggatagcattgcagttgatttaa

SEQ ID NO: 7103 - DNA, 1896 bp, Escherichia coli
atggcagggaagtttcgctgcattttgctgttgatagcagggctgtttgtatcatctctaagttatgcagaaaacacggagatcccttcttatgaagaagggatctcgctctttgatgttgaagccactctgcaaccagatggggtgctcgacatcaaagaaaatattcattttcaggcgcgaaatcagcagattaagcacggcttttatcgtgatttaccacgactatggatgcagcctgatggggacgctgcactgctgaactatcatattgttggcgtcacccgtgatggtattcctgaaccctggcatcttgactggcatatcgggttaatgagtattgtcgtgggcgataaacaacgtttcttgcctcaaggcgactatcattatcaaattcattatcaggttaaaaatgctttcctgcgtgagggggattctgatctgctaatctggaacgtgaccggtaaccactggccgtttgaaatttataagacccgtttttctctccagttctctaatattgcgggtaatccatttagcgaaatcgatctttttaccggagaagagggcgacacatatcgtaatggccgcatccttgaggacggaagaattgaatcccgcgatccgttttatcgtgaagatttcacggtcctctaccgctggcctcacgctttacttagcaatgcctcggctccgcaaacgacgaatattttcagccatcttcttttaccctccacgtcatcgttgttaatttggtttccgtgtctgttcctggtttgtggatggttatatctctggaagcgcaggccgcaatttacgccggtagatgtgattgaaaccgatgtcattccgccagattacacgcccggcatgttacgtctcgatgcgaagctagtttacgacgataaaggtttttgtgccgatatcgtaaatctgattgtgaaaggaaaaattcatctggaagatcagtctgacaagaaccagcaaatcctgattcgtgttaatgaaggcgcgaccagaaataatgcggtattactgcccgcagagcagttattactggaagcgttatttcgtaaaggcgataaggtcgttcttacggggagacgcaacagagtcttacgcagggcatttttacggatgcagaaattttatctgccgcgtaaaaagtcttcgttttaccggtctgatacttttttgcaatggggtggactggcaatattggcggtcattctttacggtaacttgagtcctgtaggctgggcaggaatgagtctggtgggcgatatgtttattatgatctgctggattattccttttttattttgttcccttgagcttttgtttgcccgcgatgatgacaagccttgcgttaatcgtgtaatcatcactttgtttttaccactgatttgttcaggcgtggccttctattctctctacatcaatgtcggagatgtattcttttactggtatatgccagcgggttattttaccgctgtttgcctgaccggttatctcactggcatggggtatatttttctgccaaagtttacccaaactggacagcaacgttatgcccacggtgaagctatcgttaactatcttgcgcgtaaagaggcagcaacacacagtggacgtcggcggaaaggggaaacacggaaactggattacgcgttgctaggttgggctatatcggcaaatttggggagggaatgggcgttacgcattgccccttcgctttcttcggcgattcgcgctccagagattgcccgtaacggcgttttattctcattacagacgcacctaagttgcggggccaataccagtttgttggggcgaagttattccggtggtggtgctggcggcggcgcgggtggcggaggcggtggtggctggtaa

SEQ ID NO: 7104 - DNA, 1293 bp, Escherichia coli
atgctcgatcccaatctgctgcgtaatgagccagacgcagtcgctgaaaaactggcacgccggggctttaagctggatgtagataagctgggcgctcttgaagagcgtcgtaaagtattgcaggtcaaaacggaaaacctgcaagcggagcgtaactcccgatcgaaatccattggccaggcgaaagcgcgcggggaagatatcgagcctttacgtctggaagtgaacaaactgggcgaagagctggatgcagcaaaagccgagctggatgctttacaggctgaaattcgcgatatcgcgctgaccatccctaacctgcctgcagatgaagtgccggtaggtaaagacgaaaatgacaacgttgaagtcagccgctggggtaccccgcgtgagtttgactttgaagttcgtgaccacgtgacgctgggtgaaatgcactctggcctcgactttgcagctgcagttaagctgactggttcccgctttgtggtaatgaaagggcagattgctcgcatgcaccgcgcactgtcgcagtttatgctggatctgcataccgaacagcatggctacagtgagaactatgttccgtacctggttaaccaggacacgctgtacggtacgggtcaactgccgaaatttgctggcgatctgttccatactcgtccgctggaagaagaagcagacaccagtaactatgcgctgatcccaacggcagaagttccgctgactaacctggtgcgcggtgaaatcatcgatgaagatgatctgccaattaagatgaccgcccacaccccatgcttccgttctgaagccggttcatatggtcgtgacacccgtggtctgatccgtatgcaccagttcgacaaagttgaaatggtgcagatcgtgcgcccagaagactcaatggcggcgctggaagagatgactggtcatgcagaaaaagtcctgcagttgctgggcctgccgtaccgtaaaatcatcctttgcactggcgacatgggctttggcgcttgcaaaacttacgacctggaagtatggatcccggcacagaacacctaccgtgagatctcttcctgctccaacgtttgggatttccaggcacgtcgtatgcaggcacgttgccgcagcaagtcggacaagaaaacccgtctggttcataccctgaacggttctggtctggctgttggtcgtacgctggttgcagtaatggaaaactatcagcaggctgatggtcgtattgaagtaccagaagttctgcgtccgtatatgaacggactggaatatattggctaa

SEQ ID NO: 7105 - DNA, 1389 bp, Escherichia coli
atggaaaacaagtctgctcgtgcaaaggtccaggcttttgggggctttttgactgcaatggtcatccccaatattggtgcttttattgcctggggttttattactgcgttatttattcccaccggttggctgcctaacgaacatttcgccaaaattgtcggcccgatgattacctatttattgcccgtgatgattggttctacaggtggtcatctggtcggcggtaaacgcggggcggtcatgggcggaataggtactattggtgtgatcgttggcgcagagatcccgatgttccttggctcaatgatcatggggccgctcggtgggttggtcataaaatatgtcgataaggcactggaaaaacgcatacctgccggttttgagatggttatcaataacttctcattaggtatcgcggggatgctcctttgtctgctgggttttgaagttatcggcccggcggtgttaattgccaatactttcgtcaaagagtgtattgaggcgctggtacatgcgggttatctgccattgttgtcagtcatcaatgaaccggcgaaagtgcttttcctcaataatgcgatcgatcagggcgtctattatccgctgggaatgcaacaggcttcggttaacggtaaatccatcttctttatggtggcctctaacccaggtccgggcctggggctgctgctggcgtttaccttgtttggtaaagggatgagtaaacgttctgcgcccggggcgatgattattcacttcctcggtgggatccacgaactgtatttcccgtatgtgctgatgaagccgctgaccattattgccatgattgcgggcggtatgtctggcacctggatgtttaacttactggacggtggtctggtggctggcccaagtccggggtctatctttgcttacctggcactgacgccgaaaggctcgttcctggcgacaattgccggtgttacggtaggtaccctggtgtcctttgctattacttcgctgatactgaagatggaaaaaacggtggaaacggagagcgaagatgagtttgctcagtcagccaatgcggttaaggcgatgaaacaagagggtgcattctcgttaagcagggttaagcgtatcgcctttgtttgcgatgcggggatgggctccagtgcgatgggcgcgaccaccttccgtaaacgcctggaaaaagcggggctggcaattgaagtaaaacattacgccatagaaaacgtgcctgcggatgcggatatcgtcgttactcatgccagtctggaagggcgcgtgaaacgtgtgacggataaaccactgatattgattaataactatattggcgatccaaaactcgacactttatttaatcaattaaccgccgaacataaacactga

SEQ ID NO: 7106 - DNA, 444 bp, Escherichia coli
atgcggcttagtgattattttccagaatcatcaatctcagttatacattcagcaaaagattggcaggaagctatcgatttctcgatggtatcattgctggataaaaactatatcagcgagaattacattcaggcaattaaagattccaccattaacaatggcccttattatattctcgcaccaggcgtggcaatgcctcatgcgcgaccggaatgtggggcgcttaaaaccgggatgtctttgacattacttgaacaaggtgtttattttccggggaatgacgaaccaattaaattactcatcggactctctgctgccgatgccgattcgcacattggcgctattcaggcgttaagtgaattactgtgcgaagaagaaatactcgaacaactcttaacagcatcatcagaaaaacaattagcggacattatcagccgcggataa

SEQ ID NO: 7107 - DNA, 816 bp, Escherichia coli
atggcgttcaaattcaaaacctttgcggcagtgggagccctgatcggatcactggcactggtaggctgcggtcaggatgaaaaagatccaaaccacattaaagtcggcgtgattgttggtgccgaacagcaggttgcagaagtcgcgcagaaagttgcgaaagacaaatatggcctggacgttgagctggtaaccttcaacgactatgttctgccaaacgaagcattgagcaaaggcgatatcgacgccaacgccttccagcataaaccgtaccttgatcagcaactgaaagatcgtggctacaaactggtcgcagtaggcaacacttttgtttatccgattgctggttactccaagaaaatcaaatcactggatgaactgcaggatggttcgcaggttgccgtgccaaacgacccaactaaccttggtcgttcactgctgctgctgcaaaaagtgggcttgatcaaactgaaagatggcgttggcctgctgccgaccgttcttgatgttgttgagaaccccaaaaatctgaaaattgttgaactggaagcaccgcaactgccgcgttctctggacgacgcgcaaatcgctctggcagttatcaataccacctatgccagccagattggcctgactccggcgaaagacggtatctttgttgaagataaagagtccccgtacgtaaacctgatcgtgacgcgtgaagataacaaagacgccgagaacgtgaagaaattcgtccaggcttatcagtctgacgaagtttacgaagcagcaaacaaagtgtttaacggcggagctgttaaaggctggtaa

SEQ ID NO: 7108 - DNA, 1545 bp, Escherichia coli
atgaaaatccgttcacaagtcggcatggtgcttaacctcgacaaatgtatcggctgccatacctgttcggtgacctgtaaaaacgtctggaccgggcgcgaaggcatggagtacgcatggtttaacaacgtcgaaaccaaaccgggcattggttatccgaaaaactgggaagatcaggaagagtggcaaggcggctgggtgcgtgatgtgaatggcaagatacgcccgcgtctgggcaacaagatgggcgtaataaccaaaatcttcgccaacccggtggtgccgcagattgatgattactacgaacctttcaccttcgactacgaacatttgcatagcgcaccggaaggcaaacatattcctactgctcgcccgcgttcactgattgacggcaaacggatggacaaagtgatctgggggccaaactgggaagaactgctgggcggtgagttcgaaaaacgtgcccgcgaccgcaacttcgaggccatgcaaaaggagatgtacgggcagtttgaaaacaccttcatgatgtacctgccgcgcctgtgcgaacactgcctcaatcccagctgcgtggcgacctgcccaagcggcgctatctacaaacgcgaagaagacggcattgtgctgattgatcaggataaatgccgtggctggcgtttgtgcataagcggttgtccgtacaaaaaaatctacttcaactggaaaagcggcaagtcagaaaaatgcatcttctgttacccacgaattgagtccggtcaaccgaccgtgtgctcagaaacctgcgtgggtcgcatccggtatctgggcgtgctgctttacgacgccgaccgcatcgaggaagcggcgagcaccgagcgcgaagttgacctctatgaacgccagtgcgaagtgttcctcgatccacacgatccctcagtgatcgaggaagccctgaaacaaggtattccacaaaatgtgattgacgctgcccagcgttcgccagtctacaaaatggcgatggactggaaactggcactaccgttgcaccctgaataccgcaccctgccgatggtctggtacgttcctccgctgtcaccgattcagtcctacgcagatgcgggcggtttgccgaaaagcgaaggcgtgctgcccgccatcgaaagcctgcgtattccggtgcaatatctcgccaatatgttgagtgccggcgataccggtccggtactgcgggcgctgaaacggatgatggcgatgcgccactatatgcgttcacaaaccgtggaaggcgttactgatactcgtgccatcgacgaagtaggcctgagcgtcgcccaggtcgaagagatgtatcgctatctcgccattgccaactatgaagatcgttttgttatcccgaccagccatcgggaaatggcgggcgatgccttcgcagaacgcaacggctgcggttttacctttggcgacggttgccacggttcggacagtaaattcaacctgttcaacagtagccgtatcgatgccatcaacatcaccgaagtgcgcgacaaagcggagggcgaataa

SEQ ID NO: 7109 - DNA, 1203 bp, Escherichia coli
atgacacaattcgcttctcctgttctgcactcgttgctggatacagatgcttataagttgcatatgcagcaagccgtgtttcatcactattacgatgtgcatgtcgcggcggagtttcgttgccgaggtgacgatctgctgggtatttatgccgatgctattcgtgaacaggttcaggcgatgcagcacctgcgcctgcaggatgatgaatatcagtggctttctgccctgcctttctttaaggccgactatcttaactggttacgcgagttccgctttaacccggaacaagtcaccgtgtccaacgataatggcaagctggatattcgtttaagcggcccgtggcgtgaagtcatcctctgggaagttcctttgctggcggttatcagtgaaatggtacatcgctatcgctcaccgcaggccgacgttgcgcaagccctcgacacgctggaaagcaaattagtcgacttctcggcgttaaccgccggtcttgatatgtcgcgcttccatctgatggattttggcacccgtcgccgtttttctcgcgaagtacaagaaaccatcgttaagcgtctgcaacaggaatcctggtttgtgggcaccagcaactacgatctggcgcgtcggctttccctcacgccgatgggaacacaggcacacgaatggttccaggcacatcagcaaatcagcccggatctagccaacagccagcgagctgcacttgctgcctggctggaagagtatcccgaccaacttggcattgcattaaccgactgcatcactatggatgctttcctgcgtgatttcggtgtcgagttcgctagtcggtatcagggcctgcgtcatgactctggcgacccggttgaatggggtgaaaaagccattgcacattatgaaaagctgggaattgatccacagagtaaaacgctggttttctctgacaatctggatttacgcaaagcggttgagctataccgccacttctcttcccgcgtgcaattaagttttggtattgggactcgcctgacctgcgatatcccccaggtaaaacccctgaatattgtcattaagttggtagagtgtaacggtaaaccggtggcgaaactttctgacagccctggcaaaactatctgccatgataaagcgtttgttcgggcgctgcgcaaagcgttcgaccttccgcatattaaaaaagccagttaa

SEQ ID NO: 7110 - DNA, 1545 bp, Escherichia coli
gtgggcacgtgttatacacgcgctgaaatgaaggatggtttcatgcctcacacgataaaaaagatgagtctgataggactcatattgatgatctttacttccgtatttggatttgccaatagcccatcggcttattacttaatgggttatagtgcgattcccttttatatattttctgcattgttattctttattccattcgccttaatgatggctgaaatgggagctgcttatcgcaaagaagaaggcggtatctattcctggatgaataatagtgtcggaccacgttttgccttcattggtacgtttatgtggttttcctcttatatcatctggatggtgagtacctccgcgaaagtttgggtaccgttctcaacattcctctatggtagcgacatgacccagcactggcgtattgccggactggagcctacgcaggtggttggtctgctggctgtggcatggatgattctggtcaccgtcgttgcttctaaggggattaataaaattgcccgcattactgcggtgggcggtattgcagtaatgtgtctgaatttagtattgctgttagtaagcattactattttgttattaaatggtgggcatttcgcgcaggatattaatttccttgcatcaccgaacccgggttatcagtccggtctggcaatgctatcgtttgtggtatttgccatttttgcctatggcggaattgaagcggttggtggtctggtcgataaaacggaaaatccagaaaagaactttgccaaaggtattgtttttgccgctattgttatttcaatcggttattcgctggcaatatttttatggggcgtcagcacaaactggcagcaggtattaagtaatggttccgttaacctcggcaatattacctatgtgctgatgaagagccttgggatgacgctgggtaatgcactgcatttgtcacctgaagcgtcattgtcgctgggcgtatggtttgcgcgtattactggactttcgatgttcctcgcctataccggtgcgttctttacgctttgctattcaccgttgaaagccatcatccaggggacgccgaaagcattgtggccggaaccgatgacgcgcctgaatgcgatggggatgccgtctatcgccatgtggatgcagtgcgggttggttactgtcttcatcctgctggtttcgtttggtggcggtaccgcatcggcgttctttaacaagctgacgctgatggcgaacgtgtctatgacgcttccttacctgttcctcgcgctggctttcccgttctttaaagcacgtcaggatctcgacagaccgtttgtgattttcaaaacgcatttgtcggcaatgattgcgacagtggttgtcgtactggtggtgacatttgcgaacgtcttcaccatcattcaacctgtggttgaagccggagactgggacagcacattgtggatgattggcggccctgtcttcttctcgctgttagcgatggcgatttaccagaactattgcagcagagtggcaaaaaatccgcagtgggcggtggaataa

SEQ ID NO: 7111 - DNA, 315 bp, Escherichia coli
atggatgacaccagccgggacccggcaataaccgaagatgaaatcagggcgctgcaattttctgccggggatgtagcggaaatagagcagacgattctctcttttgtcgatgcctgccacacccgtaaagtggcgatggtggtgggtagcaccattaacaccctcaaagatcgcgatggtaaacggtggggaaacctgccggatatttattgcgcttatcttatccgatgtctggtttttcgcggggaattagtgggatacggcgatttgtttcgtatgcgctatagcgaaattaagcgaccggttaccttatga

SEQ ID NO: 7112 - DNA, 1149 bp, Escherichia coli
ttgattaagtcagcgctattggttctggaagacggaacccagtttcacggtcgggccataggggcaacaggttcggcggttggggaagtcgttttcaatacttcaatgaccggttatcaagaaatcctcactgatccttcctattctcgtcaaatcgttactcttacttatccccatattggcaatgtcggcaccaatgacgccgatgaagaatcttctcaggtacatgcacaaggtctggtgattcgcgacctgccgctgattgccagcaacttccgtaataccgaagacctctcttcttacctgaaacgccataacatcgtggcgattgccgatatcgatacccgtaagctgacgcgtttactgcgcgagaaaggcgcacagaatggctgcattatcgcgggcgataacccggatgcggcgctggcgttagaaaaagcccgcgcgttcccaggtctgaatggcatggatctggcaaaagaagtgaccaccgcagaagcctatagctggacacaagggagctggacgttgaccggtggcctgccagaagcgaaaaaagaagacgagctgccgttccacgtcgtggcttatgattttggtgccaagcgcaacatcctgcggatgctggtggatagaggctgtcgcctgaccatcgttccggcgcaaacttctgcggaagatgtgctgaaaatgaatccagacggcatcttcctctccaacggtcctggcgacccggccccgtgcgattacgccattaccgccatccagaaattcctcgaaaccgatattccggtattcggcatctgtctcggtcatcagctgctggcgctggcgagcggtgcgaagactgtcaaaatgaaatttggtcaccacggcggcaaccatccggttaaagatgtggagaaaaacgtggtaatgatcaccgcccagaaccacggttttgcggtggacgaagcaacattacctgcaaacctgcgtgtcacgcataaatccctgttcgacggtacgttacagggcattcatcgcaccgataaaccggcattcagcttccaggggcaccctgaagccagccctggtccacacgacgccgcgccgttgttcgaccactttatcgagttaattgagcagtaccgtaaaaccgctaagtaa

SEQ ID NO: 7113 - DNA, 693 bp, Escherichia coli
atgatgactaaaataaagttattgatgctcattatattttatttaatcatttcggccagcgcccatgctgccggagggatcgcattaggtgccacgcgtattatttatcccgctgatgctaaacagactgcggtatggattagaaatagccataccaatgagcgctttctggtcaattcgtggattgaaaacagcagcggtgtaaaagaaaagtcattcatcattacaccgccactgtttgttagtgaacccaaaagcgaaaatactttgcgtattatttacaccggtccaccgctggcagcagatcgtgagtctctgttctggatgaatgttaagacgatcccttcggtagataaaaatgcattgaacggcaggaatgttttgcaactggcgattttatcgcgcatgaaattatttctccgtccaattcaattacaagaattacccgcagaagcgccggacacactcaagttttcgcgatccggtaactatatcaatgttcataatccatcacctttttatgtcaccctggttaacttacaagtgggcagccaaaagttggggaatgctatggctgcacccagagttaattcacaaattcccttaccctcaggagtgcagggaaagctgaaatttcagaccgttaatgattatggttcagtaactccggtcagagaagtgaacttaaactaa

SEQ ID NO: 7114 - DNA, 1014 bp, Escherichia coli
atgatgacgacgatgctggaagtggcgaagcgcgccggggtttcaaaagcgaccgtttcccgcgtgctttcaggtaatggctacgtcagccaggagactaaagatcgcgtgtttcaggcggtagaagagagcggttaccgtccaaacttgctggcgcgcaatctgtcggcgaagagtactcagacgctggggctggtagtgaccaacacgctttaccacggcatttattttagtgaattactctttcatgccgcgcgaatggcggaagagaaagggcggcagttgctattggcagatggtaaacacagcgcagaagaagagcgccaggcgattcagtatctgctggatctgcgctgcgacgcgatcatgatttacccgcgttttttaagcgtggatgagatcgatgacatcattgacgcgcacagtcagccgataatggtgcttaatcgccgcctgcgcaaaaacagcagccatagcgtctggtgcgatcataaacagaccagttttaacgccgtggcagagttgataaacgccgggcatcaggagattgctttccttaccggctcgatggattcccccaccagcattgaacgtcttgccgggtataaagacgcgctggcgcagcatggtattgcgctcaatgaaaaacttatcgctaacggtaaatggacgcctgccagcggggccgaaggggtagaaatgttgctcgaacgtggggctaaatttagcgcgttagttgccagtaacgacgatatggcgataggtgcgatgaaagcgttacacgagcgcggcgtagcggtgccagagcaggtgtcagttatcggattcgatgatatcgctattgccccctacaccgttccggcgctctccagcgtaaaaattccggtgactgagatgattcaggaaattattggacggctgatttttatgctcgatggcggggatttctcaccgccgaaaaccttcagcggaaaactgatccgccgcgactcactcattgctccttcgcgataa

SEQ ID NO: 7115 - DNA, 1227 bp, Escherichia coli
atgggaattaacgaaatcatcatgtacatcatgatgttctttatgctgatagctgccgtagacaggatcctgtcgcagttcggcggttctgctcgtttcctcggtaagttcggtaaaagtatcgaaggatcaggcggtcagttcgaagaaggctttatggcaatgggcgcactgggcctggcgatggtcggtatgaccgcgctggcaccggtactggctcacgttctcgggccggtaattattccggtttacgaaatgctcggcgctaacccatcgatgttcgccggaacactgctggcgtgcgatatgggcggcttcttcctcgccaaagagctggcgggcggcgacgtagccgcgtggctatactctgggttaattctcgggtcgatgatggggccaacgattgtgttttccattccggtggcgctcggcattatcgaaccttctgaccgtcgttatctggcgctcggcgtgctggcgggcattgtgaccattccgattggttgtatcgctggtggtctggttgctatgtactccggtgtgcagatcaacggccagccggtggaattcactttcgccctgatcctgatgaacatgatcccggtgatcattgttgcgattctggtggcgctggggctgaaattcatcccggaaaaaatgatcaacggcttccagatcttcgccaaattcctcgttgcattgatcaccctcggtcttgccgctgcggtagtgaaattcctgcttggctgggaactgatccccggtctggatcctatctttatggcccctggcgataaacccggtgaggtgatgcgcgccattgaagttatcggttctatctcctgcgttctgttaggggcgtatccgatggtgctgctgctgactcgctggtttgaaaaaccgctgatgagcgtcggtaaagtactgaatatgaacaacatcgcggcagccggcatggtggcaacgcttgccaacaacatcccgatgttcggcatgatgaagcagatggatacccgcggcaaagtcatcaactgcgccttcgccgtttccgctgctttcgccctgggcgaccacttaggcttcgccgctgccaacatgaacgccatgatcttcccgatgattgtcggcaagttgatcggcggcgtaacggcgattggcgtggcgatgatgctggtgccaaaagaagacgcgaccgcgactaaaaccgaagcggaggcacaatcgtga

SEQ ID NO: 7116 - DNA, 1047 bp, Escherichia coli
atgaaaaaatggtcacgccacctgctcgcggcgggtgctctggcactgggcatgagcgccgctcacgccgatgacaacaacacgctgtatttctacaactggaccgagtacgtgccgccaggactgcttgaacagttcaccaaagaaaccggtattaaggttatctattcgacttacgagtcgaacgaaaccatgtacgccaagctgaaaacatacaaagacggtgcctatgatctggtggttccttcaacctattacgttgataaaatgcgtaaagaagggatgatccagaagatcgacaagtcgaagttaacaaacttcagcaatctcgatccagacatgctcaacaagccttttgacccgaataacgactactccattccgtatatctggggtgcgacggcgattggtgttaacggtgatgcggtggatccgaaatctgtcaccagctgggccgatctgtggaagccagagtacaaaggcagcctgctgttgaccgacgatgcccgtgaagtgttccagatggcgctgcgtaagctgggctactccggtaacaccaccgatccgaaagagattgaagctgcatataacgagctgaaaaaactgatgccaaacgtggcagcctttaactccgataacccggcgaacccgtacatggaaggcgaagttaacctcggcatgatctggaacggttctgctttcgttgcacgccaggcgggtacgccaattgacgtggtgtggccgaaagaaggcggcattttctggatggacagcctggcgatcccggcaaatgccaaaaacaaagaaggcgcgctgaaattgatcaacttcctgctgcgcccggatgtggcaaaacaggttgctgaaactatcggttatccaacgccaaaccttgcggcgcgtaagctgttaagtccagaagtggcgaacgataaaacactctacccggatgctgaaaccattaaaaatggcgaatggcagaatgacgttggcgcagccagcagcatttatgaagagtattatcagaagctgaaagcaggacgttaa

SEQ ID NO: 7117 - DNA, 459 bp, Escherichia coli
atgttccggggagcaacgttagtcaatctcgacagcaaagggcgcttatcagtgcctacccgttatcgggaacagctgcttgagaacgctgccggtcaaatggtttgcaccattgacatttatcacccgtgcctgctgctttaccccctgcctgaatgggaaattatcgagcaaaaattatcgcgtctgtcgagcatgaacccggttgagcgccgtgtgcagcgcctactgttaggtcatgccagcgaatgtcagatggatggcgcaggtcgattgttaatcgcgccagtactgcggcaacatgccgggctgacaaaagaagtgatgctggttggacagttcaacaagtttgagctgtgggatgaaacaacctggcatcaacaggtcaaggaagatatcgacgcagagcagttggctaccggagacttatcggagcgactgcaggacttgtctctataa

SEQ ID NO: 7118 - DNA, 1317 bp, Escherichia coli
atggactccacgctcatctccactcgtcccgatgaagggacgctttcgttaagtcgcgcccgacgagctgcgttaggcagcttcgctggtgccgtcgtcgactggtatgattttttactctatggcatcaccgccgcactggtgtttaatcgcgagtttttcccgcaagtaagcccggcgatgggaacgctcgccgcatttgctacctttggcgtcggatttcttttccgtccgctcggcggtgtcattttcggtcactttggcgaccgactgggacgtaagcgcatgttaatgctgaccgtctggatgatgggcatcgcgacagccttgattggtattcttccttcattctcgaccattgggtggtgggcacctattttgctggtgacactgcgtgccattcagggatttgcagtcggcggcgaatggggaggcgcggcgttgctttccgttgaaagtgcaccgaaaaataaaaaagccttttacagtagcggtgtacaagttggctacggtgtaggtttactgctttcaaccggactggtttcattgatcagtatgatgacgactgacgaacagtttttaagctggggctggcgcattcctttcctgtttagcatcgtactggtactgggagcattgtgggtgcgcaatggcatggaggagtccgcggaatttgaacaacagcaacattatcaagctgccgcgaaaaaacgcatcccggttatcgaagcgctgttacgacatcccggtgctttcctgaagattattgcgctacgactgtgcgaattgctgacgatgtacatcgttactgcctttgcacttaattattcaacccagaatatggggctaccgcgcgaacttttccttaatattggtttgctggtaggtggattaagctgcctgacaattccctgttttgcctggcttgccgatcgttttggtcgccgtagggtttatatcacaggtacgttaatcggaacgttgagcgcatttcctttctttatggcgcttgaagcacaatctattttctggatagttttcttctccataatgctggcaaacattgcgcatgacatggtggtgtgtgtgcaacaaccgatgtttaccgaaatgtttggtgccagttatcgctatagtggcgctggagtcggttatcaggttgccagtgtggttggcggtggatttacaccttttattgccgctgcactcatcacttactttgccgggaactggcatagcgtcgccatttatttgctggctggatgcctgatttccgcaatgaccgctttgttgatgaaagacagtcaacgcgcttga

SEQ ID NO: 7119 - DNA, 786 bp, Escherichia coli
gtggttcttatgtccgaaacaaaaaacgaacttgaagacctgctggaaaaagcagcaactgaaccggcgcaccgcccggcctttttccgtactctactggaatccaccgtctgggtgcctggtacggcggcgcagggcgaggctgtggttgaagatagcgcgcttgatttacagcactgggaaaaagaagacggcaccagcgtcattccttttttcacctcgttagaagcacttcaacaggcggttgaagacgaacaggcatttgtcgtaatgcccgttcgcacgctgtttgagatgacacttggcgaaacgctcttccttaatgccaaactgccaaccggtaaagaatttatgccgcgtgaaatcagtttgttgattggtgaagagggaaatccgctgagcagccaggaaatcctggaaggcggtgaatcgctgatattatcggaagtcgcagagccgccagcacaaatgattgattcactcaccaccttatttaaaaccattaagccggtgaagcgtgcttttatttgttcaattaaagagaacgaagaggcacagcctaatttacttattggcattgaagccgatggtgatatcgaagaaattattcaggcgacgggaagtgtagcgaccgatacattacctggcgatgaaccaatcgatatttgtcaggtgaaaaaaggggaaaaaggaattagccactttattaccgaacatattgcgccattctatgaacgtcgctggggtggttttttgcgtgactttaaacagaatcggataatctaa

SEQ ID NO: 7120 - DNA, 579 bp, Escherichia coli
gtggaataccgtagcctgacgcttgatgattttttatcgcgctttcaacttttgcgcccgcaaattaaccgggaaaccctaaatcatcgtcaggctgctgtgttaatccccatcgtccgtcgaccgcaaccggggttgttgctgactcagcgttcgattcatctgcgtaaacacgctggacaagtggcattccctggaggtgcagtcgatgacacggacgcatcagctatcgccgccgcgctgcgcgaagctgaagaagaggtcgctataccgccttccgccgttgaagttatcggcgtgctgccgcccgtcgatagcgtcactggctaccaggtaaccccagtggtcggcattatcccgcccgatctgccgtatcgcgccagtgaagatgaagtctcggcggtgtttgaaatgccgctcgcccaggcattacatctgggtcgttatcaccctttagatatctaccgccgtggtgattcacatcgggtatggctgtcctggtacgaacagtattttgtatggggaatgaccgcaggcataattcgtgagctggcgctgcaaattggtgtgaaaccctga

SEQ ID NO: 7121 - DNA, 2601 bp, Escherichia coli
atgtatagaactcatcgacaacacagcctgttaagctctggtggagtgccatcgtttattggtgggctggtggtgtttgtgtcggcagcgttcaatgcacaagctgaaacctggttcgatcctgcttttttcaaagatgatccctcaatggtggccgatttgtctcgtttcgaaaaaggacaaaaaataacgccaggggtttatcgtgtcgatattgttctgaatcagacaattgtagatacgcgcaacgtcaattttgttgagataacgccagagaaggggattgccgcctgtttgacgactgaaagcctggatgcaatgggtgttaatactgatgcgtttccggcttttaaacaactggacaaacaagcgtgtgtgccattggcggagattattccggatgccagcgtaacgtttaatgtgaataaactccgtctggaaatttcagtaccgcaaatcgccatcaaaagtaatgcccgtggttatgtcccccctgaacgttgggatgaagggatcaacgcgctattactgggatattcgtttagcggggctaacagtattcatagcagcgcagacagtgattctggcgacagctattttctgaatttaaacagtggcgttaatttaggcccatggagattgcgcaacaattcaacatggagtcgtagtagtggccaaaccgcagaatggaagaatctcagcagctatttgcaacgggcggttattcctctgaaaggcgaactgaccgtaggtgatgattatactgcaggcgattttttcgatagtgtcagctttcgtggtgtgcagctggcgtcagatgacaacatgctgccagacagcctgaaagggtttgcgcctgtggtgcgtggtatcgccaaaagcaatgcccagataacgattaagcaaaatggttacaccatttaccaaacttatgtatcgcctggtgcttttgaaattagtgatctctattccacgtcgtcgagcggtgatttgttagttgaaatcaaagaagcggacggcagcgtcaatagctacagcgtaccgttctccagtgtgccattactccagcgtcaggggcgaatcaaatacgcggtgacactggcgaaatacagaaccaatagtaatgaacagcaggagagcaaatttgcccaggccacgttgcagtggggcggaccgtggggaacgacctggtatggtggtggacaatatgctgaatattaccgtgccgccatgtttggtctgggatttaacctcggcgatttcggagcaatttcgttcgatgcgacccaggcgaagagtacgctagcagatcaaagcgaacataaaggtcagtcatatcgttttctgtatgccaaaacgctcaaccacttgggcactaactttcaattgatgggctatcgctattcgacgtcgggtttctacaccctttccgacaccatgtataaacatatggatggctacgaatttaatgacggtgatgatgaagatacgccgatgtggtcgcgttattacaatttgttttacaccaaacgtggcaaactgcaggtcaatatctcccagcaattaggcgagtacggttcgttttatttaagtggtagccagcaaacttactggcatacggatcaacaggatcggctattacagtttggctacaacacgcaaattaaagatctttcgctggggatttcctggaactacagtaagtcccgtggtcaacctgatgctgatcaggtgtttgctctaaatttttccctgccgctcaatctgttgctccccagaagtaatgatagctataccaggaaaaaaaattacgcctggatgacctctaacaccagtatcgataacgaagggcacactacacaaaacctgggtttaacggagacattactcgatgacggtaacctgagctacagcgtgcaacagggatataacagcgaggggaaaacggctaatggtagcgccagcatggattacaaaggggcgtttgcggatgcccgagtgggctacaactacagcgataacggcagtcaacaacaactgaactacgctctttcaggcagtttagttgcccattcacagggcattaccctggggcaatcgctgggggaaactaacgttctgattgcagcaccaggcgcagagaatactcgtgtggcgaacagcaccgggctgaaaactgactggcgcggatataccgttgttccttatgccacttcttatcgggaaaatcgaatcgcacttgatgcggcgtcgttaaaacgtaacgtggatcttgaaaatgcagtagtcaacgtggttcccaccaaaggggcgttggttctggcggagttcaatgcccatgcgggtgcaagggtattaatgaaaacatcaaagcagggtataccgctgcgttttggcgcgatagcgacgctggacggcgtacaggctaatagcggcataattgatgatgatggctcgctctatatggcgggtttaccggcgaagggaacaataagcgtgcgctggggcgaagctcccgatcaaatttgtcatatcaattacgagcttaccgaacaacaaattaactctgcgattacgcgaatggatgccatatgcagataa

SEQ ID NO: 7122 - DNA, 1515 bp, Escherichia coli
atgcaacagtctaccccgtatctctcatttcgcggcatcggtaaaacgtttcccggcgttaaggcgctgacggatattagttttgactgctatgccggtcaggttcatgcgttgatgggtgaaaatggcgcaggaaaatcaactctcttaaaaatcctcagcggcaactatgcgccaaccacgggttctgtagtgattaatgggcaggaaatgtccttttccgacacgaccgcagcacttaacgcgggcgtggcgattatttaccaggaactgcatctcgtgccggaaatgaccgtcgcggaaaacatctatctcggccagctgccgcataaaggcggcattgtgaatcgctcattgctgaattatgaggcgggtttacaacttaaacatcttggtatggatattgacccggacacgccgctgaaatatctctccattggtcagtggcagatggttgaaatcgccaaagcgctggcgcgtaacgccaaaattatcgcctttgatgagccaaccagctccctctctgcccgtgaaatcgacaatcttttccgcgttattcgtgaactgcgaaaagaggggcgggtaatcttatacgtttctcaccgtatggaagaaatatttgccctcagcgatgccattactgtctttaaagatggacgttatgtcaaaacctttaccgatatgcagcaggttgaccacgacgcgctggtgcaggcgatggtcgggcgcgacattggcgatatctacggctggcaaccgcgtagttatggcgaggagcgcctacgtcttgatgctgtgaaagcaccaggcgtgcgtacgccaataagtctggcggttcgcagtggtgaaattgttgggctgtttggtctggtaggggcggggcgtagcgaattaatgaaaggcatgtttggcgggacgcaaatcaccgccggtcaggtttatatcgaccaacagccgatcgatattcgtaaaccgagccacgccattgccgcaggcatgatgctctgcccggaagatcgcaaagcggaaggcattattcccgtgcactccgttcgcgacaatatcaacatcagtgccagacgtaaacatgtgctcggcggttgtgtaatcaacaacggttgggaagaaaacaatgccgatcaccacattcgttcgctcaacatcaaaacgccgggcgcggagcaactgatcatgaatctctcaggcggaaatcagcaaaaagccattctgggccgctggttatcggaagagatgaaggtcattttgctggatgaacctacgcgcggcattgatgttggcgctaagcacgaaatatataacgtaatttatgcgctggcggcgcagggcgtggcggtgctgtttgcctccagcgacttacctgaagtcctcggcgttgccgaccggattgtggtgatgcgggaaggtgaaatcgccggtgaattgttacacgagcaggcagatgagcgtcaggcactgagccttgcgatgcctaaagtcagccaggctgttgcctga

SEQ ID NO: 7123 - DNA, 1323 bp, Escherichia coli
atgcaagcctattttgaccagctcgatcgcgttcgttatgaaggctcaaaatcctcaaacccgttagcattccgtcactacaatcccgacgaactggtgttgggtaagcgtatggaagagcacttgcgttttgccgcctgctactggcacaccttctgctggaacggggcggatatgtttggtgtgggggcgtttaatcgtccgtggcagcagcctggtgaggcactggcgttggcgaagcgtaaagcagatgtcgcatttgagtttttccacaagttacatgtgccattttattgcttccacgatgtggatgtttcccctgagggcgcgtcgttaaaagagtacatcaataattttgcgcaaatggttgatgtcctggcaggcaagcaagaagagagcggcgtgaagctgctgtggggaacggccaactgctttacaaaccctcgctacggcgcgggtgcggcgacgaacccagatcctgaagtcttcagctgggcggcaacgcaagttgttacagcgatggaagcaacccataaattgggcggtgaaaactatgtcctgtggggcggtcgtgaaggttacgaaacgctgttaaataccgacttgcgtcaggagcgtgaacaactgggccgctttatgcagatggtggttgagcataaacataaaatcggtttccagggcacgttgcttatcgaaccgaaaccgcaagaaccgaccaaacatcaatatgattacgatgccgcgacggtctatggcttcctgaaacagtttggtctggaaaaagagattaaactgaacattgaagctaaccacgcgacgctggcaggtcactctttccatcatgaaatagccaccgccattgcgcttggcctgttcggttctgtcgacgccaaccgtggcgatgcgcaactgggctgggacaccgaccagttcccgaacagtgtggaagagaatgcgctggtgatgtatgaaattctcaaagcaggcggtttcaccaccggtggtctgaacttcgatgccaaagtacgtcgtcaaagtactgataaatatgatctgttttacggtcatatcggcgcgatggatacgatggcactggcgctgaaaattgcagcgcgcatgattgaagatggcgagctggataaacgcatcgcgcagcgttattccggctggaatagcgaattgggccagcaaatcctgaaaggccaaatgtcactggcagatttagccaaatatgctcaggaacatcatttgtctccggtgcatcagagtggtcgccaggaacaactggaaaatctggtaaaccattatctgttcgacaaataa

SEQ ID NO: 7124 - DNA, 723 bp, Escherichia coli
gtgaattccttctgccatgcaggcagggttggacagaaaacacgcgaaggaattaaaatgcctggaacgggaaaaatgaaacatgtcagtttgactctgcaggttgagaacgacctgaaacatcagcttagtattggcgcattaaaacctggcgcacgcctgattactaaaaatctggcggagcaattaggtatgagtattacacctgtgcgtgaagcattattacgtctggtttcggtgaatgcgctttctgtcgcacctgcacaagcatttacagttccggaagtggggaaacgtcaattagacgaaatcaatcggatccgctacgaactggaattaatggcagttgctctggctgttgaaaacctcaccccgcaagaccttgcggaactccaggaattgctcgagaaattacagcaggcgcaagaaaagggcgacatggaacaaatcattaatgtaaacaggctatttcgcttagcgatttatcatcgctcaaatatgcccatcctgtgtgagatgattgagcaactgtgggtcaggatggggcctggtttacattatctctatgaagcgattaatccagcggaattacgggagcatatagaaaactatcatctgttactcgctgcgttaaaagcaaaagacaaagagggatgcagacattgtcttgctgaaattatgcaacaaaatattgctattttataccagcaatacaatcgttaa

SEQ ID NO: 7125 - DNA, 387 bp, Escherichia coli
gtggcgtccagctcattgattatggggaataacatgcacgtaaaatacttagcagggattgtcggtgccgcgctactgatggcgggttgtagctccagcaacgaattgagtgctgccggtcagagtgtacgcattgtggacgagcagccaggcgcagagtgccagctgattggtactgcgacaggtaagcaaagcaactggctttccgggcaacacggagaagaaggcggttctatgcgcggcgcagcaaacgatctgcgcaaccaggcggctgcaatgggcggtaacgtgatttatggcatcagtagcccgtcgcagggaatgttgtccagttttgtcccgacggatagccagattatcggtcaggtttataagtgcccgaactga

SEQ ID NO: 7126 - DNA, 1287 bp, Escherichia coli
atgaaactctacaatctgaaagatcacaacgagcaggtcagctttgcgcaagccgtaacccaggggttgggcaaaaatcaggggctgttttttccgcacgacctgccggaattcagcctgactgaaattgatgagatgctgaagctggattttgtcacccgcagtgcgaagatcctctcggcgtttattggtgatgaaatcccacaggaaatcctggaagagcgcgtgcgcgcggcgtttgccttcccggctccggtcgccaatgttgaaagcgatgtcggttgtctggaattgttccacgggccaacgctggcatttaaagatttcggcggtcgctttatggcacaaatgctgacccatattgcgggtgataagccagtgaccattctgaccgcgacctccggtgataccggagcggcagtggctcatgctttctacggtttaccgaatgtgaaagtggttatcctctatccacgaggcaaaatcagtccactgcaagaaaaactgttctgtacattgggcggcaatatcgaaactgttgccatcgacggcgatttcgatgcctgtcaggcgctggtgaagcaggcgtttgatgatgaagaactgaaagtggcgctagggttaaactcggctaactcgattaacatcagccgtttgctggcgcagatttgctactactttgaagctgttgcgcagctgccgcaggagacgcgcaaccagctggttgtctcggtgccaagcggaaacttcggcgatttgacggcgggtctgctggcgaagtcactcggtctgccggtgaaacgttttattgctgcgaccaacgtgaacgataccgtgccacgtttcctgcacgacggtcagtggtcacccaaagcgactcaggcgacgttatccaacgcgatggacgtgagtcagccgaacaactggccgcgtgtggaagagttgttccgccgcaaaatctggcaactgaaagagctgggttatgcagccgtggatgatgaaaccacgcaacagacaatgcgtgagttaaaagaactgggctacacttcggagccgcacgctgccgtagcttatcgtgcgctgcgtgatcagttgaatccaggcgaatatggcttgttcctcggcaccgcgcatccggcgaaatttaaagagagcgtggaagcgattctcggtgaaacgttggatctgccaaaagagctggcagaacgtgctgatttacccttgctttcacataatctgcccgccgattttgctgcgttgcgtaaattgatgatgaatcatcagtaa

SEQ ID NO: 7127 - DNA, 297 bp, Escherichia coli
gtgaaaaagatgcaatctatcgtactcgcactttccctggttctggtcgctcccatggcagcacaggctgcggaaattacgttagtcccgtcagtaaaattacagataggcgatcgtgataatcgtggctattactgggatggaggtcactggcgcgaccacggctggtggaaacaacattatgaatggcgaggcaatcgctggcacctacacggaccgccgccaccgccgcgccaccataagaaagctcctcatgatcatcacggcggtcatggtccaggcaaacatcaccgctaa

SEQ ID NO: 7128 - DNA, 1209 bp, Escherichia coli
gtgaaacgattacaggcatttaaattccagttaagacccggtggtcaacaggagtgtgaaatgaggcgcttcgcaggcgcatgtcgtttcgttttcaatcgtgctctggcacgtcagaatgagaatcatgaggccggtaataaatacatcccttacgggaaaatggcttcctggctggttgagtggaaaaatgccactgaaacgcaatggcttaaagattctccctcacagccattgcaacagtcactgaaagaccttgagcgggcttacaaaaacttcttccggaagcgggctgcttttccccgattcaaaaagcggggacagaatgatgcattccgctacccgcagggcgttaagctcgatcaggaaaacagccgtatttttctgccgaaactgggctggatgcgctaccggaacagccgtcaggtcacgggtgttgtgaaaaatgtcactgtcagccagtcctgcggtaagtggtacatcagtattcagacagaaagtgaagtatcaactccggttcacccttcagcatcaatggtcgggctggatgctggcgtggctaaactcgccacgctgtcagatggcacagtctttgagcctgtaaacagttttcagaaaaaccagaagaagctggcgagacttcagcgacagttaagccgcaaggtcaaattcagcaacaactggcaaaagcagaaacgcaaaatacagcgactgcattcctgtatcgcaaatatccgcagggactaccttcacaaagtcacaacggccgtcagcaaaaaccacgcaatgatagtcattgaggatttgaaggtcagcaacatgtcaaagtcagcagcgggtacggtcagccagccggggcgcaatgtccgggcaaaatcaggtttaaaccgttcgatactggatcagggctggtatgaaatgcgccgccagcttgcgtataagcagctctggcgtggcggtcaggtgcttgctgttccgccagcgtatacaagccagcgttgcgcgtactgtggtcatacagcgaaagagaaccgcctgtcacaaagtaaattcagatgccaggtatgtggatatacagcgaacgccgatgtaaatggcgctcgcaacattttagcggcggggcacgccgttcttgcctgtggagagatggtgcagtcaggccgcccgttgaagcaggaacccaccgaaatgattcaggcgacagcctga

SEQ ID NO: 7129 - DNA, 1209 bp, Escherichia coli
gtgaaacgactacaggcatttaaattccagttaagacccggtggtcaacaggagcgtgaaatgaggcgcttcgcaggcgcatgtcgtttcgttttcaatcgtgctctggcgcttcagaatgagaatcatgaggccggtaataaatacatcccttacgggaaaatggcttcctggctggttgagtggaaaaatgccactgaaacgcaatggcttaaagatgccccgtcacagccattgcaacagtcactgaaagaccttgagcgggcttacaaaaacttcttccggaagcgggctgcttttccccgattcaaaaagcggggacagaatgatgcattccgctacccgcagggcgttaagctcgatcaggaaaacagccgtatttttctgccgaaacttggctggatgcgctaccggaatagccgtcaggtcacgggtgttgtgaaaaatgtcactgccagccagtcctgcggtaagtggtacatcagtattcagactgaaaatgaagtatcaactccggttcacccttcagcattaatggtcggactggatgctggcgtggctaaactcgccacgctgtcagatggcacagtctttggacctgtaaacagttttcagaaaaaccagaagacgctggcgagacttcagcgacagttaagccgcaaggtcaaattcagcaacaactggcagaagcagaaacgcaaaatacagcgactgcattcctgtatcgcaaatatctgcagggactaccttcacaaagtcacaacgaccgtcagcaaaaaccacgcaatgatagtcattgaggatttgaaggtcagcaacatgtcaaagtcagcagcgggtacggtcagccagccggggcgcaatgtccgggcaaaatcaggtttaaaccgttcgatactggatcagggctggtatgaaatgcgccgccagcttgagtacaagcagctctggcgtggcggtcaggtgcttgctgttccgccagcgtacacaagccagcgttgcgcgtgctgtggtcatacagcgaaagaaaatcgcctgtcacaaagtaaattcagatgccaggcatgtggatatacagcgaacgctgatgtaaatggcgctcgtaacattttagcggcggggcacgccgttcttgcctgtggggagatggtgcagtcaggccgcccgttgaagcaggaacccaccgaaatgattcaggcgacagcctga

SEQ ID NO: 7130 - DNA, 2871 bp, Escherichia coli
atgatcatccactttactttaaatggcgcgcctcaggagctaaccgttaatccaggcgaaaacgtgcaaaagctgttgtttaacatgggaatgcactctgtacgcaacagtgatgatggtttcgggtttgccggttctgacgcaataatctttaacggtaatatcgttaacgcgtccttgcttattgccgcacagttagagaaggcagatattcgtaccgcagaatctctgggcaaatggaacgagttaagtctggttcaacaggcaatggttgatgttggcgtggtgcagtctggttataacgatccagctgcagctctgattatcaccgatcttctcgatcgcatcgccgcacctacccgcgaagagatcgacgacgcgctttctggtttgttcagccgcgatgctggctggcagcaatactatcaggtcattgaactggcggttgcacgtaaaaataatccgcaggccaccattgatatcgctccgactttccgtgacgacctagaagtcattggtaagcattatcctaaaactgatgccgcgaaaatggtgcaggcgaaaccctgctatgttgaagaccgcgtaacggctgacgcctgcgtcattaaaatgttacgtagcccacacgctcacgcactgattactcatctggatgtcagcaaagctgaagccttaccgggcgtcgttcacgttattactcacctgaattgcccggatatctactataccccgggtggtcagagcgcaccggaaccgtcaccgcttgaccgccgtatgttcggcaagaaaatgcgtcacgtcggcgatcgtgttgctgcggtcgtcgcagaaagtgaagaaattgcgctcgaagcactgaagctcatcgacgttgaatatgaagtgcttaagccggtaatgtcgatcgacgaagcaatggcggaagatgcgcctgtcgtgcacgatgaaccggtggtgtatgttgctggtgcgccagatactctggaagacgataacagccatgcagcccagcgcggcgagcatatgatcatcaacttcccgatcggttctcgccctcgcaaaaatatcgccgccagtattcatggtcatattggcgatatggacaaaggctttgccgatgccgatgtgatcattgagcgaacctataactcaacgcaagcgcagcagtgcccgactgaaacacatatctgctttactcgtatggacggcgatcgtctggttatccacgcctccacccaggtaccatggcacttacgccgccaggtcgcgcgcctcgtgggcatgaaacagcataaagttcatgtcattaaagagcgagttggcggcggttttggttccaaacaggacatcctgctggaagaagtgtgcgcctgggcaacctgcgtgaccgggcgtccggtactgttccgctacacccgtgaagaagagtttattgctaacacctctcgtcacgtcgcgaaagtcaccgtcaaactgggagcgaaaaaagatggtcgcctgacggcagtgaagatggatttccgcgccaacactggcccttacggcaaccactcactcaccgtaccgtgtaacggaccggcgctgtcgctgccgttatatccgtgcgataacgtcgatttccaggtcaccacctactacagcaacatttgcccaaatggtgcttatcagggttatggcgcaccgaaaggtaacttcgctatcaccatggcattagcggaactggctgaacagttacagatcgaccaactggaaattatcgaacgtaaccgggtacacgaagggcaagagctgaaaattctcggtgcaatcggtgaaggtaaagcgccgacctccgttccttccgccgccagctgtgcactggaagagatcctgcgtcagggtcgcgagatgatccaatggtcgtcaccgaaaccgcaaaatggtgactggcacatcggtcgcggcgtcgccattatcatgcagaaatcgggtatcccggatatcgatcaggctaactgcatgatcaaactggaatcggacggcacctttatcgttcattctggcggtgcggatattggtactggtctggatactgtagtgacgaaactggcagcagaagtgctgcactgcccaccgcaggacgtgcatgttatctccggtgataccgatcatgcgttgtttgataaaggcgcatatgcctcgtccggtacttgcttctcgggtaacgcggcgcgtttggcagcggaaaatctacgggagaaaattctgttccacggcgcgcaaatgttgggtgagccagtggcagatgttcaactggcaacgccgggcgtcgtgcgcggcaagaaaggcgaagttagtttcggggatattgcccataaaggcgaaaccggcaccggctttggttcactggtgggaactggcagttatatcacgcctgatttcgccttcccgtatggcgcaaacttcgctgaagttgccgtcaacacgcgtacgggtgaaatccgcctggataaattctacgccttgctggactgcggtacaccggtcaatccagagttagcgttgggacaaatctacggtgccaccctgcgtgctatcggccacagtatgagcgaagagatcatttatgacgccgaaggtcacccgttaacgcgtgatttacgcagttacggcgcaccgaaaattggtgacattccgcgtgatttccgcgctgtgctggtgccgagcgacgataaagtcggcccgttcggggcgaaatcgatctcggaaatcggtgtaaatggcgcagctccggcgattgctaccgcaattcacgatgcatgcggcatctggttacgcgaatggcatttcacaccggagaaaatactcactgcgctggaaaaaatataa

SEQ ID NO: 7131 - DNA, 792 bp, Escherichia coli
atgagcagtaacttcagacatcaactattgagtctgtcgttactggttggtatagcggccccctgggccgcttttgctcaggcaccaatcagtagtgtcggctcaggctcggtcgaagaccgcgtcactcaacttgagcgtatttctaatgctcacagccagcttttaacccaactccagcaacaactttctgataatcaatccgatattgattccctgcgtggtcagattcaggaaaatcagtatcaactgaatcaggtcgtggagcggcaaaagcagatcctgttgcagatcgacagcctcagcagcggtggtgcagcggcgcaatcaaccagcggcgatcaaagcggtgcggcggcatcaacgacgccgacagctgatgctggtactgcgaatgctggcgcgccggtgaaaagcggtaatgcaaacacggattacaatgcagctattgcgctggtgcaggataaatcccgccaggatgacgcaatggtggcatttcagaatttcatcaaaaattaccctgattcaacttacctgccaaacgccaattattggctgggtcagttaaactacaacaagggtaaaaaagatgatgcggcgtactattttgcttcggtagtgaaaaactatccgaagtcaccaaaggctgcagatgcgatgtttaaagtcggcgtcatcatgcaggacaaaggtgacaccgcaaaagcgaaagccgtataccagcaggttatcagtaaataccctggtactgatggcgctaaacaggcacaaaaacgtctgaacgcgatgtaa

SEQ ID NO: 7132 - DNA, 1992 bp, Escherichia coli
atgtcctcacgtaaagagcttgccaatgctattcgtgcgctgagcatggacgcagtacagaaagccaaatccggtcacccgggtgcccctatgggtatggctgacattgccgaagtcctgtggcgtgatttcctgaaacacaacccgcagaatccgtcctgggctgaccgtgaccgcttcgtgctgtccaacggccacggctccatgctgatctacagcctgctgcacctcaccggttacgatctgccgatggaagaactgaaaaacttccgtcagctgcactctaaaactccgggtcacccggaagtgggttacaccgctggtgtggaaaccaccaccggtccgctgggtcagggtattgccaacgcagtcggtatggcgattgcagaaaaaacgctggcggcgcagtttaaccgtccgggccacgacattgtcgaccactacacctacgccttcatgggcgacggctgcatgatggaaggcatctcccacgaagtttgctctctggcgggtacgctgaagctgggtaaactgattgcattctacgatgacaacggtatttctatcgatggtcacgttgaaggctggttcaccgacgacaccgcaatgcgtttcgaagcttacggctggcacgttattcgcgacatcgacggtcatgacgcggcatctatcaaacgcgcagtagaagaagcgcgcgcagtgactgacaaaccttccctgctgatgtgcaaaaccatcatcggtttcggttccccgaacaaagccggtacccacgactcccacggtgcgccgctgggcgacgctgaaattgccctgacccgcgaacaactgggctggaaatatgcgccgttcgaaatcccgtctgaaatctatgctcagtgggatgcgaaagaagcaggccaggcgaaagaatccgcatggaacgagaaattcgctgcttacgcgaaagcttatccgcaggaagccgctgaatttacccgccgtatgaaaggcgaaatgccgtctgacttcgacgctaaagcgaaagagttcatcgctaaactgcaggctaatccggcgaaaatcgccagccgtaaagcgtctcagaatgctatcgaagcgttcggtccgctgttgccggaattcctcggcggttctgctgacctggcgccgtctaacctgaccctgtggtctggttctaaagcaatcaacgaagatgctgcgggtaactacatccactacggtgttcgcgagttcggtatgaccgcgattgctaacggtatctccctgcacggtggcttcctgccgtacacctccaccttcctgatgttcgtggaatacgcacgtaacgccgtacgtatggctgcgctgatgaaacagcgtcaggtgatggtttacacccacgactccatcggtctgggcgaagacgggccgactcaccagccggttgagcaggtcgcttctctgcgcgtaaccccgaacatgtctacatggcgtccgtgtgaccaggttgaatccgcggtcgcgtggaaatacggtgttgagcgtcaggacggcccgaccgcactgatcctctcccgtcagaacctggcgcagcaggaacgaactgaagagcaactggcaaacatcgcgcgcggtggttatgtgctgaaagactgcgccggtcagccggaactgattttcatcgctaccggttcagaagttgaactggctgttgctgcctacgaaaaactgactgccgaaggcgtgaaagcgcgcgtggtgtccatgtcgtctaccgacgcatttgacaagcaggatgctgcttaccgtgaatccgtactgccgaaagcggttactgcacgcgttgctgtagaagcgggtattgctgactactggtacaagtatgttggcctgaacggtgctatcgtcggtatgaccaccttcggtgaatctgctccggcagagctgctgtttgaagagttcggcttcactgttgataacgttgttgcgaaagcaaaagaactgctgtaa

SEQ ID NO: 7133 - DNA, 1158 bp, Escherichia coli
atgctcaccgttaagcagattgaagcagcaaagccgaaagaaaaaccataccgccttctcgatggtaatggcctgtacctttatgtccctgtgtcagggaaaaaggtatggcagcttcgctacaagattgacggtaaggagaaaatcctgaccgtcggaaaatatccgcttatgactttgcaggaggcaagggataaagcatggactgcgaggaaagacatctcggttggcatcgatcctgtaaaggcgaaaaaggcttcgtctaacaacaattcctttagtgcgatttacaaggaatggtacgagcacaagaagcaagtatggtcagtagggtatgcaactgaacttgccaaaatgtttgacgacgacattttacctatcattggcggccttgaaattcaggatattgagccgatgcaactgctggaagtaatccgcaggtttgaagatcgcggtgcaatggaacgagccaacaaagcacgcagaagatgcggcgaggttttccgttacgctattgtcaccggaagggctaaatataacccggcacctgaccttgctgacgccatgaagggataccgcaagaagaacttcccgtttcttcctgcagaccagatcccggcattcaacaaagcactggcaacattttcaggaagtatcgtatcgctcattgcgaccaaagttttacgctacacagccctaagaacgaaagagcttcgttccatgctatggaagaacgtcgattttgaaaataggattatcaccatcgacgccagtgtgatgaaaggacgcaaaattcatgtggttcctatgtcagaccaggtagttgaacttctcactacgctaagctccatcaccaaaccagtctcagagtttgtttttgccgggcgcaacgataagaagaagccaatctgcgagaacgcggtactgcttgtgatcaaacaaatcggctatgagggtctggaaagcggtcacggattcaggcatgaattcagcacgattatgaacgagcacgaatggcctgctgacgctattgaagtgcaactggcacatgcaaacggcggatctgtgcgtgggatttacaaccatgctcagtatctcgataaacgcagagaaatgatgcaatggtgggcggactggcttgatgagaaggtggagtga

SEQ ID NO: 7134 - DNA, 1572 bp, Escherichia coli
atgatgttagatatagtcgaactgtcgcgcttacagtttgccttgaccgcgatgtaccacttcctttttgtgccactgacgctcggtatggcgttcctgctggccattatggaaacggtctacgtcctctccggcaaacagatttataaagatatgaccaagttctggggcaagttgtttggtatcaacttcgctctgggtgtggctaccggtctgaccatggagttccagttcgggactaactggtcttactattcccactatgtaggggatatcttcggtgcgccgctggcaatcgaaggtctgatggccttcttcctcgaatccacctttgtaggtctgttcttcttcggttgggatcgtctgggtaaagttcagcatatgtgtgtcacctggctggtggcgctcggttcaaacctgtccgcactgtggattctggttgcgaacggctggatgcaaaacccaatcgcgtccgatttcaactttgaaactatgcgtatggagatggtgagcttctccgagctggtgcttaacccggttgctcaggtgaaattcgttcacactgtagcgtctggttatgtgactggcgcgatgttcatcctcggtatcagcgcatggtatatgctgaaaggtcgtgacttcgccttcgctaaacgctcctttgctatcgctgccagcttcggtatggctgctgttctgtctgttattgttctgggtgatgaatccggctacgaaatgggcgacgtgcagaaaaccaaactggctgctattgaagccgagtgggaaacgcaacctgcgcctgctgcctttactctgttcggcattcctgatcaggaagaggagacgaacaaatttgcgattcagatcccttacgcactgggcatcattgcaacgcgttccgtggataccccggttatcggcctgaaagagctgatggtgcagcatgaagaacgcattcgtaacgggatgaaggcgtactctctgctcgaacaactgcgttctggttctaccgaccaggcggttcgtgaccagttcaatagcatgaagaaagacctcggttacggtctgctgctgaaacgctatacgccaaacgtggctgatgcgactgaagcgcagattcaacaggcaaccaaagactccatcccgcgtgtagcgccgctgtactttgcgttccgtatcatggtggcgtgtggcttcctgcttctggcaatcatcgcgctctctttctggagtgtcatccgcaaccgcattggcgagaaaaaatggcttctgcgcgccgcgctgtacggtattccgctgccgtggattgctgtagaagcgggctggttcgtggctgaatatggccgccaaccgtgggctatcggtgaagtgctgccgacagctgtggcgaactcgtcactgaccgcaggcgatctcatcttctcaatggtgctgatttgcggcctgtataccctgttcctggtggcagaattgttcttaatgttcaagtttgcacgcctcggcccaagcagcctgaaaaccggtcgctatcactttgagcagtcttccacgactactcagccggcacgctaa

SEQ ID NO: 7135 - DNA, 1062 bp, Escherichia coli
atggctatcgacgaaaacaaacagaaagcgttggcggcagcactgggccagattgagaaacaatttggtaaaggctccatcatgcgcctgggtgaagaccgttccatggatgtggaaaccatctctaccggttcgctttcactggatatcgcgcttggggcaggtggtctgccgatgggccgtatcgtcgaaatctacggaccggaatcttccggtaaaaccacgctgacgctgcaggtgatcgccgcagcgcagcgtgaaggtaaaacctgtgcgtttatcgatgctgaacacgcgctggacccaatctacgcacgtaaactgggcgtcgatatcgacaacctgctgtgctcccagccggacaccggcgagcaggcactggaaatctgtgacgccctggcgcgttctggcgcagtagacgttatcgtcgttgactccgtggcggcactgacgccgaaagcggaaatcgaaggcgaaatcggcgactctcacatgggccttgcggcacgtatgatgagccaggcgatgcgtaagctggcgggtaacctgaagcagtccaacacgctgctgatcttcatcaaccagatccgtatgaaaattggtgtgatgttcggtaacccggaaaccactaccggtggtaacgcgctgaaattctacgcctctgttcgtctcgacatccgtcgtatcggcgcggtgaaagagggcgaaaacgtggtgggtagcgaaacccgcgtgaaagtggtgaagaacaaaatcgctgcgccgtttaaacaggctgaattccagatcctctacggcgaaggtatcaacttctacggcgaactggttgacctgggcgtaaaagagaagctgatcgagaaagcaggcgcgtggtacagctacaaaggtgagaagatcggtcagggtaaagcgaatgcgactgcctggctgaaagataacccggaaaccgcgaaagagatcgagaagaaagtacgtgagttgctgctgagcaacccgaactcaacgccggatttctctgtagatgatagcgaaggcgtagcagaaactaacgaagatttttaa

SEQ ID NO: 7136 - DNA, 237 bp, Escherichia coli
gtgaagtttatgctcaatgcaacaggattgcccttacaagatctggtgttcggtgcgtccgtctactttcctccgtttttcaaagcattcgcgtttggattcgtcatctggcttgtcgtacaccgcctgcttcgtggctggatctacgccggtgacatctggcatcccttgttaatggatttatcgctgtttgcgatttgcgtttgccttgctctggcaatactgattgcgtggtaa

SEQ ID NO: 7137 - DNA, 900 bp, Escherichia coli
ttgcgtttgccttgctctggcaatactgattgcgtggtaactatgtcaattaaaacaattaagtatttctcaacaatcattgtagcggtagttgcggttcttgccggatggtggctgtggaattattacatgcaatctccgtggacacgcgacgggaaaatacgcgcagaacaggtttctatcaccccacaggtgtcgggacgtattgttgagctgaatataaaagacaaccagctggttaacgcgggggatcttctgctcacgatcgataaaacgccctttcagatcgccgagctgaacgcacaggctcagctggcgaaagcgcaatctgacctcgcaaaagccaataacgaagcgaatcgtcgtcgtcatctctcacaaaattttatttctgccgaagaactcgataccgctaacctcaatgttaaagcgatgcaggccagtgttgatgccgcacaggcgacgctgaaacaggcacaatggcaactggcgcaaacggaaattcgcgccccggtgagtggatgggtgactaaccttactacccgcatcggcgattacgctgataccgggaaaccgctgtttgcccttgtcgacagccactcgttttacgtcattggttattttgaagaaaccaagttgcgccatatccgcgaaggtgcaccagcacaaattaccctctatagtgataacaaaacgttacagggtcacgtttccagtatcggtcgggcgatttatgatcagagcgttgaaagtgactcaagccttattccggatgttaaacctaacgtcccctgggttcgactcgcccaacgcgttcccgtccgctttgcgctggataaagtcccaggcgatgtcacgttggtgtcgggcaccacctgtagcattgccgtaggtcaataa

SEQ ID NO: 7138 - DNA, 1644 bp, Escherichia coli
gtgaacttggatttctggatgacagtattcaacaaatttgctagaacttttaaatctcattggttgttgtatctttgtgttattgtttttggtattacgaacttagtcgcttcttccggagcgcatatggttcagcgcttgctgttcttcgttctgaccatcctggttgtaaaacgtatatcatcccttccgcttcgcctgcttgttgccgcaccatttgtgttactgactgcggcagacatgagtattagcctctattcatggtgtacctttggtacaactttcaatgatggatttgcgattagtgtgctccagagtgatccggatgaagttgtcaaaatgctggggatgtatatcccttatctatgtgcctttgcttttttatcccttctttttttggcagtaataataaaatatgatgtttccttgccgacaaaaaaagtgacaggaatattattgctgattgtcatttcgggcagtttattttccgcttgtcaatttgcttataaagatgcaaaaaataaaaaagcgttcagtccatatatactagcgtcgcgatttgctacctatacgccgtttttcaatctcaactattttgctttagcagcgaaagagcatcaaagattactctcaattgcaaacacggtgccgtattttcaattatcagtcagggatacaggtattgatacctacgtgttgattgtgggggagtctgtacgtgtcgacaatatgtctttgtatggatatacacgctctacgacaccgcaagttgaagcacaaagaaaacagatcaaactgtttaatcaagcaataagcggcgcaccttacactgcgctgtcggttcccctttctttaactgctgattctgttttgagtcatgacattcataattaccccgacaacattattaatatggctaatcaagcaggatttcagactttctggctaagctcgcaatccgcttttcggcagaatggtacagcagttaccagtatcgccatgcgcgccatggaaacagtttatgtcagaggatttgatgaattgttgttgccgcatttatcgcaagcattacagcaaaatacgcagcaaaagaaactgattgttcttcatttaaatggaagccatgaaccggcttgtagcgcctatccgcaatccagcgccgtgtttcaaccgcaggacgatcaggatgcctgctatgacaactccattcattacacagatagtttgctaggtcaggtttttgaattattaaaagatcgccgcgcctcggtcatgtattttgccgaccacggcctggaacgtgaccctacgaagaagaacgtctattttcatggaggcagggaggctagccagcaggcatatcatgtcccgatgtttatctggtatagccccgttcttggggatggcgtggatcgcacaacggaaaacaacatcttttcgacagcttacaataattaccttattaatgcgtggatgggggtaacaaagccggaacagccgcaaacgcttgaggaagtgattgcacactataaaggagactcacgggttgtggatgcaaaccatgatgttttcgattatgtgatgctcagaaaggagtttacagaggataagcaaggtaaccccacccctgaagggcagggttga

SEQ ID NO: 7139 - DNA, 1611 bp, Escherichia coli
atgagcattccattcacccgctggccggaagagtttgcccgtcgctatcgggaaaaaggctactggcaggatttgccgctgaccgacattctgacgcgacatgctgcgagtgacagcatcgcggttatcgacggcgagcgacagttgagttatcgggagctgaatcaggcggcggataacctcgcgtgtagtttacgccgtcagggcattaaacctggtgaaaccgcgctggtacaactgggtaacgtcgctgaattgtatattacctttttcgcgctgctgaaactgggcgttgcgccggtgctggcgttgttcagccatcagcgtagtgaactgaacgcctatgccagccagattgaacccgcattgctgattgccgatcgccaacatgcgctgtttagcggggatgatttcctcaatactttcgtcacagaacattcctccattcgcgtggtgcaactgctcaacgacagcggtgagcataacttgcaggatgcgattaaccatccggctgaggattttactgccacgccatcacctgctgatgaagtggcctatttccagctttccggtggcaccaccggcacaccgaaactgatcccgcgcactcataacgactactactacagcgtgcgtcgtagcgtcgagatttgtcagttcacacaacagacacgctacctgtgcgcgatcccggcggctcataactacgccatgagttcgccaggatcgctgggcgtctttcttgccggaggaacggttgttctggcggccgatcccagcgccacgctctgtttcccattgattgaaaaacatcaggttaacgttaccgcgctggtgccacccgcagtcagcctgtggttgcaggcgctgatcgaaggcgaaagccgggcgcagcttgcctcgctgaaactgttacaggtcggcggcgcacgtctttctgccacccttgcggcgcgtattcccgctgagattggctgtcagttgcagcaggtgtttggcatggcggaagggctggtgaactacacccgacttgatgatagcgcggagaaaattatccatacccagggttacccaatgtgtccggatgacgaagtatgggttgccgatgccgaaggaaatccactgccgcaaggggaagtcggacgcctgatgacgcgcgggccgtacaccttccgcggctattacaaaagtccacagcacaatgccagcgcctttgatgccaacggtttttactgttccggcgatctgatctctattgatccagagggttacatcaccgtgcaggggcgcgagaaagatcagattaaccgtggcggcgagaagatcgctgccgaagagatcgaaaacctgctgctgcgccacccggcggtgatctacgccgcactggtgagcatggaagatgagctgatgggcgaaaaaagctgcgcttatctggtggtaaaagagccgctgcgcgcggtgcaggtgcgtcgtttcctgcgtgaacagggtattgccgaatttaaattaccggatcgcgtggagtgtgtggattcacttccgctgacggcggtcgggaaagtcgataaaaaacaattacgtcagtggctggcgtcacgcgcatcagcctga

SEQ ID NO: 7140 - DNA, 810 bp, Escherichia coli
atgcctgaattacccgaagttgaaaccagccgccgcggcatagaaccgcatctcgttggtgcaaccattcttcatgcagtggtgcgcaacggacgcttgcgctggccggtttcagaagagatctaccgtttaagcgaccaaccagtgcttagcgtgcagcggcgggctaaatatctgctgctggagctgcctgagggctggattatcattcatttagggatgtctggcagcctgcgcatccttccagaagaacttccccctgaaaagcatgaccatgtggatttggtgatgagcaacggcaaagtgctgcgctacaccgatccgcgccgctttggtgcctggctgtggaccaaagagctggaagggcataatgtgctgacccatcttggaccggagccgcttagcgacgatttcaatggtgagtatctgcatcagaagtgcgcgaagaaaaaaacggcgattaaaccgtggctgatggataacaagctggtggtaggggtagggaatatctatgccagcgaatcactgtttgcggcggggatccatccggatcggctggcgtcatcactgtcgctggcagagtgtgaattgttagctcgggtgattaaagcggtgttgctgcgttcgattgagcagggtggtacaacgctgaaagattttctgcaaagtgatggtaaaccgggctatttcgctcaggaattgcaggtttacgggcgaaaaggtgagccgtgtcgggtgtgcggtacgccgattgtggcgactaaacatgcgcagcgggcaacgttttattgtcggcagtgccagaagtaa

SEQ ID NO: 7141 - DNA, 1191 bp, Escherichia coli
atgcatctgcttgtccatccaaatggttctaagtactggcgtttgcagtaccgttatgagggaaagcaaaaaatgctggcacttggggtttatcctgaaatcacactagcggatgccagagtacgtcgtgacgaggcgcgtaagctgcttgcgaatggcgtcgatccgggagacaaaaagaaaaatgataaggttgaacagagtaaagcacgaacctttaaagaagtcgcgattgagtggcatggcaccaataaaaagtggtctgaagatcacgcccatcgtgtgctaaaaagtcttgaagataatctttttgcagcgcttggtgaacgtaatatcgctgagttaaaaactcgagatttattagcacctattaaggccgtagaaatgtctggacgtcttgaagtggccgctcgtcttcagcagcgcactacagccatcatgcgctatgcagtgcaaagtgggttaattgattataacccggcacaagagatggctggggcggttgcttcctgtaatcgacaacatcgtcccgcgcttgaattaaagcgcatccctgagttgcttacaaaaatagatagctatactggtaggccgctaacccgatgggcgatagaactcactttgctgatctttattcggtccagtgagctgcgttttgctcgttggtcagagatcgatttcgaagcgtctatatggactatcccaccggagcgggagcctattcctggagtgaaacattcccatagaggctcaaaaatgcgtacaacgcatctagtgcctctttcaacgcaagctcttgcaattttaaagcagataaaacagttttatggggcccatgacttgatatttattggtgatcacgattcgcacaaacccatgagtgagaatacggtaaatagtgcgttacgggtcatggggtatgatacaaaagtagaggtttgtggtcatggctttcgaacaatggcctgtagttcattggtcgaatcaggtctgtggtctcgtgatgctgttgaacgtcagatgagccacatggcgcgaaattcagtgagggccgcgtatatccataaagcagagcatctggaagaacggcgattgatgctacagtggtgggccgattttctggatgtaaacagagaaaggtttatcagtccatttgaatatgcaaagattaataatccattaaaacagtaa

SEQ ID NO: 7142 - DNA, 192 bp, Escherichia coli
atgccaacgaaaccgccttatcctcgtgaagcatatatagtgacgattgaaaaaggaaagccaggacagacggtaacctggtaccaactcagagccgatcatcctaaaccagactcgttgatcagtgaacatccgaccgctcaggaagcgatggatgcgaaaaaacgctatgaggaccctgacaaagagtga

SEQ ID NO: 7143 - DNA, 762 bp, Escherichia coli
atggcacaggttgcgattattaccgcctccgattcggggatcggcaaagagtgcgcgttattactggcgcagcaggggtttgatattggtattacctggcactcagatgaagaaggggcaaaagataccgcgcgtgaggtagttagccacggcgtacgtgcggagatcgtgcagctggatctcggcaatctaccagaaggggcactggcgctggagaaactcattcaacggctggggcgcattgatgtgctggtgaataatgcgggtgcaatgaccaaagcgccgtttcttgatatggcttttgatgagtggcgcaagatttttaccgttgatgtcgatggtgcattcttatgctcgcaaattgcggctcgtcagatggtgaaacaagggcagggcggtcgcatcatcaacattacgtcggtacatgaacatacgccgctgccggatgccagcgcctacacagccgctaaacatgcgctcggtgggttaaccaaagcgatggcgctggagctggtcaggcataagattttggtgaacgcagtcgcgcctggggcgatcgccacgccaatgaatggcatggatgacagcgacgtgaagcccgacgcggagccttcgattcccttgcggcgttttggcgcaacgcatgagattgccagcctggtggtgtggctttgttcggagggcgcaaattacaccaccgggcagtcgttgatagtggatggcggctttatgttggcgaatccacagttcaacccagaatag

SEQ ID NO: 7144 - DNA, 1317 bp, Escherichia coli
atgggaaacacatcaatacaaacgcagagttaccgtgcggtagataaagatgcagggcaaagcagaagttacattattccattcgcgctgctgtgctcactgttttttctttgggcggtagccaataaccttaacgacattttattacctcaattccagcaggcttttacgctgacaaatttccaggctggcctgatccaatcggccttttactttggttatttcattatcccaatccctgctgggatattgatgaaaaaactcagttataaagcagggattattaccgggttatttttatatgccttgggtgctgcattattctggcccgccgcagaaataatgaactacaccttgtttttagttggcctatttattattgcagccggattaggttgtctggaaactgccgcaaacccttttgttacggtattagggccggaaagtagtggtcacttccgcttaaatcttgcgcaaacatttaactcgtttggcgcaattatcgcggttgtctttgggcaaagtcttattttgtctaacgtgccacatcaatcgcaagacgttctcgataaaatgtctccagagcaattgagtgcgtataaacacagcctggtattatcggtacagacaccttatatgatcatcgtggctatcgtgttactggtcgccctgctgatcatgctgacgaaattcccggcattgcagagtgataatcacagtgacgccaaacaaggatcgttctccgcatcgctttctcgcctggcgcgtattcgccactggcgctgggcggtattagcgcaattctgctatgtcggcgcacaaacggcctgctggagctatttgattcgctacgctgtagaagaaattccaggtatgactgcaggctttgccgctaactatttaaccggaaccatggtgtgcttctttattggtcgtttcaccggtacctggctcatcagtcgcttcgcaccacacaaagtcctggccgcctacgcattaatcgctatggcactgtgcctgatctcagccttcgctggcggtcatgtgggcttaatagccctgactttatgcagcgcctttatgtcgattcagtacccaacaatcttctcgctgggcattaagaatctcggccaggacaccaaatatggttcgtccttcatcgttatgaccattattggcggcggtattgtcactccggtcatgggttttgtcagtgacgcggcgggcaacatccccactgctgaactgatccccgcactctgcttcgcggtcatctttatctttgcccgtttccgttctcaaacggcaactaactga

SEQ ID NO: 7145 - DNA, 51 bp, Escherichia coli
atgacacgcgttcaatttaaacaccaccatcatcaccatcatcctgactag

SEQ ID NO: 7146 - DNA, 900 bp, Escherichia coli
atgacagacaacactcgtttacgcatagctatgcagaaatccggccgtttaagtgatgactcacgcgaattgctggcgcgctgtggcattaaaattaatcttcacacccagcgcctgatcgcgatggcagaaaacatgccgattgatattctgcgcgtgcgtgacgacgacattcccggtctggtaatggatggcgtggtagaccttgggattatcggcgaaaacgtgctggaagaagagctgcttaaccgccgcgcccagggtgaagatccacgctactttaccctgcgtcgtctggatttcggcggctgtcgtctttcgctggcaacgccggttgatgaagcctgggacggtccgctctccttaaacggtaaacgtatcgccacctcttatcctcacctgctcaagcgttatctcgaccagaaaggcatctcttttaaatcctgcttactgaacggttctgttgaagtcgccccgcgtgccggactggcggatgcgatttgcgatctggtttccaccggtgccacgctggaagctaacggcctgcgcgaagtcgaagttatctatcgctcgaaagcctgcctgattcaacgcgatggcgaaatggaagaatccaaacagcaactgatcgacaaactgctgacccgtattcagggtgtgatccaggcgcgcgaatcaaaatacatcatgatgcacgcaccgaccgaacgtctggatgaagtcatcgccctgctgccaggtgccgaacgcccaactattctgccgctggcgggtgaccaacagcgcgtagcgatgcacatggtcagcagcgaaaccctgttctgggaaaccatggaaaaactgaaagcgctgggtgccagttcaattctggtcctgccgattgagaagatgatggagtga

SEQ ID NO: 7147 - DNA, 1458 bp, Escherichia coli
atgaatacatctcatgtaagagttgttactcatatgtgtgggttcctggtttggctctatagtctttcaatgttgccaccaatggttgtagcattgttttataaagaaaaaagcctgtttgttttctttataactttcgttatatttttttgcattggtggcggagcgtggtatacaactaagaaatctggcattcaattacgtacccgtgatgggtttattataattgtaatgttttggattttgttttctgttattagtgcattccctttatggattgactcagaacttaatttaacgttcattgatgctctgtttgaaggggtttctggaataacaacaacaggagcaactgtaattgatgatgttagttcattacctcgggcatatttgtactatcggtcacagttaaattttataggtggtttaggagttattgttctggcggttgctgtattgccattattgggtattggtggtgcaaagctttatcagtcagaaatgccggggccatttaaggatgacaaactcactccccgcctggccgatacgtcacggacactgtggataacttattctttattaggtattgcttgtattgtctgttatagacttgcaggaatgcctttgtttgatgctatttgtcacgggatttccacagtttcgcttggtggtttctcaactcatagcgagagtatcggatattttaataactatttggttgagctggtggctggttctttttccctgctatcggctttcaacttcactctttggtatattgttattagcaggaaaacgataaaacctttaatcagagatattgaacttcgtttctttctgttaatagccttaggggtgatcattgttacctctttccaggtctggcatataggtatgtatgacttgcatggaagttttattcattcgttttttcttgccagctccatgctcactgataatggtttagctacgcaggattatgcaagttggcccacgcacacgatagtgtttttgctgttgtcaagtttctttgggggatgtataggttcaacttgtggtggaattaagtcacttcgatttcttatacttttcaaacaaagcaaacacgagataaatcagctttctcatcccagagcgttgttgagtgtaaatgtaggagggaagatagttacagatcgtgtaatgaggtctgtatggagtttcttttttctttatactctcttcacggtgttttttatactggtgttaaatggtatgggatatgattttcttacatcatttgcaacagtggctgcatgtattaataatatgggattaggttttggggctactgcatcgtcattcggagtgcttaatgacattgcaaaatgcttaatgtgcatagctatgattcttggtcgccttgaaatttatcctgttattatattgttttcaggttttttttggcgctcctaa

SEQ ID NO: 7148 - DNA, 1191 bp, Escherichia coli
gtgataatgaaaaggcaaagaaacgtcaatttgttattgatgttggtattactcgtggccgtcggtcagatggcgcaaaccatttatattccagctattgccgatatggcgcgcgatctcaacgtccgtgaaggggcggtgcagagcgtaatgggcgcttatctgctgacttacggtgtctcacagctgttttatggcccgatttccgaccgcgtgggccgccgaccggtgatcctcgtcggaatgtccatttttatgctggcaacgctggtcgcggtcacgacctccagtttgacggtgttgattgccgccagcgcgatgcaggggatgggcaccggcgttggcggcgtaatggcgcgtactttaccgcgagatttatatgaacggacacagttgcgccatgctaacagcctgttaaacatggggattctcgtcagtccgttgctcgcaccgctaatcggcggtctgctggatacgatgtggaactggcgcgcctgttatctctttttgttggttctttgtgctggtgtgaccttcagtatggcccgctggatgccggaaacgcgtccggtcgatgcaccgcgcacgcgcctgcttaccagttataaaacgcttttcggtaacagcggttttaactgttatttgctgatgctgattggcggtctggccgggattgccgcctttgaagcctgctccggcgtgctgatgggcgcggtgttagggctgagcagtatgacggtcagtattttgtttattctgccgattccggcagcgttttttggcgcatggtttgccggacgtcccaataaacgcttctccacgttaatgtggcagtcggttatctgctgcctgctggctggcttgctgatgtggatccccgactggtttggcgtgatgaatgtctggacgctgctcgttcccgccgcgctgttctttttcggtgccgggatgctgtttccgctggcgaccagcggcgcgatggagccgttccccttcctggcgggcacggctggcgcgctggtcggcggtctgcaaaacattggttccggcgtgctggcgtcgctctctgcgatgttgccgcaaaccggtcagggcagcctggggttgttgatgaccttaatgggattgttgatcgtgctgtgctggctgccgctggcgacgcggatgtcgcatcaggggcagcccgtttaa

SEQ ID NO: 7149 - DNA, 1767 bp, Escherichia coli
atgaaattgccagtcagagaatttgatgcagttgtgattggtgccggtggcgcaggtatgcgcgcggcgctgcaaatttcccagagcggccagacctgtgcgctgctctctaaagtcttcccgacccgttcccataccgtttctgcgcaaggcggcattaccgttgcgctgggtaatacccatgaagataactgggaatggcatatgtacgacaccgtgaaagggtcggactatatcggtgaccaggacgcgattgaatatatgtgtaaaaccgggccggaagcgattctggaactcgaacacatgggcctgccgttctcgcgtctcgatgatggtcgtatctatcaacgtccgtttggcggtcagtcgaaaaacttcggcggcgagcaggcggcacgcactgcggcagcagctgaccgtaccggtcacgcactgttgcacacgctttatcagcagaacctgaaaaaccacaccaccattttctccgagtggtatgcgctggatctggtgaaaaaccaggatggcgcggtggtgggttgtaccgcactgtgcatcgaaaccggtgaagtggtttatttcaaagcccgcgctaccgtgctggcgactggcggagcagggcgtatttatcagtccaccaccaacgcccacattaacaccggcgacggtgtcggcatggctatccgtgccggcgtaccggtgcaggatatggaaatgtggcagttccacccgaccggcattgccggtgcgggcgtactggtcaccgaaggttgccgtggtgaaggcggttatctgctgaacaaacatggcgaacgttttatggagcgttatgcgccgaacgccaaagacctggcgggccgtgacgtggttgcgcgttccatcatgatcgaaatccgtgaaggtcgcggctgtgatggtccgtgggggccacacgcgaaactgaaactcgatcacctgggtaaagaagttctcgaatcccgtctgccgggtatcctggagctttcccgtaccttcgctcacgtcgatccggtgaaagagccgattccggttatcccaacctgtcactacatgatgggcggtattccgaccaaagttaccggtcaggcactgactgtgaatgagaaaggcgaagatgtggttgttccgggactgtttgccgttggtgaaatcgcttgtgtatcggtacacggcgctaaccgtctgggcggcaactcgctgctggacctggtggtctttggtcgcgcggcaggtctgcatctgcaagagtctatcgccgagcagggcgcactgcgcgatgccagcgagtctgatgttgaagcgtctctggatcgcctgaaccgctggaacaataatcgtaacggtgaagatccggtggcgatccgtaaagcgctgcaagaatgtatgcagcataacttctcggtcttccgtgaaggtgatgcgatggcgaaagggcttgagcagttgaaagtgatccgcgagcgtctgaaaaatgcccgtctggatgacacttccagcgagttcaacacccagcgcgttgagtgcctggaactggataacctgatggaaacggcgtatgcaacggctgtttctgccaacttccgtaccgaaagccgtggcgcgcatagccgcttcgacttcccggatcgtgatgatgaaaactggctgtgccactccctgtatctgccagagtcggaatccatgacgcgccgaagcgtcaacatggaaccgaaactgcgcccggcattcccgccgaagattcgtacttactaa

SEQ ID NO: 7150 - DNA, 312 bp, Escherichia coli
atgacaaacttcacgaccagcacgccgcatgatgcattatttaaaacctttctcacgcaccctgacactgcgcgggattttatggagattcacttacctaaagatttacgtgaactgtgcgatctcgatagcttaaaactggaatccgccagctttgtcgatgaaaaattgcgggcgctacactccgatattttatggtcggtaaagacccgcgaaggcgatggctatatctatgtggtgattgaacatcagagccgcgaggacattcatatggcctttcgcctgatgcgctattccatggcggtgatgtag

SEQ ID NO: 7151 - DNA, 783 bp, Escherichia coli
atgacaaacttcacgaccagcacgccgcatgacgcattatttaaatcttttctcatgcaccctgacaccgcgcgggattttatggagatccacttacccaaagatttacgtgaactgtgcgatctcgacagcttaaaactggaatccgccagctttgtcgatgaaaaattgcgggcgctacactccgatattctgtggtcggtaaagacccgggaaggcgatggctatatctatgtggtgattgaacatcagagccgtgaggatattcatatggcctttcgcctgatgcgctattccatggcagtgatgcagcgccatatagagcatgataaacgccggccactaccgctggtcatcccgatgctgttttatcacggtagccgtagtccttatccctggtctttgtgctggttggacgaatttgccgacccgactactgcacggaagctttataacgccgcgttcccgctggtggatatcactgtcgtgccggacgacgagattgtgcagcaccgcagagtcgccctgttggagttgatccaaaagcatattcgccagcgcgatctgatggggcttatcgatcaactggtagtattactggttacagagtgtgctaatgacagccagataactgcgctgttaaattacattttactgactggcgatgaagagcgttttaatgagtttatcagtgaactaaccagtcgaatgcctcaacacagagagcgaataatgacgattgcagagcgaattcataatgacgattgcagagcgaattcataa

SEQ ID NO: 7152 - DNA, 1365 bp, Escherichia coli
atgagcgataatgacactatcgtagcccaggccacgcctccgggacgtggcggcgttggcatcctgcgcatctccggcttcaaagcccgtgaagttgccgaaaccgtgctgggtaaactgcctaagccgcgctacgccgattatcttccgtttaaagacgccgacggcagcgtgctcgatcaggggattgcgctatggttccctggcccgaactcgttcaccggcgaagatgtgctggaactgcaaggtcatggcggtccggtgatcctcgacctgctgttaaaacgcattctgaccattcccggcctgcggattgctcgccctggtgagttttccgaacgcgcgtttcttaacgataaacttgacttagcccaggccgaggcgattgccgatcttatcgacgccagttcggaacaggcggcccgttcggcacttaactcgctgcaaggcgcattctccgcacgggttaatcatctggtagaagccctcacccacttgcgcatttacgtcgaagcggcaattgatttccccgatgaagagatcgatttcctctccgacggaaaaattgaagcccagctcaatgacgttattgccgatcttgatgcagtgcgtgctgaagcacgtcagggtagtttgttgcgcgaagggatgaaagtggtgattgccggacgtcctaacgccggtaaatcgagcctgttaaacgcgctggcggggcgtgaagcggcaatcgtaaccgatatcgccggaactacgcgtgacgtgctgcgtgagcatatccacattgacggaatgccgctgcatatcatcgataccgccgggctacgtgaagccagtgacgaagtagaacgtattggtatcgagcgcgcgtggcaggaaattgaacaggccgaccgcgtgctgtttatggtcgatggcaccacaacagacgccgtggatccggcagagatctggccggaatttattgcccgtctgccagcgaaactgccgatcaccgtggtgcgcaataaagccgatatcaccggcgaaacgctgggaatgagtgaagtgaacggtcacgcgttaattcgtctctcggcaaggactggtgaaggcgtggacgtgctgcgtaaccatctcaaacagagcatgggctttgacaccaacatggaaggcggcttcctggcgcgtcgtcgccacctacaggcgctggaacaggcagcggaacatctacaacagggcaaagcgcaactgttgggagcctgggcaggtgaactgctggcggaagagttgcgtctggcacagcagaacttaagcgaaatcaccggggaatttacttcagacgacctgctggggcggattttctccagcttctgtattggtaagtaa

SEQ ID NO: 7153 - DNA, 723 bp, Escherichia coli
gtgattgaatttaaaaacgtctccaagcactttggcccaacccaggtgctgcacaatatcgatttgaacattgcccagggcgaagtcgtggtgattatcgggccgtccggttccggtaaatcgaccctgctgcgctgcatcaacaaactggaagaaatcacctccggcgatctgattgtcgatggcctgaaggttaacgatccgaaagttgacgagcgcctgattcgccaggaagcaggtatggtgttccagcagttttacctcttcccgcatctgacagcgctggaaaacgtcatgtttggcccgctacgcgtgcgtggcgcgaacaaagaagaggcggaaaaactggcacgtgagctgctggcgaaagtcggtctggcagaacgtgcacatcactacccttccgaactttctggtggtcaacagcagcgtgtggcgattgcccgcgcgctggcggtgaagccgaaaatgatgctgtttgatgaaccgacttccgctcttgacccggaactgcgccatgaagtgctgaaggttatgcaggatctggctgaagaagggatgacgatggtgatcgtgacccacgaaatcggttttgccgagaaagtagcttcgcggctgatctttatcgacaaaggccggattgcggaagatggcaatccgcaggtgttgatcaagaacccgccgagccagcgcttgcaggaatttttgcagcacgtctcttaa

SEQ ID NO: 7154 - DNA, 660 bp, Escherichia coli
atgcagtttgactggagtgccatctggcctgccattccgcttctgattgaaggtgccaaaatgaccctgtggatttcggtcctcggtctggcaggcggtctggtaatcggattgctggcaggttttgcacgcaccttcggaggttggatagccaaccacgtcgcgctggtctttattgaagtgatccgcggcacacctatcgtcgtccaggtgatgtttatttatttcgccctgccgatggcgtttaacgacttacgcatcgacccatttactgcggcggtggtcaccatcatgatcaactccggcgcgtatattgcggaaatcacgcgtggtgcggtgctgtctatccacaaaggttttcgtgaagcaggactggcgctcggtctttcacgttgggaaaccattcgctacgtcattttaccgctggcactgcgtcgtatgctgccgccgctgggtaaccagtggatcatcagcattaaagacacctcgctgtttattgtgatcggcgtggcggaactgacccgtcaggggcaagaaattattgccggtaacttccgcgcccttgagatctggagcgccgtggcggtgttctatctgattattaccctggtgctgagctttattctgcgtcgtctggaaagaaggatgaaaatcctgtga

SEQ ID NO: 7155 - DNA, 1011 bp, Escherichia coli
atgagacgagaacttgccatcgaattttcccgcgtcaccgaatcagcggcgctggctggctacaaatggttaggacgcggcgataaaaacaccgcggacggcgcggcggtaaacgccatgcgtattatgctcaaccaggtcaacattgacggcaccatcgtcattggtgaaggtgaaatcgacgaagcaccgatgctctacattggtgaaaaagtcggtactggtcgcggcgacgcggtagatattgctgttgatccgattgaaggcacgcgcatgacggcgatgggccaggctaacgcgctggcggtgctggcagtaggcgataaaggctgcttcctcaatgcgccggatatgtatatggagaagctgattgtcgggccgggagccaaaggcaccattgatctgaacctgccgctggcggataacctgcgcaatgtagcggcggcgctcggcaaaccgttgagcgaactgacggtaacgattctggctaaaccacgccacgatgccgttatcgctgaaatgcagcaactcggcgtacgcgtatttgctattccggacggcgacgttgcggcctcaattctcacctgtatgccagacagcgaagttgacgtgctgtacggtattggtggcgcgccggaaggcgtagtttctgcggcggtgatccgcgcattagatggcgacatgaacggtcgtctgctggcgcgtcatgacgtcaaaggcgacaacgaagagaatcgtcgcattggcgagcaggagctggcacgctgcaaagcgatgggcatcgaagccggtaaagtattgcgcctgggcgatatggcgcgcagcgataacgtcatcttctctgccaccggtattaccaaaggcgatctgctggaaggcattagccgcaaaggcaatatcgcgactaccgaaacgctgctgatccgcggcaagtcacgcaccattcgccgcattcagtccatccactatctggatcgcaaagacccggaaatgcaggtgcacatcctctga

SEQ ID NO: 7156 - DNA, 2145 bp, Escherichia coli
atgtctaacgtgcaggagtggcaacagcttgccaacaaggaattgagccgtcgggagaaaactgtcgactcgctggttcatcaaaccgcggaagggatcgccatcaagccgctgtataccgaagccgatctcgataatctggaggtgacaggtacccttcctggtttgccgccctacgttcgtggcccgcgtgccactatgtataccgcccaaccgtggaccatccgtcagtatgctggtttttcaacagcaaaagagtccaacgctttttatcgccgtaacctggccgccgggcaaaaaggtctttccgttgcgtttgaccttgccacccaccgtggctacgactccgataacccgcgcgtggcgggcgacgtcggcaaagcgggcgtcgctatcgacaccgtggaagatatgaaagtcctgttcgaccagatcccgctggataaaatgtcggtttcgatgaccatgaatggcgcagtgctaccagtactggcgttttatatcgtcgccgcagaagagcaaggtgttacacctgataaactgaccggcaccattcaaaacgatattctcaaagagtacctctgccgcaacacctatatttacccaccaaaaccgtcaatgcgcattatcgccgacatcatcgcctggtgttccggcaacatgccgcgatttaataccatcagtatcagcggttaccacatgggtgaagcgggtgccaactgcgtgcagcaggtagcatttacgctcgctgatgggattgagtacatcaaagcagcaatctctgccggactgaaaattgatgacttcgctcctcgcctgtcgttcttcttcggcatcggcatggatctgtttatgaacgtcgccatgttgcgtgcggcacgttatttatggagcgaagcggtcagtggatttggcgcacaggacccgaaatcactggcgctgcgtacccactgccagacctcaggctggagcctgactgaacaggatccgtataacaacgttatccgcaccaccattgaagcgctggctgcgacgctgggcggtactcagtcactgcataccaacgcctttgacgaagcgcttggtttgcctaccgatttctcagcacgcattgcccgcaacacccagatcatcatccaggaagaatcagaactctgccgcaccgtcgatccactggccggatcctattacattgagtcgctgaccgatcaaatcgtcaaacaagccagagctattatccaacagatcgacgaagccggtggcatggcgaaagcgatcgaagcaggtctgccaaaacgaatgatcgaagaggcctcagcgcgcgaacagtcgctgatcgaccagggcaagcgtgtcatcgttggtgtcaacaagtacaaactggatcacgaagacgaaaccgatgtacttgagatcgacaacgtgatggtgcgtaacgagcaaattgcttcgctggaacgcattcgcgccacccgtgatgatgccgccgtaaccgccgcgttgaacgccctgactcacgccgcacagcataacgaaaacctgctggctgccgctgttaatgccgctcgcgttcgcgccaccctgggtgaaatttccgatgcgctggaagtcgctttcgaccgttatctggtgccaagccagtgtgttaccggcgtgattgcgcaaagctatcatcagtctgagaaatcggcctccgagttcgatgccattgttgcgcaaacggagcagttccttgccgacaatggtcgtcgcccgcgcattctgatcgctaagatgggccaggatggacacgatcgcggcgcgaaagtgatcgccagcgcctattccgatctcggtttcgacgtagatttaagcccgatgttctctacacctgaagagatcgcccgcctggccgtagaaaacgacgttcacgtagtgggcgcatcctcactggctgccggtcataaaacgctgatcccggaactggtcgaagcgctgaaaaaatggggacgcgaagatatctgcgtggtcgcgggtggcgtcattccgccgcaggattacgccttcctgcaagagcgcggcgtggcggcgatttatggtccaggtacacctatgctcgacagtgtgcgcgacgtactgaatctgataagccagcatcatgattaa

SEQ ID NO: 7157 - DNA, 1356 bp, Escherichia coli
atgttttcagaagtcatgcgttatattctcgacctcggccctacggtgatgctgccgattgtcatcattattttttctaaaatattaggcatgaaggcaggcgattgctttaaagcgggtctgcatatcgggattggctttgttggcattggccttgtgattggcttaatgctggattccattggcccggcggcgaaagcgatggcggaaaatttcgacctgaatctgcatgtggtcgatgttggctggccgggctcttcaccaatgacctgggcgtcgcaaattgcgctggtggcgattccgattgcgattctggttaacgtggcgatgttactgacccgtatgacgcgggtggtaaatgttgatatctggaatatctggcatatgaccttcaccggcgcgttgctgcatctggcaaccggttcatggatgatagggatggcaggtgtggtaattcacgcggcgtttgtttataagctcggcgactggtttgcccgcgatacccgaaatttctttgagctggaaggtattgctattccgcacggtacgtcggcgtatatggggccgattgcggtgctggtcgatgctatcatcgagaaaatcccaggcgttaaccgaattaaatttagcgccgacgatattcagcgcaaatttggtccatttggcgagcctgtcaccgtgggttttgtgatggggctgattatcggcatcctcgcgggttacgatgtcaaaggtgtattgcagctggcggtaaaaacggcggcagtgatgctgctaatgccacgggtgattaaacccatcatggatggtttaacgcccatcgctaagcaggctcgtagtcgtttacaggcgaagttcggcggtcaggagttcctgattggccttgatccggcgttgctgctgggacatacggcggtggtatcggcaagcctgatttttatcccactcaccattttaattgctgtttgtgtgccgggtaatcaggtgctgccgtttggcgatcttgccaccatcggcttcttcgtggcgatggcggtcgccgtgcatcgtggaaatctgttccgcaccttaatctcgggtgtcatcattatgagcatcaccctgtggatcgcgacgcaaactattggtttgcacacccaactggcggctaatgctggggcgttaaaagccgggggtatggtggcttcaatggatcagggcggttctcccattacctggttactgattcaggttttctccccgcaaaatattcccggtttcattattatcggtgcaatttatctgaccggtattttcatgacctggcgtagagcgcgtggctttattaaacaagagaaagtcgttctcgcagaataa

SEQ ID NO: 7158 - DNA, 2715 bp, Escherichia coli
atgggctttgccctgatggcgctgttaaccctgaccagtaccctggtgggatggtacaacctgcgctttatcagccaggtggaaaaagacaacactcaggcattgattcctaccatgaatatggcgcgccagttgagcgaagccagcgcctgggaacttttcgccgcgcagaacctgaccagtgccgataacgaaaagatgtggcaggcgcaggggcgaatgctcaccgcacaaagcctgaagattaatgcgttgctgcaagcgttacgggaacaaggttttgataccaccgctattgaacaacaggagcaggagatctcccgttcgttacgtcagcaaggggaactggtggggcagcgtttgcaactgcgccagcaacaacagcaactcagtcagcagatagtcgctgccgccgatgagatcgcacgcctggcgcaaggtcaggcgaataatgcgacaacttccgctggagcgacccaggccgggatttacgatttgatcgaacaagatcagcgtcaggctgctgaaagtgcactcgatcggctgattgatatcgatcttgagtatgttaaccagatgaatgaactgcgccttagcgctctgcgggtgcagcaaatggtgatgaatctggggctggagcagatccagaaaaatgcaccaacgctggaaaagcagctcaataatgcggtgaaaattctgcaacgtcggcaaatacgcattgaagatccgggtgttcgtgcgcaggtcgcaacaacgttaactaccgttagccaatatagcgatttgctggcgctgtatcagcaggacagtgaaatcagcaatcacctacaaactctcgcacaaaataacatcgcccagttcgcgcagtttagtagcgaagtcagtcagctggtcgacaccattgagctgcgtaatcagcacggactggcgcatctggaaaaagcgagtgcacgcgggcaatacagcctgttattgctggggatggtttcactttgcgcactgattctgatcctctggcgcgtggtttatcgctcagtcacgcgtccacttgccgaacaaacgcaggcgctgcaacggctgctggacggtgatattgactcccctttcccggaaaccgctggcgtacgggagctggataccatcgggcggctgatggatgcgtttcgcagcaatgttcatgcactgaatcgccaccgcgaacagctggcggcgcaggtcaaagcgcgtacagctgaattgcaggaactggtgatagaacaccgacaggcacgggcggaagcagaaaaagccagccaggcaaaatcggcgtttctggcggcgatgagccatgagatccgcacaccgctgtacggtattctcggcactgctcaactgctggcagataaccccgcacttaacgcccagcgtgatgatttgcgggcaattactgactctggtgaatcgttgctgaccatcctcaacgatattctcgattattccgctatcgaagcaggtggcaagaatgtttcggtcagcgatgagccctttgaaccgcgcccgctgctggaaagtaccctgcaattaatgagcggacgggtgaaaggtcgcccgattcgcctggcaacggcaattgccgatgatatgccgtgcgcgttaatgggcgatccacgacgtattcgtcaggttataaccaacctgttgagcaacgccctgcgttttactgacgaagggtacattatcctgcgtagtcgcactgatggcgagcaatggctggtcgaagtggaagacagcggctgcggtattgatcccgcgaaactggcagaaatcttccagccatttgtgcaggtaagcggcaaacgcggcggcaccgggctgggactgactatcagtagccgtctggcccaggcgatgggcggcgaactgagcgccaccagcacgccggaggttggaagctgtttttgtttacgcttgccgttacgtgttgccacggcacccgtgccaaaaacagtcaatcaggcggtgcgtcttgacggtttacgtttgctgttaattgaagataacccgctaacccagcgaattaccattgagatgctgaaaaccagtggtgcgcagattgttgctgttggcaatgccgcgcaggctttagagacactgcaaaatagcgaaccgtttgctgccgcactggtggattttgatctgccggatatcgacggcattacgcttgcccgacaactggcacagcaatatccgtcgctggttttgattggctttagcgcccatgtcattgacgaaacgctgcgccagcgtaccagttcattattccgcgggattatccctaaaccggtgccgcgtgaagtgctcggtcagttactggcgcactatctccaactgcaagtcaataatgatcaatcgctggatgtatcgcaactcaatgaagatgctcagttaatggggacggagaagatccacgaatggctggtattatttacacaacatgccctgccgcttctcgatgaaatcgacattgcccgcgccagtcaggatagcgagaaaataaagcgtgccgcgcatcagctaaaaagcagttgctcgagtctgggaatgcatatcgccagccagctatgcgcacaactggagcagcagccattatctgccccccttccacacgaagaaattacacgcagtgttgccgctctggaagcatggttgcataagaaagacctgaacgcgatttga

SEQ ID NO: 7159 - DNA, 741 bp, Escherichia coli
atgttaattaatcgcaatattgtggcgttatttgcgttgccttttatggcaagcgcaactgcttctgaattatccattggtgctggtgcggcttataatgaatcgccttatcgcggttataatgaaaatacgaaggcaattccgctgattagttatgaaggtgatactttttatgttcgtcagaccacgttaggttttattctgtcgcaaagtgaaaaaaatgaacttagcctgaccgcatcctggatgccgctggaatttgaccctaccgataatgacgattatgccatgcaacagcttgataagcgtgatagtacggctatggcgggggttgcctggtatcaccacgagcgttggggaaccgtgaaagcctctgcagctgcggacgttctggataacagcaacggctgggtgggggagctatcggtattccacaaaatgcagataggtcgtctgtcgctgacacctgcgctgggcgttctctattatgacgagaatttcagtgactattactatggcatttcagagagtgagtcccgtcgtagcggtctggcaagttattccgcgcaggatgcctgggtgccctatgtcagcctgacggcaaaatacccgataggagagcacgtcgtattgatggcgagcgcaggatacagcgagctgccggaagagattaccgacagcccgatgattgatcgtaatgagagttttacctttgtcaccggggtgagctggcgtttttaa

SEQ ID NO: 7160 - DNA, 1374 bp, Escherichia coli
atggcactttggggcgggcgttttacccaggcagcagatcaacggttcaaacaattcaacgactcactgcgctttgattaccgtctggcggagcaggatattgttggctctgtggcctggtccaaagccctggtcacggtaggcgtgttaaccgcagaagagcaggcgcaactggaagaggcgctgaacgtgttgctggaagatgttcgcgccaggccacaacaaatccttgaaagcgacgccgaagatatccatagctgggtggaaggcaaactgatcgacaaagtgggccagttaggcaaaaagctgcataccgggcgtagccgtaatgatcaggtagcgactgacctgaaactgtggtgcaaagataccgttagcgagttactgacggctaaccggcagctgcaatcggcgctggtggaaaccgcacaaaacaatcaggacgcggtaatgccaggttacactcacctgcaacgcgcccagccggtgacgttcgcgcactggtgcctggcctatgttgagatgctggcgcgtgatgaaagccgtttgcaggatgcgcttaagcgtctggatgtcagcccgctaggctgtggcgcgctggcgggaacggcctatgaaatcgaccgtgaacagttagcaggctggctgggctttgcttcggcgacccgtaacagtctcgacagcgtttctgaccgtgaccatgtgttggaactgctttctgctgccgctatcggcatggtgcatctgtcgcgttttgctgaagatctgattttctttaacaccggcgaagcggggtttgtggagctttctgaccgcgtgacttccggttcatcattaatgccgcagaagaaaaacccggatgcgctggagctgattcgcggtaaatgcggccgggtgcagggggcgttaaccggcatgatgatgacgctgaaaggtttgccgctggcttacaacaaagatatgcaggaagacaaagaaggtctgttcgacgcgctcgatacctggctggactgcctgcatatggcggcgctggtgctggacggcattcaggtgaaacgtccacgttgccaggaagcggctcagcagggttacgccaacgccaccgaactggcggattatctggtggcgaaaggcgtaccgttccgcgaggcgcaccatattgttggtgaagcggtggtggaagccattcgtcagggcaaaccgctggaagatctgccgctcagtgagttgcagaaattcagtcaggtgattgacgaagatgtctatccgattctgtcgctgcaatcgtgcctcgacaagcgtgcggcaaaaggcggcgtctcaccgcagcaggtggcgcaggcgattgcttttgcgcaggctcggttagggtaa

SEQ ID NO: 7161 - DNA, 1254 bp, Escherichia coli
gtgagtcactgggctacattcaaacaaacagcaacaaatttatgggtgacccttcggcacgacattctcgcgctggccgtctttttaaatggattgcttatttttaaaacaatctatggtatgtcggtcaatttgcttgatattttccatatcaaagcattttcagagttggatctctccttgctggcaaacgccccactctttatgctcggcgtctttcttgtcctgaactccattggcttactgttccgggcaaagctcgcatgggcaatcagtatcattttgttgttgatagcgctaatttacaccctgcatttttatccctggctgaaatttagtattggattttgcatttttacgctggtgtttttgctgatactgcgcaaagacttctcccacagtagcgccgcagccgggacaatttttgcatttattagtttcacgacattactgttttactcaacctacggtgcgctttatttaagcgaaggttttaatccgcgaatagaaagtttgatgaccgcgttctatttttcgatagaaaccatgtcaaccgtcggctatggcgatattgtccctgtttctgaatcagcacgattgttcactatttcggtcattatttccggcattaccgtttttgccacatctatgacctcaatttttggtccgcttatccgcgggggattcaacaaacttgtaaaaggaaacaatcatacaatgcatcgtaaagatcattttattgtttgcggacattcgattctcgccatcaatacgatcctgcaactgaatcaacgcggacaaaacgtaacggttatcagcaacttgcctgaagatgatatcaagcaacttgagcaacgcttaggcgataatgctgatgttatccccggtgacagtaatgacagttctgtattaaagaaagcgggaatcgatcgttgccgggccattctggcgctgagtgataacgatgcagataacgcgtttgttgtactctcggcaaaagatatgagcagtgatgtcaaaacagttctcgccgtcagtgatagcaaaaacctgaataagattaagatggtacatccggatatcattctctcaccgcaactgtttggcagcgaaattctggcgcgagttttaaatggtgaagagattaataatgatatgctcgtttcaatgttgttgaactcaggtcatggtattttcagcgataacgatgaactagaaacgaaagctgacagtaaagaatcggcgcaaaaatag

SEQ ID NO: 7162 - DNA, 348 bp, Escherichia coli
atggctatcatcccaaaaaactatgcgcggttagaaagcggctatcgcgaaaaagcattaaaaatctatccgtgggtctgcggtcgctgttcccgcgagtttgtttattccaacctgcgtgaacttaccgttcaccacattgatcacgaccataccaataacccggaagatggcagtaactgggaattgttgtgtctctattgccacgatcatgagcattcgaaatataccgaagcggatcagtatggtacgaccgttatcgcaggggaagatgcgcagaaagatgtcggtgaagcgaagtacaacccattcgctgacctgaaagcgatgatgaacaagaagaagtga

SEQ ID NO: 7163 - DNA, 2868 bp, Escherichia coli
atgggcatcaaacaacacaatgggaataccaaagcagatcgtctcgctgaattaaaaatccgttcgccctcaattcaactgataaaatttggcgctattggtttgaatgcaattatcttttcccccctgctgatagctgctgatacaggaagtcaatatggcaccaatattactattaatgatggtgacagaattacaggagataccgccgatccatcaggaaacctctatggtgtaatgaccccagcaggaaacacgcctggcaatatcaacctgggtaatgatgtcaccgtcaatgtcaacgacgcctctggatatgcaaaaggaatcattattcagggcaaaaacagctccctgacagctaaccgactcacagtagatgttgttggtcaaacctctgccatcggcattaacttaattggtgactatacccatgctgacttaggcacaggcagcaccattaagagtaacgatgacggcatcattattgggcatagctcaacactaacagccactcaattcaccattgaaaactcgaacggtataggcctaaccatcaatgactatggcaccagtgtcgatcttggaagcggaagtaaaatcacgaccgatggaagtacaggtgtttatatcggtggtctcaacggcaataacgccaatggtgctgcgcgttttacggctacagacctgacaatcgatgttcagggctacagcgccatggggataaacgtacagaaaaactctgttgtcgatctcggaacaaacagtaccattaaaaccaatggcgataatgctcacggcctctggagctttggccaggttagcgcgaatgcactcactgttgatgtaactggagccgcggccaatggcgtcgaagttcgtggtggtacaaccactatcggtgcagatagccatatttcttccgcgcagggcggtggcctcgtcaccagtggttcagacgcgataatcaattttactggcacggcagcgcaacgaaacagcatcttttccggcggttcttatggtgcctcggcccagacggcaacggctgttgtcaacatgcaaaataccgatattacagttgatcgtaatggcagtctggcgctgggtttgtgggctctcagcggcggtagaataaccggagacagtttggctatcaccggcgcggcaggagccaggggaatttatgccatgaccaacagccagatcgacctcacgagcgatctggtcattgatatgagtacacccgaccagatggccatcgcaacgcaacatgacgatggttatgccgccagccgcatcaacgcctcgggtcgtatgcttatcaacggtagcgttctttccaaaggtgggctaatcaatctggatatgcaccctgggtcggtttggacaggttcctccctcagcgataatgtcaatggcggaaaactggacgttgcaatgaataacagcgtctggaacgtaacaagtaattctaatctcgacacgctggcgctgagccattcaactgtcgattttgccagccacgggtcaactgccggcacatttgccacattaaacgtagagaacctgagcggtaacagtacctttattatgcgtgctgatgttgttggcgagggtaatggcgttaataataaaggggatttattgaatatcagcgggagtagtgctggtaatcacgtattggctatccgcaaccagggcagcgaggccacaacgggaaatgaagttctgacagtggtaaaaaccactgacggcgcggcctcgttcagcgcgtcttctcaggttgagttggggggatatctgtacgatgtgcgtaaaaatggcactaactgggagctttacgcttccgggacagttccggaaccgactcctaatcctgaacccacaccagctcccgctcagcctcccatagtcaaccccgatcctacgcctgaacccgctcccacgcctaaacccaccacgaccgcagatgctggcggcaattatctcaatgtcggttacttattgaactatgttgaaaaccgtacgctgatgcaacggatgggtgacctgcgaaatcagagtaaagacggtaatatctggttgcgcagttatgggggaagcctggactcctttgccagtggcaaactgagcggctttgacatgggttacagcggtatccagtttggtggggataaacgtctctctgatgtaatgccgttgtatgtcggtctgtatattggctcaacacatgcatcgccggactatagcggaggcgacggtaccgcacgttcagactacatgggaatgtacgccagttacatggcacaaaacggtttttacagcgatctcgttataaaagcatcgcgccagaaaaatagtttccacgtactggacagtcagaacaacggcgttaacgccaacggcactgcgaatggaatgagcatctccctggaagccgggcagaggttcaacctgtcccctactggttatgggttctatatagagccgcaaacccagcttacatacagccaccagaatgagatgactatgaaggcgagtaatggcctcaatatacatctgaatcactacgaatcgctgctggggcgtgccagcatgatactggggtatgacatcaccgcaggcaacagccagctgaatgtctatgtgaagactggcgctatccgcgagttttcaggggataccgaatatctgttgaacaactcccgggagaagtacagtttcaaaggtaatggctggaataacggcgtgggagtcagtgcacagtataacaaacagcacacattctatctcgaagcggattacacgcagggtaacctctttgatcagaagcaagtcaacggaggatatcgcttcagcttttaa

SEQ ID NO: 7164 - DNA, 252 bp, Escherichia coli
atggccaatgttgaaatctataccaaagaaacctgcccgtattgccatcgtgcaaaagcactgctgagcagcaagggcgtgagtttccaggagctgccgatcgatggcaacgccgccaagcgtgaagagatgatcaaacgcagcggtcgcaccacggttccccagatttttattgacgcacagcacattggcggctgtgatgacttgtatgcattggatgcacgtggtggactggatcccctgctgaaataa

SEQ ID NO: 7165 - DNA, 432 bp, Escherichia coli
atgcaagaaattatgcaatttgttggccgtcatcccatactgagtatcgcctggatcgcgttactggtggcggttcttgtgactacgtttaagagcctgacctcgaaagtgaaggtgattactcgtggtgaagctacgcgtctgatcaacaaagaagacgctgtggttgtggatttacgtcagcgtgatgacttccgtaaaggccatatcgcaggttctattaatctgttgccgagcgaaatcaaagccaacaatgttggtgagcttgagaagcacaaagacaaaccggttatcgtggtagacggttctggcatgcagtgccaggagcctgcaaacgcactgacgaaagctggttttgcgcaagtattcgtgctgaaagaaggcgtcgctggctgggctggcgaaaacttgcctttggtgcgcggcaaataa

SEQ ID NO: 7166 - DNA, 870 bp, Escherichia coli
atgtccattttaatcgataaaaacaccaaggttatctgccagggctttaccggtagccaggggactttccactcagaacaggccattgcatacggcactaaaatggttggcggcgtaaccccaggtaaaggcggcaccacccacctcggcctgccggtgttcaacaccgtgcgtgaagccgttgctgccactggcgctaccgcttctgttatctacgtaccagcaccgttctgcaaagactccattctggaagccatcgacgcaggcatcaaactgattatcaccatcactgaaggcatcccgacgctggatatgctgaccgtgaaagtgaagctggatgaagcaggcgttcgtatgatcggcccgaactgcccaggcgttatcactccgggtgaatgcaaaatcggtatccagcctggtcacattcacaaaccgggtaaagtgggtatcgtttcccgttccggtacactgacctatgaagcggttaaacagaccacggattacggtttcggtcagtcgacctgtgtcggtatcggcggtgacccgatcccgggctctaactttatcgacattctcgaaatgttcgaaaaagatccgcagaccgaagcgatcgtgatgatcggtgagatcggcggtagcgctgaagaagaagcagctgcgtacatcaaagagcacgttaccaagccagttgtgggttacatcgctggtgtgactgcgccgaaaggcaaacgtatgggccacgcgggtgccatcattgccggtgggaaagggactgcggatgagaaattcgctgctctggaagccgcaggcgtgaaaaccgttcgcagcctggcggatatcggtgaagcactgaaaactgttctgaaataa

SEQ ID NO: 7167 - DNA, 1299 bp, Escherichia coli
atgaaagcgatcttaatcccatttttatctcttctgattccgttaaccccgcaatctgcattcgctcagagtgagccggagctgaagctggaaagtgtggtgattgtcagtcgtcatggtgtgcgtgctccaaccaaggccacgcaactgatgcaggatgtcaccccagacgcatggccaacctggccggtaaaactgggttggctgacaccgcgcggtggtgagctaatcgcctatctcggacattaccaacgccagcgtctggtagccgacggattgctggcgaaaaagggctgcccgcagtctggtcaggtcgcgattattgctgatgtcgacgagcgtacccgtaaaacaggcgaagccttcgccgccgggctggcacctgactgtgcaataaccgtacatacccaggcagatacgtccagtcccgatccgttatttaatcctctaaaaactggcgtttgccaactggataacgcgaacgtgactgacgcgatcctcagcagggcaggagggtcaattgctgactttaccgggcatcggcaaacggcgtttcgcgaactggaacgggtgcttaattttccgcaatcaaacttgtgccttaaacgtgagaaacaggacgaaagctgttcattaacgcaggcattaccatcggaactcaaggtgagcgccgacaatgtctcattaaccggtgcggtaagcctcgcatcaatgctgacggagatatttctcctgcaacaagcacagggaatgccggagccggggtggggaaggatcaccgattcacaccagtggaacaccttgctaagtttgcataacgcgcaattttatttgctacaacgcacgccagaggttgcccgcagccgcgccaccccgttattagatttgatcaagacagcgttgacgccccatccaccgcaaaaacaggcgtatggtgtgacattacccacttcagtgctgtttatcgccggacacgatactaatctggcaaatctcggcggcgcactggagctcaactggacgcttcccggtcagccggataacacgccgccaggtggtgaactggtgtttgaacgctggcgtcggctaagcgataacagccagtggattcaggtttcgctggtcttccagactttacagcagatgcgtgataaaacgccgctgtcattaaatacgccgcccggagaggtgaaactgaccctggcaggatgtgaagagcgaaatgcgcagggcatgtgttcgttggcaggttttacgcaaatcgtgaatgaagcacgcataccggcgtgcagtttgtaa

SEQ ID NO: 7168 - DNA, 1119 bp, Escherichia coli
atgcataaccaggctccaattcaacgtagaaaatcaacacgtatttacgttgggaatgtgccgattggcgatggtgctcccatcgccgtacagtccatgaccaatacgcgtacgacagacgtcgaagcaacggtcaatcaaatcaaggcgctggaacgcgttggcgctgatatcgtccgtgtatccgtaccgacgatggacgcggcagaagcgttcaaactcatcaaacagcaggttaacgtgccgctggtggctgacatccacttcgactatcgcattgcgctgaaagtagcggaatacggcgtcgattgtctgcgtattaaccctggcaatatcggtaatgaagagcgtattcgcatggtggttgactgtgcgcgcgataaaaacattccgatccgtattggcgttaacgccggatcgctggaaaaagatctgcaagaaaagtatggcgaaccgacgccgcaggcgttgctggaatctgccatgcgtcatgttgatcatctcgatcgcctgaacttcgatcagttcaaagtcagcgtgaaagcgtctgacgtcttcctcgctgttgagtcttatcgtttgctggcaaaacagatcgatcagccgttgcatctggggatcaccgaagccggtggtgcgcgcagcggggcagtaaaatccgccattggtttaggtctgctgctgtctgaaggcatcggcgacacgctgcgcgtatcgctggcggccgatccggtcgaagagatcaaagtcggtttcgatattttgaaatcgctgcgtatccgttcgcgagggatcaacttcatcgcctgcccgacctgttcgcgtcaggaatttgatgttatcggtacggttaacgcgctggagcaacgcctggaagatatcatcactccgatggacgtttcgattatcggctgcgtggtgaatggcccaggtgaggcgctggtttctacactcggcgtcaccggcggcaacaagaaaagcggcctctatgaagatggcgtgcgcaaagaccgtctggacaacaacgatatgatcgaccagctggaagcacgcattcgtgcgaaagccagtcagctggacgaagcgcgtcgaattgacgttcagcaggttgaaaaataa

SEQ ID NO: 7169 - DNA, 1014 bp, Escherichia coli
atgaatactgaagccacgcacgaccaaaatgaagcacttactaccggcgctcgcctgcgtaatgctcgcgaacaactaggacttagtcagcaggccgttgccgagcgactttgcctgaaggtttccacggtacgcgacattgaagaagataaggcacccgccgatcttgcttcaacattcctgcgcggatatatccgctcttatgcgcgtctggtacatattccagaagaagaactgctgccagggctggaaaagcaggctccacttcgggctgcaaaagttgcgccgatgcagagtttttccctcggtaaacgccgcaaaaaacgcgacggctggctgatgaccttcacttggctggtgttgtttgtggttatcggcctgagcggtgcctggtggtggcaagaccgcaaagctcagcaggaagagatcaccactatggccgatcaatcttcggcggaactgagcagtaatagcgagcaggggcagagtgttccattaaatacgtcgacaactacagacccggctacaacgtccacgccgccagcgtctgtggatactaccgcaaccaacacgcaaacacctgccgtaactgcgccagcaccagctgttgatccgcaacagaatgcggttgtttcgccttcgcaggcaaatgttgataccgccgcgaccccggcaccaacggcagcaacaacgccagatggtgctgcgccgttgccaaccgatcaggctggcgtgaccacgccggtggctgatccgaatgcgctggtgatgaactttactgccgattgctggctggaggtcactgatgctaccggtaaaaaattgtttagcggtatgcagcgtaaagacggtaatttgaacttaaccggccaggcaccgtacaaactgaaaattggtgcgccagccgcagtacagatccagtatcaagggaaacctgtcgatctgagtcgttttatcagaactaaccaggttgcgcgtctgaccctcaatgccgaacaatcaccggcgcagtaa

SEQ ID NO: 7170 - DNA, 2244 bp, Escherichia coli
atggcgcgttccaaaactgctcagccaaaacactcactgcgtaaaatcgcagttgtagtagccacagcggttagcggcatgtctgtttatgcacaggcagcggttgaaccgaaagaagacactatcaccgttaccgctgcacctgcgccgcaagaaagcgcatgggggcctgctgcaactattgcggcgcgacagtctgctaccggcactaaaaccgatacgccgattcaaaaagtgccacagtctatttctgttgtgaccgccgaagagatggcgctgcatcagccgaagtcggtaaaagaagcgcttagctacacgccgggtgtctctgttggtacgcgtggcgcatccaacacctatgaccacctgatcattcgcggctttgcggcagaaggccaaagccagaataactatctgaatggcctgaagttgcagggcaacttctataacgatgcggtcattgacccgtatatgctggaacgcgctgaaattatgcgtggcccggtttccgtgctttacggtaaaagcagtcctggcggcctgttgaatatggtcagcaagcgtccgaccaccgaaccgctgaaagaagttcagtttaaagccggtactgacagcctgttccagactggttttgactttagcgattcgttggatgatgacggtgtttactcttatcgcctgaccggtcttgcgcgttctgccaatgcccagcagaaagggtcagaagagcagcgttatgctattgcaccggcgttcacctggcgtccggatgataaaaccaattttaccttcctttcttacttccagaacgagccggaaaccggttattacggctggttgccgaaagagggaaccgttgagccgctgccgaacggtaagcgtctgccgacagactttaatgaaggggcgaagaacaacacctattctcgtaatgagaagatggtcggctacagcttcgatcacgaatttaacgacacctttactgtgcgtcagaacctgcgctttgctgaaaacaaaacctcgcaaaacagcgtttatggttacggcgtctgctccgatccggcgaatgcttacagcaaacagtgtgcggcattagcgccagcggataaaggccattatctggcacgtaaatacgtcgttgatgatgagaagctgcaaaacttctccgttgatacccagttgcagagcaagtttgccactggcgatatcgaccacaccctgctgaccggtgtcgactttatgcgtatgcgtaatgacatcaacgcctggtttggttacgacgactctgtgccactgctcaatctgtacaatccggtgaataccgatttcgacttcaatgccaaagatccggcaaactccggcccttaccgcattctgaataaacagaaacaaacgggcgtttatgttcaggatcaggcgcagtgggataaagtgctggtcaccctaggcggtcgttatgactgggcagatcaagaatctcttaaccgcgttgccgggacgaccgataaacgtgatgacaaacagtttacctggcgtggtggtgttaactacctgtttgataatggtgtaacaccttacttcagctatagcgaatcgtttgaaccttcttcgcaagttgggaaggatggtaatattttcgcaccgtctaaaggtaagcagtatgaagtcggcgtgaaatatgtaccggaagatcgtccgattgtagttactggtgccgtgtataatctcactaaaaccaacaacctgatggcggaccctgagggttccttcttctcggttgaaggtggcgagatccgcgcacgtggcgtagaaatcgaagcgaaagcggcgctgtcggcgagtgttaacgtagtcggttcttatacttacaccgatgcggaatacaccaccgatactacctataaaggcaatacgcctgcacaggtgccaaaacacatggcttcgttgtgggctgactacaccttctttgacggtccgctttcaggtctgacgctgggcaccggtggtcgttatactggctccagttatggtgatccggctaactcctttaaagtgggaagttatacggtcgtggatgcgttagtacgttatgatctggcgcgagtcggcatggctggctccaacgtggcgctgcatgttaacaacctgttcgatcgtgaatacgtcgccagctgctttaacacttatggctgcttctggggcgcagaacgtcaggtcgttgcaaccgcaaccttccgtttctaa

SEQ ID NO: 7171 - DNA, 798 bp, Escherichia coli
atgcaggaatacacgaatcattccgataccacttttgcactgcgtaatatctcctttcgtgtgcccgggcgcacgcttttgcatccgctgtcgttaacctttcctgccgggaaagtgaccggtctgattggtcacaacggttctggtaaatccactctgctcaaaatgcttggccgtcatcagccgccgtcggaaggggagattcttcttgatgcccaaccgctggaaagctggagcagcaaagcgtttgcccgcaaagtggcttatttgccgcagcagcttcctccggcagaagggatgaccgtgcgtgaactggtggcgattggtcgttacccgtggcatggcgcgctggggcgctttggggcggcagatcgcgaaaaagtcgaggaagctatctcgctggttggcttaaaaccgctggcgcatcggctggtcgatagtctctctggcggcgaacgtcagcgggcgtggatcgccatgctggtggcgcaggatagccgttgtctgttgctcgacgaaccgacctcggcgctggatatcgcccaccaggttgatgtgctgtcgctggtgcaccgtttaagtcaggagcgtggcctgacggtcattgccgtgttgcacgatatcaatatggcggcacgctactgtgattatctggtcgccctgcgcggcggtgaaatgattgctcagggaacgcctgcggaaattatgcgcggcgaaaccctcgaaatgatttatggcatcccgatgggtattttgccgcatccggcgggtgctgcacctgtgagttttgtttattga

SEQ ID NO: 7172 - DNA, 1941 bp, Escherichia coli
atgatgagttatgtagactggccgccattaattttgaggcacacgtactacatggctgaattcgaaaccacttttgcagatctgggcctgaaggctcctatccttgaagcccttaacgatctgggttacgaaaaaccatctccaattcaggcagagtgtattccacatctgctgaatggccgcgacgttctgggtatggcccagacggggagcggaaaaactgcagcattctctttacctctgttgcagaatcttgatcctgagctgaaagcaccacagattctggtgctggcaccgacccgcgaactggcggtacaggttgctgaagcaatgacggatttctctaaacacatgcgcggcgtaaatgtggttgctctgtacggcggccagcgttatgacgtgcaattacgcgccctgcgtcaggggccgcagatcgttgtcggtactccgggccgtctgctggaccacctgaaacgtggcactctggacctctctaaactgagcggtctggttctggatgaagctgacgaaatgctgcgcatgggcttcatcgaagacgttgaaaccattatggcgcagatcccggaaggtcatcagaccgctctgttctctgcaaccatgccggaagcgattcgtcgcattacccgccgctttatgaaagagccgcaggaagtgcgcattcagtccagcgtgactacccgtcctgacatcagccagagctactggactgtctggggtatgcgcaaaaacgaagcactggtacgtttcctggaagcggaagattttgatgcggcgattatcttcgttcgtaccaaaaacgcgactctggaagtggctgaagctcttgagcgtaacggctacaacagcgccgcgctgaacggtgacatgaaccaggcgctgcgtgaacagacactggaacgcctgaaagatggtcgtctggacatcctgattgcgaccgacgttgcagcccgtggcctggacgttgagcgtatcagcctggtagttaactacgatatcccgatggattctgagtcttacgttcaccgtatcggtcgtaccggtcgtgcgggtcgtgctggccgcgcgctgctgttcgttgagaaccgcgagcgtcgtctgctgcgcaacattgaacgtactatgaagctgactattccggaagtagaactgccgaacgcagaactgctaggcaaacgccgtctggaaaaattcgccgctaaagtacagcagcagctggaaagcagcgatctggatcaataccgcgcactgctgagcaaaattcagccgactgctgaaggtgaagagctggatctcgaaactctggctgcggcactgctgaaaatggcacagggtgaacgtactctgatcgtaccgccagatgcgccgatgcgtccgaaacgtgaattccgtgaccgtgatgaccgtggtccgcgcgatcgtaacgaccgtggcccgcgtggtgaccgtgaagatcgtccgcgtcgtgaacgtcgtgatgttggcgatatgcagctgtaccgcattgaagtgggccgcgatgatggtgttgaagttcgtcatatcgttggtgcgattgctaacgaaggcgacatcagcagccgttacattggtaacatcaagctgtttgcttctcactccaccatcgaactgccgaaaggtatgccgggtgaagtgctgcaacactttacgcgcactcgcattctcaacaagccgatgaacatgcagttactgggcgatgcacagccgcatactggcggtgagcgtcgtggcggtggtcgtggtttcggtggcgaacgtcgtgaaggcggtcgtaacttcagcggtgaacgccgtgaaggtggccgtggtgatggtcgtcgttttagcggcgaacgtcgtgaaggccgcgctccgcgtcgtgatgattctaccggtcgtcgtcgtttcggtggtgatgcgtaa

SEQ ID NO: 7173 - DNA, 1833 bp, Escherichia coli
gtgaatgtggcgcaggcggaagtgttgaatctggagtccggagctaaacaggttttacaagaaacctttggctaccaacagtttcgccccggccaggaagaaattatcgacactgtgctttccggccgcgattgcctcgtcgtcatgcccactggtggcggaaaatccctttgctatcaaatccctgccttattgctaaacggccttaccgtggttgtttcaccgctgatttcgttgatgaaagatcaggtggatcaactgcaagccaacggcgtggcggcggcgtgccttaactcgacgcaaacccgcgaacagcaacttgaagtgatgacaggctgccgcaccgggcaaattcgtctgctttatatcgccccggaacgcctgatgctggataactttcttgagcatctggcgcactggaatccggtgttattagccgttgatgaagcgcactgtatctcccaatggggccacgatttccgcccggaatatgccgcgctcggtcagttgcgccagcggttcccgacgctgccgtttatggcgctgaccgccacagccgacgacaccacgcgccaggatatcgtgcgcctgctggggctgaacgatccgctgattcaaatcagcagttttgaccgtccgaatattcgctacatgctgatggagaagttcaaaccgctcgatcagttgatgcgctacgtgcaggaacagcgcggtaagtcaggcattatctactgcaacagccgcgcgaaagtagaagacaccgctgcgcgcctgcaaagcaagggaattagcgcggcggcctatcatgccgggctggaaaataatgttcgcgccgatgtgcaggaaaaattccagcgcgatgacctgcaaattgtggtggcgacggtggcgttcggcatgggcatcaataaaccaaacgttcgcttcgtggtccactttgatattccgcgcaatatcgaatcctattatcaggaaaccggacgcgccgggcgtgatggcctgcccgcggaagcgatgctgttttacgatccggctgatatggcgtggctgcgccgttgtctggaagagaagccgcaggggcagttgcaggatatcgagcgccacaaactcaatgcgatgggcgcgtttgccgaagcgcaaacttgccgtcgtctggtattgctgaactattttggcgaagggcgtcaggagccgtgcgggaactgcgatatctgcctcgatccgccgaaacagtacgacggttcaaccgatgctcagattgccctttccaccattggtcgtgtgaatcagcggtttgggatgggttatgtggtggaagtgattcgtggtgctaataaccagcgtatccgcgactatggtcatgacaaactgaaagtctatggcatgggccgtgataaaagccatgaacattgggtgagcgtgatccgccagctgattcacctcggcctggtgacgcaaaatattgcccagcattctgccctacaactgacagaggccgcgcgcccggtgctcgcggaatcctctttgcaacttgccgtgccgcgtatcgtggcgctcaaaccgaaagcgatgcagaaatcgttcggcggcaactatgatcgcaaactgttcgccaaattacgcaaactgcgtaaatcgatagccgatgaaagtaatgtcccgccgtacgtggtgtttaacgacgcaaccttgattgagatggctgaacagatgccgatcaccgccagcgaaatgctcagcgttaacggcgttgggatgcgcaagctggaacgctttggcaaaccgtttatggcgctgattcgtgcgcatgttgatggcgatgacgaagagtag

SEQ ID NO: 7174 - DNA, 912 bp, Escherichia coli
atgcgactatttaactggcgacgtcaggcggtgttaaacgccatgccactggtcaaacctgaccaggtacgtacaccgtggcatgaattctggcgacgatttcgccgtcagcatatggcgatgaccgccgcattattcgttattttattgattgtggtggccatttttgcacgctggatcgctccctatgacgccgaaaattattttgattatgacaatctgaataacggaccttctttgcagcactggtttggcgtcgattcactggggcgtgacattttcagccgtgtcctggttggtgcgcaaatctcgctggcggcgggcgtgtttgccgtgtttatcggtgcggcgatcgggacgttgctgggcttgctcgctggatattatgaaggctggtgggatcggctgatcatgcgcatttgcgatgtgctgtttgccttcccgggtattttactggcgatcgctgttgttgcggtgttgggaagcggcattgctaacgtgattattgcagtcgccattttttccatccccgcgtttgcccgcctggtgcgcggcaacacgctggtgttgaaacagcaaacctttattgagtcagcacgcagtattggtgccagcgatatgaccgttttgttgcgtcatatcctgcctgggaccgtctcttctatcgtggtgtttttcaccatgcgcattggtacctcgattatctctgccgccagcctctcatttctcggcctcggtgcgcagccgccgacaccagagtggggagcaatgctcaatgaggctcgagcggatatggttatcgcgccgcatgtcgctgtttttccggccctggctatttttctgaccgtactggcgttcaatttgttgggcgatggtttacgcgatgcgctggatccgaaaattaaaggatag

SEQ ID NO: 7175 - DNA, 291 bp, Escherichia coli
atgaaaatcactcctgaacaggctcgtgaggctctggatgcctggatatgtcgaccaggaatgacacaggagcaggcgacgatattaatcactgaagcattctgggctttgaaagagcgcccgaacatcgatgttcagcgtgtcacatatgaaggtggcgcgattgatcagcgagcgcttggcgttaatcgagtgaagatatttgaacgctggaaggctatcgacaccagggataagcgtgaaaagttcacggcgctagtgcctgcaattatggaggctaccactggatga

SEQ ID NO: 7176 - DNA, 231 bp, Escherichia coli
atgcttaaaactgacgctcttttgtatttcggttcaaaaacaaaacttgcacaagcagcaggtattcgtttggcttcgctttatagctggaaaggggatttagttcccgaaggtcgcgcgatgcgtctacaggaggcatctggcggggagcttcagtatgatcccaaagtttatgatgaatatcgtaagacgaagcgggcggggcggttgaacaatgaaaatcactcctga

SEQ ID NO: 7177 - DNA, 918 bp, Escherichia coli
atgatcaaacaaaggacacttaaacgtatcgttcaggcgacgggtgtcggtttacataccggcaagaaagtcaccctgacgttacgccctgcgccggccaacaccggggtcatctatcgtcgcaccgacttgaatccaccggtagatttcccggccgatgccaaatctgtgcgtgataccatgctctgtacgtgtctggtcaacgagcatgatgtacggatttcaaccgtagagcacctcaatgctgctctcgcgggcttgggcatcgataacattgttatcgaagttaacgcgccggaaatcccgatcatggacggcagcgccgctccgtttgtatacctgctgcttgacgccggtatcgacgagttgaactgcgccaaaaaatttgttcgcatcaaagagactgttcgtgtcgaagatggcgataagtgggctgaatttaagccgtacaatggtttttcgctggatttcaccatcgattttaaccatccggctattgattccagcaaccagcgctatgcgatgaacttctccgctgatgcgtttatgcgccagatcagccgtgcgcgtacgttcggtttcatgcgtgatatcgaatatctgcagtcccgtggtttgtgcctgggcggcagcttcgattgtgccatcgttgttgacgattatcgcgtactgaacgaagacggcctgcgttttgaagacgaatttgtgcgtcacaaaatgctcgatgcgatcggtgacttgttcatgtgtggtcacaatattattggtgcatttaccgcttataaatccggtcatgcactgaataacaaactgctgcaggctgtcctggcgaaacaggaagcctgggaatatgtgaccttccaggacgacgcagaactgccgttggccttcaaagcgccttcagctgtactggcataa

SEQ ID NO: 7178 - DNA, 420 bp, Escherichia coli
atgtttgaattctatatcgccgcgcgtgagcagaaagaaacaggtcaccctggtatcttctcccgacaaaaacacagcaccataatatatgtaatttgtttattactgatttgcctgtggtttgcaggaatggtgctggttggtgggtatgccaggcagctatgggtgctttggatagtaaaagccgaagtcactgtagaggctgaaacgcccgcttttaaacaatcaacacaacactatttcttcaaaaaacagccactccccgtcgtcgaatccgtcgaggaggaagatgacccaggcgtcgcggttgagaatgccccctcttcttctgaagacgaagaaaatactgtggaagaaagcgaagagaaagccggtttaagagagcgtgtcaaaaatgcactgaacgaacttgagagataa

SEQ ID NO: 7179 - DNA, 1470 bp, Escherichia coli
atgtctacgagaagagaagttattctttcctggttgtgtgagaaacgtcaaacctggcgtctatgctatttgttgggtgaggctggaagtggaaaaacctggctggcgcagcaactgcaaaaagataaacatcgccgtgtgattactttaagcctcgttgtttcctggcaaggtaaggccgcatggatcgttaccgacgataacgcggctgaacagggctgccgtgacagcgcctggacgcgagatgagatggcggggcaattactgcatgcgcttcatcgaactgatagtcgctgccctcttattattattgaaaatgctcacctgaatcaccgccgcatacttgatgatctccaacgcgcaatatctcttattcctgacggtcaatttttgctgatcggcagacccgatcgaaaagtcgaacgtgattttaaaaaacagggcattgaacttgtctcgataggacgtctgacggagcacgaacttaaggcaagcatccttgaaggtcagaatattgaccaacccgatctccttttaaccgccagagttctgaaacggatagctttattatgtcggggcgatcgcagaaagctggcgcttgccggcgaaacaattcgcttattacagcaagccgagcagaccagcgttttcacagcaaaacaatggcgaatgatttaccgcatattgggtgataaccgcccccggaaaatgcagcttgccgtggtgatgagtggaaccattatcgctcttacctgtggttggctactgctgtcctcttttacagctacgttacccgttcctgcgtggctgatacccgtaacgccagtagttaaacaagatatgactaaggatattgctcatgtggtgatgcgcgatagtgaggcgctaagcgtgttatacggcgtatgggggtacgaggtcccagctgattcggcctggtgcgatcaggcagtaagagcggggctggcatgtaaaagtgggaatgcttctttacaaacattggtagatcagaatttgccctggatcgcatcgcttaaagtcggggacaaaaaattgcctgttgtggtcgttcgcgtcggtgaggctagcgttgatgtcctcgtaggtcagcaaacgtggacgctgacacataaatggtttgagtcggtatggacgggtgattatcttctgttgtggaaaatgtcgccggaaggggagagtaccattacgcgtgatagcagcgaggaagagattctctggctggaaacgatgttaaaccgcgcattgcatatttcgacagaaccttcggcggagtggcgtcccttgttggtagaaaaaataaagcaatttcaaaaaagccaccacttgaaaactgacggtgttgttggcttttcaacgttagtacatctctggcaggtggcaggggagagtgcctacttatatcgggatgaagcaaatatttccccggaaacaacagtgaaggggaaatga

SEQ ID NO: 7180 - DNA, 1512 bp, Escherichia coli
gtgcgttgtctgatgatttataaaaatgaggctttaaacatggtacctgtggtcgcgcttgtcgggcgccctaacgtaggaaaatccacgttatttaaccgtctaactcgcacccgagatgcgctggttgcggatttcccgggtctgactcgtgaccgtaagtacggtcgtgcggaaattgaaggccgtgagtttatctgtattgataccggcgggattgatggcacagaagacggtgtagaaacccgcatggcggaacagtcgctgctggcgattgaagaagcggacgtcgtactgtttatggtggatgcgcgcgcgggcctgatgccggcagatgaagcgattgccaaacatctgcgctcccgtgaaaaaccgaccttcctggtggcaaacaaaactgacggtctggatcccgatcaggcagtggttgatttctactcgcttggtttaggtgaaatctacccgatcgccgcgtctcacggtcgtggcgtattaagtctgctggagcatgtgctgctgccgtggatggaagatctcgcaccgcaagaggaagtcgacgaagacgctgaatactgggcgcaatttgaagcggaagagaacggcgaagaagaagaggaagacgacttcgacccgcaaagtctgccgatcaaactggcgattgtgggtcgtccgaacgtaggtaagtctacactcactaaccgtattcttggtgaagagcgcgttgttgtttacgacatgcctggcacgacgcgtgacagcatctacatcccaatggaacgcgatggacgtgagtatgtgctcattgacaccgctggcgtacgtaaacgcggcaaaatcaccgatgctgtagagaaattctccgtaatcaaaacgttgcaggccattgaagacgccaacgtggtgatgttagtgattgatgcgcgcgaaggtatttccgatcaggatctctcgctgctgggctttattctcaatagtgggcgctcacttgtcattgtggtgaataagtgggatggcctgagtcaggaagtgaaagagcaggtgaaagaaacgctggacttccgtctgggctttatcgattttgctcgtgtgcactttatctctgccttgcacggcagtggtgttggtaacttgtttgaatcagtacgtgaagcgtatgacagctccacccgtcgtgtggggacctctatgctgacgcgcatcatgacgatggctgttgaagatcaccaaccgccgctggtacgcggtcgtcgtgtgaagctgaaatatgcccacgccggtggttataacccgccgattgtggtgattcacggtaatcaggtgaaagacctgcctgattcctacaagcgctacttgatgaactacttccgcaaatcgctggacgtaatgggatcgccgattcgtattcagttcaaagaaggggaaaacccgtatgcgaataagcgtaacaccctgacgccaacccagatgcgtaaacgtaagcgtctgatgaagcacatcaagaaaaataaataa

SEQ ID NO: 7181 - DNA, 1179 bp, Escherichia coli
atgcaattgcgtaaattactgctgccaggactgctttccgttacccttttaagcggctgttcgctgtttaacagcgaagaagatgtggtaaagatgtccccattgccaaccgttgaaaaccagtttacgccgaccacggcgtggagcacttccgttggtagcggcattggcaacttctattccaatcttcatccggcactggcggacaacgttgtctatgcagcggaccgcgctggtttagtaaaagcgctgaatgcggatgatggcaaagaaatctggtctgtcagcctggccgagaaagatggctggttctctaaagagcctgcattactttctggcggtgtgaccgtgtctggtgggcatgtctacattggcagcgaaaaggcgcaggtttacgcgctgaataccagcgatggtactgtggcatggcaaactaaagtcgcgggtgaagcactttcgcgcccggtggtcagcgacggtctggtgttaatccacaccagtaacggtcagttacaagcgctgaacgaagctgacggcgctgtcaaatggacagttaacctcgatatgccttcgctctctttgcgtggcgagtctgcgccgacaacggcttttggtgcggccgtcgtggggggcgataatggtcgcgtcagcgcagtgctgatggaacagggccagatgatttggcagcagcgtatttcccaggcgaccggttctaccgaaattgaccgtctgagcgatgttgacacgactcccgtcgttgttaacggcgttgttttcgcgctggcctataatggtaacctgacggcgcttgatctgcgcagtggtcagattatgtggaaacgcgaactgggttcggtgaatgatttcatcgtcgacggcaatcgcatctatctggtcgatcaaaatgaccgggtgatggcgttgaccattgatggcggcgttacgctgtggacacaaagcgatctgctgcatcgcctgctgacttctccggtgctgtataatggcaacctggtggtcggtgacagtgaaggttatctgcactggattaacgtcgaagatggtcgtttcgttgcccagcaaaaagttgatagttccggtttccagactgaaccggttgccgctgacggcaaactgctgatccaggcaaaagacggaaccgtgtactctattacacgttaa

SEQ ID NO: 7182 - DNA, 945 bp, Escherichia coli
atgagtcgtcctcgtcgtcgcggtcgcgacattaacggcgttttgttgctggataaacctcagggtatgtccagcaacgatgcgctgcaaaaagtgaaacgtatatataacgccaaccgtgccgggcataccggtgcgctggacccgctggcgaccggcatgttgccgatttgcctcggggaagcgacgaagttttcccagtatctgctggactccgacaaacgctatcgggtcattgcgcgtcttggacagcgtaccgatacttctgatgccgacggacagatcgttgaagaacgtccggtaacctttagcgcagagcagctggcagcggcactggatactttccgtggcgatatcgaacagatcccttcgatgtattcagcactgaaatatcagggcaaaaaactgtacgaatatgcgcgtcagggcattgaagttccgcgtgaagcgcgtccgattaccgtttatgaattgctgtttattcgccatgaaggcaatgagctggagctggaaattcactgctcaaaaggcacttatatccgcaccatcattgatgacctgggtgaaaaactcggctgtggcgcgcatgttatttacctgcgccgtctggcggtaagtaaatatccggttgaacggatggtgaccctggagcacctgcgtgaacttgttgagcaagctgaacagcaggatattccagccgcggagttacttgatccattactgatgccaatggacagtccagcttcggactatccggtggtgaatcttccgttaacgtcttctgtttacttcaaaaatggtaacccggttcgtacatctggtgcgccactggaaggactggttcgcgtcacggaaggtgagaacggcaaatttatcggtatgggcgaaattgacgatgaaggccgcgttgcgcctcgtcgcctggtggttgaatacccggcgtaa

SEQ ID NO: 7183 - DNA, 363 bp, Escherichia coli
ttggagtcattaccgggccaaatcgataaatcgctcgatgaagcctcactcagcctgcgcgccggttccctgcgtaccattacgcacatcctgctgccgctgctgcgcccggcgatcctctcggcgctgatttacagctttgtgcgcgccattaccaccgtcagcgccattgtgttcctcgtcacgccggatacccgcgtagcgacggcttacatcctcaaccgcgtggaagatggcgaatacggtgtagcgattgcctacggttccattctgatcgtggtgatgctggcgattattttcatctttgactggctgatcggtgaatcacgtacctcccgttcaaaagccaaaaaccaggcgtaa

SEQ ID NO: 7184 - DNA, 927 bp, Escherichia coli
atgctcccgccttattttttgttcaaagagatgacagacacacagtatattggccgcttcgccccctctccttccggcgagcttcattttggctctctgatcgccgcgctcggcagctatttgcaggctcgcgcccggcaaggtcgctggctggtacgcatagaagatatcgacccgcctcgtgaagttcccggtgccgcagaaactatcctgcgccagctggaacattacggtctgcactgggacggcgatgttctctggcaatcgcaacgtcacgacgcctatcgtgaagcactcgcctggttacatgaacaaggactaagttattactgcacctgtacgcgtgcgcgtattcaaagcattggcggtatttacgacggtcattgccgggtgttgcatcatggaccagacaacgccgcagtgcgtatccgccagcagcatccggtcacgcaatttactgaccagctgcgcggcattattcacgccgacgaaaaactggcacgggaagattttatcattcatcgccgtgatgggttgttcgcctacaacctggctgttgtggttgatgatcatttccagggcgttacagaaatagtgcgtggggctgatctgattgaaccaacagtaaggcaaatctcgctgtaccagctttttggctggaaagtgccagattacattcatctgccgctggcgcttaatccacaaggcgctaaactttccaagcagaatcatgcgcctgcgttgccgaaaggcgatccacgcccggtactaatcgcggcacttcaatttctggggcagcaggcagaagcacactggcaggatttcagcgtcgagcaaatccttcagtcagccgtcaaaaactggcggcttaccgccgtgcccgagtcggcaattgtaaattcaacattctcaaatgcgtcatgctga

SEQ ID NO: 7185 - DNA, 456 bp, Escherichia coli
atgcaagaagggcaaaaccgtaaaacatcgtccctgagtattctcgccatcgctggggtggaaccatatcaggagaagccgggcgaagagtatatgaatgaagcccagctggcgcacttccgtcgtattctggaagcatggcgtaatcaactcagggatgaagtcgatcgcaccgttacacatatgcaggatgaagcagccaacttcccggacccggtagaccgtgcagcccaggaagaagagttcagcctcgaactgcgtaaccgcgatcgcgagcgtaagctgatcaaaaagatcgagaagacgctgaaaaaagtggaagacgaagatttcggctactgcgaatcctgcggtgttgaaattggtattcgccgtctggaagcgcgcccgacagccgatctgtgcatcgactgcaaaacgctggctgaaattcgcgaaaaacagatggctggctaa

SEQ ID NO: 7186 - DNA, 1575 bp, Escherichia coli
atgctctccacactccgccgcactctatttgcgctgctggcttgtgcgtcttttatcgtccatgccgctgcaccagatgaaatcaccaccgcctggccggtgaatgtcgggccactaaacccgcacctttacacgcctaaccagatgttcgcccagagcatggtttatgaaccattggtgaaatatcaggcagacggttcggtgatcccgtggctggcaaaaagctggactcattcagaagatggtaaaacctggaccttcaccctgcgtgatgacgtgaaattctccaacggtgaaccgttcgatgccgaggcggcggcagaaaacttccgcgcagtgctcgataaccgtcaacgtcacgcctggctggagctggcaaaccagattgttgatgttaaagcactcagtaaaacagagctgcaaattaccctgaaaagcgcctactatcctttcctgcaagaactggccctgccccgtcctttccgttttatcgctccctcgcagtttaaaaaccatgaaaccatgaacggaattaaagcgccgattggcaccggaccgtggattttgcaggaatcgaaactgaatcagtacgatgtcttcgtccgtaacgaaaactactggggcgaaaagccagcgattaaaaagatcacctttaacgtcatcccggacccgactacccgcgcggtggcgtttgaaactggcgatatcgacctgctgtacggaaacgaagggttattaccgctcgataccttcgcccgctttagccagaatccggcttaccacacccaactgtcacagccgatcgaaaccgtgatgctggcgctcaataccgccaaagcccccaccaacgagctggcagtacgtgaagctcttaattacgcggtaaacaaaaaatcgctgattgataacgcgttgtatggcacccagcaggtcgccgacaccctgtttgccccttctgtgccctacgccaacctcggcctgaaaccgagccagtacgatccgcaaaaagcgaaagcgttgctggaaaaagccggttggacgctgcctgcgggcaaagacatccgcgagaaaaatggtcagccgctgcgcattgaactttcgttcatcggcaccgatgcgttaagcaaatcgatggcggaaatcattcaggctgatatgcgccagattggcgcagatgtctcgctgattggcgaagaagagagcagtatctatgctcgtcagcgcgacggtcgttttggcatgattttccaccgcacctggggcgcgccatatgatccacacgccttcctcagttcaatgcgcgtaccgtcacacgctgacttccaggcacagcaaggattagccgacaaaccgctgattgataaagagatcggcgaagtgctggcgacccatgacgaaacgcaacgtcaggcgctgtatcgcgacattctgacccgtctgcatgacgaggcggtttatctgcctatcagttacatctcaatgatggtggtatcaaaaccggagctgggtaacatcccctacgcgccgatcgccaccgaaattccgttcgaacagattaaaccggtgaaaccttaa

SEQ ID NO: 7187 - DNA, 243 bp, Escherichia coli
gtggcattggttgctggagagagaaaacccccgcacgttgcaggtatgcacctgacaacaccacgggggctaatcttgaacctagaccactcaagaatagccgcgaaacgttgtcattacaacacaggcggctatatgacgctcgcagagctgggcatggccttctggcatgatttagcggctccggtcattgctggcattcttgccagtatgatcgtgaactggctgaacaagcggaagtaa

SEQ ID NO: 7188 - DNA, 693 bp, Escherichia coli
atgcagtcaataacacctccattaattgccgttattggtagcgatggttcaggcaagtcaacggtgtgtgaacatcttattaccgttgtcgaaaaatatggtgctgccgaaagagttcatttaggaaaacaggccggaaatgtcggtcgtgcagtgacaaaattaccgttgatgggaaaatccttacataaaacaattgaacgaaatcaggtgaaaacagcaaaaaaattgcctggaccagttccggcgctggtaattacagcgtttgtcgcccgtcgcttactgcgctttcgtcatatgcttgcctgtcgtcgtcgcgggttaattgttctaaccgaccgttatcctcaggaccaaattcctggcgcttacgatggtacggtgttcccacctaacgttgaaggtggtcgttttgtctcatggctggcaagccaggaacgtaaagcgtttcactggatggcgagccataagcctgatctggtcatcaaactcaatgttgaccttgaagttgcctgtgcacgtaaacccgaccataaacgggaatcgctggcgaggaagattgccataacgccacagttaacctttggtggtgcacaactggttgatatcgatgccaatcagccactggaacaggtgttggttgatgcagaaaaagcgattacggattttatgaccgcgcgtggttatcactag

SEQ ID NO: 7189 - DNA, 462 bp, Escherichia coli
atgacaactcaggtccgcaaaaacgtcatggatatgtttatcgatggcgcgcgccgtggctttactatcgccacgaccaacctgctgccaaacgtggtgatggcgtttgtcatcattcaggcgctgaaaattaccggcctgctcgactgggtggggcatatctgtgaacccgtaatggcgctgtggggattacccggtgaagcggcaaccgtccttttagccgcattaatgagtatgggtggcgcagtcggtgttgccgccagtctggcaaccgctggcgcattaaccggtcacgatgtcaccgttttactgcccgcgatgtatttaatgggcaacccggtgcaaaatgtcggtcgctgcctggggacagccgaagtgaatgccaaatattacccgcatatcattacggtctgcgtgattaacgcattgctgtcgatctgggttatgcagcttattgtttaa

SEQ ID NO: 7190 - DNA, 855 bp, Escherichia coli
gtgattgaaaacgaattcggcgaagtctctgttgatgatcaactgattggcgaccgcgccacgcagatcaaaacgctgaccaacggctgcatctgttgttcgcgctccaacgagctggaggacgcgctactcgacctgctggacaatctcgacaagggcaatattcagttcgaccgtctggtcattgaatgcaccggcatggccgatcccggcccgattattcagacctttttctcccatgaagttttatgccagcgttatctgctggacggcgtgattgcgctggtggatgcggtacatgccgatgagcagatgaaccagttcaccatcgcccagtcacaggttggctacgccgaccgcattctgctgaccaaaaccgacgtcgcaggcgaagcagaaaaactgcatgaacgcctggcgcgcatcaacgcccgcgcaccggtctacaccgtcacccacggcgacatcgatctgggcctgctgttcaacaccaacggttttatgctggaagaaaacgtcgtcagcaccaaaccgcgtttccactttatcgcagataaacaaaacgatatttcgtcgattgtggtggaactggattacccggtagatatcagcgaagtttcccgcgtgatggaaaacctgctgctggagtcggcggataaactgctacgttacaaagggatgctgtggattgacggcgaacctaaccgcctgctgttccagggcgtccagcgcctctacagcgccgactgggacaggccgtggggcgatgaaaaaccgcatagcacgatggtgtttatcgggatccagctgccggaggaagagattcgggctgcgtttgcggggttgaggaagtaa

SEQ ID NO: 7191 - DNA, 987 bp, Escherichia coli
atgatgcaggatttgcgtctgatattaatcattgttggcgcgatcgccataatcgctttactggtacatggtttctggaccagccgtaaagaacgatcttctatgttccgcgatcggccattaaaacgaatgaagtcaaaacgtgacgacgattcttatgacgaggatgtcgaagatgatgagggcgttggtgaggttcgtgttcaccgcgtgaatcatgccccggctaacgctcaggagcatgaggctgctcgtccgtcgccgcaacaccagtaccaaccgccttatgcgtctgcgcagccgcgtcaaccggtccagcagccgcctgaagcgcaggtaccgccgcaacatgctccgcatccagcgcagccggtgcagcagcctgcctatcagccgcagcctgaacagccgttgcagcagccagtttcgccacaggtcgcgccagcgccgcagcctgtgcattcagcaccgcaaccggcacaacaggctttccagcctgcagaacccgtagcggcaccacagcctgagcctgtagcggaacctgctccagttatggataaaccgaagcgcaaagaagcggtgattatcatgaacgtcgcggcgcatcacggtagcgagctaaacggtgaactgcttcttaacagcattcaacaagcgggcttcatttttggcgatatgaatatttaccatcgtcatcttagcccggatggcagcggcccggcgttattcagcctggcgaatatggtgaaaccgggaacctttgatcctgaaatgaaggatttcactactccgggtgtcactatctttatgcaggtaccgtcttacggtgacgagctgcagaacttcaagctgatgctgcaatctgcgcagcatattgccgatgaagtgggcggtgtcgtgcttgacgatcagcgccgtatgatgactccgcagaaattgcgcgagtaccaggacatcatccgcgaagtcaaagacgccaacgcctga

SEQ ID NO: 7192 - DNA, 1395 bp, Escherichia coli
gtggttcgatcgcagttatcacgcgctgatgcgccctgcttgttaacctccttaaggagacagctgatggcaatgttcggttttcctcactggcagttaaaatcgacctctacagagagcggcgtggtcgcgccggatgaacgattgccgtttgctcagacggcagtaatgggcgttcaacacgcggtggcgatgtttggcgcgacggtgttaatgccgattctgatggggctggatcccaatctttccattttaatgtcggggatcggcacgttactgtttttctttattaccggcgggcgcgtccccagttatctcggctccagcgcggcttttgtcggcgtggtgatcgccgcgacgggctttaacggtcagggcattaacccgaatatcagcattgcgctgggcgggattatcgcctgtgggctggtttataccgtcattggcctggtggtgatgaaaatcggtacgcgctggattgaacgactgatgccgccggtggtgacgggtgcggtggtgatggcgattggcctgaacttagcgcctatcgcagtgaaaagtgtatcggcttcggcctttgatagctggatggcggtaatgacggtgctgtgtattgggctggtggcggtgtttacccgtggcatgatccagcggttattgattctcgtaggattaattgtcgcctgtctgctgtatggcgtgatgaccaacgttttagggctgggaaaagccgtcgattttactctcgtcagccatgctgcctggttcggtctgccacatttttccactcctgcttttaatggtcaggcaatgatgctgattgcgcccgtggcggtgattctggtggcggaaaacttaggtcatctcaaggcagtcgccgggatgaccggacgcaatatggacccgtatatggggcgggcattcgtaggcgatggtctggcaacgatgctttccggctctgtcggcggtagcggcgtgaccacctatgctgaaaatatcggtgtgatggccgtgaccaaagtctactcgacgctggtgtttgttgctgctgccgtcatcgccatgctgttgggcttttcaccgaaatttggtgcgctgattcataccattccggccgcggttattggtggtgcatcaattgttgtgttcgggctgattgccgtcgcaggcgcaaggatatgggtacaaaaccgtgtcgatttaagccagaacggtaatttgattatggtcgcagtaaccttagtgctgggcgcgggtgattttgctctcacgctgggcggttttacgttgggagggattggtacagcaacctttggcgcgattttactcaatgcgttgttaagcagaaagttggttgacgttccaccgccagaagttgttcatcaggagccataa

SEQ ID NO: 7193 - DNA, 3501 bp, Escherichia coli
gtgagttattacctgactggggccaggaatgcgcaaattcacactaaacatattccgctttccctcggtctggccgtcatgccgatggtcgaggcagcaccaaccgctcagcaacagttgctggagcaagttcggttaggcgaagcgacccatcgtgaagatctggtgcaacagtcgttatatcggctggaacttattgatccgaataacccggacgtcgttgccgcccgtttccgttctttgttacgtcagggcgatattgatggcgcgcaaaaacagctcgatcggctgtcgcagttagcgccgagttcaaatgcgtataaatcgtcgcggactacgatgctactttccacgccggatggtcgtcaggcactgcaacaggcacgattgcaggcgacgaccggtcatgcagaagaagctgtggcgagttacaacaaactgttcaacggtgcgccgccggaaggtgacattgctgtcgagtactggagtacggtggcgaaaattccggctcgccgtggcgaagcgattaatcagttaaaacgcatcaatgcggatgcaccgggcaatacgggcctgcaaaacaatctggcgctattgctgtttagtagcgatcgccgtgacgaaggttttgccgtcctggaacagatggcaaaatcgaacgccgggcgcgaaggggcctctaaaatctggtacgggcagattaaagacatgcccgtcagtgatgccagtgtgtcggcgctgaaaaaatatctctcgatctttagtgatggcgatagcgtggcggctgcgcaatcgcaactggcagaacagcaaaaacagctggccgatcctgctttccgcgctcgtgcgcaaggtttagcggcggtggactctggtatggcgggtaaagccattcccgaactacaacaggcggtgcgggcgaacccgaaagacagtgaagctctgggggcgctgggccaggcgtattctcagaaaggcgatcgcgccaatgcagtggcgaatctggaaaaagccctcgcactggacccgcacagcagcaacaacgacaaatggaacagtctgctgaaagtaaaccgctactggctggcgatccagcagggcgatgctgcgctgaaagccaataatcctgaccgggcagaacgcctgttccagcaggcgcgtaatgtcgataacaccgacagttatgcagtgctggggctgggcgatgtggcgatggcgcgaaaagattatcccgccgccgaacgttattatcagcagaccttgcgtatggacagcggcaacactaacgccgtgcgcgggctggcaaatatttaccgccagcaatcgccagaaaaagctgaagcgtttatcgcctcgctctctgccagtcagcggcgtagcattgatgatatcgaacgcagcctgcaaaacgaccgtctggcacagcaggcagaggcactggaaaaccagggcaaatgggcgcaggcggcagcacttcagcggcaacgactggcgctggaccccggcagcgtatggattacttaccgactttcgcaggatctctggcaggccggacaacgcagccaggccgatacgttaatgcgcaatctggcgcagcagaagtcgaacgacccggagcaggtttacgcttacgggctgtacctctctggtcatgaccaggacagagcggcgctggcgcatatcaatagcctgccgcgtgcgcagtggaacagcaatattcaggagctggttaatcgactgcaaagcgatcaggtgctggaaaccgctaaccgcctgcgagaaagcggcaaagaggcagaagcggaagcgatgctgcgccagcaaccaccttccacgcgtattgacctcacgctggctgactgggcgcaacaacgacgtgattacaccgccgcccgcgctgcatatcagaatgtcctgacgcgggagccagctaacgccgacgccattcttggtctgacggaagtggatattgctgccggtgacaaagcggcggcacgtagccagctggcgaaactgcccgctaccgataacgcctcgctgaacacacagcggcgcgtggcgctggcacaggcgcagcttggcgataccgcagcagcgcagcggacgtttaataagttgatcccgcaggcaaaatctcagccaccgtcgatggaaagcgcgatggtgctgcgtgatggtgcgaagtttgaagcgcaggcgggcgatccaacgcaggcgctggaaacctacaaagacgccatggtcgcatccggtgtgactacgacgcgtccgcaggataacgacacctttacccgactgacccgtaacgacgagaaagatgactggctgaaacgtggcgtgcgcagcgatgcggcggacctctatcgccagcaggatcttaacgtcacccttgagcacgattactggggttcgagcggcaccggtggttactccgatctgaaagcgcacactaccatgttgcaggtggatgcgccgtattctgacgggcggatgttctttcgcagtgatttcgtcaatatgaacgtcggcagtttctccactaatgccgatggcaaatgggatgacaactggggcacctgtacattacaggactgtagcggcaaccgcagccagtcggattccggtgccagcgtggcggtcggctggcgaaatgacgtctggagctgggatatcggtaccacgccgatgggcttcaacgtggtggatgtggtcggcggcatcagttacagcgatgatatcgggccgctgggttacaccgttaacgcccaccgtcggcccatctccagttctttgctggcctttggtgggcaaaaagactccccgagcaataccgggaaaaaatggggtggcgtacgtgccgacggtgtggggctaagtctgagctacgataaaggtgaagcaaacggcgtctgggcatcgcttagtggcgaccagttaaccggtaaaaatgtcgaagataactggcgcgtgcgctggatgacgggctattactataaggtcattaaccagaacaatcgccgcgtcacaatcggcctgaacaacatgatctggcattacgacaaagatctgagtggctactcactcggtcagggcggttactacagtccgcaggaatacctgtcgtttgccataccggtgatgtggcgggagcgcacggaaaactggtcgtgggagctgggtgcgtctggctcgtggtcgcattcacgcaccaaaaccatgccgcgttatccgctgatgaatctgatcccgaccgactggcaggaagaagctgcgcggcaatccaacgatggcggcagcagtcagggcttcggctacacggcgcgggcattacttgaacgacgtgttacttccaactggtttgttggcacggcaattgatatccagcaggcgaaagattacgcacccagccatttcctgctctacgtacgttattccgccgccggatggcagggtgacatggatttaccgccgcagccgctgataccttacgccgactggtaa

SEQ ID NO: 7194 - DNA, 1107 bp, Escherichia coli
atgaatgtgttgcgtagtggaatcgtgacgatgctgctgctggctgcctttagtgttcaggcagcctgtacctggcctgcctgggagcagtttaaaaaggattacatcagtcaggaagggcgcgtcatcgaccccagcgacgcgcgcaaaatcaccacctccgaagggcaaagttacggcatgttctctgccctggcggctaacgaccgtgcagctttcgataatattctcgactggacgcagaacaatctcgctcagggttctttaaaagaacgtttgcccgcctggctgtggggcaagaaagagaacagtaagtgggaagtgctggacagcaattcggcctccgatggtgatgtctggatggcctggtcgttgctggaggcggggcgtttgtggaaagagcagcgttataccgacatcggcagcgcgttgctaaaacgtatcgcgcgggaggaagtggtgacggtgcctgggctgggttccatgttgttaccgggcaaagtgggttttgctgaggataacagctggcgttttaaccccagctacctgccgccgacgctggcgcagtatttcacccgctttggcgcgccgtggaccacgctgcgcgaaaccaatcaacgtttattgctggaaaccgccccgaaaggtttttcgccagactgggtgcgctatgagaaagacaaaggctggcagctaaaagccgaaaaaacattgatcagcagctacgacgctatccgcgtttacatgtgggtaggcatgatgcctgacagcgatccgcaaaaagcgcggatgctcaaccggtttaaaccgatggcgacattcactgagaaaaacggttatccgccggaaaaagtggatgtggctacggggaaagcgcagggtaaaggaccagtcggtttttctgccgccatgctgccctttttacaaaaccgcgatgcgcaggccgttcagcgccagcgcgtggccgataactttcccggcagcgatgcctattacaactatgtgctgaccctgtttggacaaggctgggatcaacaccgtttccgcttctcgacaaaaggtgagttattacctgactggggccaggaatgcgcaaattcacactaa

SEQ ID NO: 7195 - DNA, 501 bp, Escherichia coli
atgcgcaaattcacactaaacatattcacgctttccctcggtctggccgtcatgccgatggtcgaggcagcaccaaccgctcagcaacagttgctggagcaagttcggttaggcgaagcgacccatcgtgaagacctggtgcagcagtcgttgtatcggctggaacttattgatccgaataacccggacgtcgttgccgcccgtttccgttctttgttacgtcagggcgatattgatggcgcgcaaaaacagctcgatcggctgtcgcagttagcgccgagttcaaatgcgtataaatcgtcgcggactacgatgctactttccacgccggatggtcgtcaggcactgcaacaggcaagattgcaggcgactaccggtcatgcggaagaagctgtggcgaactgttcaacggtgcgccgccggaaggtgacattgctgtcgagtactggagtacggtggcgaaaattccggctcgccgtggcgaagcgattaatcagttaa

SEQ ID NO: 7196 - DNA, 603 bp, Escherichia coli
atgagcgataaattcggcgaagggcgcgatccgtatctttatccaggccttgatatcatgcgtaaccggctgaacatccgccagcagcagcggctggaacaggccgcttacgaaatgacggcgctgcgtgctgcgaccattgagcttggtccgctggtgcgcggtttaccgcatttgcgaactatccatcgccagctgtatcaggatattttcgactgggcagggcaactgcgtgaagttgatatttatcagggtgatacgccgttctgccactttgcttatatcgaaaaagagggcaatgccctgatgcaggatctggaggaagaaggttatctggttggcctggagaaagcgaagttcgtcgagcggctggcgcattactattgtgaaatcaacgtgctgcatcccttccgggtgggaagtggtctggcacagcggatcttcttcgagcaactggcgattcatgccggatatcaactgagctggcagggtatcgaaaaagaggcctggaatcaggcaaatcagagtggggcaatgggggatctcaccgcactgcagatgatatttagcaaagtggtaagcgaagccggggaatctgagtaa

SEQ ID NO: 7197 - DNA, 519 bp, Escherichia coli
atgattcttaaatcagctatttccgctgactctctgctcgctaaggatgcttttagggcatcctttcatttacactttttacgaaatcatgggatcactaacaaaatatcgcttgtcagttatattgtatggcaggaaagatatgcgactgatattacagatccccaaagtggagagtttatgaccattaaaaataagatgttgctgggtgcgcttttgctggttaccagtgccgcctgggccgcaccagccaccgcgggttcgaccaatacctcgggaatttctaagtatgagttaagtagtttcattgctgactttaagcatttcaaaccaggggacaccgtaccagaaatgtaccgtaccgatgagtacaacattaagcagtggcagttgcgtaacctgcccgcgcctgatgccgggacgcactggacctatatgggtggcgcgtacgtgttgatcagcgacaccgacggtaaaatcattaaagcctacgacggtgagattttttatcatcgctaa

SEQ ID NO: 7198 - DNA, 1416 bp, Escherichia coli
atgaaaatcaaaactcgcttcgcgccaagcccaacaggctatctgcacgttggcggcgcgcgtactgctctttactcctggctttttgcacgtaaccacggcggtgagttcgtgctgcgtattgaagacaccgatcttgagcgttccacgccggaagctatcgaagccattatggatggcatgaactggctgagcctggagtgggatgaaggtccgtactaccagaccaaacgttttgatcgctacaacgcggtgatcgatcagatgctggaagagggcactgcttataaatgctattgctctaaagagcgcctggaagcgctgcgcgaagagcaaatggcgaaaggtgagaagccgcgttatgacggtcgctgccgccacagccatgagcatcatgctgatgatgaaccgtgtgttgtacgttttgctaacccgcaggaaggttctgttgtttttgacgatcagatccgtggtccgatcgagttcagcaaccaggaactggacgatcttattatccgccgtaccgatggttccccaacctataacttctgtgtggttgtcgatgactgggatatggaaatcacccacgttatccgtggcgaagaccatatcaacaacacgccacgccagatcaacattcttaaggccctgaaagcgccggtgccggtttacgcgcacgtttctatgatcaatggcgatgacggtaaaaaactgtccaaacgtcacggggcagtcagcgtaatgcagtatcgtgatgacggttatttgccagaagcactgctgaactatctggtgcgtctgggctggtcccacggcgatcaggaaatcttcactcgtgaagagatgatcaaatacttcactttgaatgccgtcagcaaatctgccagtgcgttcaacaccgacaagctgctgtggctgaaccatcactacattaacgcgctgccgccggagtatgttgctactcacttacagtggcacattgagcaggaaaatatcgatacccgtaacggcccgcagctggctgatctggtgaaactgctgggcgaacgctgcaagacgctgaaagagatggcacagagctgccgttatttctacgaagattttgctgagttcgatgccgacgccgcgaaaaaacatctgcgtccggtagcgcgtcagccgctggaagtggttcgtgacaaactggccgcgattactgactggaccgctgaaaacgttcatcacgctattcaggcgacggcggatgagctggaagtgggtatgggtaaagttggtatgccgctgcgtgtcgccgtaaccggtgcggggcagtctccagcactggatgttaccgttcacgcaattggtaagacccgcagtatcgagcgtatcaacaaagcgctggattttattgctgaacgcgaaaatcagcagtaa

SEQ ID NO: 7199 - DNA, 1746 bp, Escherichia coli
atggctggacgaatcccacgcgtattcattaatgatctgctggcacgcactgacatcgtcgatctgatcgatgcccgtgtgaagctgaaaaagcagggcaagaatttccacgcgtgttgtccattccacaacgagaaaaccccgtccttcaccgttaacggtgagaaacagttttaccactgctttggatgtggcgcgcacggcaacgcgatcgacttcctgatgaactacgacaagctcgagttcgtcgaaacggtcgaagagctggcagcaatgcacaatcttgaagtgccatttgaagcaggcagcggccccagccagatcgagcgccatcagaggcaaacgctttatcagttgatggacggtctgaatacgttttaccaacaatctttacaacaacctgttgccacgtctgcgcgccagtatctggaaaaacgcggattaagccacgaggttatcgctcgctttgcgattggttttgcgccccccggctgggacaacgtcctgaagcggtttggcggcaatccagaaaatcgccagtcattgattgatgcggggatgttggtcactaacgatcagggacgcagttacgatcgtttccgcgagcgggtgatgttccccattcgcgataaacgcggtcgggtgattggttttggcgggcgcgtgctgggcaacgatacccccaaatacctgaactcgccggaaacagacattttccataaaggccgccagctttacggtctttatgaagcgcagcaggataacgctgaacccaatcgtctgcttgtggtcgaaggctatatggacgtggtggcgctggcgcaatacggcattaattacgccgttgcgtcgttaggtacgtcaaccaccgccgatcacatacaactgttgttccgcgcgaccaacaatgtcatttgctgttatgacggcgaccgtgcaggccgcgatgccgcctggcgagcgctggaaacggcgctgccttacatgacagacggccgtcagctacgctttatgtttttgcctgatggcgaagaccctgacacgctagtacgaaaagaaggtaaagaagcgtttgaagcgcggatggagcaggcgatgccactctccgcatttctgtttaacagtctgatgccgcaagttgatctgagtacccctgacgggcgcgcacgtttgagtacgctggcactaccattgatatcgcaagtgccgggcgaaacgctgcgaatatatcttcgtcaggaattaggcaacaaattaggcatacttgatgacagccagcttgaacgattaatgccaaaagcggcagagagcggcgtttctcgccctgttccgcagctaaaacgcacgaccatgcgtatacttatagggttgctggtgcaaaatccagaattagcgacgttggtcccgccgcttgagaatctggatgaaaataagctccctggacttggcttattcagagaactggtcaacacttgtctctcccagccaggtctgaccaccgggcaacttttagagcactatcgtggtacaaataatgctgccacccttgaaaaactgtcgatgtgggacgatatagcagataagaatattgctgagcaaaccttcaccgactcactcaaccatatgtttgattcgctgcttgaactgcgccaggaagagttaatcgctcgtgagcgcacgcatggtttaagcaacgaagaacgcctggagctctggacattaaaccaggagctggcgaaaaagtga

SEQ ID NO: 7200 - DNA, 300 bp, Escherichia coli
atgactgaactcgcgcaattacaggccagtgccgaacaggcagcggccttattgaaagcaatgagccaccctaaacgattgctgattctgtgcatgcttagcggttcccccggcaccagcgcgggagagctgacgcgcattaccggactgagtgcctctgcgacatcacagcatctcgctcgtatgcgggacgaagggcttatcgacagccaacgggatgcccaacgcattctatattccattaaaaatgaggcggtaaatgccattatcgccaccctgaaaaatgtctattgtccgtaa

SEQ ID NO: 7201 - DNA, 855 bp, Escherichia coli
atgaaacaaaaagtggttagcattggcgacatcaacgtagcaaatgacctgccgttcgtactgtttggcggtatgaacgtgttggaatctcgcgatctggcgatgcgcatttgcgagcactacgtaactgtgacccagaaactgggtatcccttacgtgttcaaagcctcttttgacaaagccaaccgctcctccatccactcttatcgtggaccgggcctggaagaagggatgaaaatcttccaggagttgaagcagacttttggcgtgaaaattatcaccgacgttcacgaaccaagtcaggcacagcccgttgctgatgtcgtggatgtgattcagttgccggcgtttcttgctcgccagactgacctggttgaagccatggcgaaaaccggtgcggtaattaacgtcaagaaaccacagtttgtcagcccgggacagatgggtaatatcgttgataaattcaaagaaggcggcaacgaaaaagtgattctttgcgatcgcggtgctaacttcggctatgacaacctggttgtcgatatgctgggcttcagcattatgaagaaagtgtctggtaactcgccggtgattttcgacgtgacccacgcactgcaatgccgcgatccgtttggcgcagcttccggtggtcgtcgtgctcaggtggctgagctggcacgagccggtatggcggtaggtctggcggggctgtttattgaagcgcatccggatccggaacatgcgaaatgtgatggtccatccgcgctgccgctggctaaactggaaccgttcctcaagcagatgaaagcgattgatgatctggtgaaaggtttcgaagaactggataccagcaagtaa

SEQ ID NO: 7202 - DNA, 354 bp, Escherichia coli
atgtcatttctgttacccatccaattgttcaaaattcttgctgatgaaacccgtctgggcatcgttttactgctcagcgaactgggagagttatgcgtctgcgatctctgcactgctctcgaccagtcgcagcccaagatctcccgccacctggcattgctgcgtgaaagcgggctattgctggaccgcaagcaaggtaagtgggttcattaccgcttatcaccgcatattccagcatgggcggcgaaaattattgatgaggcctggcgatgtgaacaggaaaaggttcaggcgattgtccgcaacctggctcgacaaaactgttccggggacagtaagaacatttgcagttaa

SEQ ID NO: 7203 - DNA, 1113 bp, Escherichia coli
atgaattactctcacgataactggtcagcaattctggcccatattggtaagcccgaagaactggatacttcggcacgtaatgccggggctctaacccgccgccgcgaaattcgtgatgctgcaactctgctacgtctggggctggcttacggccccggggggatgtcattacgtgaagtcactgcatgggctcagctccatgacgttgcaacattatctgacgtggctctcctgaagcggctgcggaatgccgccgactggtttggcatacttgccgcacaaacacttgctgtacgcgccgcagttacgggttgtacaagcggaaagagattgcgtcttgtcgatggaacagcaatcagtgcgcccgggggcggcagcgctgaatggcgactacatatgggatatgatcctcatacctgtcagttcactgattttgagctaaccgacagcagagacgctgaacggctggaccgatttgcgcaaacggcagacgagatacgcattgctgaccggggattcggttcgcgtcccgaatgtatccgctcacttgcttttggagaagctgattatatcgtccgggttcactggcgaggattgcgctggttaactgcagaaggaatgcgctttgacatgatgggttttctgcgcgggctggattgcggtaagaacggtgaaaccactgtaatgataggcaattcaggtaataaaaaagccggagctccctttccggcacgtctcattgccgtatcacttcctcccgaaaaagcattaatcagtaaaacccgactgctcagcgagaatcgtcgaaaaggacgagtagttcaggcggaaacgctggaagcagcgggccatgtgctattgctaacatcattaccggaagatgaatattcagcagagcaagtggctgattgttaccgtctgcgatggcaaattgaactggcttttaagcggctcaaaagtttgctgcacctggatgctttgcgtgcaaaggaacctgaactcgcgaaagcgtggatatttgctaatctactcgccgcatttttaattgacgacataatccagccatcgctggatttcccccccagaagtgccggatccgaaaagaagaactaa

SEQ ID NO: 7204 - DNA, 1119 bp, Escherichia coli
gtgccgatgaattactctcacgataactggtcagcaattctggcccatattggtaagcccgaagaactggatacttcggcacgtaatgccggggctctaacccgccgccgcgaaattcgtgatgctgcaactctgctacgtctggggctggcttacggccccggggggatgtcattacgtgaagtcactgcatgggctcagctccatgacgttgcaacattatctgacgtggctctcctgaagcggctgcggaatgccgccgactggtttggcatacttgccgcacaaacacttgctgtacgcgccgcagttacgggttgtacaagcggaaagagattgcgtcttgtcgatggaacagcaatcagtgcgcccgggggcggcagcgctgaatggcgactacatatgggatatgatcctcatacctgtcagttcactgattttgagctaaccgacagcagagacgctgaacggctggaccgatttgcgcaaacggcagacgagatacgcattgctgaccggggattcggttcgcgtcccgaatgtatccgctcacttgcttttggagaagctgattatatcgtccgggttcactggcgaggattgcgctggttaactgcagaaggaatgcgctttgacatgatgggttttctgcgcgggctggattgcggtaagaacggtgaaaccactgtaatgataggcaattcaggtaataaaaaagccggagctccctttccggcacgtctcattgccgtatcacttcctcccgaaaaagcattaatcagtaaaacccgactgctcagcgagaatcgtcgaaaaggacgagtagttcaggcggaaacgctggaagcagcgggccatgtgctattgctaacatcattaccggaagatgaatattcagcagagcaagtggctgattgttaccgtctgcgatggcaaattgaactggcttttaagcggctcaaaagtttgctgcacctggatgctttgcgtgcaaaggaacctgaactcgcgaaagcgtggatatttgctaatctactcgccgcatttttaattgacgacataatccagccatcgctggatttcccccccagaagtgccggatccgaaaagaagaactaa

SEQ ID NO: 7205 - DNA, 600 bp, Escherichia coli
gtgggaaagacggaggaaaatagcgtgcaacgtgaagatgtactgggagaagccctgaaattattagaattacaagggattgccaacaccacgctggagatggttgctgaacgtgtggattatccactggacgagctacgccgcttctggccagacaaagaggcaatcctctacgatgcgctgcgttatcttagccaacagatagatgtctggcgtcgtcagctgatgctggacgaaacgcaaaccgccgaacaaaagctgctggcacgttatcaggcgttatcggagtgcgttaaaaacaaccgctatccgggctgtctatttatcgctgcctgtacgttttatcccgatcctggccaccctattcatcaactggccgatcagcaaaaaagcgcggcctacgatttcacccacgaactgttaaccacactggaagttgacgatccggcgatggtagcaaagcagatggaactggtgctggaaggctgtttaagccgaatgctggtgaatcgtagccaggcggatgtcgacactgcacatcggctggcggaagatatcctgcgcttcgcccgctgccgccagggtggtgcattgacctga

SEQ ID NO: 7206 - DNA, 2505 bp, Escherichia coli
atgtcacaaactatcgacctgaccctggacggcctgtcctgcggtcactgcgttaaacgcgtgaaagaaagtcttgaacagcgtccggatgttgagcaggcggatgtgtctatcactgaagcgcacgttaccgggactgccagtgcagaacagctgatcgaaaccatcaaacaagcgggttatgacgcatctgtaagccacccaaaggctaaaccgctggcggagtcatcaatcccgtcggaagcactgacagcggtttctgaggcgcttccggcagcgaccgccgatgacgatgacagccagcagttgctgctgagcggcatgagctgcgccagctgtgtcacccgcgtacaaaatgcgctgcaaagcgtaccgggcgtcactcaggcacgggtaaacctggcggagcgtactgcgctggtgatgggcagtgcctccccacaagatttagtgcaggcggtggaaaaagcgggctacggcgcggaagcgattgaagatgacgctaaacgccgcgagcgccagcaagaaaccgccgtcgctacgatgaagcgcttccgctggcaggcaattgtcgcactggcggtgggtatcccggtgatggtctgggggatgatcggcgataacatgatggtcaccgctgacaaccgcagcctgtggttggttatcggcctgataaccctggcagtgatggttttcgccggcggccatttttaccgcagtgcatggaaaagcctgctgaacggtgcggcgacgatggatacgctggtggcgctgggtactggcgtggcgtggctctattcgatgagcgtcaacctgtggccgcagtggttcccgatggaagcgcgacatctttattacgaagccagcgcgatgattatcggtctgatcaatctcggccatatgctggaagcgcgcgcacgccagcgttcttctaaggcgctggaaaagttactcgatttaaccccgccgacggcacgcctggttactgacgaaggtgaaaaaagcgtgcctctggcagaagtgcagccaggtatgttgctgcgcctgacgaccggcgatcgcgtgccggtagatggcgagattacccagggcgaagcatggctggatgaagcgatgctgacgggcgaaccaatcccgcagcaaaaaggcgaaggcgatagcgtccatgccgggacagtggtacaggacggcagtgtgctgtttcgtgccagtgcggttggcagccatactacgctgtcacgaatcattcgcatggtgcgccaggcccagagcagcaagccagaaatcggtcagctggcggataaaatctcagccgtatttgtgccggtagtggtggttattgcgcttgtcagtgcggcaatctggtatttctttggtccggcaccgcagattgtctataccctggtgattgccaccacggtactgattattgcctgtccgtgtgcgctggggctggcgacgccgatgtcgattatttccggcgtcgggcgggcggctgagtttggcgtgctggtgcgggacgctgacgcgctgcaacgcgccagtacactcgacactgtagtgttcgataaaaccgggacgctgactgaagggaagccgcaggttgtcgcagtgaaaacatttgctgatgttgatgaagcgcaggcattgcgtctggcggcggcactggagcaaggttccagccatccgctggcacgagcgatcctcgataaagcaggtgatatgcagctaccgcaggtcaacggtttccgcacattgcgcgggctgggcgtgagcggtgaagctgaaggtcatgcgttattgctgggcaatcaggcgctgttaaatgagcaacaggttggtaccaaagctatcgaagcggagattactgctcaggcatcgcaaggggcaacgcctgtgctgctggcggttgacgggaaagcggtagccctgctggcagtacgcgatccgttgcgtagtgatagcgtggcggcgctgcaacgcctgcataaagcgggatatcgtctggtgatgttgaccggggataacccaaccaccgccaatgcgatcgccaaagaagcagggattgatgaggtgatcgccggggtgctgccggacggtaaagccgaagcgatcaaacatctgcaaagtgaaggacgtcaggtggcaatggtgggcgacggcattaacgacgcgccagcgctggctcaggcggatgtcggcattgcgatgggtggcggcagtgatgttgccattgaaaccgcggcgattaccctgatgcgccatagcctgatgggcgttgcggatgcgctcgctatttcccgcgcaacgctgcacaacatgaagcagaacctgctcggtgcgtttatctacaacagtatcggtattccggtcgccgccggtattttgtggccgttcactggaacactgcttaacccggtagttgccggagcggcaatggcgctctcgtcgattaccgtagtgagtaacgccaaccggttgctgcggtttaaaccgaaggaataa

SEQ ID NO: 7207 - DNA, 1263 bp, Escherichia coli
atggcaaccgtttttatttaccgaaaggagcatatgactttttctttaatcacggatgcctggatttgcccggtaaccaataaaatcctggatacggcttttaaaggcttaaccccttatctgcctacccatatttcgttcgagcatcttaccctggcgcaatatgacacttttgtcgcgcagaaagtcacaatgccggaaatctggaagctggatcgttcacaggaagactacgcagagggtctggcaaaagcacgcgactgggtcagccatgatccgctgatcgcacaattgcggtcggaaaacgtctggacagacattaacgatcgtgtcgtggaaggcggcttctactatcgtactgccgagcactctgcccagcagtcgtcagaacgtctgcaaagctatgaaaagatgttcaagaatgggcaactaaatgttctcaactgttccaccaccatggaaatgggggttgataccgatcgcgtgatgacgctggcctctcgcagccagcaggcaacgattccggggccggagtggcacctgaatgacgaactggtggtgcgtagtctcggttataaaacggtagaactgaacgagtttattctgccggctaaagccaccaacgctgtcgagcgggtcaaagacattcagatccacaaacagttgaatggaccactgtcgcagtttgggcaacgcttctgggacgtgctgtttaacgaccatgaagaagcgcagtcactgatgaataacacgcgaattaccggcgttcactataccgatcgctatctgcaaaacccggttgcgctggcgttgttgggatcaattctgagaccgctaaaaacaaagctgaccgatggcgctgaagtgacgctggatacgctatttaaagataaagatcgccccggtaaccggcctttccatgactggatgagcatagcggattttcaggatttcgctgatcagtggtttgctgctgcgctgggcaggccggtagaactgacggtgttcgactcgccgcgcgatatccctcaccatcgtaaactgacggtgacttttgaggatggtcaggtattgaagatccgcttcgatcaggggatgggctactggcgcatcaacttttcatcgcaatggcattactttgatttccgcgatgacgtttctttccagttagtcaaaatggctcaggcctgcaaggaagggaatgtcgccaacagcgaagagagttgggcaacggatgtgctggtggaggtgatcgcctcctga

SEQ ID NO: 7208 - DNA, 1191 bp, Escherichia coli
atgacaacaaacactgtttcccgcaaagtggcgtggctacgggtcgttacgctggcagtcgccgccttcatcttcaacaccaccgaatttgtccctgttggcctgctctctgacattgcgcaaagttttcacatgcaaaccgctcaggtcggcatcatgttgaccatttacgcatgggtagtagcgctaatgtcattgccttttatgttaatgaccagtcaggttgaacggcgcaaattactgatctgcctgtttgtggtgtttattgccagccacgtactgtcgtttttgtcgtggagctttaccgttctggtgatcagtcgcattggtgtggcttttgcacatgcgattttctggtcgattacggcgtctctggcgatccgtatggctccggccgggaagcgagcacaggcattgagtttaattgccaccggtacagcactggcgatggtcttaggtttacctctcgggcgcattgtgggccagtatttcggttggcgaatgaccttcttcgcgattggtattggggcgcttatcacccttttgtgcctgattaagttacttcccttactgcccagtgagcattccggttcactgaaaagcctcccgctattgttccgccgcccggcattgatgagcatttatttgttaactgtggtggttgtcaccgcccattacacggcatacagctatatcgagccttttgtacaaaacattgcgggattcagcgccaactttgccacggcattactgttattactcggtggtgcgggcattattggcagcgtgattttcggtaaactgggtaatcagtatgcgtctgcgttggtgagtacggcgattgcgctgttgctggtgtgcctggcattgctgttacctgcggcgaacagtgaaatacacctcggggtgctgagtattttctgggggatcgcgatgatgatcatcgggcttggtatgcaggttaaagtgctggcgctggcaccagatgctaccgacgtcgcgatggcgctattctccggcatatttaatattggaatcggggcgggtgcgttggtaggtaatcaggtgagtttgcactggtcaatgtcgatgattggttatgtgggcgcggtgcctgcttttgccgcgttaatttggtcaatcattatatttcgccgctggccagtgacactcgaagaacagacgcaatag

SEQ ID NO: 7209 - DNA, 834 bp, Escherichia coli
atggataatgctgttgatcgccacgttttttatatttctgatggtacggcaataactgcggaggtattaggacacgcagtaatgtcacaatttcccgtcactatcagcagcatcacgctgccgtttgtcgaaaatgagagccgtgcacgggcagtgaaggatcagattgacgcaatttatcaccagacaggcgtgcgcccgctggtcttctactccatcgtgttgccggagattcgcgccatcatcttgcaaagtgaaggcttttgccaggatatcgttcaggcgctggttgccccgctacaacaagagatgaaactggatccaacgccgattgctcatcgtacccatggccttaaccctaataatctcaataaatatgatgcgcgcattgcggcgattgattacaccctcgcccacgatgacggcatttcgttgcgcaatctggaccaggctcaggtgatcctgctcggtgtttctcgctgtggtaaaacccccaccagtctgtatctggcaatgcagtttggtatccgcgcggcaaactacccctttattgccgacgatatggataatctggtgctacccgcgtcgctcaaaccgcttcagcataaattgttcggcctgactatcgacccggaacgtctggcggcgattcgcgaggaacgtcgggagaacagtcgctatgcctcgcttcgtcagtgcaggatggaagtcgcggaagtggaagccttgtaccgtaaaaatcagatcccgtggattaacagtaccaattattcggtagaagagattgccaccaagatcctcgatatcatgggccttagtcgccgaatgtactag

SEQ ID NO: 7210 - DNA, 1344 bp, Escherichia coli
gtgagcaatctgtcgctcgatttttcggataatacttttcaacctctggccgcgcgtatgcggccagaaaatttagcacagtatatcggccagcaacatttgctggctgcggggaagccgttgccgcgcgctatcgaagccgggcatttacattctatgatcctctgggggccgccgggtaccggcaaaacaactctcgctgaagtgattgcccgctatgcgaacgctgatgtggaacgtatttctgccgtcacctctggcgtgaaagagattcgcgaggcgatcgagcgcgcccggcaaaaccgcaatgcaggtcgccgcactattctttttgttgacgaagttcaccgtttcaacaaaagccagcaggatgcatttctgccacatattgaagacggcaccatcacttttattggcgcaaccactgaaaacccgtcgtttgagcttaattcggcactgctttcccgtgcccgtgtctatctgttgaaatccctgagtacagaggatattgagcaagtactaactcaggcgatggaagacaaaacccgtggctatggtggtcaggatattgttctgccagatgaaacacgacgcgccattgctgaactggtgaatggcgacgcgcgccgggcgttaaatacgctggaaatgatggcggatatggccgaagtcgatgatagcggtaagcgggtcctgaagcctgaattactgaccgaaatcgccggtgaacgtagcgcccgctttgataacaaaggcgatcgcttttacgatctgatttccgcactgcataagtcggtacgtggtagcgcacccgatgcggcgctgtactggtatgcgcgaattattaccgctggtggcgatccgttatatgtcgcgcgtcgctgtctggcgattgcgtctgaagacgtcggtaatgccgatccacgggcgatgcaggtggcaattgcggcctgggattgctttactcgcgttggcccggcggaaggtgaacgcgccattgctcaggcgattgtttacctggcctgcgcgccaaaaagcaacgctgtctacactgcgtttaaagccgcgctggccgatgctcgcgaacgcccggattatgacgtgccggttcatttgcgtaatgcgccgacgaaattaatgaaggaaatgggctacgggcaggaatatcgttacgctcatgatgaagcaaacgcttatgctgccggtgaggtttacttcccgccggaaatagcacaaacacgctattatttcccgacaaacaggggccttgaaggcaagattggcgaaaagctcgcctggctggctgaacaggatcaaaatagccccataaaacgctaccgttaa

SEQ ID NO: 7211 - DNA, 1407 bp, Klebsiella pneumoniae
atgcaaagcacaacacaacaacaaggtgggcagctgaagcgcaccatgaaaacgcgccatctgatcatgctgtcgctcggcggcgtgattggcaccggcttattctttaataccggctatatcatctccaccaccggcgcggccgggacgctgctggcgtatctgattggcgccctggtggtctggctggtgatgcagtgccttggcgaactgtcggtggcgatgccagagaccggcgccttccacgtttacgcggcgcgctatcttggcccggcgacgggctataccgtggcgtggctctactggctaacgtggacggtggcgctggggtcgagcttcaccgcggcgggattctgcatgcagtactggttcccgcaggtgccggtctggatctggtgcgtggtgttctgcgcagtgatcttcggccttaacatcatttcgacgcgcttcttcgccgaaggcgagttctggttctcgctggtgaaagtgatcaccatcgtcgcgtttattattctcggcggcgcggccattttcggcatcattccgatgcaggatggctccccggcgccgggcctgcgcaatatcaccgccgaaggctggttcccgcacggcggcctgccgatcctgatgaccatggtggcggtgaacttcgccttctccgggacggagcttatcggcattgccgccggagagacggaaaacccgcataaggttattccggttgccatccgcaccaccatcgcccggctgattattttctttatcggcaccgtgtttgtgctggcggcgctgatcccgatgcagcaggcgggagtggagaaaagccccttcgtgctggtgtttgagaaggtgggcatcccttatgcggcggacatgttcaacttcgtgatcctgacggcgatcctgtcggcggctaactccggcctgtacgcttccgggcggatgctgtggtcgctgtcgaacgagaagacgctgccggcctgctttgccaaagtcaataaacggggcgtgccggtgaccgccctgtcggtgagtatgctgggcggcgtgctggcgctgttctccagcgtggtggcgccagatacggtgtttgtcgcgctgtcggcgatctccggttttgcggtggtggcggtgtggttgagcatctgcgcctcgcactttatgttccgccgccgccatctgcagcagggtaaggcgctgagcgatctccagtatcgcgctccctggtatccggtggtgcccgttctgggctttgtgctgtgcctggtggcctgcgtgggcctcgcttttgacccgagccagagaattgcgctgtggtgcgggatcccctttgtggccctgtgctatggtgcctggtatcttactcgttcacggaatatgactcaggagccccaacatgtcgcagac

SEQ ID NO: 7212 - DNA, 1486 bp, Klebsiella pneumoniae
atgaacaaagaaattttggctgttgttgaagccgtttccaacgaaaaagcgctgccgcgtgagaaaattttcgaagcgctggaaagcgcgctggcaacggccaccaagaaaaaatacgaacaagagatcgacgttcgcgttgaaatcgaccgcaagagcggcgatttcgataccttccgtcgttggctggttgtagaagaagtcacccagccgacgcgcgagatcacgctggaagcagcgcgtttcgaagatgaaagcatgaacgtcggcgactatgtcgaagatcagatcgaatctgttaccttcgaccgtatcaccacccagaccgctaagcaggttatcgtgcagaaagtccgcgaagccgagcgcgcgatggtggtcgatcagttccgcgagcacgaaggtgagatcatcaccggcgtggtgaaaaaagtgaaccgcgacaatatcacactggatctgggtaacaacgctgaagccgtgatcctgcgtgaagatatgctgccgcgtgaaaacttccgtccgggcgaccgcattcgcggcgtactgtacgctgtccgtccggaagcgcgtggcccagctgttcgtcacccgttccaaacctgagatgctgatcgaactgttccgcatcgaagtgccggaaatcggtgaagaagtgctggagatcaaagcggcggctcgcgatccgggctctcgtgccaaaatcgcggtgaaaaccaacgacaagcgcatcgacccggttggcgcttgcgtcggtatgcgcggtgcgcgtgtgcaggccgtgtcgactgagctgggtggtgaacgcatcgatatcgtcctgtgggatgataacccggcgcagttcgtgattaacgctatggcgccggcagacgtcgcgtccatcgtggtggatgaagataaacacaccatggatatcgcggtagaagcgggcaacctggcgcaggcgatcggccgtaacggtcagaacgtccgcctggcttcacagctcagcggctgggaactcaacgtcatgaccgttgacgatctgcaggctaagcaccaggcggaagcgcatgccgctatcgataccttcaccaaatatcttgatattgatgaagatttcgcgacagtgctggttgaagaaggcttctcctcgctggaagagctggcctatgtgccgatgaaagaactgctggaaatcgacggtctggatgaagccaccgttgaagcacttcgtgagcgtgcgaaaaacgcactgactacgctggcgctggctcaggaagaaagcctgggagataacaaacctgccgatgatctgttgaatctcgaaggtctggatcgtgccctggcattcaaactggctgcccgtggtgtttgtacgctggaagatctcgccgagcagggcgttgatgacctggctgatatcgaagggatgaccgacgagaaagctggcgagctcatcatggccgctcgcaacatttgttggttcggcgacgaagcgtaa

SEQ ID NO: 7213 - DNA, 2688 bp, Klebsiella pneumoniae
atgacagatgtgactattaaagcgctggcctcagagattcagacctctgtggatcgcctgatacagcaatttgctgacgcaggcatccgcaaatcggctgatgattctgtgacctcgcaagagaaacaaactttgttgacgcacctgaaccgtgaacacggctcggcgccagacaagctgacgttacagcgtaagacgcgcagtacgttgaatattccaggtaccggtggaaagagtaaatcggtacaaatcgaagtccgcaagaaacgcacctttgtgaaacgcgatccgcaagaggctgaacgcctggccgcggaagagcaggcgcagcgtgaagcggaagagcaggcccgtcgtgaagctgaagaagcagcgaaacgcgaggcgcaattaaaagctgaacgtgaggccgcagaacaagctaaacgtgaagtcgctgataaagcgaaacgtgaagctgcggaaaaagacaaagtgagcaatcaacataccgacgaaatgaccaaaaccgcccaggctgaaaagatccgtcgcgagaacgaagccgcggaattgaagcgcaaatcggaagaagaagcacgccgcaaacttgaagaagaagcgcgccgtgtagcggaagaagcacgccgtatggctgaagaaaacgaaaaaaattggtctgaaacctcagacagcccggaagatagcagcgactatcacgtcaccacatcacagcatgctcgtcaggctgaagatgataacgatcgtgaagtcgaaggcggtcgcggccgtagccgtagcagcaaagcggctcgtccggcgaagaaaggcaacaaacacgctgaatcgaaagctgatcgtgaagaagcccgcgcggccgttcgcggcggtaaaggcggtaagcaccgtaaaggttccgctctgcagcagggcttccagaagccagcgcaggccgttaaccgtgacgtcgtaatcggcgaaaccatcaccgttggcgaactggctaacaagatggcggtgaaaggttctcaggtcatcaaagcgatgatgaagctgggcgccatggcgaccatcaaccaggtcatcgaccaggaaaccgcacagctggttgccgaagagatgggccacaaagttatcctgcgtcgtgaaaacgaactggaagaagccgtaatgagcgaccgtgacaccggcgcggcggctgaaccgcgcgcaccggtcgtgaccattatgggtcacgttgaccacggtaaaacctcgctgctggactacattcgttctaccaaggttgcctccggcgaagcgggtggtattacccagcacatcggtgcttaccacgtcgaaaccgacaacggcatgatcaccttcctggataccccgggccacgccgcgtttacctccatgcgtgctcgtggcgcgcaggcgacggatatcgtggctctggtggtggcggcagacgacggcgtgatgccggagactatcgaagctatccagcacgctaaagcggcgcaggtaccggtggtagtggcggtgaacaagatcgataagccagaagccgatccggatcgcgtgaagaacgaactgtcccagtacggcatcctgccggaagagtggggcggcgagagccagttcgtccacgtttccgcgaaagcgggtaccggcatcgacgacctgctggacgcgatcctgctgcaggctgaagttcttgagctgaaagcggtccgcaacggtatggcgagcggcgcggtcatcgaatccttccttgataaaggtcgtggtccggtagctaccgttctggttcgcgaaggtactctgcacaagggcgacattgttctgtgcggcttcgaatatggccgtgtgcgcgcgatgcgtgacgaactgggtcgcgaagtgctggaagcgggtccgtccattccggtggaaatcctcggcctgtccggtgtgccggctgccggtgatgaagtgaccgtagtgcgtgacgagaaaaaagcgcgtgaagtggcgctgtatcgtcagggcaaattccgtgaagttaagctggcgcgtcagcagaaatctaaactggaaaacatgttcgctaacatgaccgaaggcgaagttcacgaagtgaacatcgtactgaaagcggacgtacagggttctgtcgaagcgatttccgattccttactgaaactgtctaccgacgaagtgaaagtgaagatcatcggttccggcgtaggtggtatcaccgaaaccgacgctaccctggcagcagcatccaacgcgattctggttggcttcaacgttcgtgccgatgcctctgcgcgtaaagttatcgaagcggaaagcctggatctgcgttactactccgtcatctataacctgatcgacgaagtgaaagcggcgatgagcggcatgctgtctccggaactgaaacagcagatcatcggtctggctgaagtgcgtgatgtcttcaaatcgccgaaattcggcgccatcgcgggctgtatggttaccgaagggacgatcaaacgtcacaacccaatccgcgttctgcgtgacaacgtggttatctatgaaggcgagctggaatccctgcgccgcttcaaagatgacgttaacgaagtccgtaacggcatggaatgtggtatcggtgtgaagaactacaacgacgttcgcgttggcgatatgatcgaagtgttcgaaatcatcgaaatccagcgtagcatcgat

SEQ ID NO: 7214 - DNA, 358 bp, Klebsiella pneumoniae
atgacagatgtgactattaaagcgctggcctcagagattcagacctctgtggatcgcctgatacagcaatttgctgacgcaggcatccgcaaatcggctgatgattctgtgacctcgcaagagaaacaaactttgttgacgcacctgaaccgtgaacacggctcggcgccagacaagctgacgttacagcgtaagacgcgcagtacgttgaatattccaggtaccggtggaaagagtaaatcggtacaaatcgaagtccgcaagaaacgcacctttgtgaaacgcgatccgcaagaggctgaacgcctggccgcggaagagcaggcgcacgtgaaacggaagagcaggcccgtcgtga

SEQ ID NO: 7215 - DNA, 828 bp, Klebsiella pneumoniae
atgtttgtcccatttctcattatgttacgcgaaggcctggaggcggcgctgattgtcagcctgatcgccagctatctgaaacgcacccagcgcggcaactggattggcgtgatgtggattggcgtgatcctcgcggcggcgctgtgtcttggcttaggcatctttatcaacgaaaccaccggtgaatttcctcagcgtgaacaggagctgttcgaagggatcgtcgcggtcattgcggtggtgatcctgacgtggatggtcttctggatgcgcaatgtctcacgcaacgtcaagcagcagctggagcaggccgtggacaaggcgctgcagcgcggtaatcaccacggctgggcgctggtgatgatggtctttttcgcggtcgcccgtgaggggctggagtcggtcttctttctgctggcggccttccagcaggatgtcggcatctggccgccgctgggggcgctgctgggtctggccaccgctatcgtgctgggcttcctgatctactggggcggtatccgccttaaccttggcgtgttcttcaaatggaccagcctgtttattctgctggtggccgctggcctggccgcgggggcgatccgcgccttccacgaggcgggcctgtggaacctgttccaggataccgccttcgatctgagcaacgtgctgtcgacgcatacgctgttcggcacgctgctggaagggatcttcggctatcaggagacgccgagcgtcagcgaagtggctgtctatctgctttatctgatcccggcgctggtgctgtttgccctgccgccgcggaataataccactgcctcgcgggctgcc

SEQ ID NO: 7216 - DNA, 1125 bp, Klebsiella pneumoniae
atgaaatttgaactggataccaccgacggtcgcgcccgccgcggtcgcctggtgtttgagcgcggcgtggtggaaacaccggcctttatgcccgttggcacctacggcaccgtcaaagggatgacgccggaagaggtggaagccaccggcgcgcagattattctcggcaacaccttccacctgtggctgcgcccgggtcaggagatcatgaagctgcacggcgatctgcacgattttatgcagtggaaaggaccgatcctgaccgactccggcggtttccaggtgttcagccttggcgatatccgtaagatcaccgagcagggcgtccacttccgcaatccgatcaacggcgatccgattttcctcgatccggaaaaatcgatggagattcagtacgatctcggctctgacatcgtgatgatcttcgacgaatgtacgccgtacccggcggactgggattacgccaagcgctcaatggagatgtctctgcgctgggcgaagcgcagccgcgaccgtttcgatagccttggcaataaaaatgcgctgttcggcattattcagggtagcgtttacgaagatttacgcgatatctcggttaaaggtctggtagagattggctttgatggctacgctgtcggcggtttggcggttggtgagccgaaggaagacatgcaccgtattctggagcacgtctgcccgcagatcccggccgataaaccacgatacctgatgggcgtcgggaagccggaagatctggtggaaggggtacgtcgcggtatcgatatgttcgactgcgtcatgccgacgcgcaacgcgcgtaacggccacctgttcgtcaccgacggcgtggtgaaaatccgcaacgcgaagcacaaaagcgataccgcgccgctggacgccgagtgtgattgctatacatgtcgcaattattcacgcgcttacttgcatcacctcgaccgttgcaacgaaatattgggcgcgcgtctcaataccattcataacctgcgctactatcagcgtttaatggctggtttacgcaaggctatcgaagagggtaaattagagagcttcgtgaccgatttttaccaacgtcaggggcgcaccgtgcctcctttgaacgttgat

SEQ ID NO: 7217 - DNA, 376 bp, Klebsiella pneumoniae
gctgaagctccaatgtgctggaaagatgcggtgcctggcggcgaaagcgcgcggcaaccgcgtgatcgcggtgggcaccacctcggtacgttcgctggagagcgcggcgcaggcggcgaaagacgcgctgatcgcgccgttcttcgacgatacgcagattttcatctacccgggttatcagtaccaggtgatcgatgcgctggtgactaacttccatctccctgaatccacactgattatgctggtgtcggcgtttgcgggttatcagcacaccatgaacgcctataaggtggcggttgagcagaaatatcgcttttttagctacggggatgcgatgtttatcacgtacaatccgcaggctatttctgagcgtccc

SEQ ID NO: 7218 - DNA, 1062 bp, Klebsiella pneumoniae
atgcgcgttaccgattttgcttttgaactacccgaatctctgatcgcccactatccgatgcctgagcgcagtagctgtcgcttgctctccctggacgggccgacgggcgcgctgacgcatggcaccttcaccgacattctcgataagcttaatccaggcgatctgctggtgtttaacaacacccgggtgatcccggcgcgtctgttcggccgcaaggccagcggcggcaagattgaagtgctggtggagaggatgctggatgataagcgcattctggcccatattcgcgcctcgaaagcgccgaagccgggcgccgaactgctgctgggcgatgacgaaagtattaaggccacgatgctggcgcgccacggcgcgctgtttgaagtggagtttaacgacgagcgcccggtgctggagatccttaacgggatcggccatatgccgctgccgccctatattgaccgcccggacgaagacgccgaccgcgagctctatcaaaccgtctatggcaccaggccgggcgcggtagccgccccgaccgccggtttgcatttcgacgaaccgctgctggacaaactgcgcgccaaaggcgttgagatggcgtttgtcaccctgcatgtgggcgcgggcaccttccagccggtgcgcgtcgacagcattgaagagcacaccatgcactccgaatatgccgaagtgccgcaggaggtggtcgatgcggtgctggcggcgaaagcgcgcggcaaccgcgtgatcgcggtgggcaccacctcggtacgttcgctggagagcgcggcgcaggcggcgaaagacgcgctgatcgcgccgttcttcgacgatacgcagattttcatctacccgggttatcagtaccaggtgatcgatgcgctggtgactaacttccatctccctgaatccacactgattatgctggtgtcggcgtttgcgggttatcagcacaccatgaacgcctataaggtggcggttgagcagaaatatcgcttttttagctacggggatgcgatgtttatcacgtacaatccgcaggctatttctgagcgtccc

SEQ ID NO: 7219 - DNA, 615 bp, Klebsiella pneumoniae
atgaactcttataaacacccgctgcgcgtcggcgtcggcggcccggtcggctccggtaaaaccgctctgctggaagcactgtgtaaagcgatgcgcgatacctggcagctggcggtggtcactaacgacatctataccaaagaagatcagcgcatcctcaccgaagcgggcgcgctggcgcctgaacgcatcgtcggtgtggaaaccggcggctgcccgcatacggcgatccgcgaagatgcctcaatgaacctcgccgccgtggaagcgctgagtgaaaagttcggtaacctcgaccttatcttcgtggaaagcggcggcgataacctgagcgccaccttcagcccagagctggcggatctgaccatctacgtcatcgatgtggccgaaggggagaagatcccgcgcaaaggcggaccggggatcaccaaatccgatttcctggtgatcaataaaaccgaccttgccccctatgtgggcgcgtcgctggaggtgatggcgagcgatacccagcgtatgcgcggcgatcgcccatggaccttcaccaatctgaagcagggcgacggcctgagcaccattatcgccttcctcgaagacaaaggcatgcttggcaaa

SEQ ID NO: 7220 - DNA, 1605 bp, Klebsiella pneumoniae
atgtcatcactggatcttaaccctgaattacccgcgacaacgcggacttccggctcccgggaaaccttagaagattacaccttacgttacgccccgctgagctttcgccgctggggtccgggcgtcgtcgcggtcaccgcgctgggcggcatcgcctatctggccgacttttccatcggcgccagcatcggtatggcctggggcaccagcaacgccatctattcgatcctggtggcggcgctggtgatcttcctcaccggcattccgctggcgatcactgccgcgcgctacaacattgaccttgacctgatcacccgcagcgccggcttcggctatttcggctcggtgatcaccagcattatttttgccggcttcacctttatcttcttcgccctcgaaggctcgatcatggcccagggcctgctggtgggcctcgggatcccgctgtggatgggatatctgatcgccaccctgatggtgctcccgctggtggtctatggcatgaaagccctgacccgcctgcaggtgtggaccacgccgctgtggctggtgctgatggtggtgccggtggtgtggctgattgtcaaagatccgcagctggtggacggcttcctgcatttcgccggtaaaaacagcgcgtcgacggtggatattaccgccatcatgctcggcgccggggtatgcctgtcgctgatcatgcagattggcgagcaaattgattacctgcgctttatgccgcctaagaccgcggagaatcgtaaaagctggtggctggcggtcttttccgccggcccgggctgggtggtgttaggggcgatcaaacagatcatcggcgccttcctcggcttctatctgttgacccgtttcccggcggtgcacaataccgaaccggtgcagcagttcgtcagcgtcttcgataacctggtgcccggctggctggccctgacgctggcggtggtgctggtggtgatctcgcagatcaaaattaacgtcaccaatgcctactccggctcgctggcgtggaccagcgcctggacccgcaccaccaaacgctatccgggacggattatttttgtggtggtcaacctggcgattgccctggcgctgatggagggcgatatgttcagcgccctgtcgtggatcctcggcttttactccaacttcgccatcgcctgggtcgtggtggtggcgaccgacatcacctttaataaaggcttgctcaagctggcgccggcgcagccggagtatcgtcgcggcatgatctacaacgttaacccggtgggcgtggtctcctttggtctggccgccgggctgtcgatctgcgccttcttcggtctgctgggggcgacgctggcgccgttctcgccgctgattgcgctggtcgttgcctttgtcatgaccccgctgatggggctccttacccgcgggcgctactatattaagcaggtggatgacggcatcgccgagccgcgctatgacgcggcggggaacgcctccaccaccgtgtatcaatgcgttagctgtgaggaagagtacgagcgcccggacgtgatgcactcgcacaagcatcagggagccatctgctcgctgtgtaaaagtatggag

SEQ ID NO: 7221 - DNA, 1017 bp, Klebsiella pneumoniae
atggcgatttttgatggtcacaatgacctgctgctgaatctctggcttcaccatcgcgaggatccggtgagcgccttctttgccgggattgagaacggccatctcgactatccgcgcatgctgcaaggcggatttgccggcgggctattcgcgctattcgtgccaccgcaggaatatattgcccgtatgacgccgcaatacgccagccaacgatgggatccgatcgatatcctctggcagcaactggccatcctgaagcaacttatcgcgcactccgctggacgcttgagattgtgtctgagcgcggcggatatcgaacgctgccgcgaggataaggtactggcgatggtggcgcatattgagggtgccggaggttttgatggcgagggccgcgacctgcaggccttttatgccgccggggtccgcagcattggtccgttctggaatattgcgaaccgcttcggcagcggcgttaacggttcgtttcccggtagcccggacactgggcctggactgacagcggcaggtatcgatctgattaagcaggccaatgccttgaagatgcagattgacgtgtctcatatgaatgaaaaagcgttctgggataccgcccatcactcaacgtcaccgctggtggccacccactccaatgcccacgccctgtgcccgcagccgcgcaatctgaccgaccagcaactgcgggcgatccgcgacagcggcggcgtggtgggcgtcaatttcggcaatgctttcctgcgcgccgacggccggcgcgatagcgacacgcccttaaccaccattgtccggcatatcgactatcttattaacataatgggtgaggatcatgtggctcttggctcggattttgacggcatcaccctgccggacgagctgggcgatgtggccggcttaccgcggcttatcaatacgttgcgcgctagcggctatgatcaattggtgctggataagctgctgtggcgtaactggctacgggtattaaaaaatgtttggcaacaa

SEQ ID NO: 7222 - DNA, 1281 bp, Klebsiella pneumoniae
atgtcgcttcgttctctgcgggctttatgtctgaccagcttttttattgccgacgtgcgcgacggcctcggcccgtttctggggatctttctcacccagcgtcactggcaggcggaggacattggcctgctgatgtccgtcggcggtatcgccggcctgctggcgaccctgtccgccggcttcatcaccgacagctcgcggcataagcgcttgctgctggccggggtctgcctggtgatcaccctcaccaccctgctgctctggtttagtcagaagaccagcgtggtcgccctctcgcaagtcgccagcggcatctgcgcggcctttgtcggaccgctgatcgccgggattaccctcggtcttgccagacagcgcggctttagcgcccagatggggaaaaacgaagccttcaaccacgcgggaaatttcttcaccgcgctaatggccggggctatcgcctggtactggggcatcggcggcattttcattctgatggcctgtaccacgctgcttaccctggtcgccctgctggcgatccgcggcggcgatatcgacgatgatgccgcccgcggcatcgaagcggcatccacgccctccctgccggggtttgccatcctgttccgccatacgccgctgctgatcgccggcgtaaccctgatgctgttccatctcgccaatgccgcactgttgccgatgctgagcatgcggatcgccgccgcgccgggacacctcaatcccggactgtttgccgccgccacggtgattatttcgcaggtggtgatgatcccggtggccatccgggtcgccggcagcatcgacaaatacggttactggcgatgcatcctgctggcgctgctgatcatgcccatccgggcggcgctggcggcgtccagcgacgccccggcgatgatggtcccggtgcaaattcttgatggcctggcggcagggattttgggggtggcggtgcccagctttatcgtctcgctgctgcgcggcagcgggcacgttaacgctggacagagcgtggtgatgctgatgcagggcgccggggcggcaatgagtccggcgttaaccgggtctatcgccgggcactactcctatgccaccgccttcggcgtgctgagcgttatcgcgattgtcgccctgatggtatggtggcgcagcgtccgctgctcaccgtctccgcgtcacgccagtcggcgagagcgggcagtaactacggcacagcgacctggggagagaggaaatcgccagccgggcagcagccccctgctgcccgcc

SEQ ID NO: 7223 - DNA, 570 bp, Klebsiella pneumoniae
atgtccgttcagcctgtcgaaataagtaaggcctatcgtttattgcaggtcgggtccaccaccatgatttccgcaaaatatgatggcgtcgaaaatgtcatgtcagccgcctgggttgggctggcaggcgagcgaaaagtggtggcctatattggcacccaggctttcactcgtcagctggtggaaaagagcggctatttcgtggtgcagatccccgtagtcagccagatggcaaccgtcctctacgctggcgggcgcagctctgccgacgcgccggataaaaatgacaccatccccttcttttatcagccggaatttgatcttcctcttgtggcaggctgtgcgggctggctggtgtgcaaagtgatgccctacccggacattcagcagcaacacaatctgtttatgggcgatatcgtcgccgcctggagcgatgaccgggtattccgcaacggacactggatttttgatgatgcgccggacgagctacggaccgttcactatgtcgcaggcgggcagttctatgccatcggcaaaggcagcaaattcgatcatgggccgggtcaggac

SEQ ID NO: 7224 - DNA, 750 bp, Klebsiella pneumoniae
gtgacgccgatgcttgactggcacggcgtcctgagcgggcagccgttgcaatggattatctctggttttctcaccaccgtctgggtcagcgtcgccgggatcctgctcgccaccctgctggcggtcctgctgctggccctgcgcctcggcggcggacgcgcggggcgcggactggtggccgcgtgggtctcgttgtttcgcaataccccgctgctggtccagctgctgttctggtactttgccgcctggaacctgctgccgctggcggtgaaggaggtggtgaacgacgaacacgcctggtccattctgccgggcaacgtctggtggctgacgccggagttcctctgctcaatgtgggggctgggggtctttacctccgcctttctggtggaagagatcgcctccggactgcgcgccgtcagccacgggcagcgggaagccgcgctgtcgcagggctttacgccgtggcaggagctgcgctttatcctcctgccgcagggactggccaacgcctggcagccgattgtcggccagtatctcaacctgatgaaactctcatcgctggccagcggcatcggctttgcggaactgacctatcaggtgcggcagattgagagctataacgcgcacgccctggaggcgtttgccgtcggcaccgcgctgtacctggcgctgggggtggcgatgggcgtggcgctcacgcgtctcggcccgggaagaaaactgcaacggagcgcccgacatgaacgc

SEQ ID NO: 7225 - DNA, 288 bp, Klebsiella pneumoniae
atgctttcagcacttatctcttccgcatttagctaccgggcagtgccattggcatgacaacccgaacaccagtgatgcgtccactccggtcctctcgtactaggagcagcccccctcaattctccagcgccccggcagatagggaccgaactgtctcacgacgttctaaacccagctcgcgtaccactttaaatggcgaacagccatacccttgggacctacttcagccccaggatgtgatgagccgacatcgaggtgccaacaccgccgtcgatatgaactcttggg

SEQ ID NO: 7226 - DNA, 366 bp, Klebsiella pneumoniae
atgctttcagcacttatctcttccgcatttagctaccgggcagtgccattggcatgacaacccgaacaccagtgatgcgtccactccggtcctctcgtactaggagcagcccccctcaattctccagcgcccacggcagatagggaccgaactgtctcacgacgttctaaacccagctcgcgtaccactttaaatggcgaacagccatacccttgggacctacttcagccccaggatgtgatgagccgacatcgaggtgccaaacaccgccgtcgatatgaactcttgggcggtatcagcctgttatccccggagtaccttttatccgttgagcgatggcccttccattcagaaccaccggatcac

SEQ ID NO: 7227 - DNA, 366 bp, Klebsiella pneumoniae
atgctttcagcacttatctcttccgcatttagctaccgggcagtgccattggcatgacaacccgaacaccagtgatgcgtccactccggtcctctcgtactaggagcagcccccctctattctccagcgcccacggcagatagggaccgaactgtctcacgacgttctaaacccagctcgcgtaccactttaaatggcgaacagccatacccttgggacctacttcagccccaggatgtgatgagccgacatcgaggtgccaaacaccgccgtcgatatgaactcttgggcggtatcagcctgttatccccggagtaccttttatccgttgagcgatggcccttccattcagaaccaccggatcac

SEQ ID NO: 7228 - DNA, 306 bp, Klebsiella pneumoniae
atgctttcagcacttatctcttccgcatttagctaccgggcagtgccattggcatgacaacccgaacaccagtgatgcgtccactccggtcctctcgtactaggagcagcccccctcaattctccagcgcccacggcagatagggaccgaactgtctcacgacgttctaaacccagctcgcgtaccactttaaatggcgaacagccatacccttgggacctacttcagccccaggatgtgatgagccgacatcgaggtgccaaacaccgccgtcgatatgaactcttgggcggtatcaacctgtta

SEQ ID NO: 7229 - DNA, 234 bp, Klebsiella pneumoniae
atgctttcagcacttatctcttccgcatttagctaccgggcagtgccattggcatgacaacccgaacaccagtgatgcgtccactccggtcctctcgtactaggagcagcccccctcaattctccagcgcccacggcagatagggaccgaactgtctcacgacgttctaaacccagctcgcgtaccactttaaatggcgaacagccatacccttgggacctacttcagccccga

SEQ ID NO: 7230 - DNA, 1518 bp, Klebsiella pneumoniae
atggtcagcaataatagcgaacggtcaggcgaatatttgttggagatgagcaacatcaacaaatcgtttcctggcgtcaaggctcttgataatgtcaacctgaaggttcgtccgcactccattcatgcgttaatgggtgagaacggcgccggtaaatcgacattattaaaatgcctttttgggatctatcaaaaagattccggtagcattctttttcagggaaaagagatcgatttccattcgacgaaagaagccctggaaaacggtatttcgatggtgcatcaggaattaaacctggtattacagcgttcggtcatggataacatgtggctcgggcgctatccaactaaaggcatgtttgtcgatcaggacaaaatgtaccgggataccaaggccatttttgatgagctggatattgatatcgatccgcgcgcccgcgtcggtaccttatcggtatctcagatgcagatgattgagatcgcgaaggcgttttcctatgacgccaaaatcgtcatcatggatgagccgacgtcatcgctgacggaaaaagaggtcaaccatctgtttaagatcatccgtaagctgaaagatcgcggctgcggtatcgtctatatctcgcataaaatggaagaaattttccagttgtgcgatgaaataaccatcctgcgcgacggccagtggatcgccacccagccgctggaagggctggatatggataagatcatcgccatgatggtcgggcgttcgcttaaccagcgttttccggatcgcgaaaacactccgggcgaagtgatcctccaggtgcgcaatctcacctcgctgcgccagccctccattcgcgatgtctcctttgacctgcataagggcgaaattctcggtatcgccggcctggtgggcgctaaacgcaccgacatcgtggagaccctgttcggcatccgtgagaaggccagcggcaccatcacgctgcacggaaagaagatcaacaaccacagcgccaacgaggcgataaaccacggttttgcgctggtgaccgaggagcggcgctctacagggatttacgcctatctggatatcgggtttaactcgctgatctccaatattaagaaatataaaaacagcatcggcttgctggataactcgcgaatgaagagcgatacccaatgggttattgactcgatgcgcgtcaaaacccccggtcagcatacgcagattggctcgctttccggtggtaaccagcaaaaggtcattataggccgctggctgctgacccagccggagatcctgatgctggatgagccaacgcgcggtatcgacgtcggcgccaagtttgaaatctatcagctgattgccgaactggctaaaaaagacaaagggatcattattatttcttccgaaatgccggaactgctggggattaccgaccgcattctggtgatgagcaacggcctggtcgcgggcattgttgagactaaaaccactacgcaaaacgaaatactgcgtcttgcgtcattgcacctt

SEQ ID NO: 7231 - DNA, 1023 bp, Klebsiella pneumoniae
atgatgcctcgatctctttcgcaaaccggcccggagaagcgacgcttcacctggccgaagggcaccccgcagattattgccttgctgctggttctgctggtagacagcctggtggcgccccatttttatcaggtggtgctccaggatggccgcctgtttggcagcccgatcgatattctcaaccgcgccgcgccggtggcgctgctggcgattggcatgacgctggtgatcgccaccggcggcatcgacctgtcggtaggggcggtgatggcgattgccggcgcgacggccgcctcgatgaccgtcgccgggcacagcctgccggtggtgctgttggccgcgctggccgcgggcgcgctggccggattgtggaacggcatcctcgtggcggtccttaagatccagccctttgtggcgacgctgatcctgatggtggccgggcgcggggtggcgcagttgatcaccgccgggcagatcgtcacctttgattccccggccctggcatggctcggcagcggatcgtttctgctgtttccgacgccggtgatcgtcgccgccgctacgctgctgctgttctggctgtttacccgtaaaacggcgctgggcatgtttattgaggcggtagggatcaacatccgcgcggcgaaaaacgccggcgtcaatacccgcatcgtggtgatgctggcctatgtcctgagcggtgtctgcgcggcgatcgccgggatcatcgtggcggcggacatccgcggcgcggatgccaataacgccgggctatggcttgagctggacgccattctggcggtggtcatcggcggcgcctcgctgatgggcgggcgctttaacctgctgctctcggtggtgggggcgctgattatccagggaatgaacaccgggattttgctctccggcttcccgccggagctcaaccaggtggtgaaagcggtggtggtgctgtgcgtactgattgtccagtcgccgcgctttatcggtttactgaaaggggtacgcggccatgataaaacg

SEQ ID NO: 7232 - DNA, 2001 bp, Klebsiella pneumoniae
atgcgtctggatcgtcttaccaataaattccagcttgctcttgccgatgcccagtcgctcgcactcgggcacgacaaccaattcatcgaacctcttcatttaatgagcgccttgctgaatcaggaagggggatcggtacgtcctttattaacctcggcgggcgtgaatgccgggaaactgcgcactgacatcgaacaggccttgagccgtttaccgcaggtggaaggcaccggcggcgatgtgcaaccttctcaggatttagtgcggatcctcaacctttgcgacaagctggcgcaaaagaaaaaggacaactttatttcgtcggaactgttcgttctggcggcgcttgaatcgcgcggtacgctgaccgaccttttaaaatccgccggagcaacaaccgccaacgtgactcaggcgattgaacaaatgcgcggaggtgaaagcgtgaacgatcagggtgccgaagaccaacgtcaggcattgaagaaatttaccgtcgatctgaccgagcgagccgagcagggcaagctggatccggtgatcggccgtgatgaagagattcgccgtaccattcaggtactgcagcgtcgtaccaaaaacaacccggtgctgatcggtgaacccggggtgggtaaaacggcaatcgtcgaaggcctggcgcagcgtatcgtcaacggcgaagtaccagaagggctgaaaggccgtcgggtattggcgctggatatgggggcgctggtggccggggcgaaataccgcggtgagtttgaagagcgtctgaaaggcgtgctgaccgacctgtccaaacaggaaggcaacgtcattctgtttatcgacgaactgcataccatggttggcgctggtaaagccgacggcgcgatggatgcgggtaacatgctgaagccggcgctggcgcgtggtgaactgcactgcgtcggggcgacgacgcttgatgaataccgtcagtacatcgaaaaagacgccgcgctggaacgtcgcttccagaaagtgttcgttgccgagccttcggtagaagataccatcgcgattctgcgcggtctgaaagaacgttatgagctgcaccaccacgtgcagatcactgacccggctatcgtggcggcggcgaccttatcgcatcgctatattgccgaccgtcagctgccggataaagccatcgacctcatcgatgaggcggcatccagcatccgtatgcagattgactccaaaccggaagagctggaccgtctcgatcggcgtattatccagctgaaactggaacagcaggcgctgaagaaagagtctgatgaggcgagcctgaagcgtctcgatatgctcaacgaggagctggcggataaagaacggcagtactcggtgctggaagaagagtggaaagcggaaaaagcgtcgctctccggcacccagaccatcaaagctgagctggagcaggcgaaaatcgccatcgaacaggcgcgccgcgtcggcgatctggcgcggatgtccgagctgcagtatggcaaaattccggaactggagaaacagctggcggctgccactcagtccgaagggaaaaccatgcgtctgctgcgtaataaagtgacggatgctgaaatcgccgaagtgctggctcgctggaccggtatcccggtctcccgcatgatggaaagcgagcgtgacaaactgctgcgtatggagcaggagctgcatcatcgggtgattggccaggatgaggcggttgaagcggtatccaacgccattcgccgcagccgcgccgggctgtccgatccgaaccggccgattggttcgttcctgttcctcggtccaaccggggtcggtaaaaccgagctgtgtaaaacgctggctaactttatgttcgacagcgacgacgcaatggtgcgtatcgatatgtccgagtttatggagaaacattccgtctcgcgtctggtcggtgcgcctccgggatacgtcggctatgaagaattccaccacatggagctcagcgccgag

SEQ ID NO: 7233 - DNA, 519 bp, Klebsiella pneumoniae
gtggttgagcaaaacggagaggacctgattatgcgccggatattatcggtattactggaaaacgaatcgggtgcactgtcccgcgttatcggcctcttctcccagcgtggctataatatagaaagcctgactgtcgcgccgacggacgatcccactctctccagaatgaccattcagaccgtgggcgatgaaaaagcgattgagcagattgaaaagcaactgcacaagctggtggatgtcctgcgggtcagcgagctggggcagggggctcatgttgaacgcgaaattatgctggtgaaggttcaggccagcggctatggccgtgaagaagtgaagcgcaacaccgaaatcttccgcggacagattatcgacgtgacgccttctatctataccgtccagctcgccggcaccagcgataagctggatgcatttctggcctcgctgcgcgatgtcgctcggattgtggaagtggctcgctccggcgtggtcggcctgtctcgcggtgataaaatcatgcgc

SEQ ID NO: 7234 - DNA, 1257 bp, Klebsiella pneumoniae
gtgcaccgcgcggaacgctcctttcctaaggatacgcctgatatgaaagagattgctttacccctccacccggcgccggcgcgcgtctggattgccgtcgttgcgctcgggatctgcgccttttcgatcgtcaccagcgaactggcgccggtgggcatgctcagcgccctggcggcggattttcaccagacggaatccggcgtgggcctcgccgtcaccgcctatggctgggtaggcgccctggcggctctgctttccggcgcaatgccgacgcgtatttcccgcaaggcgctgctggtcgggctgatgctgatcctcgcgctttcctgcctcgccgcaacccggtcttattcgatgttcgccctgatgagcgcccgcatgattggcgccctggcgcatggcgccttctgggccttaattggcattgtcgccgcgcagctggtgccgccgcaccggctggggctggccacggcgatcatttttggcggcgtgtcagcggcaagcgtagtgggggtgccgctggcgagctttatcgccaccctggcgggctggcgactcgcgtttatgtcgatggccttgctgtcactagccgccgctgcggtgctgtgctcgacgctgcccccgctggccgcccctgcccccgtcaggctgcgtgtttatcgcgatatcttccgcaatccgctgctcggtggcctgtatggcgccacggcctgcatcattaccgctcactttgctgccttcacctacattgaaccactgctgataaatctgcagggagtcccggcgaccgctctctccggcctgctactgctgtcaggggtttccgggctgctgggtaacgttatcgcgggtaagctgatcgatcgtcatctgaaggggctgattttcgctgcgctgctgctgagcgggggcgcgctggcgctccttggcgccgcccgtcttgcgccactgccgttctgttttagcgggctactgttagccctgtggggcgccggcatcgcgattgtgttcgtaggcttacagacctggctgctgcgcagcgcgggcgctgtcgcccagccggcgtcagccatttatgtggccatttttaatgccgccatcggcaccggggcgtttgtcggcggccagctgatcgcctcagctggcctgtcgggaatggtgtggctggcggcggggatcatggtgggcagtacgctgctgatcgccctgctgaaagcgcctctgcccggtcaggtcagtgcggcgacggcaggcgct

SEQ ID NO: 7235 - DNA, 2148 bp, Klebsiella pneumoniae
ttggcaacgacaaccgcagaacgtataaccgccgccgtggattttcacgccctcaacgcgatgctgaatttgtacgacagcgagggccgcatcccgtttgagaaagatcgccaggcggttgaggcctttatggcgacccaggttcagcccaacgccctcaccttccccagccaggaggataagctcagctggctcgtcagcgagggctattacgatccgcaggtgctggccggctatgaccgcgggtttgtgctggcgttgttcgcccatgcccggcgcgctccgtttcgctttcagaccttcctcggcgcctggaagttctataccagctatgcgctgaagacctttgacggcaagcactacctcgaggatttcgccgaacgcagcgtgatggtggccctgacgctggcccggggcgatgaacagcaggcgcggcagctgacggaggagatactcagcggccgctttcagcccgccacaccgaccttccttaacgctggcaaacagcagcgcggggagctgatctcctgcttcctgctgcgtattgaggataatatggagtccatcggccgggcggtgaactcggcgctacagctgtcgaagcgcggcggcggggtggcctttttactctccaacctgcgcgaggccggggcgccgatcaagcgcatcgaaaaccagtcttctggggtggtgccggtgatgaagatgctggaggacgccttctcctacgccaatcagctcggcgcccgccagggggcgggtgcggtctggctgcatgttcaccatcccgatattttacgctttcttgatactcggcgtgaaaatgccgatgagaaaatccgcatcaaaaccttgtcgctgggggtggtgatccctgatatcaccttccagctggcgaaagaagatgcgcagatggccctgttctcgccttatgacgtcgaacggctgtacggcaaacctttcgccgattgcgccatcggcgacctctatccgcagctggtggccgacgagcgggtccgcaagcgctggatccgcgcccgcgacctgttccagcgcctggcggagatccagtttgaatccggctacccgtacatcatgtttgaagacaccgtgaaccgcgccagtccggtggccgggcgggtcaccatgagcaatctgtgttcggagatcctgcaggtcagtacgccgtccgcctataatgaagacctcagctatgcccatatcggggaagatatctcctgcaacctcggctcgctgaacatcgcccacaccatggactcgccggatttcggccgcacaatcgccaccgcggtgcgcgccctgaccgccgtgtccgacatgagccacattcagtcggttccctcggtggcggccggcaacgcggcctcccacgccatcggcctggggcagatgaatctgcacggttacctggcgcgggagggcattgcctacggcagcccggaggggctggacttcaccaatatctacttctacaccgtgacctggcacgcgctgcacacctcgatgcagctggcccgcgagcgcggccagcgcttcgccggcttcgagcagtcgcgctacgccagcggggcgtacttcgacaaatatctgcaggaggagtggcagccgaaaaccgaacgggtgcgcacgctgttcgcccgcgccggcatctctctgcccgaccggaaagctggcgccagtgcgcgacgatgtcatgcgctatggcatctacaatcgctatctgcaggcggtgccccaccggctcgatctcgtacatcaaccatgccacctccagcattcacccgatcgtctcgaagattgagatccgcaaagaggggaaaaccgggcgggtgtactaccccgcgccatttatgaataacgacaatctggccctctaccaggatgcgtatgagatagggccggagaagatcattgacacttacgccgaggcgacgcgccacgtcgaccaggggctgtcgctgaccctgttcttccccgataccgccaccacccgcgatatcaacaaggcgcaaatttacgcctggaagaaaggcatcaagacgctctactacatccgtctgcgccatggcgctggaaggcactgaaattgaaggctgcgtgtcctgcgcgctgtaaggagaacaggat

SEQ ID NO: 7236 - DNA, 894 bp, Klebsiella pneumoniae
atgaaaagattaaaatatctgtcaacgctgctggtcgcggccgtcgccctgattgccgcatggttgttatggaatttctacactcagtcaccctggacccgcgacggcaaagtgcgcgccgagcaggttgggatcacccctcaggtctccggcagtattctgcagttgaacgtaaccgataaccaacgggtcaaagccggggaagtattgtttaccatcgacgacaccccctatcgcatcgcggtgctgaacgcccaggcgcagctggcgaaagcccaggcggaggtggcgaaagcgcaggcggagcaaagcaaggccgccagcgaggctcgccgtcgccgaagcctgtcgcaaaatgccatctcggctgaagaccttgagaacgtcaataccgccctgaataccgccaccaccaccctggctgccgccagagcgggggtcggcgtaaccgaagcggcgctgaaacatgcgcagtggcagctcagccagacggttgtcaaagcgccggtggatggctgggtgaccaacctttccacccgcgtcggtgattacgctaccaccggccatccggtctttgccctggtggacagccactcgttttacgtgctgggctacttcgaagagaccaaactgcgccacattcgcatcggcgatccggcacaaattattctctatagcaatcagcagacgctaaagggccatgtcgcgagcatcggccgcgcgattgtcgaccagagcgtggaacagggaaccgggctggtggccaacatcaaaccaaatatcccctgggttcgtctcgcccaacgcgttccggtgcgaattgcctttgatacgctgccggccgatgtcaccctggtctccggcaccacctgcactgtctcaattggcgggcag

SEQ ID NO: 7237 - DNA, 234 bp, Klebsiella pneumoniae
gtgaaactgagtcttaacacatccggattgccgctgcaggacctggtgttcggcgcatccgtctatttccctccgctgttcaaagccgtcttgttgggtttctttatctggttgtttttacatcgccagctgcgtgactggatgtatgcgggcgacatctggcacccgctactaatggatctctccctgttcgcgctctcggtctgtctggccctggtattactcattgcctgg

SEQ ID NO: 7238 - DNA, 891 bp, Klebsiella pneumoniae
atgaagatcctgcttactggtggtaccggcctgattggccgacatctgatacccagattgctggagctcgggcatagcgtcacggtctccacgcgacatccggataccgcccgcgcccgtctcgatccgcgcgtcaccctgtggcgcgatttcgagggccatcaccacctcaatgacattgatgccgtcatcaatctggcgggtgaacccatcgctgataaacgctggacggccgagcagaaacaacgcttgtgccatagccgctgggatctcacgcagcggctggtgggcctgatccacgccagcgacacccctccctccgtgctgatcagcgggtctgccatcggctactatggcgacctcggcgaggtggtggtgaccgaagaagagccaccgcacaatgagtttacccataagctgtgcgcccgctgggaacaaattgcctgcgaagcgcaaagcgagcgcacccgcgtctgcctgctgcgcaccggcgtggtactggctccgcggggcggtattctcggcaaaatgacacccgcctttaagctcggcctcggcgggcctatcggcaacggcagacagtacctggcctggatccatatcgacgatatggttaacggcattctgtggctgctggataacgatctgcgcggtccgttcaatatggtttctccctacccggtgcataacgagcagttcgcccatgcgctgggtcatgcgctccatcgaccggcgattttccgcgttcccgccgccgctatccgcctgttgatgggggaatccgccgtcctggtgcttggcggccagcgcgcgctgccaaagcgtctggaggccgccggctttgccttccgctggtacgatctggacgaagcgctaaaggatgtgctgagt

SEQ ID NO: 7239 - DNA, 684 bp, Pseudomonas aeruginosa
gtggctgaactggcgccgctgctggtttccgcgctgatcctcggcctgctcgggggaggccactgcctgggcatgtgcggcggcctgatgggcgccctgaccctggccattcccgccgaacagcgcggccgtcgtctgcgcctgctgctggcctacaacctcggccgcatcctcagctacgcctgcgccggcctgctgctcggcctggccggctgggcggtggcgcgcaccccgttggccggcgcgctgcgggtggtcgccgggctgctgctgatcgccatgggactctacctggccggctggtggagcggcctgacccgcgtcgaggcgctcggtcgcggcctctggcgccacctggaacccttcgcccggcgcctgctgccggtctccagcctgccacgggccctgctgctcggagcgatctggggctggctgccctgcgggctggtctacagcaccctgctctgggccaccagccagggatcggcactggacagcgcgctgctgatgctggcgttcggcctcggcacctggccggttctgctggccaccggcatggccgccgaacgggtgaccgccctgctgcgccgtcgcggcgtacgcatcgtgggcggcctgatggtcatcctcttcggcctctggaccctcccaggaccgcaccaggcctggctgatggggcattga

SEQ ID NO: 7240 - DNA, 13029 bp, Pseudomonas aeruginosa
atgatggacgccttcgaacttcccaccaccctggtccaggccctgcgtcgccgcgctgtccaggagcccgagcgcctggcgctgcgcttcctcgccgaggacgatggcgaaggcgtggtcctcagctatcgcgatctcgacctgcgcgcgcggagcatcgccgcggccctgcaggcccatgcgcagctgggcgatcgcgcggtactgctgtttcccagcggccccgactacgtcgcggcgttcttcggttgcctgtatgccggggtcatcgcggtgccggcctacccgccggaatcggcgcgccgccatcaccaggaacgcctgttgtcgatcatcgccgacgccgagccgcgcctggtcctgaccaccgctgacctgcgcgagccattgctgcagatgaacgcgcaactgtccgccgccaacgccccgcaactgctctgcgtcgaccagttggacccggccgttgccgaggcctgggacgagccgcaagtgcgtcccgagcacatcgccttcctccagtacacctccggttcaaccgcattgcccaagggcgtgcaggtcagccatggcaacctggtcgccaacgaggtgctgatccgccgaggcttcggcatcggtgccgacgacgtgatcgtcagctggctgccgctgtaccacgacatgggcctgatcggcggcctgctgcaaccgatcttcagcggcgtaccctgcgtgctgatgtcgccgcgctacttcctcgaacgtccggtgcgctggctggaagccatcagccagtacggcggcaccgtcagcggcggtcccgatttcgcctaccggctgtgcagcgagcgggtcgccgagtcggccctgcagcgtctcgacctgagcggttggcgggtagccttctccggttccgagccgatccgccaggacagcctggaacgcttcgccgagaaattcgccgccagccgcttcgacgcgtccagtttcttcgcctgctacggcctcgccgaggcgaccctgttcgtcaccggcggccagcgcggccagggcattcccgccctggcggtggatggcgaggcgctggcgcgcaaccgcatcgccgaaggcgaaggcagcgtgctgatgtgctgcggccgcagccagccggaacacgccgtgctgatcgtcgacgcggcgagcggcgaggtcctcggcgacgacaacgtcggcgagatctgggccgccgggccgagcatcgcccacggctactggcgcaacccggaagcttcggcgaaggccttcgtcgagcgtgacgggcgcacctggctgcgcaccggcgacctcggcttcctccgcgacggcgaactgttcgtcaccgggcgcctgaaggacatgctcatcgtccgcggccacaacctctatccgcaggacatcgaacgcaccgtcgagagcgaggtgccgtcggcgcgcaagggcagggtcgcggccttcgcggtcacggtcgatggcgaggaaggcatcggcatcgccgccgagatcggtcgcggcgtccagaaatcggtgccggcccaggagctgatcgactcgatccgccaggcggtggccgaggcctaccaggaagcgccgaaggtggtggcgctgctcaatcccggcgccttgccgaagacgtccagcggcaagctgcaacgttccgcctgccgcctgcgcctggaagacggcagcctggacagctatgcgctgtttcccggcctccaggccgtgcaggaggcgcagccgccggcaggcgacgacgaactgctggcacgcatcggcgagatctggaaggcccggctgggcgtggcgcaggtagcgccgcgcgatcacttcttcctgcttggcggcaattccatcggcgccgcccaggtggtcgcccaggtgcgcgacagtctcggcgtcgccctcgacctgcgccaactgttcgaggcgccgaccctgcaggccttcagcgccacggtggcccgccaactggccgccggcctgccggccgaggcaccgatggcgcacctgccgcgcggtgtcgacctgccgcagtcggcggcgcagcagcgtctctggctgacctggcagatcgatccgcagagcgccgcctacaacatccccggcggcctgcgcctgcgcggcgagctggacgaagcggcgctgcgcgccagcttccagcgcctggtcgaacgccacgaagcgctgcgcacgcgtttcctcgagcgcgacggcgcggccttgcagcgtatcgacgagcggggcgagttcgcctggcagttcgtcgacctcgccgcgctggccgagcacgaacgcgccgcggctgccgcgcagcgccgcgaagccgaggcgcagcagccgttcgacctggaaaaggggccgctgctgcgggtcagcctggtgcgcctggacgaacaggagcaccagctctgggtcaccctgcatcacatcgtcgccgatggttggtcgctgaacctgctgctcgacgaattctcgcggctctacgccgaagcctgcggcggccagccggccgacctggcgccgctggaactgcactacgccgagttcgctgcctggcaacggcagtggctggacgcgggcgagggcgcccgccaactggcctactggcgggagcgcctgggcgacacggcgccggtgctggaactggccaccgaccatccgcgcacggcgcgccaggcgtcgcccgccgcgcgctacagcctgcgggtcgacgaagccctggcgcgggctatccgcgaggccgcgctggaccatgaggcgagtgtcttcatgtggctgctggcggcgttccaggcgctgctgcatcgccacagcgggcagggcgagatccgcatcggcgtgcccagcgccaaccgccagcgcctggagacccaggggctggtcggcttcttcatcaacaccctggtcctgcgcggcacgccccgggcgcgccagccgttcgccgcgttgctcggcgaggctcgcgaggcgaccctcggcgcccaggccaaccaggacctgccgttcgaccaggtgctcgcggcctgcggccagggcggccagttgttccaggtgctgttcaaccaccagcagcgcgacctgtcggcgttgcgccggctgcccggcctgctcgccgacgagctgccctggcacagccgcgaagccaagttcgacctgcaactgcagagcgaggaggacgctcgcggtcgcctgaccctgaatttcgactacgccgcggacctcttcgacgaggccagcatccggcgtttcgccgcgcaatacctggagctgctgcgccaggtcgcggaagacccgcagcgctgcctcggcgatatcgccctggtcgacgccgagcaggcggcgcacctcgccgaatggggcagcgcgccctgcgagccggcgcgcgcctggctgccggagctgctggagcggcaactggcgcagtccgccgaacgcgtcgccctggagtgggacggcggcagcctcggctacgccgaactgcacgcccgggccaaccgcctggcccactacctgcgcgacaagggcgtcggcccggacgtgcgggtagcgatctgcgccgagcgttcgccgcaactgctggtcggtctgctggcgatcgtcaaggcgggcggtgcctacgtgccgctggacccggactaccccagcgaacgcctggcctacatgctcgccgacagtggcgtcgagctgctactgacccaggcccatctgttcgaacgcctgcctggcgcggagggcgtcacgccgatctgcctggacagcctcaagctcgacaactggccgagccaggcaccgggcctgcacctgcacggcgacaatctcgcctacgtcatctacacctccggctccaccggccagccgaagggcgtgggcaacacccacgcggcgctggccgagcgcctgcaatggatgcaggccacctacaccctcgacggcgacgacgtgctgatgcagaaggcgccggtgagcttcgacgtgtcggtgtgggagtgcttctggccgctggtcaccggttgccggttggtcctcgccgcccccggcgagcaccgcgatccggcgcgcctggtggaactggtgcggcagttcggggtgaccacgctgcacttcgtgccgccgctgctgcaactgttcatcgacgaacccggcgtcgccgcctgcggcagcctgcgccgcctgttctccggcggcgaggcgcttccggcggagctgcgcaaccgcgtgttgcaacgcctgccggcggtggccctgcataaccgctacgggccgaccgagaccgccatcaacgtcacccattggcagtgccgcgcggaagacggcgagcgttcgccgatcggccgaccgctgggcaacgtggtctgccgcgtgctggacgccgagttcaacctgctgccggccggcgtcgccggcgagctgtgcatcggcggcctgggcctggcccgcggctacctggggcgcccggcgctgagcgccgagcgcttcgtcgccgatccgttctcggccgccggcgagcgcctgtaccgcaccggcgaccgcgcgcgctggaacgccgacggcgtgctggaatacctcggccgcctcgaccagcaggtcaagctgcgtggcttccgcatcgagccggaggaaatccaggcacgcctgctggcgcagccgggggtggcccaggcggtagtggtgatccgcgaaggcgtggccggcagccagttggtcggctactacaccggcgctgtcggcgccgaggcggaagccgagcagaaccagcgtctgcgcgccgcgctacaggccgaactgccggaatacatggtcccgacgcagttgatgcgcctggcgcagatgcccctcggcccgagcggcaagctggatacgcgggcgctgccggagccggtctggcagcagcgcgagcacgtcgagccgcggaccgagctgcaacggcgcatcgccgcgatctggagcgaagtgctcggcctgccgcgggtcggcttgcgcgacgatttcttcgagctcggcgggcattccctgctggccacccgcatcgtctcgcgcacccgccaggcctgcgacgtcgaactgccgttgcgcgcgctgttcgaggccagcgaactggaggccttctgcgaacaggtccgcgcagcccaggccgccggacgtaccgacagccacggcgcgatccgccgcatcgaccgcgagcagccggtgccgctgtcctactcgcagcagcgcatgtggttcctctggcaactggagccggacagcccggcctacaacgtcggcggcctggcacgcctgagcgggccgctggacgtggcgcgcttcgaggccgcgctacaggccctggtgcagcgccacgagaccctgcgcaccacgttccccagcgtcgacggcgtgccggtacagcgcgtgcacggcgatggcggcctgcacatggactggcaggacttctccgcgctcgaccgcgacagccgccagcagcacctgcagaccctcgccgacagcgaggcgcaccggcccttcgaccttgagagcgggccgttgctgcgggtctgcatggtgaagatggccgagcgcgagcactacctggtggtgaccctgcaccacatcgtcaccgaaggctgggcgatggacatcttcgcccgcgaactgggcgcgctctacgaggccttcctcgacgaccgcgaatcgccgctggagccgttgccggtccagtacctggactacagcgtgtggcagcgcgagtggctggagagcggcgagcgccagcgccagctcgactactggaaggcccagctgggcaacgagcatccgctgctcgaactgccgggcgaccggccacgcccgccggtgcagagccaccagggcgacctctaccgcttcgacctgagccccgagctggccgagcgcgtgcggcgcttcaacgccgcccgcgggctgaccatgttcatgaccatgaccgccacccttgcggccttgctctaccgctacagcggccagcaggacctgcgtatcggcgcgccggtggcgaaccgcatccgcccggagagcgaagggctgatcggcgccttcctcaatacccaggtgctgcgctgccggctcgacggacagatgagcgtcggcgagctgcttgagcaggtgcggcagaccgtgatcgatggccagtcgcaccaggacctgccgttcgaccacctggtggaagccctgcagccgccgcgcagcgccgcctacaacccgttgttccaggtgatgtgcaacgtccagcgctgggagttccagcagacccggcaactggccgggatgaccgtcgagtacatcgccaacgatgcgcgggcgaccaagttcgacctcaacctggaggtcaccgacctcgaccagcgcctcggctgctgcctgacctacagccgcgacctgttcgacgaaccgcgcatcgcgcggatggccggacactggcagaacctgctggaggcgctgctgggcgacccgcagcggcgcattgccgaattgccgctgttcgccgccgaggagcggaagcaactgctgctcgccggcacggccggcgaggcagggctccaggacaccctccatggcctgttcgccgcccgcgtggcggccagcccccaggccccggcgctgaccttcgcaggacagaccctgagctatgccgaactcgatgcccgctccaaccgtctggcgcgcgtcctgcgcagtcacggcgtcggcccggaagtgcgggtcggcctggccctggagcgttcgctggagatggtcgtcggcctgctggcgatcctcaaggccggcggcgcctacgtgccgctggacccggaatatccgctggagcgcctgcaatacatgatcgaggacagcggcgtacgcctgctgctcagccacgcggcgctgtttgaggccctcggcgagctgccggcaggcgtggcgcgctggtgcctcgaggaggacggcccggcgctggacgccgaggaccccgcgccgctggcagcgctgagcgggccgcagcaccaggcctacctgatctatacctccggctccaccggcaagccgaagggcgtggcggtctcccacggcgagatcgccatgcactgcgccgcggtgatcgagtgcttcggcatgcgcgccgaggattgcgaactgcacttctattcgatcaacttcgacgctgccagcgagcgcctgctggccccgttgctgtgcggcgcccgcgtggtgctgcgggcccagggccagtggggcgcggaggaaatctgcgagctgatccgcgcggagggcgtgagcatcctcggcttcaccccgagctacggcagccagctcgcccagtggctggagagccagggccggcagttgccggtgcgcatgtgcatcaccggcggcgaagcgctgaccggcgagcacctgcaacggattcgccaggccttcgccccggcgtcgttcttcaatgcctacggaccgaccgagacggtggtcatgccgctggcctgcctggctcccgaacgactggaggagggtgccgccagcgtgccgatcggcagcgtggtcggcgcgcgggtcgcctacatcctggatgccgacctggccctggtgccgcagggcgcgaccggcgaactctacgtcggcggcgccggcctggcgcgcggctaccatgagcgtccggcgctcagcgccgagcgcttcgtgcccgatcccttcgctgccgagggcggccgcctgtaccgcaccggcgacctggtgcgcctgtgcgacaacggccaggtggaatatgtcggccgcatcgaccaccaggtgaagatccgtggcttccgcatcgaactgggcgagatcgaggcgcgcctgctggagcatccgcaggttcgcgaagcgctggtcctggcgctcgacagcccgagcggcaagcagttggccggttatgtcgccagcgcggtggccgagcaggacgaggacgcccaggcggcgctgcgcgaggcgctgaaaacgcatctcaagcagcaattgccggactacatggtgccggcccacctgctgttgctcgccagcctgccgctgaccgccaacggcaagctcgaccgccgcgcgctgccggcgcccgacccggcgctcaaccggcaggcctacgaggccccgcgcagcgtgctggagcagcaactggccggggtctggcgcgaggtgctgaacgtcgagcgggtaggtctcggcgacaacttcttcgaactgggcggcgattcgatcctgtcgatccaggtggtcagccgcgcccgccagctcggcatccacttcagcccccgcgacctgttccagcaccagaccgtgcagagcctcgccgcggtggcccggcacagccaggccagccaggccgagcaggggccggtgcagggcgacagcgcgctgacgccgatccagcactggttcttcgacctgccgctggcgcgccgcgaacactggaaccaggcgctgctgttgcagccgcggcaggccattgacctcggtctgctgcgcaagtccctgcaacgcctggtcgaacagcatgatgccctgcgcctggcgttccgccaggtcgacggcgagtggctggcgcagcatcgtccgctgcgcgaacaggaactgctctggcacgtcccggtgcaatccttcgacgaatgcgccgagctgttcgccaaggcccagcgcagcctcgacctcgaacaggggccgctgctgcgcgcggtgctggtggacggcccggccggtgagcaacgcctgctgctggcgatccaccacctggtggtggacggggtgtcctggcgggtgctgctggaggacctgcaacaggtctaccgtcagttcgccgagggcgccgaaccggcgctgccggccaagaccagcgccttccgcgactgggccggacgcctgcaggcctacgccggcagcgaatcgctgcgcgaggagctgggctggtggcaagcccggctgggtgggcagccggtcgagtggccgtgcgaccgcccgcagggcgacaaccgcgaggcgctggcggaaagtgtcagcctgcggctcgacccgcaacgtacccggcaattgctgcaacaggcgccggcggcctaccgcacccaggtcaacgacctgctgctgaccgccctcgctcgcgtgctctgccgctggagcgggcagccatcgacgctggtgcagttggaagggcatggccgcgaggcgctgttcgacgatatcgacctgacccgcagcgtcggctggttcaccagcgcctacccgttgcgcctgaccccggcgcagagcccgggcgagtcgatcaaggcgatcaaggaacagctccgcgcggtgccgcacaaaggcctcggctacggcgtgctgcgctacctcgccgatccggcggtgcgccaggcgatggccgcgctgcccacggcgccgatcaccttcaactacctcggacagttcgaccagagcttcgccgacgccctgttccagccgctggaccagcccaccgggccgatccacgacgagcaggcgccgttgcccaacgagctgagcgtcgatggccaggtctacggcggcgagctggtgctgcgctggacctacagccgcgagcgctacgacgcgcggacggtgaacgagctggcgcaggcctatctcgccgaactgcaggcgctgatcgagcattgcctggaagacggcgccggcggcctgaccccgtccgacttcccgctggcgcaactgagccaggcgcaactggacgccctggcagtgccggccggcgagatcgaggacgtctatccgctgaccccgatgcaggaagggttgctgttacacaccctgctggaaccgggcaccggcatctactacatgcaggaccgctaccggatcgacagcccgctcgatcccgagcgcttcgccgctgcctggcaggcggtggtggcccgccacgaggcgctgcgtgcgtcgttcgtctggaatgccggcgaaacgatgttgcaggtgatccacaagcccggtcgcacccgcatcgagttcctcgactggagcgaactgccggaggacggccacgaggaacgcctgcaagcgctgcacaagcgcgagcgcgaggccggcttcgacctgctcgaacagccgccgttccacctgcgcctgatccgcctgggcgaggcgcgctactggttcatgatgagcaaccaccacatcctcatcgatgcctggtgccgtggcctgctgatgaacgacttcttcgagatctacagtgctctcggcgaaagccgcccggcgaacctgccgacgccgccgcgctaccgcgactacatcgcctggctgcaacgccaggacctggagcaatcgcgacgctggtggagcgagagcctgcgcggcttcgagcggccgaccctggtgcccagcgaccgcccgttcctccgcgagcacgccggcgaaagcggcgggatgatcgtcggtgaccgctacacgcgtctggacgccgccgacggcgcgcgcctgcgcgaactggcgcagcgctaccagctcaccgtcaacaccttcgcccaggccgcctgggcgctgaccctgcgccgcttcagcggcgagcgcgacgtgctgttcggcgtcaccgtggccgggcgcccggtgggcatgccggaaatgcagcgcaccgtcggcctgttcatcaacagcatcccattgcgcgtgcagatgccggccgccggccagcgctgcacggtacgcgaatggctgaaccggctgttcgagcgcaacctggagttgcgcgagcacgagcacctgcccctggtagccatccaggaaagcagcgagctgcccaagggccagccgctgttcgacagcctgttcgtgttcgagaacgctccggtggaagtctcggtactggaccgcgcgcagagcctgaacgccagttccgactccgggcgtacccacaccaacttcccgttgaccgtggtctgctatccgggtgatgacctcggcctgcacctgtcctacgaccagcgctacttcgaggcgccgaccgtcgagcgcctgcttggcgagttcaagcgcctgctgctggccctggccgacggtttccacggcgaactggaggccttgccgctgctcggcgaggacgagcgcgacttcctcctcgacggctgcaaccgcagcgcccgcgactacccgctggagcaaggctacgtgcggctgttcgaggcgcaggtggcggcccatccgcagcgcatcgccgccagttgcctggaacagcgctggagctacgccgagctgaaccgccgggccaaccgcctcggccacgccctgcgcgccgccggcgtcggcatcgaccagccggtggcactgctggccgagcgcggcctcgacctgctcggcatgatcgtcggcagcttcaaggccggtgccggctacctgccgctcgaccccggccatccgacccagcgcctgacccggatcgtcgagctgagccgcacactggtactggtctgcacccaggcctgccgcgagcaggcgctggcgctgttcgacgaactcggctgcgtcgaccggccgcgcctgctggtgtgggacgagatccagcagggcgagggcgccgagcacgatccgcaggtctacagcgggccgcagaacctcgcctacgtgatctacacctccggctccaccggactgccgaagggcgtgatggtggagcaggcgggcatgctcaacaaccagttgagcaaggtcccgtacctggaactggacgagaacgacgtgatcgcccagaccgcctcgcagagcttcgacatctcggtctggcagttcctcgccgcgccgttgttcggcgcccgcgtggcgatcgtgccgaacgccgtcgcccacgatccgcagggcctgctggcgcacgtcggcgaacagggcatcacggtgctggaaagcgtgccgtcgctgatccagggcatgctcgccgaagagcgccaggccctcgacggcctgcgctggatgttgcccaccggcgaggcgatgccgccggaactggcgcgccagtggctcaagcgctacccacggatcggcctggtgaatgcctacgggccggcggagtgttccgacgacgtggcgttcttccgcgtcgacctggcctccaccgagagcacctacctgccgatcggcagtcccaccgacaacaaccgcctgtacctgctcggtgccggcgccgacgacgccttcgaactggtgccgctgggcgcggtgggcgagctgtgcgtggccggcaccggcgtcggtcgtggctacgtcggcgatccgctgcgcaccgctcaggccttcgtcccgcatccgttcggcgcgccgggcgagcgtctgtaccgtaccggcgacctggcgcggcggcgcgccgacggggtgctggaatatgtcgggcggatcgaccaccaggtgaagatccgcggcttccgcatcgagctgggcgagatcgaggcgcgcctgcacgaacgcgccgacgtccgcgaggcggcggtggcggtccaggaaggggcgaacggcaagtacctggtgggctacctggttcccggcgagacaccgcgttccagcgccgactcgccggccggactgatggtggagcagggcgcctggttcgagcggatcaagcagcaactgcgcgccgacctgccggactacatggtgccgctgcactggctggtgctggaccggatgccgctcaacgccaacggcaagctcgaccgcaaggcgctgccggcgctggacatcggccagatgcagaaccaggcctaccaggccccgcgcaacgaactggaggaaaccctggcgcggatctgggccgaggtgctgaaggtcgagcgggtcggggtgttcgacaacttcttcgaactcggcgggcattcgctgctggccacccagatcgcctcgcgggtgcagaaggccctgcaacgcaacgtgccgctacgggcgatgttcgaatgcaccacggtggaagagctggccagctacatcgagtccctggccccgagcgagatcagcgagcagaaggccgagcgcctgaacgacctgatgtcgaagctggaaatgctctga

SEQ ID NO: 7241 - DNA, 3131 bp, Pseudomonas aeruginosa
cgccacgaggcgctgcgtgcgtcgttcgtctggaatgccggcgaaacgatgttgcaggtgatccacaagcccggtcgcacccgcatcgagttcctcgactggagcgaactgccggaggacggccacgaggaacgcctgcaagcgctgcacaagcgcgagcgcgaggccggcttcgacctgctcgaacagccgccgttccacctgcgcctgatccgcctgggcgaggcgcgctactggttcatgatgagcaaccaccacatcctcatcgatgcctggtgccgtggcctgctgatgaacgacttcttcgagatctacagtgctctcggcgaaagccgcccggcgaacctgccgacgccgccgcgctaccgcgactacatcgcctggctgcaacgccaggacctggagcaatcgcgacgctggtggagcgagagcctgcgcggcttcgagcggccgaccctggtgcccagcgaccgcccgttcctccgcgagcacgccggcgaaagcggcgggatgatcgtcggtgaccgctacacgcgtctggacgccgccgacggcgcgcgcctgcgcgaactggcgcagcgctaccagctcaccgtcaacaccttcgcccaggccgcctgggcgctgaccctgcgccgcttcagcggcgagcgcgacgtgctgttcggcgtcaccgtggccgggcgcccggtgggcatgccggaaatgcagcgcaccgtcggcctgttcatcaacagcatcccattgcgcgtgcagatgccggccgccggccagcgctgcacggtacgcgaatggctgaaccggctgttcgagcgcaacctggagttgcgcgagcacgagcacctgcccctggtagccatccaggaaagcagcgagctgcccaagggccagccgctgttcgacagcctgttcgtgttcgagaacgctccggtggaagtctcggtactggaccgcgcgcagagcctgaacgccagttccgactccgggcgtacccacaccaacttcccgttgaccgtggtctgctatccgggtgatgacctcggcctgcacctgtcctacgaccagcgctacttcgaggcgccgaccgtcgagcgcctgcttggcgagttcaagcgcctgctgctggccctggccgacggtttccacggcgaactggaggccttgccgctgctcggcgaggacgagcgcgacttcctcctcgacggctgcaaccgcagcgcccgcgactacccgctggagcaaggctacgtgcggctgttcgaggcgcaggtggcggcccatccgcagcgcatcgccgccagttgcctggaacagcgctggagctacgccgagctgaaccgccgggccaaccgcctcggccacgccctgcgcgccgccggcgtcggcatcgaccagccggtggcactgctggccgagcgcggcctcgacctgctcggcatgatcgtcggcagcttcaaggccggtgccggctacctgccgctcgaccccggccatccgacccagcgcctgacccggatcgtcgagctgagccgcacactggtactggtctgcacccaggcctgccgcgagcaggcgctggcgctgttcgacgaactcggctgcgtcgaccggccgcgcctgctggtgtgggacgagatccagcagggcgagggcgccgagcacgatccgcaggtctacagcgggccgcagaacctcgcctacgtgatctacacctccggctccaccggactgccgaaggcgtgatggtggagcaggcgggcatgctcaacaaccagttgagcaaggtcccgtacctggaactggacgagaacgacgtgatcgcccagaccgcctcgcagagcttcgacatctcggtctggcagttcctcgccgcgccgttgttcggcgcccgcgtggcgatcgtgccgaacgccgtcgcccacgatccgcagggcctgctggcgcacgtcggcgaacagggcatcacggtgctggaaagcgtgccgtcgctgatccagggcatgctcgccgaagagcgccaggccctcgacggcctgcgctggatgttgcccaccggcgaggcgatgccgccggaactggcgcgccagtggctcaagcgctacccacggatcggcctggtgaatgcctacgggccggcggagtgttccgacgacgtggcgttcttccgcgtcgacctggcctccaccgagagcacctacctgccgatcggcagtcccaccgacaacaaccgcctgtacctgctcggtgccggcgccgacgacgccttcgaactggtgccgctgggcgcggtgggcgagctgtgcgtggccggcaccggcgtcggtcgtggctacgtcggcgatccgctgcgcaccgctcaggccttcgtcccgcatccgttcggcgcgccgggcgagcgtctgtaccgtaccggcgacctggcgcggcggcgcgccgacggggtgctggaatatgtcgggcggatcgaccaccaggtgaagatccgcggcttccgcatcgagctgggcgagatcgaggcgcgcctgcacgaacgcgccgacgtccgcgaggcggcggtggcggtccaggaaggggcgaacggcaagtacctggtgggctacctggttcccggcgagacaccgcgttccagcgccgactcgccggccggactgatggtggagcagggcgcctggttcgagcggatcaagcagcaactgcgcgccgacctgccggactacatggtgccgctgcactggctggtgctggaccggatgccgctcaacgccaacggcaagctcgaccgcaaggcgctgccggcgctggacatcggccagatgcagaaccaggcctaccaggccccgcgcaacgaactggaggaaaccctggcgcggatctgggccgaggtgctgaaggtcgagcgggtcggggtgttcgacaacttcttcgaactcggcgggcattcgctgctggccacccagatcgcctcgcgggtgcagaaggccctgcaacgcaacgtgccgctacgggcgatgttcgaatgcaccacggtggaagagctggccagctacatcgagtccctggccccgagcgagatcagcgagcagaaggccgagcgcctgaacgacctgatgtcgaagctggaaatgctctga

SEQ ID NO: 7242 - DNA, 1812 bp, Pseudomonas aeruginosa
atgagcgatagtcctcagaatcccggaccttccagtctcaagatctatttccgcctgttgggttacgtgaagccctacatcggaatgttcctactcagcatcgtcggtttcctgatcttcgcgtcgacccagccgatgctggcgggcatcctcaagtatttcgtcgacggcctctccaatcctgacgcggcattgtttccgaatgtgcagtggccctggttgcgcgacttgcacctggtctacgcggtgccgttgctgatcatcctgatcgctgcctggcaggggctgggctcgttcctcggcaacttcttcctcgccaaggtttccctggggctggtgcatgacctgcgggtcgccctgttcaacaagctgctggtgctgccgaaccgctatttcgacacgcacagctccggccacctgatctcgcgcatcaccttcaacgtgaccatggtcaccggagcggccacggatgccatcaaggtggtgatccgtgagggcctgaccgtggtcttcctgttcctctacctgctgtggatgaactggaagctgaccctggtgatgctggcgatcctgccggtcatcgcggtgatggtgactaccgccagccgcaagttccgcaagcagagcaagaagatccaggtggccatgggcgacgtcacccacgtcgcctcggaaaccatccagggctaccgggtggtgcgcagcttcggcggcgaagcctatgaagagaagcgcttcctcgacgccagccagagcaataccgacaagcagttgcggatgaccaagaccggcgcggtctacacgccgatgctgcaattggtgatctacgtcgccatggcgatactgatgttcctcgtgctgtggctgcgcggggacgcctcggccggcgacctggtggcctatatcaccgcggcgggcctgttgcccaagccgatccgccagctttccgaagtcagttccacggtccagcgcggcgtcgccggcgccgagagcatcttcgagcagctcgacgaagcggcggaggaagaccagggtaccgtcgagaaggagcgggtcagcgggcgcctggaagtgcgcaacctgagcttccgttatcccggaaccgacaagcaggtgctggatgacatcagtttcatcgccgagcccgggcagatgatcgccctggtcggccgttccggtagcggcaaatcgaccctggccaacctggttccgcgcttttaccagcacaatgacggcaagatcctccttgatggcgttgaagtcgaggattatcgcctgcgcaacctgcgccgccacatcgccctggtgacccagcaggtcacgctgttcaacgacagcgtggccaacaacatcgcctacggcgacctggctggcgcgccgcgcgaggaaatcgagcgggcggcgaaggctgccaacgccaaggagttcatcgacaacctgccgcaaggcttcgacaccgaggtcggcgagaatggcgtgctgctttccggcggccagcgccagcgtctggcgatcgcccgggcgctgctcaaggacgcgcccctgctgatcctcgacgaggcgacctcggcgctggacaccgagtcggagcggcatatccaggcggcgctggacgaagtgatgaaggggcgcaccaccctggtgatcgcccaccgcctgtcgaccatcgagaaggccgacctgatcctggtgatggaccaggggcagatcgtcgagcgcggcagccacgccgaactgctggcgcagaacggccattatgcgcggctgcacgcgatgggactggatgagcaggcgccggcgcctgtcggctga

SEQ ID NO: 7243 - DNA, 381 bp, Pseudomonas aeruginosa
atgagcgaaggaaaggacccggcggacggccgcccctccctgcggcgcttcggcgccgccttcctcggcctgttgcacggtcacgtcgagctgttcggcatcgagctgcaggaacagaaggccaacaccctgcgcctgctgctgttcgccgggctggccctggtattcgccctgctcctgctggtcggcctgtcgctgctggtgctgatcgtattctgggacaccaaccggctcgcagcggcgctcgggttgtgcctgttctacgtgatcggctcgctgttctgcggctggcgcctgtaccagtcgatcaacgacgaaagctcgccgttcagcgccaccctggaagaactggccaacgaccgcgagcgactgctgccatga

SEQ ID NO: 7244 - DNA, 330 bp, Pseudomonas aeruginosa
atgccccgcaagaccactgcaaacgctgcaaaggatgaactgttggctgaattccaggcactggtcgccgataccgagaaactcctgcaaagcaccgccgacgtggcgggcgaccaggccgaagaaatccgcggcaagatccacgacagcctcaagcgcgctcgcgataccttgcgcgacaccaaggactcgctgaaggacaacgtccgcgaacgcagccaggccgcggtggacgccaccgaggtgtacgtcggcgaacacccctggcagagcatcggcatcgccgccggcgtcggcttcctgcttggcctgttggtcagccggcgctga

SEQ ID NO: 7245 - DNA, 312 bp, Pseudomonas aeruginosa
atgcaaaaccaacaaatccggattcggttgaaggcttttgaccatcgcctgatcgatcaatcaacccaggaaatcgtggaaaccgcgaaacgtactggtgctcaggtgcgtggtccaatccctctgccgacccgcaaggaacgtttcaccgtgctgatctctccgcacgtcaacaaagatgcgcgtgatcagtacgaaattcgtacacataagcgtgtactggacatcgtccagccgacggataaaaccgtcgatgcgctgatgaagctcgatcttgctgcaggcgttgaagtacagatcagcctcggctaa

SEQ ID NO: 7246 - DNA, 699 bp, Pseudomonas aeruginosa
atgcgtaagtcctggcttaccgcttccctgctggccctcaccgtcgcctccccgttcgccgctgcggatattcaaggacacaaggccggtgacttcatcatccgtggcggcttcgccaccgtcgatcccgacgacagcagttccgacatcaagctggacggcgccaagcagcgcggtaccaaggcgactgtcgacagcgacacccagctcggcctgaccttcacctacatgttcgccgacaagtggggcgtggaactggtcgccgccactccgttcaaccaccaggtcgacgtcaagggcctcggcccgggcctggacggcaagctggccgacatcaagcaactgccgccgaccctgctgctccagtactaccccatgggcggtaccaacagcgccttccagccctacggcggtctgggcgtgaactacaccaccttcttcgacgaagacctcgccagcaaccgcaaggcgcagggtttcagcagcatgaagctgcaggactcctggggcctggccggcgaactgggcttcgactacatgctcaacgagcacgcgctgttcaacatggccgtctggtacatggacatcgacaccaaggccagcatcaacggcccgagcgccctgggcgtgaacaagaccaaggtcgacgtggacgtcgatccgtgggtctacatgatcggtttcggctacaagttctga

SEQ ID NO: 7247 - DNA, 369 bp, Pseudomonas aeruginosa
atggctctgaccaacgaagacatcatcaacgccgtatccgaaatgtccgtcatgcaagtggtcgaactgatcaaggcgatggaagagaagttcggcgttaccgctgctgccgctaccgttgccgctgctggcccggctgctgccgctgccgaagagcagaccgagttcaccatcgtcctggccgaagctggcgacaagaaagtgaacgtgatcaaggtcgttcgcgaactgaccggtctgggtctgaaagaagccaaggccgtcgtagacggcgctccgggcgtggtgaaggaaggcgcttcgaaagaagaagccgaagccgccaagaaagccctggaagaagcaggcgccaaagtcgagctcaagtaa

SEQ ID NO: 7248 - DNA, 501 bp, Pseudomonas aeruginosa
gtggcaattaaactcgaagacaagaaggccatcgtcgctgaagtcaacgaggctgccaaagctgccctgtccgctgtcgtggccgatgcccgtggcgtgaccgtaggcgccatgaccggactccgtaaagaggcccgcgaagctggtgtgtacgtgaaagtcgtacgtaacaccctgctcaagcgcgccgttgaaggcacccagttcgacgtgctcaacgacgtgttcaaaggcccgaccctgatcgctttctccaacgaacatccgggcgctgccgctcgtatcttccgtgagttcgccaagggtcaggacaagttcgagatcaaggcggctgccttcgagggtcagttcctcgcagccaatcagatcgacgtactggcaagcctgccgacctacgacgaagccgtatcgcagctgatgagcgtgattcaaggcgctaccagcaagctggctcgtactctggcggccattcgcgaccagaaagaagctgctgccgcctaa

SEQ ID NO: 7249 - DNA, 1431 bp, Pseudomonas aeruginosa
atgttcaagtcgctgcgtactcttgccttcgccacgctcctgcctttcgcccttcccaccctcgcccaggtcaacgccaccctgccggccaacgtgcagaaagccctgcagaccaacaagctgaccggcaacgatctgtcgctggtgctgattccgctcgacggcccgggcaaccccacctactacaacgccgacgtatcggtgaacccggcctcgaccatgaagctgttcaccacctatgccgccctggaaatgctcggcccgacctaccagtggaagaccgagttctacaccgacggccagctcaagaacggagtgctcaacggcaacctctacctcaagggcggcggcgatccgaaactgaacatggagaagctctggctgctgatgcgcgacctgcgcgccaatggcgtgaccaaggtcacaggtgacctggtactcgaccgcagctacttcaacatcccgcagttgccggtattcaacgacgacggcggcgacgacaccaagccgttcctggtcggtccggactcgctgctggtcaacctgaagagcgtgcgcatggtggtgcgcaccgacggcaacaaggtcaacgtgcagatggacccgccgctggccaacgtacgcatcgacaaccaggtgaagatgaccgcgccggccacctgcccggcctggccgaagctgcgcttcagcccggtgacccagttcgacggcaccaccctgctggccaccggacagattccccagggctgtagcgcgcagacctacatgtcgctgctcgaccaccccggctacaccgccggcgcggtgcgcggcatctggcaggagctgggcggcagcatcctcggcaaggaccgccagggcagcgtaccgcgcaacgccacgctgatcgccaaggccttctcgccagacctggtcgagatcatccgcgacatcaacaaatacagtaacaacaccatggcccggcagttgttcctctccatcggcgcgcagttccgcaacagtgccgacggcgacgacgcccaggccgcgcagcgggtggtgcggcagtggctggcgcgcaagggcatcaccgcgccgcgcctggtgatggagaacggctcgggactgtcgcgccaggaacgggtcagcgcccgtgagatggcggcgatgctgcaagccgcctggcacagcccctatgcagcggagtacatctcctcgctgccgctggccggcctcgacggcaccatgcgcaaacgcctgcggcgcaccgcactggtcggcgaggcgcacgtgaagaccggcaccctcaacaccgtgcgcgccctcgccggcttcagccgcgacgccagcggccacaactgggtggtggtggcgatcctcaacagcccgcggccgtggggcgcttcggcgatcctcgaccaggtactgctgagcctgcacgcgcggaaataa

SEQ ID NO: 7250 - DNA, 306 bp, Pseudomonas aeruginosa
atggctaaagagagcatgaagaaccgcgagctgaagcgtcagctgacggtagccaagtacgccaagaagcgtgccgagctgaaagcgatcatcgctaatccgaactcctctgcggaagagcgttggaatgcccaggtcgccctgcagaagcaaccgcgtgacgccagcgccagccgcctgcgtaaccgttgccgcctgaccggtcgtccgcacggcttctaccgcaagttcggcctgagccgtaacaagctgcgcgaagccgccatgcgcggcgacgtaccgggtctggtgaaagccagctggtaa

SEQ ID NO: 7251 - DNA, 540 bp, Pseudomonas aeruginosa
atggcacgattgaaagaaatttatcggaaggaaatcgcgcccaagctgaaagaagagcttcagctggcgaacgtgatggaagttccgcgcgttaccaaaatcaccctgaacatgggtcttggcgaggcggtcggtgacaagaagatcatcgagaacgccgtagccgatctggaaaagatcactggtcagaagccggtcgtgacttacgctcgtaagtccatcgcaggcttcaagatccgtgaaggctggccgatcggcgtcaaggtcaccctgcgtagcgaccggatgtacgagttcctggatcgtctgctgtccatctccctgccgcgcgtgcgtgacttccgcggcctgaatgccaagtccttcgatggtcgcggcaactacagcatgggcgtgaaagagcagatcatcttcccggaaatcgattacgacaagatcgatgcgctgcgtggcctggacatcaccctgaccaccaccgctcgtacggatgacgaaggtcgcgccctgctgcgtgctttcaaattcccgttccgtaactga

SEQ ID NO: 7252 - DNA, 1860 bp, Pseudomonas aeruginosa
atgggcctgcccctcgggctgggtaagcccaaccgactggtcaatgcgttgtaccagcggctgcggaccctgccggagcgccagctgacgctgtataccgcgctttccctggggcgtcccgccgctggcggcgacctgcaacggcgtttcctcgagcctttcgccgaacgggtcttcgccgactacccggagctggattacctgcacgccctgcgccgcgacgaactgccggcgaacatccgcgtcgaggagttctacctgcagcccggcagtctgctggacagcgcgccggcgcagcagcactacatcagttgcaactacagccacgtcgcccgcgacatcaacgccaagggcgtcaacgcggtggcgcaactggtggcgcggcatcccgagcggccgggcaagctgagcctggcctgcaacccggatatcaccctggacctcctgccgatgctggagaagcgtcgcgccgccggcgagaccatcgtcgccatcggcgtggtccacgatgacctgccctacctgccgggcgacgccgaggtcgaggagtcggtattcgacctgctgatcgacgcgccggcggaaagcagccggctgttctccacgccgaacatgccggtcaacctgcaggaccactgcatcggcctccacgccagcgcgctggtgcgcgacggcggcaccctgcagatcggcatcggctcgatgggcgacgcgctgaccgccgccctgctgctgcgccagcgcgacaacgccacctaccgagcgttgatcgacgagctgggtgtgcgtgcgcgctgggccgagacgatcgagcgcgacggtggcctggagccgttccgccgggggctttacggttgcagcgagatgttcgtgccgggtctgctggcgctggccgaggccggcgtgctgagccgccgggtctaccccgacgaagcgcggcagcgtgccgccgagcgcggtgaggcgccggtggagggcggggtgtggctgcacggcggctttttcctcggtccgttggcgttctaccggcgcctgcgcgagatgtcgctggaagagcgcgccgggatcggcatgaccggcatcggcttcgtcaacaacctgtaccgccaggaagagctgaagcgtctgcagcggcgcgacgcgcgcttcatcaacagcgccttcaccgtgaccctgctcggcgccggggtcgccgaccagctggaggacggccgggtgctcagtggcgtcggcgggcagtacaacttcgtcgcccaggctcacgagctggagggcgcacgttcgatcctgatgctgcgtagctggcgcgaatccggcggggaggtcagttcgaacatcgtctggcagtacgcccacaccaccattccccggcacttgcgtgacatggtggtgaccgagtacgggatcgccgacctgcgcggcaagaatgacgcggaagtgatcgccgcgctgctggccatcgccgactcgcgcttccagcaggcgctggccgagcaggcccagtcggccggcaagctgccgaaggatttcgtcctgcccgaacgctatcgcaacaataccccggagcgcctgcaggccttgcaccaggcccacgcagcggcgctgccggagtttcccctgggcagcgatttcgacgaggtcgagcaggacctgctgcgggcgctgggttggctcaagcgcaagctgaagctgagcgagatcctcgaactgggcaaggcgaccctggatgcgccggagccagaagcctacccggcgcatctgcggcgcatggacctggacgatccgcaggggcttcgcgaggaactctaccagcgcttgctgctggccggcctgcgagccagccaggaagagcggggctga

SEQ ID NO: 7253 - DNA, 615 bp, Pseudomonas aeruginosa
gtgcagcacatcatcggcatgccgttgcaactcatcatcatcggcatgccgcactccatcatcttcgccatcagcatgcagcagttcttgaacatctccatgtccatgccctgcatcggcatcatcctgcagtgcatggcgtcgccctgcatggagcactccatcatgcacttcatcggagccatgcccatcatcggcatgcccatccccatgcccatcgtcggcatcatcgccatgcaggcctgggacatgcccatcatcgccaggttgccgcactgcatcatcatgggcatgccgcagttcatcatcatcgccatcatctcggcgctgttgcggaactggcccatgtccatacccatcgccggcatcatcttgcacagcatgccgtcgtccatcgtttcgcactgcatggtcgccatcatcatcggcatgcccatcatgggcatcatcggcatggcggcattcatgttcatcggcatctgcatggcattcatcatggcggtaactcctgtaggcgaagcgggggtaggtgcgaatggggccgattctaggcagcgccgacgcaccggcaagatgccggtgcaacagccgagccgggcgctgcatggtggctag

SEQ ID NO: 7254 - DNA, 1047 bp, Pseudomonas aeruginosa
atgactgacgaaatacaaaagcacggcggtgtagctggcgatatcgatctggttgagctggttcgaggattatgggaggagaagtggatagttcttatattttctttgctaggtattttgtttgcagctatctacgcttttctcagtactcctgtctatgaggcccgcatagcgattttgcctccgtcgttgagtgatgtggcaggtttcaatcagggacgtaccagggaaaccgggcttggtcccttcaaggtccaggatgtgtactctgtttttgttcgcaacctgcaggctgatggaactcgtcatcgttttttcaatgagacctatttgccttctttggatgaagagcttcgttcggtttcgcgtgatgcgctctataaaaggttcactgatcagataagtattagtttgccggggaaagactttccgggtcgttatcttgttgcgattgaacaggaggatccggagcgtgcggcgagttgggttcgtcggtatatagctgatgcggccgagatttctattcaggaaatgttgaacaatgcgcatcgcgagattgaggtcaaggctcgagatattgagcagcgcatacagaacttgcgagagaatgccaaggcaagacgtgaagatcgtattgttcagctcaaggaggcgttgaaggtcgcaggtgcgctgaaattggaggagcctccactgatcagtgggcaatcctctgaggagctctcggctatcatgaatggaagtctgatgtatatgcgtggcagtaaggcgattatggccgagattcagacattggaggcgcgtagctctgatgatccttttattccggcgttgcgtactcttcaggagcagcagttattgctgagtagcttgcgtgttaattcggagcgggtttctgtttttcgacaagacggtccgatagaaacgccggactcaccagttcgtccaaggagagcgatgattttgatttttgggttgataattggtggtgtgcttggtggttttctggcgttgtgccggatttttttgaagaagtatgctcgttag

SEQ ID NO: 7255 - DNA, 1113 bp, Pseudomonas aeruginosa
gtgaaccgacctgcgagccctgcgatgcgcgacgaccgcgaactgaccccggaacaactggcggccttcggcgccgaactcgatgccctgcgcctgcgtaccctggccgatctcggcgcggacgacgcgcgctacatccgccgggtccgcgcggcggtgcgcgtctgctgctggagcggcagggcgctgctgatgttcggctggctgccgccgacctggctgctcggcagcctgcttctcggcctgggcaagatcctcgagaacatggagctgggccacaacgtcatgcacggccagtacgactggatgaacgatccggaattcgccggccgcgcctacgagtgggacatcgccgggccgtccgacttctggcggcacacccacaaccatatccaccacacctacaccaacgtgctgggcaaggacgacgacgtcggctatggggtcgtgcgcctgttcccggagcagcgctggaagccgttctaccgctggcaaccgctgtgggtgacgctgcaggcgctgctgttccagtacgcggtggcgatccagcatctgcgcctggacaagtacgccaaggggcgcctggacaaggccgaactcatgccgctgctacgccgcctgcgtgccaagctgggtcgccagtggaccaaggactacctgctgttcccgcttctcggcctgttcgccggcggcttcggcgcggtgttcgtcggtaacctgctggccaacgtgctgcgcaacctgtggaccttcacggtgatcttctgcggccacttcaccgagaaggcggtggtcttcccgccctcggtgctggagggagagacccgtggccactggtacctgcgccagttgcgcggctccagcaacctggagggcgggccgctgttccacatcctgaccggcaacctcagccaccagatcgagcaccacctctacccggacctgccggcgcgtcgctacgccgcgttgtcccgcgaggtccgcgaaatcgcccggcgctacgggcagacctacaacagcggacgcctgggacggcaattcctcactgtcttgcggcgcatctgggtatatcggctgccgccgcgcgagcccctcccggcggggcgcggctga

SEQ ID NO: 7256 - DNA, 1101 bp, Pseudomonas aeruginosa
atggccttgcttcccctcgcgctcctgacccctttgctcgcacccctgcgccgtctcgccgcccgtggctggctgcgtgaggccgatgtcgacggcctgctgcgccacgcccatccgctggcgtcgttgaaccgccactatgcgcgggtcgaggcacgctactgggtggccgacgatatgctcgccctggccctgcgtaccgcccccggctggccgccggtgcggccgggccagcacatccagctgctggcggagcgcgacggggtgcgggtcgggcgcagctacagcctgacccgggtggtcggcgagcgcctggaaatcgccgtcaagcgtcacccggacgggctgctctcgccctggttgtgcgaacacctggcggtcggccagcgtgtcgagttgcaacccgcgcaaggcgatctgcgctggccgatgcaggccgaggcggtctgcctgctggccgccggcagcggcctgacgcccttgctcggcctgctccgcgaggcgctggagaacggctatcgcggtcccgtgctgtggctgcactacgtccgtcatcccggccagcgcgcctggctcggcgagctggaggcgctggcggcgcgccacccgaacctggagttgcgctggagcctgacccgcggggcgcgggccgatggctgcctggaggggcatttccagccgcgccacctggacggctgggcagccgacctggcgcgcagccaggccctggcctgcgggccggcggctttcgtcgaggcggtgggcgagcaactgggggcacgcttcgccggcttgcagacggaatccttcagcgtcccgcgctggcgcagcggggaggcgccgcgcgaagtgcgcctgcgcttcgcccggtcgcagcgggaagtctccggcgacagcgccgccagcctgctggaacaggccgaggcccacggcctgcgcccggcccacggttgccgccagggcatctgcgccagttgcacctgcgtcctgctcagcggctgcgtgcgcgacctgcgcagcggcgcgctgtgcagcgagcccggccagcctatccgcctctgcgtcagcgccgcccacggcgacctggcgctggacctgtga

SEQ ID NO: 7257 - DNA, 1236 bp, Pseudomonas aeruginosa
atgagtgcggcttttatcaaccgtgtcgcacgagtattagtaggcaccttgggagcacagctcataacgattggtgtcactctgctactggttcgtctgtattctcctgctgaaatgggcgctttcagtgtttggctatcgttcgctacgatttttgcagttgtagttactgggcgctatgagttggctattttttcgactcgagaagagggcgaactccaggcaatcgtcaagctgatacttcagttgacactattgattttcgttgccgtggcgattgctgttgttataggtagacatctgattgagtcgatgccagttgtgatcggtgaatactggttcgcattggcggtggcttcgctggggttggggataaataagctagtcttgtcgttacttacatttcaacaatcttttaatcggttgggagttgctcgtgtaagcctggctgcatgtattgccgttgcacaagtttcagctgcatatttactggagggcgtatcagggctgatctatggccagctgtttggtgtcgtcgtagccacggcgcttgcggccctttgggtaggaaagtcgctgattttaaattgtatcgagacaccgtggcgtatggtacgacaagtagcggtacagtacatcaatttcccgaagttttctctgcctgcggatctggtcaacacggttgccagtcaggtgcctgtgattttattggcggcaaagtttggtggagacagtgcaggctggtttgccctgactctgaagataatgggagctcccatttccttgttggctgcttcggtgctcgatgtgttcaaagaacaagccgctcgtgactaccgagagtttggtaattgccgaggtatcttcctcaagactttcaggttgcttgccgtcctcgcgctacctccttttattatattttggttcattggcgagtgggcctttgggttagtctttggcgaagcgtgggctgagtcggggcgttatgctgtattgatggttccgttgttttatatgcgtttcgtggtgagtccgctcagctatacaatctatattgcccagcggcagagtatggatttgttgtggcagctagccttgttgctcctgacgtttatctgttttaccttgcctgactctgtcgactcggtgttgtggttttactccatagcatatgctgttatgtattttgtctatttctggatgtccttccagtgtgccaagggagatgccaagtga

SEQ ID NO: 7258 - DNA, 1317 bp, Pseudomonas aeruginosa
atgtatatacttgctcgagtcgacaggtctattctgctgaacacagtgttactgtttgctttcttttcagcgacagtgtgggtgaataataattatatctatcatctctatgattatatggggtctgcgaaaaaaactgtcgacttcggcttgtatccgtacttgatggtcttggcgctcatctgtgccctgttgtgtggaggggcaattcgcaggccaggtgatctgttagttacattattagttgtaatacttgttcctcattcattggttcttaatggagctaatcaatattctccggatgcgcaaccatgggctggcgtgcctctggcaattgcttttggtattttgatcatcggcattgtcaataagataagattccatccgctaggtgcattgcagcgagaaaaccaaggaaggcgaatgttagtgctactgtcagtactcaacatagtagtgcttgtgtttattttctttaaaagcgctggttatttttcctttgactttgctgggcagtatgctcgccgtgcacttgctcgtgaggtttttgctgcgggttctgcaaacggctacttgtcgtcaatcggtacccaggcattctttcctgtgttgtttgcctggggggtctacagacgacaatggttctacttggtcctgggtattgtcaatgcactagtgctgtggggagcgtttggacagaagtatccttttgtcgtgttgtttctaatttatggcctgatggtttattttcgacgattcggtcaggtcagagtgtcttgggttgtctgcgcactattgatgcttttgcttttaggggcgttggaacatgaggtgtttggctattcattcttgaatgattattttctacgtcgtgcttttattgtgccttccaccctgttgggggcagttgatcagtttgtgtctcagttcggatccaattattacagggataccctgttgggcgcgctcttgggtcagggtaggactgagccgttgagctttcgtctggggacggaaattttcaataatcccgatatgaatgcgaatgtaaacttcttcgcgatagcctatatgcagttgggttatgtgggggttatggctgagtcgatgttggtgggcggtagtgtcgttctcatgaatttcttattttcgaggtatggtgcattcatggccattccggttgctttgttatttactacaaagattcttgagcagtccctgctaactgtaatgcttggctctggtgttttcttgatgctgcttttccttgcgctaatttcttttccactcaagatgtctttaggaaaaactctatga

SEQ ID NO: 7259 - DNA, 1176 bp, Pseudomonas aeruginosa
atgagcctgaatccgagagacgtcgtcattgtcgacttcggccgcaccccgatgggtcgttccaagggtggcatgcaccgcaacacccgcgccgagaccatgtcggcgcacctgatcagcaagctgctggagcgcaacccgaaggtcgacccggccgaagtggaagacgtgatctggggctgcgtcaaccagaccctggagcagggctggaacatcgcgcgcatggcgtcgctgatgacccagatcccgcacaccagcgccgcgcagaccgtcagccgcctgtgcggttcgtcgatgagcgcgctgcacaccgccgcccaggcgatccagaccggcaatggcgatgtattcgtcatcggcggcgtggagcacatgggccacgtcggcatgatgcatggcgtcgacccgaacccgcacctgtccctgtacgccgccaaggcctcgggcatgatgggcctgactgcggaaatgctcggcaagatgcacggtatcagccgtgaggcgcaggacaagttcggcgcgcgttcgcaccaactggcctggaaggccacccaggaaggcaagttcaaggacgagatcatcccgatggaagggtatgacgagaacggtttcctgaaagtcttcgacttcgacgagaccattcgtccggaaaccaccgtcgagaccctggccgagttgaagccggcgttcaatccgaaaggcggcaccgtgaccgcggggacctcctcgcagatcaccgacggtgcctcctgcatgatcgtgatgtcggcccagcgcgcccaggacctgggcatccagccgatggcggtgatccgctccatggccgtggcgggtgtcgacccggctatcatgggctacggcccggtgccgtcgaccaacaaggcgctcaagcgtgccggcctgaccatcgccgacatcgatttcgtcgaactcaacgaagccttcgccgcccaggccctgcctgtgctgaaggacctcaagctgctcgacaagatggacgagaaggtcaacctccacggcggcgccatcgccctgggtcacccgttcggttgctccggtgcgcgcatttccggcaccctgttgaacgtgatgaagcagaacggcggtacccttggcgtgtccaccatgtgcgtgggcctgggacagggtatcaccaccgtcttcgagcgcatctaa

SEQ ID NO: 7260 - DNA, 648 bp, Pseudomonas aeruginosa
atggccgagatcaatatctaccagaatcctggtcaatccctggctaatatctataagggttttgcccgtcaatgcaatcctggctttgtcttccccgaagcacagactatagaggcatgggacattccgctgaggctacacccggaattcattccgggcggagacatcagcaaagcggaccagcaatactcgacgttgcttgcccaggaaatagccaacggcgtaaccattggtttcaggatggttaatgaaaaggaacgtgtttgcaacgttgagatacttcctttgctcacctccatggcgcagaatcttgatcgaataaaagcccgtttcggcagtggatatcttgaccgcttcaagggcagtccgaacgtctatccaaccgacgttggtttctctacggatgcatccggaggcatttcgcaggaatccggactactggtttcctacggtgtgaatctgaggacactgactcctggtacttggcaggcaatgacgctccctgaggatatcaaagcgttagtcggacctggtgttggtttacgtctggacgctcccaacttcagcgacgtattcaatacgatcaaatcgggtctccgctatacgaccgcagtaaccttgctgctggcctattttgcagcgatctag

SEQ ID NO: 7261 - DNA, 957 bp, Pseudomonas aeruginosa
atgaagaagagacctttagaagatcttttttttgcgatgtacagagggaagcagagtttcgaacactttgccaattgctctgtcgaaggtttatatgagccggtgatggtgaatggacgactcgtatataaaaccgataaggatctgcgtgcgtatcatcggtttctaaataaattcttgtttgaaaggcttcctgttgttgatgatgttgtgttttcttatcgtaaaggtgttaacgccgtagatgctgtcgaaaagcatgcaggtagtaagttttattttcaaactgatttaagggatttcttcagtagtctaactaagtctgatgttagaagaactctggaatgggcgaaagatgtttgtgttatttcagacttagatgtttgggttgagagaattctgaagttggttactattggtgattctttgccgatggggttttcgacttcccctgcaattagcaatgcatgcttatactctctggatgggatattaaagacgcattgtttaagtaatggtgttatatatactcgttatgcagatgatctgattttttcctcgtcgaacaagcaggcgcttgatcctttgtttggggtcgtgtgtcgtaccctccaatctgagttttcagggcggatgggaataaattcacagaagacaaagtacctaagaaagggggggaaaattaagctgctggggcttaatgttcttcctaatggaagagttactgtggatatgcggcataaaaaagaaatagaggttcgtcttttttattacgtaaaagacagagctaggtttttgaagatcatgggcgaggtggatgatgaaaaagctattaagaaattctctggtttaataaactacgtaaatactgttgatccggcttatcttgataagcttcgcaagaagtatggcttaacgattgttgatatgtttattcataaatcaccgaagctctag

SEQ ID NO: 7262 - DNA, 279 bp, Pseudomonas aeruginosa
gtgttcccacagcaatggaggtaccggctcatgcgagtcgagacaattagttatttgaaacgtcatgcggctgacctggatttatccgagccaatggtcgtcacgcagaacggtgttcctgcctatgtggttgagtcatatgctgagcggaagcagcgcgatgaagcaattgcgctggtgaagttgcttgcgattggctcccgccagtacgcagaaggcaagcatcgctctgttgatgatttgaaagctcgcctttccaggaggttcgctcagccagaa

SEQ ID NO: 7263 - DNA, 129 bp, Pseudomonas aeruginosa
ttgaggtggttcaaattcggtctgaattcggattatgatgttggagccgacggtagacagactgccgacgcgcgaatcccactcgtcgcctggatatggagcgtggtggagttcgaacaccgtagaacc

SEQ ID NO: 7264 - DNA, 2607 bp, Pseudomonas aeruginosa
atgggtaaatcgctggtcatcgtggaatccccggccaaggccaagaccatcaacaagtacctgggcagccagtacgtggtgaagtcgagcatcggccacatccgtgacctgcccaccagtggttcgtcgagttccaaggagccggcggccaagggccgcaagagcgcctccgaggcgccggcgctgtcaccgaaggagaaggccaggcgccaactggtctcgcgcatgggggtcgaccccgagcatggctggaaggccaagtacgagatcctgcccggcaaggaaaaggtcatcgacgagctgcgccgcctggccaaggacgccgacaccgtctatctcgcgaccgacttggaccgcgaaggggaggccatcgcctggcacctgcgggaagccatcggcggcgacgaaagccgctacaagcgcgtggtattcaacgaaatcaccaagaaggccatccaggaggccttctcccagcccggcgagctcgatatcaaccgggtgaacgcccagcaggcgcggcgtttcctcgaccgcgtggtcggctacatggtctcgccgctgctctggcagaagattgcccgtgggttgtccgccggccgcgtgcagtcggtggcggtgaagctggtggtggagcgcgaacgcgagattcgcgccttcgtcccggaagagtactgggaagtgcatgccgacctcggtaccgccaagggcgccaacgtgcgcttcgaggttacccgtgagaagggcgaggccttcaagccgctcaacgaagcccaggccatggcggccctggaaaagctcaaggcctcggcctatagcgtcgccaagcgcgaggaccggccgacctccagccgaccctcggcgccgttcatcacttccaccctgcagcaggcggcgagcaaccgcctgggcttcggggtgaagaagaccatgatgatggcccagcgtctctacgaggccggctacatcacctacatgcgtaccgactcgaccaacctgtcggccgatgccattggcatggtccgcggtttcatcgaggacgagttcggccagaagtacctgccgggcaaggccaacgtctactcgagcaaggagggcgcccaggaagcgcacgaggcgatccgtccttccgacgtcaacctcaagccgacccagctgtccggcatggagcgtgacgccgagcgcctgtacgacctgatctggcgccagttcgtggcgtgccagatgaccccggccgaatacctctcgaccagcgtgagcgtcaccgccggcgatttcgagctgcgcgccaagggccgcatcctcaagttcgacggttatacccgggtactgccgcagcagagcaagccgggcgaggacgacgtcctgccggaaatgaaggaaggcgagaacctcaagctgatcaagctcgatccgagccagcacttcaccaagccgccggcgcgctactccgaagcgagcctggtcaaggaactggagaagcgcggtatcggccgcccctcgacctacgcggcgatcatctccaccatccaggagcgcggctacgtaaccacccacaaccgccgcttctatgcggagaagatgggcgacatcgtcaccgatcggctcaacgagagcttcgccaacctgatggactacggtttcaccgccgggatggaggagcatctcgacgacgtggcccagggcgagcgcgactggaagcacctgctcgacgagttctacggcgatttcaagaagaagctcgaggtggccgaagtcagcgagaaggggatgcgcgccaaccagccgaccctgaccaacattccctgccgcgagtgcggccggccgatgatgattcgtaccgcctccaccggcgtgttcctcggctgctcgggctacagcctgccgccgaaggagcgttgcaaggcgaccgtcaacctgattcccggcgacgagatcgccgcggacgacgagggcgagtccgagtcgcgggtgttgcgtggcaagcatcgctgcccgatctgcagtaccgcgatggacgcctacctgctggacgagaaacacaagctgcatatctgcggcaacaaccccgactgtccgggctacgagatcgaggaaggccagtaccggatcaagggctacgaagggccgagcctggaatgcgacaagtgtggcagcgagatgcagttgaagaccggccgtttcggcaagttcttcggttgcaccaatccgacctgcaagaacacccgcaagctgctgaagaatggcgaggcggcgccgccgaagatggacgccatccgcatgcctgaattgaagtgcgagaaggtggacgatatctacgtgctgcgcgacggcgcttcgggcatgttcctggccgccagccagttcccgaagaaccgcgagacccgcgcgccgttggtgagcgagatcatcccgcacaaggccgagctggatcccaagtaccattacctctgcgacgccccgcagaaagacccggacggccgtcccgcggtgatccgtttcagccgcaagaccaaggagcaatacgtgcagtccgaggtcgatggcaagcccaccggctggcgcgccttctacgatggcggcaagtggaaggtcgaagacaagcgctga

SEQ ID NO: 7265 - DNA, 687 bp, Pseudomonas aeruginosa
atgggtcagaaagtacatcccaatggcattcgcctgggtatcgtcaaggagcacacctccgtttggtacgcagaccgcaagaactatgcggattacctgtttgccgacctgaaggtgcgtgagtacctccaagacaaactaaaaagcgcgtccgtaagccgtatcgatattcatcgtccggctcaaaccgcacgcatcaccatccacaccgctcgtcccggcatcgtgatcggcaagaaaggtgaagatgttgagaaactgcgccaggacctgaccaagcaaatgggtgtgcccgtgcacatcaacatcgaggaaatccgcaagccggaactcgatgccatgctggttgcgcagagcgtagcccagcagctggagcgtcgcgtaatgttccgtcgcgccatgaagcgcgccgtacagaacgccatgcgcattggtgccaagggcatcaagattcaggtcagcggtcgtctgggtggggctgaaatcgcccgtaccgaatggtatcgcgaaggtcgtgtgcccctgcacaccctgcgcgccgatatcgactatgccacctacgaagcgcacaccacttacggtgtgatcggtgtcaaggtttggatcttcaagggcgaggtcatcggtggccgccaggaagagctgaagccggtagcacccgctcctcgtaaaaaagctgctaggtaa

SEQ ID NO: 7266 - DNA, 636 bp, Pseudomonas aeruginosa
atgacaattggtgttgtcggtcgtaaatgcggcatgacccgcattttcaccgaggaaggtgtctctattccggttacggtcatcgaggtcgagccgaatcgcgtcacccagttcaagactgaagaaaccgatggctaccgtgcagtgcaagtcaccgccggcgagcgtcgtgcttctcgcgttaccaaagcgcaagctggtcactttgccaaggcgaatgtcgccgccggtcgcggcgtgtgggaattccgtctgggcgaagagcagtatgccgctggtgaccagatcactgtcgatctgttccaggcaggccagatggtagacgttaccggcgagtccaagggtaagggcttcgcgggcaccatcaagcgctggaacttccgtggtcaggataacacccacggtaactccgtttcccaccgcgtcccgggttccatcggccagtgccagactcctggtcgagtgttcaagggcaagaaaatgtccggtcatctgggtgcggagcgggtaaccgttcaatccctggagatcgtgcgcgtcgatgctgaacgcaatctgctgctggtcaagggtgccgttcccggcgctaccggcggtgatgtgatcgtgcgtccggcagccaaggctcgcggttaa

SEQ ID NO: 7267 - DNA, 561 bp, Pseudomonas aeruginosa
atgaatatccccaatctgctcacgttactgcgcgtcctgctcattccgatcttcattctgctgttctatctgccgacgtcctggagctacctgaccgccagtgccgtgttcgccctggccgccgccaccgactggctggacggctacctcgcccggcgcctcggccagagcacgccgttcggcgccttcctcgacccggtcgcggacaagctgatggtggcggttgcgctggtcttgctggtggaagagcacgccaacctgtggctgaccctgccggcggtgatcatcatcggccgcgagatcgtggtttccgccttgcgtgagtggatggccgaactgggggcgagggcgcaggtcgcggtgtccaacctgggcaagtggaagaccgcggcgcagatgctggcgctggtcattctcctggcgaatccgccgctgatgaccttctgggtgattctcggctacgtgctgctgatcatctccgcggcgctgaccctgtggtccatggtgcactacctgctggccgcgtggccgcatctgtcgaccaccccgaaagagaaataa

SEQ ID NO: 7268 - DNA, 3126 bp, Pseudomonas aeruginosa
atgaattgcgcagctacaggcggtgcgagcatgggtgcatcagaacgatccacgaacgacccttccgagctgcaaccctgcagtctccctgcctccgcttctcctcgaaaaagccgtctccgccaacgcctgatgctgatcggcttcgccttgccgatcctcgccgcggtgggcatcgtggtacttcacgaagcgcacacctcgcggctgcaggcacgcgagctggcacgctatgccgcgaccctggactacgaggtgcgccagggtcccagcgaggccatcctgttcccggcggacggccccttcgaccgccgcctcggctaccagttgctgccttcgttcatgcagcgcctgtacgaccgcgactacgccatcacccgccaggcgcacttctccccggcactgatgcgctacgccgaacaccggctgttcccgccctacgcggaaaaggcccaggccgggctggacatcgccgattgccgcggcgtgccgatctacgacttccgctatccgcaacggcgctacgcgaacttcgccagcctgccgccgctggtggtgcagagcctgctgttcatcgagaaccgcgacctgctcgatcacgaacgcccctacctcaacccggcagtggactggggtcgcttcacccaggcggcgctgtcgcaggtcggcaagatgctcggcttcagcgcgcactcctccggcggcagcaccctggcgacccagatcgagaaataccgccactctgccgaagggcgcaccggcagcatcggcgacaagctgcggcagatgctctcggccagcgtacgcagctatcgcgaaggcccggccaacttcgccgcgcgccaggacatcgtgctcacctacctcaactcggtgccgctgtcggcggcgccgggctacggcgaggtcaccggcctggccgatggcctgtgggtctggtacggcgccgactaccggcaggtcggcgaggcactcgacggcaaggccggactcgccgcccagggcctggccctgcgccaggtgctggcgctgatgatcgcccaccgccggccttccttctatctggcgccgcgcggccgcgacgagctggaccggatgaccgacagccacctgcgggtcctgacccaggccggcgtcatcgaggcgccgttacgcgatgcggcgctggcgcagaagctggcgttccgcgacccacgcagccagccgacggtgcaaccgctgccgaccaacaagggcgtgaccctggctcgcacccgcctggccgggatgctcggcgtgccactgtacgacctcgaccgtctcgacctgcgggccaataccaccctccagcacgagttgcaggaaagcgtcaccgcctacttgcagaaactcgccgacccggactacgccgcccagctcgggctgatcggcgaacgcctgctgaccccgacctcgacccgctcggtacgctacagcttcaccctgttcgaacgtacgccgagcggcaaccaggtgcgggtgcagaccgacaacaccgaccagcccttcgacatcaacgaaggcagcaagctggagttgggctccaccgccaagctacgggtgctggccagctacctggagaccgtcgcgcagatccaccgcgactatggcggcatgagcgtcgccgagctgcgcaaggtggaagtggagccgctcgatttcatcctccgctggggcatcgactacctggtcgccagccgcgaccgcgatctttccgcgatgctccaggcggccatggaacggcgctattcggccagcccctacgagagcttcttcaccggcggcgggctgcacaccttcaacaacttccgcaaggaagacaacggccgccggccgatgctgctggaagccctgcgcgaatcgatcaacctgcccttcgtgcgcctgctgcgcgacctgatccgccacgatatctaccagaacgccgggagcaaggtgcagttgctggccgacgacaaggacccgcgccgcgccgactacctcgaccgtttcgtcgacaaggaaagccaggtctacctgcgccgcttctgggtcaagtaccgcgacaaggacgccaaccagcgcctggagaccttcctcgacggcctgcgtccctggccggtgcggctggccgcgatccaccgctacctgcagccacaggccgacctggcgagcttcagcgccttcctccgcgaacgcctgccccgcggcagcctgaccgacaagcgcgccgccgagctgtacgagcgctacggcccgggcaagttcaacctcaacgaccagggctacgtcgcccgcgtgcacccgctggagctatggctgctcggctatctgcagaagcagccgcaggcgaccttcggcgaggcggtggcggccagcggcgccgagcgcaaggaggtctacggctggctgttcaagtcgcggcacaagaacgcccgcgacaagcgcatccgcatcctgctggaggtggaggccttcctcgacctgcaccagcaatggaagaaactcggctatcccttcgatcacctggtgccctcctacgccaccgccctgggcagctccggcgaccgcccggcggcgctggccgaactgatggggatcatcgtcaacgatggcgtgcgcatgccgaccctgcgcctggagcacctcgacttcgccctgggtacgccctacgagacgcgcttcgccccggaagccaccctcggccagcgggtgatgacctcggaggtcgccacgaccctgcgcaacgcgctgtcccaggtggtcgacgccggcaccgcgcggcgcctgcaaggcaccttcagccgtccggacggcgcgccactggtgatgggcggcaagaccggcaccggcgacaaccgcctgcagaccttcagcgccggcggccacgtgcgcagttcgaaggcactgaaccgcaccgccactttcgtcttctacatcggcccgcggcacttcggtaccctcaccgcctacgtcgacggcagcgagtcgagccagttcaagttcacctcggccctgccagtgcaggtactcaagggcatggcaccgctcctcagggactacctcgacccacgcaccgccacccgctgccaggtaccgttgtcgccgcaacagatcggccgcctgtag

SEQ ID NO: 7269 - DNA, 984 bp, Pseudomonas aeruginosa
atgaagccgctggaacgactggaaccgctgttcgcagacgaaaccgaagaggacatcgatcaccgcgccgcctactggttcagccggcgtcgttccgggcatttcagcgctgcctgccgggccgagctggaggattggctacgcgccgatccgcgccatcgcgaagcgctcgagggcatggagcggctctggcgcgaattcgacggcctgccgcgcccggcgctggacgatattcccgagccggtgccggcctggcgcctgccccgggcgctggcggcggcgttcttcgtgttctgcgcgctgctcgtcgccaccctgttctggcgcgaccagtcgctcggaccgaacctcgcctacggcacggcacctggcgagcagcgcgaggtggtcctggcggacggatcgaagctgttcctcgacgtcgatacccaggtgcaggtgcgttacgccgagcgcacccgcgacgtgctgttgaagaaaggcgaggtgttcttcgtggtcagccacgatccggcccggcctttccgggtcggcagcggcgacagccgggtcaccgtactcggtacccagttcagcgtccggcgcaacgcgcaggccctcgccgtggcggtgaaacaggggcgcgtggcgttgcagccgtccctggagaaggatgccgaacatgtgctgctggctggcgacagcgcgcgcctggacctcgccgagcagcgcctggaactcggccatgtggcgccggagcaggtcgccagttggcgcgatgggcaactggtgttccgcgacaagccgctgggcgaactggtggaggaactgtcgcgctatcgcgccgcgccgatccgcctgggagatccccggcttgccggcaagcgggtctccggtacggtgcggatcgcccgccccgacgattttctcctcgccctgccggcgctattgccggtgcgggtgcagccgcaggctggtggcgaggtgctgatcctggcgcgctga

SEQ ID NO: 7270 - DNA, 1839 bp, Pseudomonas aeruginosa
atgcccgattaccgctcgaaaacctccacccacggccgcaacatggccggcgcccgcgccctctggcgcgccaccgggatgaaggacgaagacttcaagaagccgatcatcgccatcgccaactccttcacccagttcgtgcccggccacgtgcacctgaaggacctcggccaactggtcgcccgcgagatcgagaaggccggcggcgtggccaaggaattcaacaccatcgccgtcgacgacggcatcgccatgggccacgacggcatgctctattcgctgccgagccgggagatcatcgccgactccgtggaatacatggtcaacgcccactgcgccgacgccatcgtctgcatctccaactgcgacaagatcacccccggcatgctgatggccgcgctgcgcctgaacatcccggtagtgttcgtctccggcgggccgatggaagccggcaagaccaagctggccagccacggcctggacctggtcgatgccatggtggtggccgccgacgactcctgctccgacgagaaggtcgccgagtacgagcgcagcgcctgcccgacctgcggctcctgctccggcatgttcaccgccaactcgatgaactgcctgaccgaggcgctcggcctgtcgctgccgggcaacggctcgaccctggccacccacgccgaccgcgagcaactgttcctacgcgccgggcgcctggccgtggaactctgccagcgctattacggcgaaggcgacgacagcgtgctgccgcgcaacatcgccaacttcaaggccttcgagaacgccatgaccctggacatcgccatgggcggctcgaccaataccatcctgcacctgctggccgccgcccaggaggccgaggtgccgttcgacctgcgcgacatcgaccgcctgtcgcgcaaggtgccgcaactgtgcaaggtggcgccgaacatccagaagtaccacatggaagacgtgcatcgcgccggcggcatcttctccatcctcggcgaactggcccgcggtggcctgctgcacaccgacgtccccaccgtgcacagcccgagcatggccgacgccatcgcccagtgggacatcacccagacccgcgacgaagccgtgcacaccttcttcaaggccggtccggcgggcatcccgacccagaccgcgttcagccagaacacccgctggccgagcctggacgacgaccgcgccgagggctgcatccgcagcgtcgagcatgcctattccaaggaaggcgggctggccgtgctctacggcaacatcgctctcgacggctgcgtggtgaagaccgccggggtcgacgagtcgatccacgtgttcgaaggcagcgcgaagatcttcgaaagccaggacgccgcggtgaaaggcatcctcggcgacgaggtgaaggccggcgacatcgtgatcatccgctacgaaggaccgaagggcgggccgggcatgcaggaaatgctctatccgaccagctacctgaagtccaagggcctgggcaagcagtgcgccctgctcaccgacggacgcttctccggcggcacctcgggcctgtccatcggccacgcctccccggaagccgccgccggcggcgccatcggcctggtgcaggacggcgacaaggtgctgatcgacattcccaatcgctcgatcaacctgctggtcagcgacgaagaactcgccgcacgccgcgccgaacaggacaagaagggctggaagccggccgcgccgcgtgcccgccgcgtcagcaccgcgctcaaggcctacgccctgctcgccaccagcgccgacaagggcgcggtacgcaacaaggcgctgctggacggctga

SEQ ID NO: 7271 - DNA, 1452 bp, Pseudomonas aeruginosa
atgcaactcaaagatgccaagctgttccgtcaacaagcctacgtcgatggcgcctgggtggatgccgacaacggccagaccatcaaggtgaacaacccggccaccggcgagatcatcggcagcgtgccgaagatgggcgccgccgagacccgccgcgccatcgaggctgccgacaaggccctgccggcctggcgtgcgctgaccgccaaggagcgcgccaacaagctgcgccgctggttcgacctgatgatcgagaaccaggacgacctggcccgcctgatgaccatcgagcagggcaagccgctggccgaggccaagggcgagatcgcctacgccgcctccttcctcgaatggttcggcgaagaagccaagcgcatctacggcgacaccattcccggccaccagccggacaagcgcatcatcgtgatcaagcagccgatcggcgtgaccgcggccatcacgccgtggaacttcccctcggcgatgatcacccgcaaggccggcccggccctggccgccggctgcaccatggtgctcaagcctgcttcgcagaccccgtattccgccctggccctggccgaactggcagagcgcgccggcattccgaagggcgtgttcagcgtggtcaccggtagcgccggcgaagtcggcggcgagctgaccagcaacccgatcgtgcgcaagctgaccttcaccggttccaccgaaatcggccgccaactgatggccgagtgcgcccaggacatcaagaaggtgtccctggagctgggcggcaacgcgccgttcatcgtgttcgacgacgccgacctggacgccgccgtcgagggcgcgctgatttccaagtaccgcaataacggccagacctgcgtctgcgccaaccgcctgtacgtgcaggacggcgtgtacgacgccttcgtcgacaagctgaaggccgccgtggccaagctgaacatcggcaacggcctggaagccggcgtgaccaccggtccgctgatcgacgccaaggccgtggccaaggtcgaggaacacatcgccgacgcggtctccaagggcgccaaggtggtttccggcggcaagccgcacgccctcggcggcaccttcttcgagccgaccatcctggtcgacgtgccgaagaacgccctggtgtccaaggacgagaccttcggcccgctggcgccggtgttccgcttcaaggacgaggccgaggtcatcgccatgtccaacgacaccgagttcggcctggcgtcctacttctacgcccgcgacctggcccgcgtgttccgcgtcgccgagcaactggagtacggcatggtcggcatcaacaccggcctgatctccaacgaagtggcgccgttcggcggcatcaaggcctcgggcctgggccgcgaaggttccaagtacgggatcgaggactacctcgagatcaagtacctctgcctgggcggtatctga

SEQ ID NO: 7272 - DNA, 915 bp, Pseudomonas aeruginosa
atgcacatccgtattctcggttcggccgccggcggcggcttcccccagtggaactgcaactgccgcaactgtcgcggggtccgcgacggcagcgtagcggcccagccacgcacgcaatcctccatcgccctgtccgacgacggcgagcgctggatcctctgcaacgcctcgcccgacatccgtgcccagatcgccgccttcccggccctccagccggcgcgtcggccgcgcgatacggcgatcggcgcgatcgtcctgctcgacagccagatcgaccacaccaccggcctgctcagcctgcgcgaaggctgcccgcacgaagtctggtgcacgcagatggtccaccaggacctcagcgaaggcttcccgctgttccccatgctttcccactggaacggcggcctgcgccaccggccgatcgccctcgatggcgagcctttcgccattccggcctgtccgcgcctgcgcttcaccgcgatccccctgcgcagtagcgcgccgccgtattccccgcatcgcggcgatccgcatccgggcgacaacatcggcctgttcgtcgaggacctcgatagcgccggtgcgctgttctatgcaccgggcctcggcgaggtggacgaggcgctgctcgaatggatgcgccgcgccgactgcctgctggtggacggtacgctctggcgcgacgacgagatgctggtctgcgaggtcggcgacaagctcggccggcagatggggcacctggcgcagagcgggccgggcggcatgctcgaggtgctggcgaaggtgccggccgcgcgcaaggtgctcatccacatcaacaacaccaatcccatcctcgacaccgcttcggccgaacgcgccgagctggatgccagtggcatcgaagtggcctgggatggcatgcacatccagctgtag

SEQ ID NO: 7273 - DNA, 4863 bp, Pseudomonas aeruginosa
atggcgttcttcaccgcggccagcaaagccgatttccagcatcaactgcagacggcactggcgcagcacctcggcgacaaggcgttaccacaagtcacgctgttcgccgaacagttcttcagcctgatctccctcgatgaactgacccagcgtcggctttccgacctggtcggttgcaccctttccgcctggcgcctgctggagcgcttcgaccgcgaccagcccgaagtccgcgtatacaaccccgactacgagaagcacggctggcaatccacccacaccgcggtagaagtgctgcacccggacctgccgttcctggtcgactcggtgcgcatggaactgaaccgtcgcggctacagcatccataccctgcagaccaacgtcctcagcgtgcgccgctcggccaagggcgagctgaaggaaatcctgcccaagggtagccagggcaaggacgtcagccaggaatcgctgatgtacctggagatcgaccgttgcgcccacgccggcgaactgcgggcgctggagaaggccatcctggaagtgctcggtgaagtacgcgtgaccgtcgccgacttcgaaccgatgaaggccaaggcccgcgaactgctgacctggcttggcaaggccaagctgaaggtgccggcggaggaactgaaggaagtacgcagctatctcgaatggctgctggacaaccacttcaccttcctcggctacgaggaattcagcgtcgccgacgaggccgacggcgggcgcatggtctacgacgagaaatccttcctcggcctgacccgtctgctgcgtgccggcctgagcaaggatgacctgcacatcgaggactatgccgtcgcctacctgcgcgaaccggtcctgctgtccttcgccaaggctgcccatccgagccgtgtgcaccgcccggcctacccggactacgtgtcgatccgcgagctggacggcaagggccgggtgatccgcgagtgccgcttcatgggcctgttcacctcctcggtgtacaacgagagcgtcaacgacatccccttcatccgcggcaaggtcgccgaagtgatgcggcgctccggtttcgacaccaaggcccacctcggcaaggaactggcccaggtgctggaagtactgccgcgcgacgacctgttccagaccccggtggacgagctgttcagcaccgccctggcgatcgtccgcatccaggagcgcaacaagatccgcgtgttcctgcgcaaggacccctacggtcgcttctgctactgcctggcctacgtgccgcgcgacgtgtattccaccgagacgcgcctgaagatccagcaggtcctgatggagcgcctgcaggcgagcgactgcgagttctggaccttcttctccgagtcggtgctggcccgcgtgcagttcatcctccgcgtcgacccgaagtcgcgcatcgacatcgacccggcgcgcctggaggaagaagtgatccaggcctgccgttcctggcaggacgactacagcagcctggtggtggaaaacctcggcgaggccaagggcaccaacgtcctggccgacttcccgaaaggcttcccggccggctaccgcgagcgcttcgccccgcacttcgcggtggtcgacctgcagcacctgctcagcctctccgagcagcgcccgctggtgatgagcttctaccagccgctggcgcagggcgagcagcaactgcactgcaagctgtaccacgccgacaccccgctggccctgtccgacgtcctgccgatcctggagaacctcggcctgcgcgtgctcggcgaattcccctaccgcctgcgccaccagaacggccgcgaatactggatccacgacttcgccttcacctacgccgaagggctggacgtggacatccagcagctcaacgagatcctccaggacgccttcgtccacatcgtcagcggcgacgccgagaacgacgccttcaaccgcctggtgctgaccgccaacctgccgtggcgcgacgtcgccctgctgcgtgcctacgcgcgttacctgaagcagatccgcctgggcttcgacctcggctacatcgccagtgcgctgaatgcccacaccgacatcgcccgcgagctggtgcggctgttcaagacccgcttctacctggcgcgcaaactcaccgcggaagacctggaagacaagcaacagaagctggagcaggcgatcctcggtgccctcgacgaagtccaggtgctcaacgaggaccgcatcctgcggcgctacctcgacctgatcaaggcgaccctgcggaccaacttctaccagcccgacggcaacggccagaacaagagctacttcagcttcaagttcaacccgaaggccattccggagctgcccaggccggtgcccaagtacgagatcttcgtctactcgccgcgcgtcgagggcgtgcacctgcgcggcggcaaggtggctcgcggcggcttgcgctggtcggaccgcgaggaagacttccgcaccgaggtgctcggcctggtcaaggcccagcaggtgaagaacgcggtgatcgtgccggtcggcgccaagggcggcttcgtcccgcgccgcctgccgcttggcggtagccgcgacgagatccaggccgaggcgatcgcctgctaccggatcttcatttccggcctgctcgatatcaccgacaacctcaaggaaggcgaagtggtgccgccggccaacgtggtccgccacgacgaggacgatccctacctggtggtcgccgcggacaagggcacggcgaccttctccgacatcgccaacggcatcgccgccgagtacggcttctggctcggcgacgccttcgcctcgggcggctccgccggctacgaccacaagggcatggggattaccgccaagggcgcctgggtcagcgtgcaacggcacttccgcgaacgcggcatcgacgtgcagaaggacaacatcagcgtcatcggcatcggcgacatggccggcgacgtgttcggcaacggcctgctgatgtcggacaagctgcaactggtggccgccttcaaccacatgcatatcttcatcgacccgaacccggacgccgccagcagcttcgtcgagcgccagcgcctgttcaacctgccgcgttcgagctgggccgactacgacgccaagctgatctccgccggcggcgggatcttcctgcgcagcgccaagagcatcgccatcaccccggaaatgaaggcgcgcttcgacatccaggccgacaggctggcgcccaccgagctgatccatgcgctgctcaaggcgccggtcgacctgctctggaacggcgggatcggtacctacgtgaagtcgagcaaggaaacccacgccgatgtcggcgacaaggccaacgatggtctgcgcgtcgacggccgcgagttgcgcgcgaaggtggtgggcgagggcggcaacctgggcatgacccaactggcgcgggtcgagttcggcctgcacggcggtgccaacaacaccgacttcatcgacaacgccggtggcgtggactgctccgaccatgaggtcaacatcaagatcctgctcaacgaagtggtgcaggccggcgacatgaccgagaagcagcgcaacgcgctgctggtgaagatgaccgacgcggtcggcgccctggtgctgggcaacaactacaagcagacccaggcgctgtccctggcgcaacgtcgcgcccgcgagcggatcgccgagtacaagcggctgatgggcgacctcgaggcgcgtggcaagctcgatcgcgccctggagttcctgccttccgacgaggagctggcggaacgcatcagtgccggccaggggctgacccgcgccgagctgtcggtgctgatctcctacagcaagatcgacctcaaggaatcgctgctgaaatcgctggtgcccgacgatgactacctgacccgcgacatggagaccgccttcccggcattgctggcggagaagttcggcgacgccatgcgccgccatcgcctgaagcgcgagatcgtcagcacgcagatcgccaacgacctggtcaaccacatgggcatcaccttcgtgcagcgcctgaaggagtccaccggcatgagcgcggccaacgtcgccggggcctacgtgatcgtccgcgacgtattccacctgccgcattggttccgccagatcgagaatctcgactaccaggtgcccgctgatatccagctgaccctgatggacgaactgatgcgcctcggccgccgcgccacccgctggttcctccgcagccgccgcaacgagctggacgcggcgcgcgacgtggcccacttcggcccgcgcatcgccgccctcggcctgaagctcaacgagctgctcgaagggccgacccgcgagctgtggcaggcgcgctaccagacctacgtcgacgccggcgtgccggaactgctggcacgcatggtggccggtaccagccacttgtacacgctgctgccgatcatcgaggcgtccgacgtgaccggccaggacaccgcggaagtggccaaggcctatttcgccgtgggcagcgcgctggacctgacctggtacctgcaacagatcaccaacctgccggtggagaacaactggcaggcgctggcccgcgaggcgttccgcgacgacctcgactggcagcagcgggcgatcaccgtctcggtgttgcagatgcaggacggaccgaaggaggtcgaggctcgcgtcggcctgtggctggaacagcacctgccgctggtcgagcgctggcgggcgatgctggtcgaactgcgtgccgcgtcgggtaccgactacgccatgtacgccgtggccaaccgcgagctgatggacctggcgcagagcagccagcacggtgtctgcatcccctga

SEQ ID NO: 7274 - DNA, 1536 bp, Pseudomonas aeruginosa
atgcgttggatttctcgtcccggctggcccggacacctgctggcactcgccgcaggcgcgctcacacccctggccctggcgcccttcgactactggccgctggcgatcctctcgatcgccctgctctatctcggcttgcgcggccttcccggcaagtccgccctgtggcgcggctggtggtacggtttcggcgcgttcggcgccggcaccagctggatctacgtcagtatccatgactacggcgccgcctcggtgccgctggcaagcctcctcatgctcggcttcaccgccggcgtcgccttcttcttcgccctgccggcctggctgtgggcgcgctgcctgcgccgcgacaacgcgccgctgggcgacgccctggcgttcgccgccctgtggctggcactggagctgttccgcagttggttccttaccggtttcccctggctctacgccggctatagccagttgcagggaccgctggccgggctggtaccggtgggcggcgtatggctgtcctccttcgtcatcgccctcagcgcggccctgctggtgaacctgccgcgcctcttcccgcacggtgccagcctgcttctggggctggtcctgctgctcggcccgtgggcggccggcctctatctcaagggccacgcctggacccattcggccggcgaaccgctgagggtagtggcgatccagggcaacatcgcccaggagctgaaatgggacccgaatcaggtccgcgcgcaactcgacctctaccgcgacctgagcctgccgcagcaggacgtcgacctgatcgtctggccggaaaccgcggtgccgattctccaggacatggccagcggctacctcggcgccatgggccaggtcgccgacgagaagaacgccgcgctgatcaccggggtcccggtgcgtgaacgtctcgccgacggcaagagtcgctacttcaacggcatcaccgtggtcggcgaaggcgcgggcacctacctcaagcagaagctggtgccgttcggcgagtacgtgccgctgcaggacctgctgcgcggcctgatcgccttcttcgacctgccgatgtccgacttcgctcgcggtccggccgaccagccgctgctcaaggccaagggctaccagatcgccccgtacatctgctacgaagtggtctacccggagttcgccgccgcgctcgcggcgcagagccaggtgttgctgacagtgagcaacgacacctggttcggcacttccataggccctttgcagcacctgcagatggcacagatgcgcgccctggaaagcggtcgctggatgatccgcgcgaccaacaacggcgtcaccggcctgatcgatccctatggccggatcgtccggcagatcccgcagttccagcagggcatcctgcgcggcgaggtgattcccatgcagggcctgacgccctatctgcaataccgcgtctggccgctggccgggttggccggcgtgctgctgctatgggctctgctcggccgccagttgcgtccgcaggagcgacgcctgttcggctga

SEQ ID NO: 7275 - DNA, 702 bp, Pseudomonas aeruginosa
atggcccagtcggaaaccgtcgaacgcattctcgatgcggcggaacagctgttcgcggaaaaaggcttcgccgaaacctcgttgcgtctgatcaccagcaaggccggggtcaacctggcggcggtgaattatcacttcggttcgaagaaggcgctgatccaggcggtgttctcgcgcttcctcgggccattctgcgccagcctggaaaaggagctggatcgtcgccaggccaagcccgaggcccagcacgccaccctggaggacctcctgcacctgctggtgtcccaggcgatggcggtgaagccgcgcagcggcaacgacctgtcgatcttcatgcgcttgctcggcctggccttcagccagagccaggggcacctgcgcaagtacctggaggaggtctacggcaaggtcttccggcgctacatgctgctggtcaacgaggctgcgccgaagctgccgcccatcgagctgttctggcgcgtgcacttcatgctcggcgcggccgccttcagcatgtcggggatcaaggccctgcgggcgatggcggaaaccgatttcggcgtgaacacttccaccgagcaggtgatgcacctgatggtgccgttcttcgctgccggcatgcgcgccgagagcggcatcgacgatccgctgctggccggggcgcaactgcgcccgcggaacaagacgcccgccaaggcctga

SEQ ID NO: 7276 - DNA, 999 bp, Pseudomonas aeruginosa
atgcaaggctctctgatgctcgacatcggcggcacctggctgaccgccgaggaccgccaaatcctgcgccaccccgaggtgggcgggctgatcatcttcgctcgcaacatcgagcatcctgcccaggttcgcgaactgtgtgcggccattcgcgccatccgtcccgacctgttgctggccgtcgaccaggaaggagggcgcgtgcagcgcctgcgccagggcttcgtgcgcctgccggcgatgcgcgcgatcgccgacaaccccaatgccgaagagctggccgagcattgtggctggctgatggcgaccgaggtgcaggcggtcggcctcgacctgagtttcgcgccggtgctggatctcgatcaccagcgcagcgccgtggtcggtagccgcgccttcgagggcgacccggagcgtgccgcgctgcttgccggtgctttcattcgcggcatgcatgccgccgggatggccgccaccggcaagcattttcccggtcacggctgggccgaggccgattcccatgtggcgattcccgaagacgcgcgcagtctcgaggaaatccggcgcagcgacctggttccgttcgcccgcctggccggacagctcgacgcgctgatgccggcccatgtcatctatccgcaggtcgacccgcagcccgccggcttttcccggcgctggttgcaggagatcctgcgcggcgagctgaagttcgacggggtgatattcagcgacgacctgtcgatggccggcgcccatgtggtcggcgacgccgccagccgcatcgaggccgccctggccgcgggctgcgacatgggcctggtgtgcaacgaccgggcttccgccgagctggccctggctgccctgcaacgcctgaaggtgaccccgccgtcgcgtctgcaacgcatgcgtggcaagggctacgcgaataccgactatcgccagcagccgcgctggctggaagcactgtccgcgttgcgcgctgcgcaactgattgattga

SEQ ID NO: 7277 - DNA, 435 bp, Pseudomonas aeruginosa
atgcaactgaacgatctgcgttccgcgccgggtgcccgtcgcgaaaagcaccgtccgggccgtggcatcggtagcggtctgggcaagaccggtggccgtggtcacaaaggtctgacctcccgctccggtggcaaggtcgctccgggcttcgagggtggtcaacagcctctgcaccgtcgcctgccgaagttcggcttcgtttccctgaaggctatggatcgtgctgaagtacgcacctccgagctggccaaggtcgaaggcgacgtcgtcagcctgcagaccctgaaggatgccaacctgatcaaccagcacgtacagcgcgtcaaagtcatgctgtccggcgaagttggtcgtgcggtcaccctgaaaggtatcgccgccaccaagggtgcgcgtgcggctatcgaagcagctggcggtaaattcgaggactaa

SEQ ID NO: 7278 - DNA, 177 bp, Pseudomonas aeruginosa
atggcaactgtcaaagtcactctggtcaagagcctgaacggccgtctggccaatcacaaggcttgcgtcaagggtctcggcctgcgtcgcatcaatcataccgtcgaagttcaggacactcctgagaaccgcggcatgatcaacaaggcctactacctgctgcgtgtggagggttaa

SEQ ID NO: 7279 - DNA, 534 bp, Pseudomonas aeruginosa
atgtctcgcgttgctaagaaccccgtcaagctgcctgccggcgttgaaatcaaactggctggtcagcaactgtccatcaagggcgccaaaggtgctctggagctcaaggtccatccttcggtcgaagtgatccaggacagcggtgagctgcgttttgctgcgcgtaacggcgaccagcagactcgcgccatggctggtaccacccgtgctctggtgaacaacatggtagtcggcgtcagccagggcttcgagcgcaagctccagctggtcggcgttggttacaaagcgcaggccaagggccaagtgctgtccctgtccctcggcttctcccatccggttgattacgaactgccggccggcatcgtcgctgagacccccagccagaccgatatcctgatcaagggtatcgacaagcagctggtcggtcaggttgctgccgaaattcgcgacttccgtccgccggagccttacaaaggcaagggcgtgcgttacgccgacgaagtcgtccgtcgtaaagaagccaagaagaagtag

SEQ ID NO: 7280 - DNA, 393 bp, Pseudomonas aeruginosa
atgagtatgcaggacccgttagcagacatgctaactcgcatccgtaatgcccagatggctgaaaagaccgtcgtaagcatgccgtcctcgaaactgaaagcggcggtagccaaagtcctgaaggacgaaggctatattgcggatttccagatcagctcggaagtaaaaccccagctgtccatcgaactgaagtacttcgaaggcaagcctgtcatcgaagaggtcaagcgcatcagccgtcctggcctgcgtcagtacaaatccgttgagcaactgccgaaagttcgtggcggcctcggtgtgtcgatcgtctccaccaacaaaggtgtgatgaccgatcgtgctgcccgtgctgctggtgttggcggcgaagtgctctgcactgtgttctaa

SEQ ID NO: 7281 - DNA, 267 bp, Pseudomonas aeruginosa
atggctgaagctcagaaaaccgtccgtacgctgaccggccgcgtcgtcagcgacaaaatggacaagaccgtcaccgtactgatcgagcgtcgcgtcaagcacccgatctacggcaaatacgtcaagcgttcgaccaaactgcacgcacacgacgaatccaatcagtgccgcattggtgacctggtcaccattcgcgaaacccgtccgctggccaagaccaaggcctggaccctggttgatatcgttgaacgcgcggtggaagtctaa

SEQ ID NO: 7282 - DNA, 192 bp, Pseudomonas aeruginosa
atgaaagcgaatgaacttcgtgaaaaatccgttgagcagctgaacgagcaactgctcggcctgctgcgcgaccagttcaatctgcgcatgcagaaagcaactggccagttggggcagtctcacctgctctcgcaggttaagcgcgacatcgctcgcgttaaaactgtgctcaatcagcaagcaggtaagtga

SEQ ID NO: 7283 - DNA, 801 bp, Pseudomonas aeruginosa
atgaaaaagtatcttgcttcattggttctgggcgtctgcgccctggtgggcgtggcttcggtccaggcggccggcgcggtggaggacgcggtcaagcgcggcaccctgcgggtcggcatggacccgacctacatgccgttcgagatgaccaacaagcgtggccagatcatcggcttcgaagtcgacctgctcaaggccatggccaagtccatgggcgtcaagctggagctggtctccaccagctacgacggcatcatcccggcgctgctgaccgacaagttcgacatgatcggctcgggcatgaccctgacccaggagcgcaacctgcgcctgaacttctccgagcccttcatcgtggtcggccagaccctgctggtgcgcaaggaactggaaggcaagatcaagtcctacaaggacctgaacgatccgcagtacagcatcacctcgaagatcggcaccaccggtgagatcgttgcccgcaagctgatcagcaaggccaagtaccacggcttcgacaacgagccggaagcggtgatggacgtggtcaacggcaaggccgacgccttcatctacgactcgccctacaacgtggtggcggtgagcaagttcggcgccggcaagctggtctacctcgaccagccgttcacctacgagccgctggcgttcggcctgaagaaaggcgactacgacagcatcaatttcatcaacaacttcctccatcagatccgcgaagacggcacctatcagcgcatccacgacaagtggttcaagaacaccgagtggctgaaggaaatggaatga

SEQ ID NO: 7284 - DNA, 2565 bp, Pseudomonas aeruginosa
atgcgaatagaccgtttgaccagcaagctgcaactggcgctctccgacgcccagtccctggccgttggccatgaccatccggccatcgagccggtgcacctgctttccgccctgctcgagcagcaaggcggttcgatcaagcccctgctgatgcaggtcggcttcgatatcgccgccctgcgcagcggcctcaacaaagaactcgacgcgctgccgaagatccagagcccgaccggcgacgtgaacctgtcccaggatctcgcacgcctgctcaaccaggctgaccgcctggcccagcagaagggcgaccagttcatctccagcgagctggtattgctggccgcgatggacgagaacaccaggctcggcaagctgctgctcggccagggcgtgtcgcgcaaggcgctggagaatgccgtggccaacctgcgtggcggcgaagcggtgaacgacccgaacgtcgaggagtcgcgccaggcgctggacaagtacaccgtcgacatgaccaagcgcgccgaggaaggcaagctcgacccggtgatcggtcgcgacgacgagatccgccggaccatccaggtcctgcagcggcggaccaagaacaacccggtgctgatcggcgaacccggcgtcggcaagaccgccatcgtcgagggcctggcccagcgcatcatcaacggcgaagtgccggacggcctcaaggacaagcgcctgctggccctggacatgggggcgctgatcgccggcgccaagttccgcggcgagttcgaggaacgcctgaaggcagtcctcaacgaactgggcaagcaggaaggtcgggtcatcctgttcatcgacgaactgcacaccatggtcggcgccggcaaggcggaaggtgccatggacgccggcaacatgctcaagccggctctggcgcgcggcgagctgcactgcgtcggtgctactaccctcgacgagtatcgccagtacatcgagaaggatgccgcgctggagcgccgcttccagaaggtgctggtggacgaaccgagcgaggaagacaccatcgccatcctccgtggtctcaaggaacgctatgaagtgcaccacggggtgagcatcaccgacggcgcgatcatcgccgcggccaagctgtcgcaccgctacatcaccgatcggcaactgccggacaaggccatcgacctgatcgacgaggccgccagccgcatccgcatggagatcgactccaagccggaggaactggatcgtctcgaccgtcgcctgatccagctgaagatcgagcgcgaggcgctgaagaaggaagacgacgaagccaccaggaagcgcttggccaagctggaggaggatatcgtcaagctcgagcgcgaatacgccgacctcgaggagatctggaagtccgagaaggccgaggtgcagggctcggcgcagatccagcagaagatcgagcaggccaagcaggagatggaggcggcgcggcgcaagggcgacctcgagagcatggcgcgcatccagtaccagaccatcccggacctggaacgcagcctgcagatggtcgaccagcacggcaagaccgagaaccagttgctgcgcaacaaggtgaccgacgaggaaatcgccgaagtggtttccaagtggaccggtatcccggtgtcgaagatgctcgagggcgagcgcgagaagctgctgcgcatggagcaggagctgcatcggcgagtgatcggccaggacgaggcggtagtcgccgtgtccaacgccgtgcgccgttcgcgcgccggcctcgccgatccgaaccggccgagcggctcgttcctcttcctcggcccgaccggggtgggcaagaccgagttgtgcaaggcgctggccgagttcctcttcgataccgaggaggcgctggtgcggatcgatatgtccgagttcatggagaaacactcggtggcccgcctgatcggcgcgcctccgggctacgtcggcttcgaggaaggcggctacctgaccgaggcgatccgccgcaagccttactcggtggtgctgctggacgaggtggagaaggcccatccggatgtattcaacattctcctccaggtgctcgaggacggacgcctgaccgacagtcacgggcgtacggtggacttccgcaacaccgtggtggtgatgacctccaacctcggttcggcacagatccaggagctggccggcgaccgcgaggcgcaacgtgccgcagtgatggacgcggtcaatgcacacttccgtccggaattcatcaaccggatcgacgaagtggtggtattcgagccgctggctcgcgagcagatcgccggcatcgccgagatccagctcggtcgcctgcgcaagcgcctggccgagcgcgagctgagcctggaactgagccaggaggcgctggacaagctgatcgccgtcggcttcgacccggtctatggcgcacgcccgctgaagcgggccatccagcgctggatcgagaacccgctggcgcaactgatcctggccggcaaattcgcgccgggtgccagtatctcggcgaaggtggaaggcgacgagatcgtcttcgcctga

SEQ ID NO: 7285 - DNA, 780 bp, Pseudomonas aeruginosa
atgaaaaaactgctcctgctgactgccctggcctccgtcatcagcgtttccgccagcgccgcggaaaagctcatcgtcgccgccacgccgatcccccatgcggaaatcctcgaactcatcaagccgaccctggcgaaggaaggcgtcgacctgcagatcaaggtgttcaccgactacgtgcagcccaacgtgcaggtcgccgagaagcgcctggacgccaactacttccagaccctgccgtacctggagaacttcaacaaaggcaagggcaccaacctggtcaccgtggtcggcgtacacgtcgagcccttcggtggttattcgaggaaatacaagtcgctggccgagttgcccgacggcgccaccgtcgccattcccaacgaaggcagcaacagcgggcgcgccctgctgctgttgcagaaggccggcctgctcaagttgaaggatccgaacaacgccctggccacgcccaaggacatcgccgagaacccgaagaacctgaaattcaaggaactcgaatcggccctgctgccgcgcgtgctggaccaggtcgacctggacctgatcaacaccaactacgcgctggaggccaagctcaacccggccaaggacgcgctggtcctggaagaccgcgactcgccctatgtgaactacctggtggcgcgtccggacaacaaggacagcgacgccctgaagaagctttccgccgcgctgaccagcccggaagtgaaagccttcatcgagaagaaatatgccggcgcggtggtcccggccttctga

SEQ ID NO: 7286 - DNA, 1269 bp, Pseudomonas aeruginosa
atgtccctgatcgccgaccacggcttcgccttcctcgtactcgcctgcctgttcggtttcttcatggcctggggcgtcggcgccaacgacgtcgccaacgccatgggcacttcggtggggtcgcgcgctctgaccatccgccaggcgatcctggtggccatggtcttcgagttctgcggtgcctatttcgctggtggcgaagtcaccgaaacgatcaggagcggcatcgtcgacccgcagtacatgacccccgacctgctggtcttcggcatgctctcggccttgctggccgccggggtctggctgttgctggcgacgatcaagggctggccggtgtcgaccacccactccatcgtcggcgcgatcatcggcttcgcctcggtcggtgtctcggtgcacgcggtgcactggggcgcgatcggcccgatcgtcgccagttgggtggtgacgccggtgctgtccgggctgctcgccttcgccctgttcaggagcgtgcagtggctggtactgcatgccgaggacccgttccgcagcgcgcgccgctacgtgccgctgtacatgttcctggcgggcttcatggtcgcgctgatgaccgtcggcaagggcctgaagcatgtcggcctggagctttccggcctccagacgctgggcctggcgttgctcgccggcggcctggtgatgggcctgggcatcgtcctgctgttgcgcatccgacccactggcggagccgatccgcgtggcggtttcgccagcgtcgagcgggtcttcgcggtgctgatgatcttcaccgcctgctccatggctttcgcccatggtgccaacgacgtggccaacgccatcggcccggtggcggcggtcgtcgcggtggtccaggccggcggcgacctggatctggtgagccgttcgccggtgccgtcctgggtactgctgctgggcgcggtgggcatcgtcatcggcctggctacctatggctaccgggtgatcgccaccatcggccgggagatcaccgagctgacccccagccgcggcttcgccgccgagctggcgaccgcctccacggtggttggcgcctcggccatcggcctgccggtatccaccacccataccctggtcggcgcggtgctcggcatcggcatggcgcgcggcatcggcgcgctcaacctgcgggtgatcggctcgatcttcctgtcctgggtagtgaccctaccggccggcgcggtgctggcgatcctgttcttcctggtcctgcgcgcgctgttcggcgcctga

SEQ ID NO: 7287 - DNA, 1038 bp, Pseudomonas aeruginosa
atgtcccaatccacgcaggtcaaccgccgcatcgtcctcgcctcgcgcccccacggcgccccgacccgggataacttccgcatcgagcaggttccgcttcctgagcccggcgcgggccaggtgctgctgcgcaccgtctacctgtcgctcgatccctacatgcgcggacggatgagcgacgcgccgtcctacgcgccgccggtggaactcggcgcggtcatggtcggcggcacggtcagccgggtggaagcctcgaaccatcccgggttcaaggtcggcgactgggtgctctcggccaacggctggcaggactacgcgctatccgacggcagcggcctggcgcgcctgggcgagtcgccggagcatccgtcctacgccctgggcctgctcggcatgcccggcttcaccgcctacatgggcctgctcgacatcggcaagccccaggccggcgagaccctggtggtggccgccgccaccgggccggtcggcgccaccgtcggacagatcggcaagctcaagggctgccgagtggtcggcgtcgccggcggtgcggaaaaatgccgccacgccgtgcaggtgctcggcttcgatgcctgcctcgaccaccatgccgcggacttcgccgaacgactggccgaggcctgcccggacggcatcgacatctattacgagaacgtcggcggcaaggtcttcgacgctgtcttcccgctgctcaacgccaaggcccggatcccggtctgcggcatcgtcgcccactacaacgacaccgagctgccacccgggccggaccgcttgccggcgctgatgggcacgatcctgcgcaagcgcatcaaggtgcagggcttcatcatcttcgacgactacggccatcgctacgatgaattccagcgcgacatgtcgaagtggttcgccgacggcctcatccagtaccgcgaagagcgggtcgacggcctggagaatgcccccgaggccttcttcggcctgctccagggacgcaatttcggcaagctggtggtgcgcgtcggagccgacgcatga

SEQ ID NO: 7288 - DNA, 951 bp, Pseudomonas aeruginosa
gtgcataccctgtcttccgcacacaacagcttcgaagcctggaaccaggcgttgcgccaggtctgcgggcgcttcgaatcgcagcccgcgctgaaccggacgctgttcatcggcgatatctcgcggcaggaccttggcggtctggagttggcgcagatccgcaccaacgcagggcgcatcgcccgccaggccacccatgccgatcatgacgacgaccgccactgcttcctggtcgtccagcgcagcggccatgcgcaactgcgccagggtggggacagcatagagctggcgccaggggaaatggcgctgatggactccgcgggcggctgcgagatcattccccacggactcatcgaacacacctcgttccatctctcccgcgaagaggtatgccggcacctgccacccagccagcgggccttcggcaaactctcgccgaactgcgccagcggtcgcctgctgagcctgctggtgcagcaggtgtgcgccggagaactgcagccgtgggcggtggcggacgagggcggggcgttgcaggaggcgctgatcgccctgctcgggccggcgctacagcacgccggcgaggaattggagggaccgctggccgggctctatggctacagtctgcgccggcacgcggagcgtctgatcgagcaatccctgcaggagccgcgcctgagtccggacatgctcgccggccgcctgcgcatctcggtgcgccagttgtaccggttgttcgaggagcagggcgacagcgtctgccgctacattctccgccagcgcctcagccgcagcgccgccgacctcggcaacccacggctgcgcggcgaatcgatcacctccatcgccttcaagtggggtttcagcgactcggcgcatttcagccgggcgttcaagaagcagttcgaggtttcgcccaaggactatcgggccggcgcgctaccggcctga

SEQ ID NO: 7289 - DNA, 1359 bp, Pseudomonas aeruginosa
gtgcagaaggagggcgtactgcgcgtgatcacccgcaacagcccggccacctacttccaggaccgcaacggcgaaaccggcttcgaatacgaactggccaagcgcttcgccgagcgcctcggcgtcgagctgaagatcgagaccgccgacaacctcgacgacctctatgcccagctttcccgcgagggcggcccggcgctcgccgcggccggcctgaccccgggacgcgaagacgacgccagcgtgcgctactcgcacacctacctcgacgtcaccccgcagatcatctaccgcaacggccagcagcgcccgacccgcccggaagacctggtcggcaagcgcatcatggtgctcaagggcagcagccacgcggagcagctcgccgagctgaagaagcagtatcccgaactgaagtacgaagaatccgatgctgtcgaagtggtcgacctgttgcgcatggtcgacgtcggcgacatcgacctgaccctggtcgactccaacgaactggcgatgaaccaggtgtacttccccaacgtccgcgtcgccttcgacttcggcgaagcccgcgggctggcctgggccttgccggggggcgacgacgacagcctgatgaacgaggtcaacgcgttcctcgaccaggccaagaaggaaggcctgctgcaacgcctgaaggaccgttactacgggcatgtcgacgtactcggctacgtcggcgcctacaccttcgcccagcacctgcagcaacgcctgccgcgctacgaaagccacttcaagcagagcggcaagcagctggataccgactggcgcctgctcgccgccatcggctaccaggaatcgctgtggcagcccggcgccacctccaagaccggcgtgcgcggcctgatgatgctgaccaaccggaccgcccaggcgatgggcgtgtccaaccggctcgacccgaagcagagcatccagggcggcagcaagtatttcgtgcagatccgcagcgaactgcccgagagcatcaaggaaccggaccgcagctggttcgccctggccgcctacaacatcggcggcgcgcacctggaagacgcgcgcaagatggccgagaaggaaggcctcaacccgaacaagtggctggacgtgaagaagatgctgccgcgcctggcgcagaagcagtggtacgccaagacccgctacggctatgcgcgcggcggcgagaccgtgcacttcgtacagaacgtgcggcgctactacgacatcctcacctgggtgacccagccgcagatggaaggcagccagatcgccgagagcgggttgcacctgcccggcgtgaacaagacgcgcccggaagaagacagcggcgacgagaaactctag

SEQ ID NO: 7290 - DNA, 1368 bp, Pseudomonas aeruginosa
atgcaagccgccaccgaaaccatcgtcgcgatcgctaccgcccagggccgcggcggcgtgggaatcgtccgcgtctccggacctctcgccggacagatggccgtggccgtgagcggacgccagctgaaagcccggcatgcgcattacggaccgttcctcgatgccggtgggcaggtgatcgacgaaggcctgtcactgtatttccccggcccgaactcgttcaccggcgaagacgtactcgaactacaggggcacggcggccccgtggtactcgacctgctggtgcagcgttgtctggaactgggcgcccgccaggcgcgaccgggcgagttcagcgagcgcgcgttcctcaacgacaagctcgacctggcccaggccgaagccatcgccgatctgatcgaggccagctcggagcaggccgcgcgcaatgcattgcgttccctgcagggcgaattctcgcgccgggtacatgcattgaccgagcaactgatttccctgcgcatctatgtcgaagccgccatcgacttccccgaggaagaaatcgacttcctcgccgatggccatgtactggggcttctggaaaaagtacgcacagaattatccacagtgcagcgcgaagcttcccaaggcgccctgctgcgcgacggcatgaccgtggtcatcgccggacgaccgaatgccggcaagtccagcctgctgaatgccctggccggtcgcgaggcggccatcgtcacggacatagccggcaccacccgcgatgtactgcgcgaacatatccacatcgatggcatgcccctgcatgtggtggacaccgcaggcctgcgggataccgaggaccatgtggaaaagatcggcgtggaacgtgcgctgaaagccatcggcgaagccgatcgcgtgctgctggtggtggacgccaccgccccggaagcagcggacccgttttccctatggccggagtttctcgaccagcgaccggaaccgggcaaggtcaccctgatccgcaacaaggcggatttgtccacagagtccattggcctcgaggaaagcgcggacggccacgtcaccatcaccctctcggcgcgcaccggcgccggcctggagctgctgcgcgaacacctgaaggcctgcatgggcttcgaacagaccgcggaaagcggtttcagcgcccgccggcgccacttggaagcgctacgcctggcagggcaggcgctggagcatggccacagccaacttatccacaatggcgccggcgaactgctggccgaggatctgcgccaggcccagcagcacctgggcgaaatcaccggcgcattcacccccgacgacctgctgggtcgcatcttctcgagtttctgcatcggcaagtaa

SEQ ID NO: 7291 - DNA, 756 bp, Pseudomonas aeruginosa
atggatgagcgcctgcgccaacagcagttcagcctcgcccggcacctgcgcgacccgcttggcaatgcgccgccgccggacatcgaagaacgtcgcctgcgggtctaccgcgagctgttctacaacgccatcgaaggcctccttgccagcggcttcccgcgcttgcgcgggctgcttggcgagcagcagtggcatggcctggtgcgcgagttctatcgcgaggagagaagccatacccccctgttcacccgtatcgccggggtcttcgtcgactacctgcggcagcggggcgagtatcggccggcgtggcaagccgagttggcccacttcgaatggagcgaaacgcgcctctacctggccgagcccgacgatccgccgtatcggcgtgaaggcgacctgctcgacggggtgccgctgctgtcgagcctggcgctgccgctgggctatcgctggccggtgcatcggctcgaagaggacgtcgcgctcgccgaagcgcctgcggaaccgaccctgctgttgatgcaccgcgattcctcgcatcgcgtgcataccgcgcgcctgactccgctggcctgccgcctgctggagtcgctggcgagacggcgcctgagcgggcgcgagcacctggcggcgctggcgctcgaggcgcggagtgcgcccggagcgctcgacgcggcggggctggagttgctggcagcgttgcggacccagggtgtcgtgctcggaaccctggaacgcgattgggcgggcggatga

SEQ ID NO: 7292 - DNA, 831 bp, Pseudomonas aeruginosa
atgaccctgatcgacaacgccgccggcctcggcctgaggcgcggcctgcttccgcaactgctggcgatggcgcccggcgcggtggacttcctcgaatgcgcgccggacaactggatcggcgtcggcggtgccttcggtgccgacctggagcgcctggtggagcgcattccactgacctgtcacggtctctcgctgtccctcggcggctccacgccgctggatgccgcctttatcgagcagacccgacgcttcctcgtccgccaccgggtcgcgttgtacagcgagcacctcagctactgttccgacgatggccatctctatgatctgttgccgctgccgttcaccgaggccgcggtgcgtcacgtcgcggcgcgcatccgcgaggcgcaggagcgcctggagcggcgcatcgcggtggagaacatttcctactatgcagcgccgtaccgggagatgagcgagatcgagttcgtcaacgcggtactcgacgaggccgactgcgacctgttgctggacgtcaacaacctgttcgtcaacgcctgcaaccacggctacgacgccctcgacttcctcgtccggctgccgcccgggcgggtcgccgcctaccatgtggcggggcactacgacgaggcgccggacctgaagatcgacacccatggtgccgccgtgaagcccggcgtctgggccttgctcggagccgcctatcgtcgcttcggcgtgcgcccgaccctgctcgagcgggacttcaactatccgccgctgggcgaactgctgctggaagtggagcagatccgccaatggcaacgcgacgagggacgccgtcatggatga

SEQ ID NO: 7293 - DNA, 2325 bp, Pseudomonas aeruginosa
gtgcgtccactcagccgttggctctcatcttgcggctcgcttctggcgctggccgcgctgttcctggtcgttcccctcgccggccgctactggctcggctggtcgacgccgttcggctatctctcggacctggccctcggcagcctgctggtgctgctcctgcatcgacgctccctgtggttcgcgctcccggtcatgctgctctggtgcctgttcctgatcggcaatgccgaactggtcgcagcggtcgggcgcatgccggaaccttccgacctcaagtacctgctggatccgcagttcgtcagcagctccacccagggcggcggcctcgcccacctgccactggcgctcggcctcggtggcgcgacattgctttgcgtgctgctctggcgtcgccgcggtccgcgcctgccgcgctatgcctacgcgctgccggcggcgttcctggcggcgcatgtcggcctgcaatacctgcgtccgagcgatgccgaccaatggcagcagtacaacctgccgcacaagctgctggccagcgcgctcagcagtggccaactggcggtcgaagactggctcgccgacgaccgtccggacaccccgccggacgtcgccgggctcaaccagctcgacctttccggaacgccgctgctggccggcggagggcgcgcgcgcaacgtcctgatcgtggccatggagggaatccccggcgcgtatatcgccgccaaccgcgccgccatcaacagcagctaccacgaagcgccgatgcccaggctgagtggctgggccgaacgggcgatgaccaccccggactacgtgctgcacagccaccagaccatccgcggcctctacgccatgctctgcggcgactacagcaagctcgactcgggcacgccgaagggcgtcgagctgctgaacaacccggcccgggccagggagtgcttgcccgcccagctgcgccagcacggtttcagcacgcacttcctgcagggtgccggcctgcgcttcatggccaaggacaaggtcatgccgcagatgggcttcgacaagaccctcgggcgcgactggttccgcaacacgtcctacctggagtttccctggggcatggacgacaaggccttcttcgagggcgccgcgacctacgtgaagcagctgcgccagcagaagaaaccctggatgctgaccctgctcaccgtcggcacccaccagccctactcggcgcctgccgactacctggcccgctacccgagcgccaagcaggccgcggtggcctatctcgacgacgcgatcgacgccttcctcgccgacctggagaaacagggcgtgttgcgcgacaccctggtggtgctcacttccgacgaatcccacggtgtcgaccaggtgcgcctcgcctcggcctggggcttcaacctggtactggcaccggaacaggcggcgctgccgccgatcaagagcggcgtctacggccacgtcgacctcgccgcgtccgtcctcgactatttcggctaccgcgtgccggcggggatttccgggcgctcgctgttccgcgactacgccagcggccgcgaaatgatgtcctacaccaacggcatgctgcgtcaccacgacggcaaggacaccttcgtcgaatgcgatttccagcaggtctgccggcgctaccgcagcgagggcttcatcgccgacgaagccgagttcctcggtcgcttcagcggtcgccaggcacgcctggtcagccagcgcgccgccgtcctcgaccactccgtgcaacaggccggccagttgggccaggagttccagttcgccacccacgaacgcatccgcctgaagccggaaacccacaacgactggaccgacaacctgatcggcgcgcaatacctggagatgccgaagaacagcaggaccacggtcaccctgaagatccgcgccttgcagatggaccgcaacggcgcccgggtgacgctgaagaccaaggagttcgaacgcgacgttcccataccggtaccggacatcccgcgcctgctcaaaggcaagccgctggacatgagcttcaccttcgacaacccggaagcgcgcaaggccttctccttccacttgctcgccgagggccgcgggatcatcgagatcagcgacttccacgtggtcacggcggccaacccggaacccgtggaaagccgcagccaggtcgccgaagcggcgaaggaacagccgctgctgagcaccctgaaaagcctgttcgccaaccgccccgaaaccgaggaagcggaacgcgcggacgcccctcgggagcgcaccgtcatccccgagcagaaggccctgatcctttcgcactga

SEQ ID NO: 7294 - DNA, 732 bp, Pseudomonas aeruginosa
atggccgcccccttcttccaagccaagccgcgcatgttgcgatccctgttccgccgcctgttcaagtacctgctctggttcatggccgccagcgtcgtgctggtcgcggtcctgcgctgggtgccgccaccggggaccatggtcatggtcgaacgcaaggtcggctcctgggtcgacggccagcccatcgacctgcagcgcgactggcgctcctgggagcagttgccggacagcctgaaggtcgcggtgatcgccggcgaggaccagcacttcgccgagcaccacggcttcgacctgccggccatccagcaggccctcgcgcacaacgagcgcggcggcagtatccgcggcgccagtacgctcagccagcaggtggcgaagaacgtcttcctctggtccgggcgcagttggctgcgcaagggcctggaggcctggttcaccctgctgatcgagacgctctggaccaagcaacggattctcgaggtctacctgaacagcgccgaatggggcccgggcgtcttcggcgcgcaggctgcggcacgctatcacttcggcctcgacgccgagcgcctgagccgcacccaggccagccagctcgccgcggtgctgcccagcccgctgaaatggagcgcggccaggccgggcccctacgtacgccagcgcgcggcctggattcgccagcagatgtggcagttgggcggcgacgactacctgctgcgcctggagcgctga

SEQ ID NO: 7295 - DNA, 1365 bp, Pseudomonas aeruginosa
atgcagaaagaaaccgaaatcaaactccgcgtcagccgcgccaccctggaagccttgcaggagcacccgttgctgaagaagcgcaacaaatcgggctgggagcgccgcgaactgtacaaccagtactacgacacccccggccgcgagctggcccgggccaaggtcgcgctgcgcatgcgccgcgacggcgagcagtacatccagacgctgaagagccgcgggcagagcgtggccgggctgtccgaacgcaacgagtgggactggtacctggaaaagaacaagctcgacctgaagaaactcgacgacaagtgctggccggcggccctcaaggatctcgacaagaagcagctcaagccgatcttcagcaccgacttcgtccgccagcgcgccgagatcgcctggggccgcggcaaggccagggtagtcgtggaggcggcgctcgacctgggcaaggtggtcgccggcgacaaccaggaggaaatctgcgaactggagctggaactgcgccagggcgatgccgccgcgctgctggagctggccgcggaactggccgccgacctgccgctgatgccctgcgacatcagcaaggccgagcgcggctaccgcctgttcgacccgaacagctacgaggtcgatcccccggcccagaaactgctggcggaaaccccgctggacggtgccttcgccgccatcgcctggtacctgctcggcagcagccagcgactggccgaacagtatcgcttcaacggccactggcgcctgctggaggactggctgcaacacctgcagaacctgcgcaccctgctcggcagcctcggccaggcggtgccacgcgccagcagtcgcgagctgcgcgaagcgctggacgctctccttgccgactgggcgccgcgcatcgagcgcggccgtgacgacgagacgctacgccagcaggcgccgcaactgttccgcggcgaactcgacgagacccgctggggcctgttctccctgaatgcctcgcgctggctgctggccaaggcctggaccgagtcgcgcaacgagcgcggcaaccgccagggctctgccgcgctgggcaagtggctgctgcgtagccttgccgaagaagcccaggccacgccgctggcgcgcgcccaccagcatcccgagctgctccccgaccaagcgccgcgcctgcagcgcatgcttacctggttgcgcctggcgcgcggcgtgctcgacctgccggaagccgaccgcctctacggcgaactggccaagttgctggagctgctgcggcaacctgtcgatgccgagcgcctggctgcccgcgccgcgcaggcccatactgtgctgacgctcaaaccctggaaggcgctgatgaaataa

SEQ ID NO: 7296 - DNA, 552 bp, Pseudomonas aeruginosa
atgaccagaacttcgaacccatgcgcagtggtattggcctttgcggcaattgccgcttcgggaaccgcgatggcggcaaacactatcacattcagcggcgaagtgaccgaccagacctgccaggtcgcggtcaacggcttcaccgaccccacggtgatcctcgacagcgtaccggtgagcgccctcgatggcgcagtgggccgcagcgccggcgaaaccgccttcaccctgcaactcaccgattgcgtcgcgccgacggccgacgagcatttcaccaccctgttccaggccaccaaccccagcgccgccgggaacctggtgaacaccgccgccagcggcgcgacgggcgtggcgctgcaattgctcgatagcgtcggcggcaacccggtcgacctggccggcggcgcggcggtgcccgccggcgacatcgtgctcgccaacggagccaccagcaccagctacgactacgcggtgcagtacgtctccgaagcggcgaccgtgacgcccggtccggtactcggcgtcgtgacctacacgctgcgttacgagtga

SEQ ID NO: 7297 - DNA, 2448 bp, Pseudomonas aeruginosa
atgccagcaccacacggtctcagtcctctgagtaaggcgtttttgatgcgccgtgccttccaacgcaggattcttccccactcgctcgccatggccctgagcctgccgctggcgggatatgtccaggcgcaggaagtcgagttcgacatccctccccaggcgctgggcagcgcactccaggagttcggccgccaggcggatatccaggtgctgtatcgcccggaagaggtccggaacaagcgtagcagtgcgatcaagggcaagctggagccgaaccaggcgattaccgagctgcttcgtggcaccggcgcatcggtggacttccagggcaatgcgataaccatcagcgtcgccgaggcggcggacagcagcgtcgatctcggcgccaccatgatcacctccaaccagttgggcaccatcaccgaggacagcggctcctatacgccaggcactatcgccacggcgacccgcctggtcctgactccgcgcgagacgccccagtcgatcaccgtggtcacccgccagaacatggacgacttcggcctcaacaacatcgacgacgtcatgcgccatacgccgggcatcaccgtctcggcctacgacactgaccgcaacaactactatgcccgcggcttctcgatcaacaacttccagtacgacgggattccctcgacggcccgcaacgtcggctactccgcgggcaatacgctcagtgacatggccatctacgaccgggtggaagtactcaagggggcgaccggcctgctcaccggtgcggggtccctcggcgccacgatcaacctgatccgcaagaaacctacccatgaattcaagggccatgtcgaactgggcgcgggcagttgggacaattaccgctccgaactggacgtcagcggcccactgaccgagtccggcaacgtccgcggccgggcggtagccgcctaccaggataagcactcgttcatggatcactacgagcgcaaaaccagcgtctattacggcatcctcgagttcgatctgaatcccgacaccatgcttaccgtcggcgccgactatcaggacaacgatcccaagggatcgggctggtcgggcagcttcccgctcttcgacagccagggcaaccgcaacgacgtctcccgctccttcaacaacggagccaagtggagcagttgggagcagtacacccgcaccgtcttcgccaacctcgagcacaatttcgccaacggctgggtcggcaaggtgcaactcgatcacaagatcaacggctaccacgcgcccctcggcgcgatcatgggcgactggccggcaccggacaacagcgccaagatcgttgcgcagaagtacaccggcgaaaccaagagcaactcgctggatatctatctcaccggccccttccagttcctcggtcgcgagcacgagctggtggtcggcacctcggcttccttctcccactgggagggcaagagctactggaacctgcgcaactacgacaacaccaccgacgacttcatcaactgggacggcgatataggcaagcccgactggggtaccccctcccagtacatcgatgacaagacccgccagttgggcagctacatgaccgcccgcttcaatgtgaccgatgacctgaacctgttcctaggtggacgcgtggtcgactaccgggtaaccggcctgaatccgaccattcgcgagtccggacgcttcattccctacgtcggcgcggtctacgacctgaacgatacctactccgtctacgccagctataccgacatcttcatgccgcaggacagttggtatcgcgacagcagcaacaagctgctcgaacccgacgaaggccagaactacgagatcggcatcaagggtgaatatctcgacggacgactcaataccagtctcgcctacttcgagattcatgaggaaaaccgcgcggaggaagacgccctctacaacagcaaaccgaccaaccccgccatcacctacgcctacaagggcatcaaggccaagaccaagggctacgaggcggaaatctcgggtgaactggcgccaggctggcaggttcaggctggctatacccacaagatcattcgcgacgacagtggcaagaaggtttccacctgggagcctcaggaccagttgagcctctacaccagctacaagttcaagggcgccctggacaagctcacggtcggcggcggcgcccgctggcagggcaagagctggcagatggtctacaacaatccccgcagccgctgggaaaagttctcccaggaagactactggctggtggacctgatggcccgctaccagatcaccgacaagctgtcagccagcgtcaacgtcaacaacgtcttcgacaagacctactacaccaacatcggtttctacacctcggcatcctatggcgatccacggaacctgatgttcagcactcgctgggacttctga

SEQ ID NO: 7298 - DNA, 1020 bp, Pseudomonas aeruginosa
atgagtcgcgcctgcctgctcgcggccctgctggccgcccccttcgcccatgccgagatgacagcgctcgacgacgagcaactgtcggacgtgcagggtgccggcatcggcttcgtcctcgacagcgccatggtcgacggcaacaaggccaccatcgcgatcaatggcgtgaccaacaccgccaccgggcagaacgtgccgattacggtaaaggagctgtacgtcgccgccactggcagcaacaagggcagcaccctggcgccggtgactctcggccgtctcaatttcccgttcaagctgaatctggccaagggttcggtgctgaccacccagctcgacgacgggcgggtggtcagcaccttgccggacaccgcggacgtgatcgagctggctttccccagcctggtgagcggcgccggcggccagccgtgcatcgctggttacgccggtgccggcagcaactgctcgagccgggccagcgaaaaggtcgacgccggcatccgcttcgacttcggcgtcacttccacgcgcaccgatgtgctcaacctggacttctccgaactggcgatggacggttcctacctgcgcttctggggcgccaacgcgcgcagccaactggttggcgagatacgcctgaacctctacgccaagactttcgagatcatgtcctgcggtgctggctcgcccagttgcgtcagcgccgctgagcaggccgcgcgcaccgtctacctgaccaacgcctatgccagcgtcgcgcttggctacgggaagtcgcagccgttgctgttctcggtcaccgccgacggcaacttcactttcgaactgcccaagctgaccctggccaacgccgccgacttctacgccaatgcgccgcgcaccagcctggtgatcgagaacctcaacatcggcggtacccggccaggctacgggcaggtaccgaccggcggctacaacatgggccgcaacgagatatccgggctcagcttcaactacctgaaggtgacgtcgcacaacctctga

SEQ ID NO: 7299 - DNA, 315 bp, Pseudomonas aeruginosa
atgcaaaagattcgtcgtgacgacgaagtaatcgtcattgccggcaaggacaagggcaagcgtggcaaggtgctgaaggttctcgctgacgaccgtctggtcgtcggcggggtgaacctgatcaagcgccacaccaagcccaatccgatgctcggccaacagggcggtatcgtcgagaaggaggcgcctctgcacgtctccaacgtcgccatcttcaatactgaaaccagcaaggctgaccgcgttggcttcaaggtagaagacggtaagaaaattcgtgtcttcaagtcgacccagaaaccggttcaggcttga

SEQ ID NO: 7300 - DNA, 369 bp, Pseudomonas aeruginosa
atgattcagactcaatccatgctcgatgtcgctgacaacagcggcgcgcgtcgtgtgatgtgcatcaaggtgctcggcggttcccaccgccgttacgccggcatcggcgacatcatcaaggtcaccgtcaaggaagcgattccgcgcggcaaagtgaagaagggccaggtcatgactgccgtggtcgttcgcaccaagcacggcgtgcgtcgtaccgacggttccatcatccgcttcgacggcaacgccgccgtcctgctgaacaacaagcaggagccgatcggcacccgtatctttgggccagtgactcgtgaactccgtaccgagaagttcatgaagatcgtctcgctcgcccccgaagtgctgtaa

SEQ ID NO: 7301 - DNA, 789 bp, Pseudomonas aeruginosa
gtggccatcactattccatacttctggaaccttatatgtggtggccaaggtatgagtgagtatggggtcttggtaaggaatggcttggggcagactgtaatagatggagagtttcataacctttctcttctgttggaaagaaatattgaagtcgagacaagtcagtggttctcactggattttccatatgcggtcacatcagctgcacctcctgttctagcagttcaagcttggaagaataaaattctttacttcgactcagtacagtatcgaggtgggccgggaaactggacaggcgccactctgagtttttcagggtatggaacacatacatccggctccgtaagaattagagtttatgcctacgcattgcctttgctgagaggatatggacttcgtgttcgaaactcggcgggaagtgtcgttttcgattctctaagacttcccttggtttttagtgcggaactgggcggggcgccagaagattgggttagggtatctggggaaccgattataggagctggccgcatagacatatatcgcccagcgacatggggtcagcctgccgatagctacattgcagtaggcatggcacttgacgtggaatttggcagagtggcggtatctggtggtacggctaatgcaattatttatatacgctggggtttcactgaggagggagtgccaaggcttatgcagcatgcatataccgggcttccaagttcttatcctggaattccagctgctgtttattatgctatgccttcaattccgataataaaggcttga

SEQ ID NO: 7302 - DNA, 1416 bp, Pseudomonas aeruginosa
atgaagcgctacgagaaattcgccgacgagattgccgagctgatccgcaccggcgtcctcgcccccgggcagaaggtgccctcggtacggcacgccagccgtacctacggggtcagcgcttccaccgtgttccaggcctactacctgctggaaagccgtgggctgatcatggcccgcgcacgctccggctacttcgtctgccagcacgtgcagcggccgctgccggaaccggagatcagcccgcgccaggccgacgccaccgaggtcgacgtcagcgagttggtgttctccgtactcagttcgatcaaggacccggacaccgtacccttcggctcggcgttccccagtccgcaactgtttcccctgccgcgcctggcgcgctcgatggcccacgcggtgcgcgacatggacccgcaatcggtggtcgccgacatgacgccgggcaaccatggcctgcgccggcagatcgccctgcgctacatggtcggcggcctgctgctgccggtggaagaactggtcatcagcaacggcgcgctggaggcactcaacctctgcctgcaggtggtcacccgtcccggcgacctggtggccatcgaggcgccggcgttctacgccaccctgcaggtgctggaacggttgaagctgaaggcggtggaaatccccgtgcatccgcgcgaaggcatcgacctggaagtgctcgccgacagcctggagcgcctgccgatcaaggcctgctggttcatgagcaacttccagaacccgatgggcgcgagcatggacgacgagaagaaacgcgccctcgccgagctgctggcgcgccaccaggtgccgatgatcgaggatgacgtctacgccgagctgtacttcggccagcaggcgccgaaaccggtcaaggcctacgaccaggaaggcctggtgatgcactgcagttccttctccaagagcctggcgccgggctaccgggtcggctgggtggccggcggacgctacgccgagcagatcgagcgactgaagctgatgaccagcctgtcggcgtcgatcccggcccaggcggccatcgccgactatctccagcacggcggctacgaccgccacctgcgcaagctgcgctacgccctggagacccagcagaacgccatgctcgcggcggtggcgcgttacttccccgagcagacccgggtcagccgtcccagcggcggctacttcctctggctggagttgcccgaggcggtcgactcgctgcgcctgttccaactggccctggcccagggcatcagcctcgccccggggccgatcttctccgccacccgccgcttcgcccattgcgcccggctcaactacgggcacccgtggagcgcgcggcaggagaaggcgatggagacactcgggcggatcacccagtcgctggcgggatga

SEQ ID NO: 7303 - DNA, 1428 bp, Pseudomonas aeruginosa
atgaacaaagcaacgacggaacctgcctacaactacaaggtggttcgccagttcgccatcatgaccgtggtatggggcgtgatcggcatggggttgggcgtactgatcgcctcgcaactggtctggccccagatgaacttcgacctgccctggaccagcttcggccgcctgcggccgctgcataccaacctggtgatcttcgccttcggcggctgcgcgctgttcgccaccagctactacacggtgcagcgtacctgccaggtgcgactgttctccgacaccctggccgccttcaccttctggggctggcaggcggtggcggtgatcctgctggtcagcctgccgctgggcaacaccaccaccaaggaatacgccgagatcgagttcaccggcgcgatctggctggcgatcgtctgggtcgcctacgcggtggtgttcttcggcaccctgatcaagcgcaaggtcaagcacatctatgtcggcaactggttcttcggctcgttcatcctgaccaccgcgatgctgcacatcgtcaaccacatgtcgctgccggtgagctggttcaagtcctactcgatgtactccggcgccaccgatgccatggtccagtggtggtacgggcacaacgccgtaggcttcttcctgaccaccggcttcctcggcatgatgtactacttcgtgcccaagcaagccgggcgcccggtctactcctaccggctgtccatcgtccacttctgggcgctgatcaccctgtacatctgggccggcccgcaccacctgcactacaccgcgctgccggactgggcgcagtcgctgggcatggtgatgtcgctgatcctcctggcgccgagctggggcggcatgatcaacggcatgatgaccctctctggggcctggcataagctgcgcgacgacccgatcctgcgcttcctggtggtgtccctggcgttctacggcatgtccaccttcgaaggcccgatgatggcgatcaagaccgtcaacgccctctcccactacaccgactggaccatcggccacgtccacgccggcgccctcggctgggtcgcgatgatcaccatcggctcgctctaccacctgattcccaaggtctacggggtcgagaagatgcacagcgtcggcctgatcaatgcgcacttctggctggccaccatcggcaccgtgctgtacatcgcctcgctgtgggtcaacggcattacccagggcctgatgtggcgcgcggtcaacgaggacggcacgctgacctactccttcgtcgagtcgctggtggccagccatccgggcttcatcgtgcgcctggtcggtggcgggttcttcctcaccggcatgctgctgatgagctacaacacctggcgcacggtacgccaggcgcgcccggaaggaatcctcgcggcggcccgcatggcctga

SEQ ID NO: 7304 - DNA, 789 bp, Pseudomonas aeruginosa
atgaaagtctgggcagtcgccaatcagaaaggaggggtcggcaagaccacctcgtccatcgccctggccggcctgttggcggatgccggcaagcgcgtggtcgtggtcgacctggacccccacggctcgatgaccagctatttcggctatgacccggacaccctcgagcacagcgccttcgacctgttcctgcaccagggcaacgtccccgaggggctgccggcctcgctgctgcgcagcaccagcaacgaacgcatttccctgctgccgtcgagtaccgcgctggccaccctggagcgccagtcgccgggcaagagcggtctcggcctggtggtctcgaagagcctggcgcagctctggcaggatttcgaccatgcgatcatcgacagcccgccgctgctcggcgtgctgatggtcaacgccctggccgccagccagcacctggtgatcccggtgcagaccgagttcctcgcggtgaaagggctggagcggatggtcaacaccctggcgatgatcaaccggtcgcgcaaacaggcgttgccctataccatcgtacctacgctgttcgaccggcggacccaggcttcgctgagcacgctgcggattctcaacgagaactacccggacaacctgtggcaggcgttcattcccatcgatacccgcctgcgcgatgccagccgggccggggtcacgccgtcgcagcacgacggcaagagtcgcggggtgatcgcctaccgcgccttgctcaagcatctgctggcgcagcagccggccacccgggtggcctga

SEQ ID NO: 7305 - DNA, 1080 bp, Pseudomonas aeruginosa
atgatttctgatggcgcacgccgacatgcggcgtctgcccgctcgtctggcttcgttctggtcggagtggtctggttcctggccatcatgaccctgctggccagtgccgctgtactctgggtcgggcgctcgctggatgccacggaaaaccggcgcaaggtgctgcttcgtgagctggaggagcatgccttgctggcgcgggtccaatggctggtggctacccagcgctataccgtcgcgggcctgagcgtaccgggaaatgctggcgccgcgccgagcaaggtggacatggacacttcgatcctgcccattggcggggagctgcctctggatggccgggagttctgcatggccaatggctggtgcgttgcgctgctcgatcgctctgcgcgcctcagtctttccggcatcgatccgcgggtactgtccaggctgctggcggggttgggggttcccgccgagcaggtgcaggtcatggtcgcccaatggttcagctatctctatcccggcgccgctccacgactgggtagtgccgcgcaagccagcgacaggtcctctccgggccaggcccggcgccgtccgttgcgctcggtgatggaagtcttccggctggaggcctggcgcccctgggaagcgcatttgctcgacgccggttggcgcgatctggtcgcggcggacgaggcggcgctgaacatcaacaccgcggatgcccgaatcctgtctcttgcctggggactaccggaggacgctgtcggccgactgctgcaagcccgctggcagcgtccgttcacccggatgtcggacctgcatgacgtcctcgggggtcatgcgaggctggttcccgaggatggatgggcgcgcctggccagtccggtcctgtcgattcggctctacccgccaggagccgagcaggggacggaatacgaggtccgcttcaactcagagcaccgcctgctgccaccctggcagcttctctcgaagaggtccgtgaagataaatgatcgctactcgaatcctccgttgcatcccgatatcgcccccggggttcttgccgccccgcttgtggcaagaccgtggtaa

SEQ ID NO: 7306 - DNA, 519 bp, Pseudomonas aeruginosa
gtgtcagcgggtgacgtcagcaacagcgaattcgtgggtagcctgtaccgggaccaccgcggctggctgcttgcctggctgaaccgcaacctcggctgccgccagcgcgccgaagacctcagccaggacaccttcgttcgcctcctcggccgcccggagctgcccggcctgcgcgaaccgcgcgcgttcctggcgaaggtggcgcgcggtctgatgatcgaccacttccgccgcgccgcccttgaacaggcctatctcgccgaactggcgctggttccggaagcggagcagccttcggccgaagagcagtacctgattctcgaggacctccgcgagatcgatcgcctgcttggcacgctgtcgctgaaggcgcgtagcgcgtttctctatagccgcctggacggcatgccccacgcggagatcgccgagcgtctcggagtctcggtgccgcgcgtgcgccaatacctggcccagggtctgcgccagtgctacatcgccctctacggagagccccggtga

SEQ ID NO: 7307 - DNA, 615 bp, Pseudomonas aeruginosa
atggtcgactttattctgaatgcccaagtgcgttccgatctggggaaaggtgcgagccgccgcctgcgtcgtaacgccggtctggttcctgctgtcgtttacggcggcgacaaagagccccagtccgtaaccctggaactgcgcgaaatcgccaagctcctggaaaacgaggctgccttcagccacgtgatcgccctgaacgttggcggcgccaaggaaaccgtactgatcaaggccctgcagcgccatccggcgaaaggcttcgtgatgcacgccgacttcctgcgcgtggtcgccgaccacaagctgaccgcccacgtaccgctgcacttcatcaacgaagaagtagccgttggcgtcaagcaagccggtggcgagatctcccacaccatctccgaagtcgaagtttcctgcctgccgaaagacctgccggaattcatcgaagtcgacatggccaaggtcgagctgggccagatcgttcacctgtcggacctcaaggctccgaaaggcgtcgagctggtacaactggcccacggcaacgacctggccgttgccaacatccacgcttcccgcgtggtgaaggaagaaggtagcgaagaaggcgccgccgagtaa

SEQ ID NO: 7308 - DNA, 972 bp, Pseudomonas aeruginosa
atggaaaccgttctgaccgcccgtgatctgacccgtcactacgaagtctcccgcggcctgttcaagggccacgcccaggtgcgcgcgctgaacggcgtatcgttcgaactggaagccggcaagaccctcgccgtggtcggcgagtccggctgcggcaagtcgaccctggcgcgcgccctgaccctgatcgaggaacccacctccggctcgctgaaaatcgccgggcaggaggtcaagggcgccagcaaggaccagcgccggcagttgcgccgcgacgtgcagatggtcttccagaacccctacgcctcgctcaatccgcgacagaagatcggcgaccagttggccgagccgctgctgatcaacaccgcgctgtcgcgcgaggaacgccgcgaaaaggtccagcagatgatgcgccaggtcggcctgcggccggagcattaccagcgctacccgcacatgttctccggcggccagcgccagcgcatcgccctggcccgggcgatgatgctgcaacccaaggtgctggtggcggacgagccgacctcggccctcgacgtgtcgatccaggcccaggtactgaacctgttcatggacctgcagcagcagttccgcaccgcctacgtgttcatctcgcacaacctggcggtggtccgccacgtcgccgacgacgtcctggtgatgtacctcggccgaccggcggagatggggccagcggacaagctctacgagaacccgctgcatccctatacccgtgcgctgctctcggcgaccccggcgatccacccggacccgacgaagccgaagatccgcatccagggcgaactgccgaacccgctgaacccgccggagggttgcgccttccacaagcgctgcccctacgccaccgagcgctgccgcagcgaggtgcccgagctgcgcctgctcgaccagcgccaggtggcctgccaccacgccgagcaattcctcggctga

SEQ ID NO: 7309 - DNA, 333 bp, Pseudomonas aeruginosa
atggaagtagccgctaagctgtcgggcgctcgtatctccgcccagaaagcccgcttggtcgccgaccagatccgcgggaagaaggtgggcgaagcgctcaacctcctggctttcagcagtaagaaagccgccgagatcatgaagaaagtgctggagtcggccgttgccaacgctgagcacaacgaaggcgccgatgtggatgacctgaaggtctccaccgtcttcgtcaacgaaggtcgttcgctcaagcgcatcatgccgcgtgccaaaggccgtgctgatcgcatcgtgaagcggtcttgccatatcacggtcaaggttgcggacaagtaa

SEQ ID NO: 7310 - DNA, 276 bp, Pseudomonas aeruginosa
gtgccacgttcactgaaaaaaggtccgtttatcgatcttcacctgttgaagaaggtcgaagtcgcggtggaaaagaacgaccgcaagccgatcaagacctggtcgcgtcgttcgatgattctgccgcatatggttggtctgaccatcgccgtgcacaacggccgtcaacacgtaccggttctcgtcaacgaggacatggtcggccacaaactgggcgagttcgccgctacccgcacctaccgcgggcatgctgcggacaagaaagccaagcgttaa

SEQ ID NO: 7311 - DNA, 3954 bp, Pseudomonas aeruginosa
atgagcggcctaccggtttcccatgtcggcgagaaagtctcgggaggggttatctccaccggctcgcccaccgtgcacgtcggcagcagcgcggtcggcctggccgaccgggtgtccgcctgcgtgccgttggtgggcaagccggtcaacccgatgctcggcagcaagctgctgccggaagaggtcgatttcgccctggcggcgccggacaccttcaccttcgcccgtggctacctgtcgagcaacccccgtatcggccggctcggccggggctggtggctgccgggcgagagcatgcacctggaactgagcgaagacgcctgcgtgctggtcgacgcccagggccgccggatcggctttcctgcgctggctcccggcgcccagcattattccggcagcgaggagctgtggctgcgccgcggcggttcgagcggcggcgaagcgcaggcctggcgcgggcgctgggcggcggtgccggccgaactgcagacgcaggagggctccgtgctggtgctgtccggccacagctacctgcatttccagcgttgccccgacggtatctggcgcctgcaggccagcttcggccgcgccggctaccgcaccgagttccgctggagcggacgtggcctgctcaccggcgtgcgcgacagcgccgggcgcagctatgcgctggtctaccagcaagcctgcgagccgagcgagggcgacgacggcctgcgtctgttcggcgtgatcctggccagccacgacggaccgcctccggactacatcgatccgcagagcccggggctcgactggctggtgcgctaccagttcagcgacagcggcgatctgatcgccgtgcgcgaccgtcttggccaggtggtccgggtattcgcctggcgcgagcacatgctggtcgcccacggcgaaccgggcgggctggaggttcgctacgagtgggatgtccatgctccgcacgggcgggtcgtgaagcagatcgaggcgggcggcctgacccgtaccttccgctacctgcgcgatgccaccgaggtcagcgacagcctcggccgcgtcgaacgctacgagttcgccggcgagggcgggcagcggcgctggaccgcgctggtcagggccgacggcagccgtagcgagttcgactacgacctgttcggccgcctggtcgccatgcgcgatccgctgggacgggagacgcggcgccggcgcgatggccaggggcggatgctcgaggaggagtcgccgggcaaggcgcgctatcgcaagcgcgtcgacgaagagaccgggctgctggtcgagctggaggacgcgatgcagcgccgctggaccttcgagcgcgacgaacggggcaatgcgacgacggtgcgcggcccggccggcagcacccgctacgcctacgaagacccgcgcctgcccgaccggccgacgcgaatcgtcgacccgcgcggcggcgagcggcgcctggagtggaaccgcttcggcctgttggccgcgttgaccgattgttccggccaggtctggcgttacgactacgacaacgaaggacgtttggtcgccagcagcgacccgctgggacaactgacccggcgccgctacgacccgctggggcaactgatcggcctggaattggccgacggcagcgccctgagctatgaatacgacgcccttgggcggcagacccgtatcgccgatgccgaggggcacgccacgctgttttcctgggggcacggcgatctgctggcgcgggtttccgacgccggcggcggcgaattgtcctacctgcacgacgaagccggcaggctggtcgccctgaccaacgagaacggcgtccaggcgcagttccgctacgacctgctggaccgtctggtggaagagaccggcttcgacggtcgtcgccaacgctatcgctacaacgccgctgacgaactgatcgcccgcgaggatgccgacggtcgcgagaccacctatgcctacgaccgcgacggccgcctggcgagcatccgggttcccgccaccgagcacgcaccggccctggtcgagcgttaccgctggttggccgacggccgcctggccagcgccggcggggcggattgcgaggtgcgctacacgtacgacgaggtcggtaacctgcgcctggaaagccaggtacatgccgacggttgggtctacagcgtcgagcacagccacgacgcgctaggcgtgcgccagaccagccgctacggcgacgcgccgccggtcgcctggctgacctatggcccgggtcatctgcacggcgcgctggtcggtgcggtcgagctggccttcgagcgcgatgccctgcaccgtgaggtgcgtcgcgacgcccgccgcgacgggcaggatgacgcgttgttcacccaggagcgccagcacgcgccgctgggacgcctgcagcgcagccgcctgcgtctggccggcggtttcgactggcagcgcggctatcgctacgacggacttggacaactggtcggcatcgacgacaaccagtatccgtcggtgcgctacgaatacgacctcggcggtcgcctgctggccagccggcgcgctggcgcggcggccagcacctaccgctacgatgccgccggcaaccgcctggagggcgtcggcgagcacgcgcgcgaggacgctcgccaggcattcgccgagaacgaactgtaccgctccggtttcagtcgctccgagacgcgcgcgagccaggccggcgaaggcccggcgcgctgggccggcaaccgcgtggagaggatcgccggcaaccgctatcgcttcgatgcgctgggcaacctggtcgagcgtatcggcgccgacggcgagcgcctgcgcctggcctacgacggcgcgcagcgcctggtccatctgacgcgcgattacgccgacggtacgcggctggaggcgcgctaccgctacgacgcgctgtcgcgacggatcgccaaggtggtgctgcgcgacggtgtcgagcagcaggtgcgcttcggttgggacggcgatcgccaatgcgccgaagcctttgcgcgggaactgcgcaccaccgttcacgaaccgggcggtttcgtcccgttgctgcgcctggagcaggcctgcgagcccgatcccccggagctgctgcaactgcgccaggcgttcgccgccgaaggccagccgctgccggcgcaatgcgtgccggcgctgggcgaggcgcggatcgctttcttccacaccgatcacctcggtacccccctgcagctgagcgacgaacgtggccaactgcgttggcagggcgttccggacgactggcgggcggtagcgccggaacgacagccgggtgcgcagccgatccgcttccaggggcagtaccacgatgaggaaagcggcctctactacaaccgctaccgttactacctgccggaagccgggcgctatgccagccaggacccgctcggcctgggcggtggccccaacccctatgcctacgcgctgaacgcgcccacgctggcctacgatcccaccggcctgatcatcccgctggtggtgatcggcgccttcgccgcccgcgccgcgatcggagcggcgctgggcgccggcatcgagctggggatgcagaccggcaagcaggtgctggggcagatgaaggacaactgggacagcgatcgcgacctcaccgatatcaagtggaagtgcatcgacatcaactggaaacacgtcggcgcctcggcggccatcggcaccgtggcgccgggcatgctcagcaccggcaagaccgtggtgcagtccgccaaggcgatcaggaccctttccggacaggcggccaacaccgccaaccgcgcggccaagctggccgcgcgcaaggccgcccatgccgataccatcaagaaggccgtggccacccaggccgcctggcagacgggcaagcagatcgtcaaatgcccactgaaggacgaagaagaggagtgtccgccgcaatga

SEQ ID NO: 7312 - DNA, 894 bp, Pseudomonas aeruginosa
atgggttcgcgcacctggcactggcccggcgtcctgctcggcctgctcctcgccacggccggcgcgcaggccgacaccctgcgcgtggcgaccctcgactgggcgccctacgtcggccccgacctgccgggcaagggcctcgccagccgcatcctcgacgaagccctggccctcgacgggcaccgcgccgaactggtgttcctgccctggcaacgtgccctgaaagaagccgccgaggggcgcttcgacgctctcatgccggcctacctgtcgcccgagcggcgcgaactgttccacgccaccatccccctgctcgactcgcaactgggcttcttccgccagcgcgagcgcctgctgccggtcaatcccgcgcatctggaaagcctgcgtccgtaccgcatcggcgtggtccgcggctacgtcaaccgggaggatttcgacgccgaccgcagcctgaccaaggacgcggtgaccaacgactggcagaacctcgagaagctcctgcgcgggcgtatcgacctggccgtggtcgatcgctacaccggctaccacctgctggcgcgcaacgtgccggcgctgaaggatcgcctggtgttcatcgaaccgccgctggaggtcaagccgctctatgtactggtgccgaaaagacacgcccgcggcgccgcccttgccgccagcctcgaccgcaacctgcgcctgatgcgtcgcagcggccggctggaacaactgatcgccgaagcacacctcgaacgcagcgggcagacccgcacgctggccgtcgatccgttaaccggccaggccgaccagcagcgcagccccggccaggagcaggaccagggccagcacgccccgttgcaaccggcgtggcgcgaagacccgctggggatgcgctag

SEQ ID NO: 7313 - DNA, 2442 bp, Pseudomonas aeruginosa
gtgcatttttccctccgcagtcgccacctgcgtccttcattgctcgccagcagcctgctcctggcggtgtcggcccagggccaggaaaagctcgacgtggatctgcccgccgcgccgctcggccaggcgatcaacgccctcgcgcaacaatcctcggtacagatccttttcgccggcgatctcggcgccggccgccaggcgcccgcgctgaaggggcgtttcacccccgaagaggcattgcgccagttgctcagggatagcggcctgaaggcgcaggccagggacgaacataccttcatcgtcgttccggccagcgaagccgccgtgcccgctacgcaagcccgcagcgaaccgctggacatggagcagatggaaatcaccgcctcgcgcaccagcagcgacctggtctccgccacgcgccagtccaccgtcatcgagcatgcccaactggaggagctgcgccagggctccgacagcctggccaccgtgctggccaaggcggtgccggggatgtccgattccagccgcaccatcaccgaatacggccagaccctgcgcgggcgcagcatgctggtgatggtcgacggcgtgccgctgaacaccaaccgcgactcctcgcgcaacctggccaacatcgacccggcgctgatcgagcggatcgaggtcatccgtggcagcagcgccatctacggcagcggcgccaccggcgggatcatctccatcaccacccgtccggccggcggcgagaaccgcgcggaaacccgcctcagcgccacctcgccgctgacccggctgggcagcgatggcctcggcggccagttccagcaatacttcgccggctccctgggggcgctcgactattcgttcgacttcggcacccgccacgtcggcgcttcctacgacgcccatggcgaccgcatcgccccggaacccagccagggcgacctgttcgactcgaacgtctacaacatcggcggcaagctcggcctgcgcatcgacgagaaccagcgcgtgcagctcgccctcagccactacgacgcccgccaggacaccgactacgccaccgacccgagggtcgccaggctgccgccgggctcggtcccggccaacgcgatcaaaggcctggagctggacgagcagaaccgcatccgcaacaccctggcgaacctcgagtacgagaacctcgacatcctcggcagccggctctccgcgcagctctactaccgcgactatttcacccgcttcactccgttcgacgcccgcgccgtctccacccgcggcggcaatgtcgaccagatcatgcagaacagcgaagtgttcggcagccgcctgaccctgcgcacgccgctgggcgaaagcggcaataccgaactggtctggggcggcgactacaaccaggaacgcagcgacatgccgctcgacgtgttcgacccggcggcctacgacgccagcggcgggctggtcttcgacaagatcggcaagctcacctacatgccgccgctacgcacccgcagcgccggcgcgttcgcccagttgcagcatcgcttcgacgaacactggtcgatcgacggcggcctgcgctacgaatactccaccgccgaattcgacgacttcatcccgctctccgagtccaaggccgcctcgccggtgaccgtcaagggcggcgacctcgactacgacgcggtgctgtcgaacctcggcatcgtctattcgccggtggctggccaggaaatctatgcctccttcagccagggcttccagttgcccgatgtcggcatccagctgcgcaacgcccgccgtggcttcgatatcggctcctcgaacctcgaaccggtgaagaccaacaactacgaactcggctggcgtggcgccatcggcggcaacaccctgggcagcctggcgctgttctacaccacctccaagctgggcgacgtgcagagcttcaacaacggcctgatcctcacccgcaccaaggagcgcatctacggcgtcgaggccagcgccgactggctcagcgacgacgaagtctggggcgcgggcggcagcgccacctggatgcgcggacgcgagaagccggacggcaaggactggcaggacatgaccggctaccgcgtgccgccgctgaagctgaccgcctacctgcaatacaagccggatgccgactggaacaaccgtctgcaggccaccttcttcgactccaaggactaccgtctcgacggcgtggaaagcttcggccggcgccaggtcagcacctacaccacggtcgacctggtcagccagtaccgcatcacccccgacgaccagttgagcctgggcatccagaacctgttcaaccgcgactactacccgctctacagccagttgctgcgcaacaacaacaacaccagccacctgccggcgccgggcacggtgctgacggcgagctatacgcacaactggtga

SEQ ID NO: 7314 - DNA, 1329 bp, Pseudomonas aeruginosa
atgccttcctcacagcttccgggggcttcgccctcggagatcgatctcgttcagctgttccagcaattgtgggcgtcgaaatggctgatagcgctgatcgcggccttggcgaccgccgctgcgctcgcctacgcgctgttggctgttccaacctaccaggtggatgtcctgttgcggccaatccagaccaaggccctggaggctgtcaatgtcaacgggctgtatgccctgactccgcgggaagcgctggatcgcgtcggcaacgagctggcagcctactccggcaggctggagtatttcgaagcccatccagagctattccagcaattgaacgccgagggcttgtcccccgagcaggctttctggaagttcaaccaggatgccttcagcatgcagcaggcggacttgaagaaggacccccaggcggcgcctttcttccgcttgtccatgcagtatccccagggcatggatggtgccgccattctcaacggcatgctcgcgtcgaccatcgagaacgagcgtcagcgaatcctggacgacctccaggcgcgtatcgacggtcgcctgcaattcctcgagcaggatatcgaaggcaagcgtgccagttaccaggctaccaaggagggcaagatcgcccggttgctggaagcggacagcatccggcgggccggcctggaggatgagctcaaggcgttgcgcgggcggctgaagatggtgcgcgattcgcgtatccagcagctcaacgaggctatccagatcgccacccggctggggatcgtcaagccgacgaccccgggcgcactgggagaggtcgggcaggatggctcgcgcagcgttttccgcaccgaggtgaataaccagcagatacccctgtatttcatgggtgtcgatgccttgaccgccgagcgcgataccttgctcaaacgcaagggcgatgacttcaccgagccccgcgtggcgaagatccagcaggagctgaagcagctggagaacaaccgtgaagtgcaatacctgcaggctcgaaagggcgaggagcgtttcttcgaaaacatcgacaagctgcgtggagagcaggcgcgcctcaagactctgaaggcgagcgagctgaagatcgaactggtgcggatcgaccagaaggcttcgacccctctgaaaccgatcaagccgcgcaaggccttggtggtggccttgggcctcctgggcgggttggtgttcggcgtgctggtggctctggttcgggcgatgttgcgtacccctcggcaacgggtacaggaagatagcctgccgccgggagtcgtcagcctcgaccggagcctttcagggacctga

SEQ ID NO: 7315 - DNA, 342 bp, Pseudomonas aeruginosa
atgcgtagcccgcttgccacgattgcctgcgcctgcctgctgctcggcggctgctccaagtccgccgaggacagcgccaacccattgctgggcaaggatgccgagtgcctcgaactgttcgcccgcagcaatgcgctgtactgcgacatccgcgaggacgaacgcgaatcccaggcgaacggtacgccgcgccggcacaccgactacgaggtagccgatgccgcttacctgctcaaggccaccggggagcgctgcgcgatcgatacgacctatgtcacggagtgttcggcgaaggccgggcagtggctgcagaaggcccgcgccaaggcggcgaagccctag

SEQ ID NO: 7316 - DNA, 2040 bp, Pseudomonas aeruginosa
atggccaagccttccttcttttcctccgacctggtgcaggtgctgctgtgcccgcgtctgcacgaactgcagttcgccgtgaaggccctgctggccggcgggttggccctgtacctggccttcggcctggagctggagcagccgcaatgggcattgatgacggtgttcgtggtcagccagccctatagcggcatggtcctggccaagggcatgttccgcctgatcggcacctgcgccggtgcgctggtgtccatcggcatggtcgcactctatggccaggcatcgctgcccttcctcctgctgatggccctctggctggcgttctgcaccgccggcgcgtcgctgctgcacaatcatgcgtcctacggtttcgtcctggccggctacaccgcggccatcgtcgccctgccggccagcgccgatccggcgacggtgttcgaccaggcggtggcccgctgctcggagatcggcctgggcatcctctgcgcggcgctggtgaatgtgctgctctggccgcggcgcctggaacgccagttggcgaaccagggcaaggcggcctgggaggccggcttgcaggcggccgcggcggagctgcgcggtgccgacgaacgcggcgagctgctcgcggcgctggggcggatcgccgcggcggacgcccagcgcgaccacgcctggttcgagggtgcgctcggccgcgcccgttcccaggccttgcgcgtgctaggcctcgacctgctcggcctgctgcgcgcggcgcgcaaggtggctcgcgagcggaggctgctcgatccggccagcgcgcacgccttgcagccctggctggaagaactcgaggcactgttgcgcgagggccgccaggccgagttcgaggcctgccggcagcgcttgcgcctggcgctggacgcggcgcacggacagttgcacctgtgcctggtctgcctcgaacgcctgctcggcgaggcgagggcggccgggcgcagcgtcgaggcgctggtctatggcgcgcccacccgccaggcgccgggcgccatcgcctggcaccgggacatcgagcgcggcgtgctgttcggcctgcgcagcgccctggcgttcctctgcgtggccgcgttctggctggccagcgcctggccgagcgggttgggcgcggtgtcgatcaccggcgtggtgctgagtctcttcgccagccgcgacaacccggcccaggccggcctgaacttccttcgcgggatcctcctgtcgatcccgctggccggcttcgtcgcactgttctacctgcccggcgtggacggcttcccgctgctctgcctgggcctgggcgtaccgctgttcttcgccgcgctgtgcgtgaaccgggcgagcctggccgggatcgcctcgccgttctgcatcttcttcgtgaagaacgtcgcgccgagcaacagcatgagctacgacctcgcgcacttcctcaacaacgccctgtcgacggtgctcggggtggccttcgccgtgctggtgttcaacctggtcagcctgcggccgggcgaacgccattaccggcgcatgctgcaggccaccctcggcgacctggcgcggctcaccctgcgctcgccggcgcaggccgaggcctggttcggcgggcgcaccgcggatcgcctgatccgcctggcgcagcgctacgaccgtttgccggaggggcgccgccagccctggtcggacggcctgatgggactcgacttcggcgacgagctgctctacctgcggcagtgcctggaggaggtcccggcgtccctggcgcaggcccgcgaccgctacctgcggcgcctgcgcctggcgctgctgggcgatggcccgcgggctgagcgtgaacacgccctcgacccgccgaccgcgcgcctgctcaaggccctggccgccagcccgctggccggcagcgaacgcggcgagctggccggcgccgcgctggtgcagttgcaggccacctggcggcagtggtgccgcagccatgctccggccgggacggcgctgcgcgcggacccgctccccggagccgggcgctag

SEQ ID NO: 7317 - DNA, 1416 bp, Pseudomonas aeruginosa
gtgatcaagaagatcctgatcgccaaccgcggcgagatcgccgtccgcatcgtgcgcgcctgcgccgagatgggcatccgctcggtggccgtctactccgaggccgatcgccacgcgctgcacgtcaagcgcgccgacgaagcccacagcatcggcgcggacccgctggccggctacctcaacccgcgcgccctggtgaacctggcggtggaaagcggctgcgacgccctgcaccccggctatggcttcctctcggaaaatgccgagctggcggaaatctgcgccgagcgcggtatcaagttcatcggcccgtcggcgcaagtgatccgccgcatgggcgacaagaccgaagcccgccgcagcatgatcgccgccggcgtgccctgcacccccggcaccgaaggcaacgtcgccgatctcgccgaggccctgcgcgaagccgagcggatcggctacccggtgatgctcaaggccacctccggcggcggcggccgtggcatccgtcgctgcaacagccgcgaggagctggaacaggcgttcccgcgggtgatctccgaggcgaccaaggccttcggcagcgccgaagtattcctcgagaagtgcatcgtcaatcccaagcacatcgaggcgcagatcctcgccgattccttcggcaacaccgtgcacctgttcgagcgcgactgctcgatccagcgccgcaaccagaagctcatcgagatcgccccgagcccgcagctcacccccgagcagcgcgcctatatcggcgacctggcggtgcgcgcggccaaggcggtgggctacgagaacgccggcaccgtggagttcctgctcgccgacggcgaggtgtacttcatggagatgaacacccgggtccaggtggagcacaccatcaccgaggaaatcaccggcatcgacgtggtccgcgagcagatccgcatcgcttccgggctggagctgtcggtcaagcaggacgacatcgtccatcgcggctacgccctgcagttccgcatcaacgccgaggacccgaagaacaacttcctgccctcgttcggcaagatcacccgctactacgcccccggcggccccggcgtacgtaccgacacggcgatctacaccggctacaccatcccgccgtactacgactcgatgtgcctgaagctgatcgtctgggcgctgacctgggaagaggccctcgatcgcggactgcgtgccctcgacgacatgcgcgtgcaaggggtcaagaccaccgcgccgtactaccaggaaatcctccgcaacccggaattccgcagcggccagttcaacaccagcttcgtcgaaagccacccggaactgacccagtactcgatcaagcgcaacccgtcgcacctggccatcgccatcgccaccgccatcgcggcccacgccggcctgtaa

SEQ ID NO: 7318 - DNA, 654 bp, Pseudomonas aeruginosa
atgttcagcctgccccaccactcgccgcgcgacctgccattcggccgccggcagaccgccatcctgttcgtcgacatgcagcgtgcctgggtcgagccggggcgcgacccgcacgtcgatccgcaggcagccggttacttctacgagcgcgtgcagaaccaggtgatccccaaccagcagcgcctgctcagggccatgcgcgcagtggacgagaacgtcctgcacaccgtcatcgagagcctcaccgccgatggtcgcgaccgctcgctggatcacaagctgtcggagatgcacctgcccaagggcagcccggacgccagggtgatcgacgccctggagccgaccgccaacgagatcgtgctgccgaagacttcttccggcgttttcaactccaccgccatcgactacgtactgcgcaacctcggcacccgccacctgatcgtctgcggggtggtcaccgaccagtgcgtggacatggccgtgcgcgatgccgccgaccgcggttacctggtcaccctggtcgaggatgcctgcgccacccataccccggaacgccaccaggcctgcctggaagcgatcaagggctactgctggatcagcgacaccgagaccgtcctgcaacgcatcgccgccctcggccggagcaacctgtga

SEQ ID NO: 7319 - DNA, 999 bp, Pseudomonas aeruginosa
gtgaaacgactgttcagcgcctccctgctggccgccggcctggcgctcggcggcgccgctcacgccgcccagcccctgctcaacgtctcctacgacgtgatgcgcgacttctacaaggaatacaacccggccttccagaaatactggaaagcggagaaaggcgagaacatcaccatccagatgtcccatggcggttccagcaagcaggcgcgctcggtgatcgacggtctgcccgccgacgtcatcaccatgaaccaggccaccgacatcgacgccctcgccgacaacggcggcctggtgccgaaggactgggcgacccgcctgccgaacaacagcgcgccgttcacctcggccaccgtgttcatcgttcgcaagggcaaccccaaggccctgaaggactggccggacctgctcaaggacggcgtccaggtagtggtgccgaaccccaagacctccggcaacggccgctatacctatctctccgcctggggctacgtgctgaagaacggcggtgacgagaacaaggccaaggaattcgtcggcaagctgttcaagcaggtaccggtgctcgacaccggcggccgcgccgccaccactaccttcatgcagaaccagatcggcgacgtactggtgaccttcgagaacgaagccgagatgatcgcccgcgaattcggccgaggcggcttcgaggtggtctacccgagcgtgtccgccgaggccgagccccccgtggcggtggtcgacaaggtggtcgagaagaaaggcagccgcgcccaggccgaggcctacctgaagtacctgtggtcggacgagggccagaccatcgccgccaacaactacctgcgcccgcgcaacccggagatcctcgccaagttcgccgaccgcttcccgaaagtcgacttcttctcggtggagaagaccttcggcgactggcgcagcgtgcagaagacccacttcatcgacggcggcgtattcgaccagatctacagccccaactga

SEQ ID NO: 7320 - DNA, 726 bp, Pseudomonas aeruginosa
atgaggaatgacggaggctttttgctgtggtgggacggtttgcgtagcgagatgcagccgatccacgacagccagggcgtgttcgccgtcctggaaaaggaagtgcggcgcctgggcttcgattactacgcctatggcgtgcgccacacgattcccttcacccggccgaagaccgaggtccatggcacctatcccaaggcctggctggagcgataccagatgcagaactacggggccgtggatccggcgatcctcaacggcctgcgctcctcggaaatggtggtctggagcgacagcctgttcgaccagagccggatgctctggaacgaggctcgcgattggggcctctgtgtcggcgcgaccttgccgatccgcgcgccgaacaatttgctcagcgtgctttccgtggcgcgcgaccagcagaacatctccagcttcgagcgcgaggaaatccgcctgcggctgcgttgcatgatcgagttgctgacccagaagctgaccgacctggagcatccgatgctgatgtccaacccggtctgcctgagccatcgcgaacgcgagatcctgcaatggaccgccgacggcaagagttccggggaaatcgccatcatcctgagcatctccgagagcacggtgaacttccaccacaagaacatccagaagaagttcgacgcgccgaacaagacgctggctgccgcctacgccgcggcgctgggtctcatctga

SEQ ID NO: 7321 - DNA, 1596 bp, Pseudomonas aeruginosa
atgtccgcatatcagaacgagatcaaggcagttgccgcgctgaaagagaagaacggcagcagctggagcgcgatcaaccccgagtacgcagctcgcatgcgtatccagaaccgcttcaagaccggcctggatatcgccaagtacaccgcggccatcatgcgcaaggacatggccgaatacgatgcggactcctccgtctacacccagtcgctgggttgctggcacggcttcatcgggcagcagaagctgatctcgatcaagaagcacctgaagaccaccaacaagcgctacctctacctgtccggttggatggtcgccgcgctgcgctccgacttcggcccgctgccggaccagtccatgcacgagaaaaccgcggtttccggcctgatcgaagagctgtacaccttcctgcgccaggctgacgcccgcgagctggacctgctgttcaccggcctggacgctgcccgcgccgctggcgacaaggccaaggaagccgagctgctggcccagatcgacaacttcgaaacccacgtggtgccgatcatcgccgacatcgacgccggcttcggcaacgccgaggcgacctacctgctggccaagaagatgatcgaagccggcgcctgctgcatccagatcgagaaccaggtgtccgacgagaagcagtgcggccaccaggacggcaaggtcaccgttccgcacatcgacttcctcgccaagatcaatgccgtacgctacgccttcctcgagctgggcgtggacgatggcgtgatcgtcgcccgtaccgactccctgggcgccggcctgaccaagcagatcgccgtgaccaacgagccgggcgacctgggcgacctgtacaactccttcctggattgcgaagaaatctccgagtccgagctgggcaacggcgacgtcgtgatcaagcgcgaaggcaagctgctgcgtccgaagcgcctggcttccaacctgttccagttccgcaagggcaccggcgaagatcgctgcgtcctggactgcatcacctcgctgcagaacggcgccgacctgctctggatcgaaaccgagaagccgcacgtcggccagatcaaggcaatggtcgatcgcatccgcgaagtgattccgaacgccaagctggtctacaacaacagcccgtccttcaactggaccctgaacttccgccagcaggtgttcgatgcgttcgtcgccgaaggcaaggacgtttccgcctacgaccgcaacaagctgatgagcgtcgagtacgacgacaccgagctggccaaggtcgccgacgagaagatccgcaccttccagcgcgatggctcggcccacgccggcatcttccaccacctgatcaccctgccgacctaccacaccgccgcgctgtccaccgacaacctggccaagggctacttcgccgacgaaggcatgctggcctacgtgaagggcgtgcagcgccaggaactgcgccagggcatcgcctgcgtcaagcaccagaacatggcgggctccgacatcggcgacaaccataaagagtacttcgcaggcgaagccgctctgaaggccagcggcaaagacaacaccatgaaccagttccactaa

SEQ ID NO: 7322 - DNA, 894 bp, Pseudomonas aeruginosa
atgacctccacctcccgcggcctcgccggaacgctgttgccggtcggcctgctattgatcgccatggcctcgatccagagcggcgcctccctggcgaaaagcatgttccccctggtcggcgcccagggcaccacggccctaaggctgttcttcgccgcgctgatcctgctgctgctcctgcgtccctggcgcaagcgcctgagcctgcaatcgctgcgctcggtggtggtctacggcatcgccctgggcggcatgaacctgctgttctatctctcggtgcgcaccgtgccgctgggcatcgcggtggccctggagttcaccgggccgctgctggtggcgatcctctcctcgcggcgcctgctggacttcctctggatcggcctggcggtgttcggcatctggctgttgctgccgctgggcaacagcgccgagccgctcgacctggtcggcgccgcctatgccctcggtgccggcgtgtgctgggcgctgtacatcctcttcggccagcgcgccggcgccgaccatggcgcccagggcgccgcgctgggggtgctggtggcggcgatcctggttgtgccgatcggcgtcgcccacgccggcgccgacctcctcgacccggcgctgatcccgttggcgctgggcgtcgcggtgctctccacggccttgccctacaccctggaaatggtcgcgctgacccgcctgccggcgcgcaccttcggcaccctgatgagcatcgagccggccttcggcgcgctctccgggctgctgttcctcggcgagcggctgagcccgacccaatggctggccatcggcgcgatcatcctcgcctcggtcggcactaccctcagcgtcaagtcgcgtggcgccgccccggcgctaccggccaaggactga

SEQ ID NO: 7323 - DNA, 639 bp, Pseudomonas aeruginosa
atggaactgagcctgtcgcgggtgcatttcccggtgaccaccctgggcccgggacggcgcctgggcatctggttccagggctgtagcatccgctgccccggctgcatctccgccgatacctgggggccgggcaggcggcgtatcgccctggcacgcctgctcgccgacatccagccatggctggagcaggccgagggcatcaccgtctccggcggtgaacccttcgagcagttcgctgccctcctcgccctgctcggcgaactgcgccggcgcagccgcgccgacatcctggtctacagcggctacccgctggagcatctgcacgcgcaactggaacaggccgccgggctgatcgacgcgctgatcagcgacccctaccaacagcacgccgaacagagcctggccctgcgcggcagcgacaaccagcgcctgagcctgctcaccgaactcggccgcgcgcgcctcggcggctaccagcggccactgcgcgaagacgacaaggccctcgacctgatgttcgaccatgacggcagcgtgtggatggccggcatcccgcgccgcgacgacctgctgcggctacaggacctgctgcgcgaacagggccaccaacttagcgtcagcgcccatcggccgcgctga

SEQ ID NO: 7324 - DNA, 1329 bp, Pseudomonas aeruginosa
atggctaagcaaggtgctctctctgcgctaagcaacggcggtctgtccgagctctgggcacgtctgcgtttcctgttcctggcgatcatcgtctatcggatcggcgcgcacatcccagttccgggcatcaaccccgatcgcttggcggcactgttccggcagaacgaggggaccattcttagcctcttcaacatgttttccggcggcgcgctggagcgcatgagtatctttgcactggggatcatgccgtacatctcggcatcgatcatcatgcagctcatgaccgctatcagcccgcagctggagcagttgaagaaagagggtgagtctgggcgtcgcaagatcagccagtacacccgctacggtactgtagtcctggcactggtccaggccatcggcatgtccgttggcctgggcagccagggcgtagccttctccaacgacttcggcttctacttcgtggctgtcaccaccttcgtggctggtgccatgttcatgatgtggctgggcgagcagatcaccgagcgcggtgtcggcaacggcatctcgatgttgatcttcgctggtatcgttgcaggcctgccgcgcgccatcggtcagtctttcgagtctgcccgtcaaggtgacatcaacatcttcgccctgatcggcgtcggcctgctggccgtggcgatcatcgcgttcgtggtgttcatcgagcgtggccagcgtcgcatcgcggtgcattacgccaagcgccagcaaggccgcaaggtgtttgcagcgcagaccagccatctgccgttgaaggtgaacatggcgggtgtgattcccgcgattttcgccagcagtatcctgctgttcccggcgtccctgggctcctggttcggtcagtcggaaggcttgggttggttgcaggacgtcgcgcaagcgatcgctccggggcagccgctgaacatcttgctgttcactgcagggatcgttttcttctgcttcttctatacagcgctgatgttcaacccgaaggacgtggcggagaacctcaagaagtccggtgcatttattccgggcatccgtccgggcgaacagtccgctcgctacatcgatggcgtgctgacccgtttgaccatgttcggtgctctgtacatgacggctgtctgcctgctgccccagttcctggtggttgcggcgcacgtgccgttctatcttggcgggacctcgctgttgatcgtggtcgtggttgtcatggactttatggcccaggtgcaatctcacctcgtttctcaccagtatgaatccctgatgaagaaagccaacctgaagggctacggcagcggcatgctgcgctga

SEQ ID NO: 7325 - DNA, 3162 bp, Pseudomonas aeruginosa
atgacattcccacgcttcttcatcgataggccgatcttcgccatcgttctttcggtgctgatgatgatcggaggcatcgtttcgttcttccagttgccgctgagcgaatacccggcggtgacgccgccgaccgtgcaggtgactaccgcctatcccggcgccaaccccgacgtgatcgcgcagacggtggcgacaccgctggagcaggcgatcaccggggtcgaggggatgctgtacatgtcctcgcagtcggccaccgacgggcgaatgatcctgaccatcaccttcgaccagcacatcgatcccgacatggcccagatccaggtgcagaaccgggtctcgcgggtgctctcgcgcctgcccgacgaggtgcagcggcagggcgtggtcacccagaagacctcgccggacatcctcatggtggtgcacctgctgtcgccggagcaacgctacgacccgctgtacatctcgaactacgcctacctccaggtgcgcgacgaactgctgcgcctgccggggatcagcgatgtggtggtgtggggcgccggcgagtacagcatgcgcctgtggctcgaccccgacctgatcgccgcgcgcgggctgacggcgggcgaagtgatcgccgcggtacgcgaacagaacgtccaggtggcggccggcgccgtcggccaggcgccggactccaccgcggccttccaggtcacggtgaataccctcgggcggctgagcgacgaagagcagttcggcgacatcatcgtccgcaccggcgccgacggccaggtgacgcgcctgcgcgacgtcgcgcggatcgagatgggcggcgatgcctatgcgctgcgcagcctgctggacggcgagccggcggtggccttgcagatcatccagagccccggagccaacgcgctggataccgccgaagcggtgcgtgccaccgtggcgaggctcgaaggcaacttcccggccggcctgagcgcgcgcatcgcctacgacccgacggtgttcgtccgcgcttcgttgcagaccgtggccaccaccctgctggaggcgatcctgctggtcgtggtggtggtggtgctgttcctgcgtagctggcgtgcttcgctgattccgctgatggccgtgccggtctcgctggtcggcaccttcgccgtcatgcacctgatgggtttctcgctgaataccctgtcgttgttcggcctggtgttgtcgatcggcatcgtcgtcgatgacgccatcgtggtggtggaaaacgtcgagcgccacatcgagaacggcgagccgccgctccaggccgcgcggcgtgcgatggacgaggtcaccgggccgatcatggcgatcacctcggtgctggcggcggtgttcatccccacggcctttctcagtggcctgcagggcgagttctatcgtcagttcgccctgaccatcgccatctccaccatcctgtcggcgctcaactcgctgaccctcagcccggccctggcgggcctgctgttgcgtccgcggccggccggaggtgcggtggcggggcgcttccagcgactgctccaggtcctcggccgaccgttgcgaaatgcccccgaggcctacggcaacgcggtgcgcaaggtggtgcgggtgagcggcctggccctggtggtgtatgggggcctgcttggcctgacctgggtcggtttccaggcggtgccgccgggcttcgtgccgatgcaggacaagtactatctggtcggcatcgcccagttgccgaacggagcgtcgctggagcgtaccgatgcggtggtcaggcagatgtcccggatcggcctcgacgagccgggggtggagagcgtcgtggccttcccgggcctgtcggtgaacggtttcgtcaacgtgccgaacgccgcggtcatgttcttcatgctcgatccgttcgaatcgcgcacctccgccgatctcggcgcgctggccatcgccgggcgcctgcaagccaggttcgccagcattcccgacggcttcctcggggtcttcccgccgccgccggtaccggggctgggaaccatcggcggcttcaagatgcaggtcgaggatcgcggcggcgccgggctggaagccctggccaggcagacccaggtgctgatgatgaaggccactgagtccggccagctcgggggcttgatgaccagcttcgatatcaatgccccgcagctcgaggtggtggtcgaccgcaccaaggtgaagagccagggcgttcgcctggccgatgtgttcgaggcattgcaggtctacctcggctcgctgtacatcaacgacttcaaccgcttcggtcgcacctacaaggtcactgcccaggccgatgcgccgcaccgcatgcaggccgaagccatcgggcgcctgcaggtacgcaatgccgccggggcgatgttgccgctgtcctcgttcgtcaccgtgacgcccagctccggtcccgaccgggtgatccactacaacggctatccgtcggcggatatcagcggcggcgcgcttcccggcgtcagttcgggacaggcggtggcgttgatggagcgcctggccggcgaagtgctgcccgagggcatgaccttcgaatggaccgacctgacctaccagcagaagctggccggcaacagcgcgctgttcatcttcccgctgtgcgtgctgctggcctacctgatcctcgccgcgcagtacaacagctggctgttgccgctggcggtcctgctgatcgtgccgatgtgcctgctcagcgcgatcgccggggtgtggctggtgggcggcgacaacaacgtgttcgtccagatcgggctggtggtgctggtaggcctggcggcgaagaacgcgatcctgatcgtcgagttcgcccgcacgctggaggccgagggcgcccgtgcgctggaggcggtggtcgaggcttgccgcctgcgcctgcggccgatcctgatgacctcgctggcgttcatcgccggcgtggtgccgttggtcatggccagcggcgccggagcggaaatgcgccaggcgatgggcgtcgcggtattcgccgggatgctcggggtgacgctgttcggcctgttcctcacgccggtgttctacgtactggtacgggcactggcggcgcgcctggagcgacgcgccggcggcagcctggcgcatctggagggaggccgtccatga

SEQ ID NO: 7326 - DNA, 1425 bp, Pseudomonas aeruginosa
atggccggcaagaccctctacgacaaactctgggacatgcacctggtcaagcagcgcgacgacggttcggcgctgatctacatcgaccgccatatcctgcacgaagtgacctcgccgcaggccttcgagggtcttcgcctggccgggcgcaagccgtggcggatcgacgccaacatcgccaccccggaccacaacgtgccgaccacccgcaccgagcgcaagggcggcatcgccgccatcgccgacgaggtctcgcgcctgcaggtgcagaccctcgacgagaactgcgacgacttcggcatcaccgaattcaagatgaacgacgtgcgccagggcatcgtccatgtggtcggtccggagcagggcgcgaccctcccggggatgaccgtggtctgcggcgactcgcacacttccacccacggcgccttcggcgcgctggcccacggcatcggcacttccgaggtagagcatgtgctggcgacccagtgcctggtggcgaagaagatgaagaacatgctggtcaaggtcgaaggcaggctgccggccggcgtcacggcgaaggatatcgtcctcgcggtgatcggcaggatcggcaccgccggcggcaacggccacgccatcgagttcgccggcagcgccatccgcgacctgtccatcgaagggcggatgaccatctgcaacatgtcgatcgaggcgggcgcccgcgtcggcctggtcgccgtcgaccagaagaccatcgactacgtgaagggccggcccttcgcgccgagcgccgagcaatgggaccaggccgtcgcctgctggcaggggctggtgtcggacgccgatgcccgcttcgataccgtggtcgagctggacgccgcgcagatcaagccgcaggtcagctggggcacgtcgccggaaatggtcctggccgtggaccagaacgtgccggacccggcccgcgagagcgacccgatcaagcgcggttcgatcgagcgcgccttgaagtacatgggcctgcggccgaaccaggcgatcaccgacatccagctggaccgggtattcatcggttcctgcaccaactcgcggatcgaggacctgcgcgctgccgccgaagttgccaggggccgcaaggtcgccgcgaccatcaagcaggcgctggtggtgccgggttccgggttggtcaaggagcaggccgagaaggaaggcctggaccggatcttcatcgaggccggcttcgaatggcgcgagccgggctgttccatgtgcctggcgatgaacccggaccggctggagagcggcgaacactgcgcctcgacctccaaccgcaacttcgagggccgtcagggcgccggtggccgtacccacctggtcagcccggcgatggccgccgccgcggccgtcaacggccgcttcatcgatgtccgcgaattgctcgcctga

SEQ ID NO: 7327 - DNA, 1035 bp, Pseudomonas aeruginosa
atgctgaccatctacagcgacgaccatcgcctgcaccacggccggcacgaactgatcggcggccagttcaccccctgcttcgaaaaacccagccgcgccgacatggtcctcgaccgcgtgaaggccgtcggcctcggcgaagtccgcgcaccgcgcgacttcggcctggaaccgatccgccgggtgcacagcgagggtttcgtgcgtttcctgcagaacgcctggcaggactggctggccaccggccgcagccacgacatgctgccgatcgcctggccgacccggcgcctgcggcagacggagccggacaacatcgacggtcgcctcggctactactccttcgacgccggcgcgccgatcaccgccgggacctggcaggcgatcaccagttcggccaacgtcgccctcagcggccagtccgaactcgccaacggcgcgcgctcggtattttcgctctgtcgcccgccgggccaccacgccgcggccgactacatgggcggctattgcttcttcaacaatgccgccatcgccgcccaggccttcctcgaccggggcgccgggcgggtggcgatcctcgacgtcgactaccaccatggcaacggcacccaggacatcttctacgaccgcgccgatgtgctgttcacctcgatccacggcgatccgcgcttcgaatacccctatttcctcggctacgccgacgagaagggcaacggcgtcggcaccggctacaacttcaactacccactggcggccggcagcgactgggcgacctggagccaggcgctgcaggcggcgatccggcagatccaggcctatgcggcggacgccctgatcgtttccctgggggtggataccttcaaggaggacccgatttcccagttccgcctggacagccccgactacctgcgcatgggcgaagccatcggcaagctcggcctggccacgctgttcgtgatggagggaggctacgcggtggaggaaatcgggatcaacgcagtgaacgtgctacagggtttcgaaggggttcaccggtaa

SEQ ID NO: 7328 - DNA, 603 bp, Pseudomonas aeruginosa
gtgaagcgctggctcggcgttgccctcggctgcagcgggctggcgatcgccctggcctgcgccggcgtgttgctggcgcctgccgatatggccgcttcctcgtcttctccgtcgccagccaggacggttgcggcactgcccgcggtcgacgaccgtccgccgccgccggcgccggtgcgatcgcaagcggcagcaccggcgtacgaggcggagccgccggtggcggaactggatcgcgagcaggcgatccagttcatgcagatgctgcgcgacgagggcgacccgcgcagcccgccgctcggcggcctgcaaccacgccagggcgcgacggcgcaggagctggccgatccgaagcagtaccaggccttcgaggaacgacagacccgcgaactggtacaggcctacaccagcggcgtacagcagataccggaaatccgcgcgcggatcgaggcggccgaacagggtggcgagcgcagcgccgaggaaatcgacgaggctcgcgccgcccttggacagttggagatgatgcgcgacaagctgcagcgggaatcgccgcaactgctgcccggcgacagcgcaccgacatcgccggcggcgccctga

SEQ ID NO: 7329 - DNA, 501 bp, Pseudomonas aeruginosa
atggcaaacaacgagcaaaagcgcgacgaaggctacatcgagaagctggttcaggttaaccgcgtcgccaaaaccgtaaaaggtggccgtatcttcgctttcaccgcactgaccgtggtgggtgatggcaagggtcgcgttggtttcggtcgtggcaaggcgcgtgaagtgccggccgccatccagaaagcaatggaagccgctcgccgcaacatgatccaagtcgatctgaacggcaccaccctgcagtatccgaccaagtccgcccatggcgcctccaaggtgtacatgcagccggcttcggaaggtaccggcatcatcgccggcggcgccatgcgtgccgttctggaagtggctggtgtgcagaacgtcctggccaagtgctatggctccaccaatccggtgaacgtggtttacgccaccttcaagggcctgaagaacatgcaggctccggaagcagtagcggccaagcgtggcaagagcgtcgaggagattctctaa

SEQ ID NO: 7330 - DNA, 351 bp, Pseudomonas aeruginosa
atgagcgtcaagaaagaaacccgtctgcgtcgcgctcgcaaggcacgcctgaagatgcgcgagctggaaaccgtacgcctctgcgtgtaccgctcttcccagcacatttacgcccaggtcattgcggccgacggcggcaaggtcctggccagcgcctcgaccctggacaaagacctgcgcgaaggtgccaccggcaacatcgatgcagccaagaaagttggtcaactggtcgccgagcgcgccaaagcggccggcgtcacccaggtggcgttcgatcgttctggcttcaagtaccacggccgtgtgaaagcgctggctgatgccgctcgtgaaggcggactggagttctaa

SEQ ID NO: 7331 - DNA, 1203 bp, Pseudomonas aeruginosa
atgacacaatcccaccgaccgcgcccgctcgacggcatcaccgtggtcagcctggagcacgccatcgccgcgccgttctgcacccgccaactggccgatctcggcgcgcgggtgatcaagatcgaacgccccggcgtcggcgatttcgcccgcggttacgacgagcgggtcaacggcctgtcgtcgcacttcgtctggaccaatcgttccaagcagagcctcagcctcgacctcaagcaggccgaggcgctgccgttgctggagaagctgctggccggcgccgacgtgctggtgcagaacctcgcgccgggcgccgccgcgcgcctgggcctgtcctacgaggcgttgcgcgagcgcttcccgcgactgatcgtctgcgatatctccggctacggcgaaggcggtccctacgagaagaagaaggcctacgacctgctgatccagagcgagggcggcttcctttcggtgaccggcggcgccgggccgaacgagatggccaaggccggctgttcgatcgccgatatcgccgccggcatgtacgcctacagcagcatcctttcggccctgctgctgcgcgagcgcaccggcgagggcagccgcatcgacgtgtcgatgctggagagcctggtggagtggatgggctacccgatgtactacgcctaccaggacgcgccgccgccgccgcgcgccggcgcttcgcactcgaccatctacccctatgggccattccccgccggcgacggcggcacggtgatgctcggcctgcagaacgagcgcgagtggcgggccttctgcgacaaggtcctgcgccgcccggaactggccgacgacgaacgcttctcggcgaacttcaagcgctcggccaaccgcgaggagctgcgtgcgctgatcgtcgaagccttcgccgccttgccggccgccgaggtggtggcgcgcctggaacaggcgcagatcgccagcgcccacgtcaacgacatggccggggtctgggcgcacccgcagttacaggcgcggcaacgctggacctccatcgacagcccggccgggcgcctgccggcgttgttgccgccggccagcagcagcgccttcgttccgcgcatggatgcggtgccggcgctgggcggcgacagcgacgcgctgcttgccgaactgggctgtaccgcggccgatatccagcgcctgcgcgcgaccggaacggtatga

SEQ ID NO: 7332 - DNA, 3132 bp, Pseudomonas aeruginosa
atgtccgaattcttcatcaagcggccgaacttcgcctgggtggtggccctgttcatctccctggccggcctgctggtcatttccaaattgccggtagcgcagtaccccaatgtcgcgccgccacagatcaccatcaccgccacctatcccggcgcctcggcgaaggtgctggtggactccgtcaccagtgtgctcgaggagtcgctgaacggcgccaagggcctgctctacttcgagtcgaccaacaactccaacggcaccgccgagatcgtcgtcaccttcgagccgggcaccgatccggacctggcccaggtggacgtgcagaaccgcctgaagaaagccgaggcgcgcatgccgcaggcggtgctgacccagggcctgcaggtcgagcagaccagcgccggtttcctgctgatctatgcgctcagctacaaggaaggcgctcagcgcagcgacaccaccgccctcggcgactacgccgcgcgcaatatcaacaacgagctgcggcgcctgccgggcgtcggcaagctgcaattcttctcttccgaggcggccatgcgggtctggatcgatccgcagaagctggtgggcttcggcctctccatcgacgacgtgagcaatgccatccgcgggcagaacgtgcaggtgccggccggcgccttcggcagcgcaccgggcagttccgcgcaggagctgacggcgaccctggcggtgaagggcaccctggacgatccgcaggagttcggccaggtagtgctgcgcgccaacgaggacggctcgctggtccggctcgccgatgtcgcgcgcctggaactcggcaaggagagctacaacatttcctcgcgactgaacggcacgcccaccgtgggcggggctatccagctgtcgcccggggccaacgcgatccagaccgctaccctggtgaaacagcgtctcgccgaactgtcggcgttcttccccgaggacatgcagtacagcgtgccctacgacacctcgcgcttcgtcgacgtggccatcgagaaggtgatccacaccctgatcgaagcgatggtcctggtgttcctggtgatgttcctgttcctgcagaacgtccgctacaccctgatcccgtccatcgtggtgccggtgtgcctgctgggtacgctgatggtgatgtacctgctggggttctcggtgaacatgatgaccatgttcggcatggtcctggcgatcggcatcctggtggacgacgccatcgtggtggtggagaacgtcgagcggatcatggcggaggaggggatttccccggccgaggccacggtcaaggcgatgaagcaggtatccggcgccatcgtcggcatcaccctggtgctctcggcggtgttcctgccgctggctttcatggccggttcggtgggggtgatctaccagcagttctcggtgtcgctggcggtctcgatcctgttctccggcttcctcgccctgaccttcaccccggcgctgtgcgccacgctgctcaagcccattcccgaagggcaccacgagaagcgcggcttcttcggcgccttcaaccgtggcttcgcccgcgtcaccgagcgctattcgctgctcaactcgaagctggtggcgcgcgccggacgcttcatgctggtgtacgccggcctggtggccatgctcggctacttctacctgcgcctgccggaagccttcgtgccggcggaagacctcggctacatggtggtcgacgtgcaactgccgcctggcgcttcgcgcgtgcgcaccgatgccaccggcgaggagctcgagcgcttcctcaagtcccgcgaggcggtggcttcggtgttcctgatctcgggcttcagcttctccggccagggcgacaatgccgcgctggccttcccaaccttcaaggactggtccgagcgaggcgccgagcagtcggccgccgccgagatcgccgcgctgaacgagcatttcgcgctgcccgacgatggcacggtcatggccgtgtcgccgccaccgatcaacggtctgggtaactccggcggcttcgcattgcgcctgatggaccgtagcggggtcggccgcgaagcgctgctgcaggctcgcgatactcttcttggcgagatccagaccaacccgaaattcctttacgcgatgatggaaggactggccgaagcgccgcaactgcgcctgttgatcgaccgggagaaggcccgtgccctgggggtgagcttcgagaccatcagcggcacgctgtccgctgccttcggctcggaggtgatcaacgacttcaccaatgcggggcgccaacagcgggtggtgatccaggccgaacagggcaaccggatgaccccggaaagcgtgctcgagctatacgtgcctaacgctgctggcaacctggtaccgctcagcgccttcgtcagcgtgaaatgggaagagggaccggtgcaattggtgcgctataacggctacccgtcgatccgcatcgtcggtgacgccgcgcccggcttcagtaccggcgaagccatggcggaaatggagcgcctggcctcgcagctgccggccggcatcggctacgagtggaccggcctgtcctatcaggagaaggtctccgccgggcaggccaccagcctgttcgccctcgccatcctggtggtgttcctgttgctggtggcgctctacgagagctggtcgatcccgctgtcggtgatgctgatcgtgccgatcggcgccatcggcgcggtgctcgcggtgatggtcagcggtatgtccaacgacgtgtatttcaaggtcggcctgatcaccatcatcggtctttcggcgaagaacgcgatcctcatcgtcgagttcgccaaggaactctgggagcaggggcatagcctgcgcgacgccgccatcgaggccgcgcgcctgcgcttccggccgatcatcatgacttccatggcgttcatcctcggcgtgatacccctggccctggccagcggtgccggcgcggcgagccagcgtgccatcggcaccggagtgatcggcgggatgctcagcgccaccttcctcggcgtgctgttcgtacctatctgtttcgtctggctgctgtcgctgctgcgcagcaagccggcacccatcgaacaggccgcttcggccggggagtga

SEQ ID NO: 7333 - DNA, 237 bp, Pseudomonas aeruginosa
atgtctagagtctgtcaagtaaccggtaagggtccggttaccgggaataacatttcccacgcacacaacaaaacccgccgccgtttcctgccgaacctgcagcaccaccgtttctgggtcgagtccgagaagcgcttcgtacgtctgcgcgtttccgccaagggcatgcgtatcatcgacaagcgtggcatcgaggccgtcctggctgacctgcgtgcccgcggcgaaaaattctaa

SEQ ID NO: 7334 - DNA, 603 bp, Pseudomonas aeruginosa
atgcaattgaatgtgaacggcgctcaggctatcgaagtctccgagcgtacctttggtggcgaattcaacgagaccctggtgcaccaggcagtcgtggcctacatggctggcggccgtcagggcagcaaggcgcagaagactcgctccgaagtctctggtggtggcaagaagccgtggcgtcagaagggcaccggtcgtgctcgcgctggcaccatccgtagccccatctggcgtgggggcggcaccactttcgccgctaaaccgcgtagtcacgaacagaagctgaacaagaagatgtaccgcgcagcactgcgctccatccttgccgagctcgttcgtctggaccgtctggtcgtcgttgccgacttcgctgtcgatgcaccgaaaaccaagggcctggttgccaagctggacaccctgggtctgaaagacgtgctgatcgtgaccgatggtgtcgacgagaacctgtacctcgctgcgcgcaacctggcgcacgtcgatgtacgtgatgtccaaggttccgaccccgtcagcctgatcgcctacgacaaggtgctggtcaccgtgtccgccgtgaagaagttcgaggagctgctgggatga

SEQ ID NO: 7335 - DNA, 1146 bp, Pseudomonas aeruginosa
atgagcatgaggttatttcccggccgcgtttccctgcgccgccggcctggcgcgcaggctcggcaggcgctcgttctcggcctctgctgcctgaccggcggccaggcctgggccctgaacgaggtcgccctgaactgctcgttcgacaatggcaaaggcttgccctggcgtgtggtgaacgagctgaccagcggcacggcgaaaggcacggtgctgttcgccaggccggtgagcctgttcctgaactacaagccccaggcttcccaggaggcgcatgagctggtcatcggggggaactggtccggggtgggctatccggggccctacggcacggtggcgtccgacgtcaaaggcatcggctatcggatctcggtggatgcccaggacggcgtcaagcgggtgattccggtcgacaaccagccccatgcgctggacaagcgagtcacgagcttttccggaagcacgaccagcgactacctacaggaactggtcctgacggtcgaccccggcgagttgcctgccggcgacctgaaggtaaccagcgtatccggcagcgccaccctgaatctctgggcggtggacaggctgaagggcgaagcgtccatcggcagcgtcctggcggtgcctgcggacaactaccccaccggggtttgccgaaagccctattcgctgatcggcccggcctccatcgctatcggcggcggtcccccgccgccgccgatcccgaagaaatgcaaggtcgaggtgggacgggaaatcaacgtcaaactgggtagcgtcgcgttgaagaacttcccgcgggtcaacgacacctccacggagcgctccttcgatatctctctcagcgagtgtgcggcgctggccaagccggaaatcgctttccgcgacaagtatgtctcggcgcagcaagcggacccgacgatcctcagcttgaagagcggcggcgcggcggggttcggcatcgtcgtgaagaacggcctggaccagcagcggatacgtttcgacggcacgccctacccgatgcggcgtgtcggcgacagcgccgacctcccgctgagtgccgcctacatccgtatcggcgcggagggcgaattgaaggccggggtcgccgacggcgccgccgagttcacgtttaccttcccctga

SEQ ID NO: 7336 - DNA, 1050 bp, Pseudomonas aeruginosa
atggatatcaagggagccctcaatcgcatcgtcaaccagctcgacctgaccaccgaggaaatgcaggcggtcatgcgccagatcatgaccgggcagtgcaccgacgcgcagatcggcgccttcctgatgggcatgcggatgaagagcgaaaccatcgacgagatcgtcggcgcggtggcggtgatgcgcgaactggccgacggcgtgcagttgcctacgctgaagcatgtggtcgacgtggtcggcaccggcggcgatggcgcgaacatcttcaacgtgtcctcggcggcgtccttcgtggtcgccgccgctggcggcaaggtcgccaaacacggtaaccgcgcggtctccggcaagagcggcagcgccgacttgctggaagccgccggcatctacctggagctgacctccgaacaggtggcgcgttgcatcgacaccgtcggcgtcgggttcatgttcgcccaggtccaccacaaggcgatgaagtacgccgccggtccgcgccgcgagctgggcttgcggactctgttcaacatgcttggcccactgaccaacccggcgggagtcaggcaccaggtggtcggggtgttcacccaggaactgtgcaagccgctggctgaagtgctcaagcgtctcggcagcgagcatgtgctggtggtgcattcgcgcgacgggctggacgagttcagtctggccgcggcgacccacattgccgagttgaaggacggcgaggtacgcgagtacgaagtgcgtcccgaggacttcgggatcaagagccagaccctgatggggctggaggtcgacagtccgcaggcctcgctggaactgatccgcgacgctttggggcggcgcaagaccgaggctgggcagaaggccgccgagctgatcgtgatgaatgccggcccggcactgtacgctgccgatctggcgaccagcctgcacgagggcattcaactggcccacgatgccctgcacaccgggctggcacgggagaagatggacgaactggtggccttcaccgccgtttacagagaggagaacgcacagtga

SEQ ID NO: 7337 - DNA, 1317 bp, Pseudomonas aeruginosa
gtgagcaatccgcaagtccggccacaggccgaagaagaacccgcgttaatcgaggcggcccgcgaagcagccaacgaggtgctggaagccgccaccgaagtcgaacgctatatcgaaaaaggcaccccgcagttcatgcgcacctccctggcgctgttctccggcggtttcgccacctttgccctgctctactgcatccagccgatgatgccggtgctgtccaaggcgttttccatcagcgccgcggaaagcagcctggcattgtccgtcgccaccgccatgctcgcccttggcctgctggtcaccggcccgatctccgacgcgatcggccgcaagccggtgatggtcgtctcgctgctggccgccgcgctgttcaccctcggcagcgcggtgatgcccacctggcatggcgtgctgctgatgcgcgcgctggtcgggctgtccttgagcggcctggccgcggtggcgatgacctatctcagcgaagagatccatccgcagcacatcggcttgtcgatgggcctgtacatcggcggcaacgccatcggcgggatgagcggacgcctgatcagcggcgtcctggtcgatttcatctcctggcatgccgcactggcggtcctcggcggcctggccctggtcgccgcgctggtgttctggcgcgtgctgcccgagtcgaaacacttccggccggcaccgctgaagccggcgaccctgctcaacggctaccgcttgcacttccgcgacgccggactgccctggctgttcctgatcggcttcctgctgatgggcagcttcgtcaccctgttcaactacatcggctaccgcctgctggccgagccctaccacatgagccaggcggtggtcggcgtgctctcggtggtttacctctcgggcatctacagctcggcctgggtcggttcgctggccgacaagctggggcgacgcaaggtgctctgggcggtcatcctgctgatgctcggcggcctgctgctgaccctgttcgagccgatcccgctgatgctcgccggcctgctgctgttcaccttcggcttcttcggcgcgcactcggtggcgagcagctggatcgggcgccgcgccctgcgcgccaagggccaggcctcgtcgctctatctgttcagctactacgtcggctcgagcctggccggcaccctcggcggggtgttctggcattactacggctggaacggcatcgggctgttcatcggctcgctgctggtggtcgcggtattggtctcgctgcacctggcgcgcctgccggccctgcctggcaacaccctggcgcagcccgcccactga

SEQ ID NO: 7338 - DNA, 1428 bp, Pseudomonas aeruginosa
atgtccaaagtcgtactggcttcacaactgccgaacaagcgcaacgcctcgctcgcgcccggcctgaaacaacgccacgtcaccatgctgtcgatcgccggggtgatcggcgccggcctgttcgtcggctccggccatgccatcgccgccgccggcccggccgccctgctcgcctacctgatcgccggcaccctggtggtgctggtcatgcgcatgctcggcgaaatggcggtcgcctcccccgataccggttccttctccacctacgccgaccgctccatcggccgctgggccggtttcaccatcggctggctctactggtggttctgggtgctggtgatcccactcgaagcgatcgccgccgcggccatcctcaacgcctggttcccggccatcgacacctggatcttcgccctcgcggtgaccttcctgctcaccgtcaccaacctcttcagcgtggcccgctacggcgagttcgagttctggttcgcgctgctcaaggtgatcgccatcatcgccttcatcgtgctcggcgcggtggccatcgtcggcggcctgccggagcgtgaggtcagcggcctgtccagcctgatggcgagccacggcggcttcgtgccgaacggctacggcgcggtgctcggcgccctgctgacgaccatgttcagcttcatgggcaccgagatcgtcaccatcgccgccgccgagtccaaggacccggcgaagcagatcacccgcgccaccaactcggtgatctggcggatcggcctgttctacctggtgtcgatcttcattgtgatctccatcgtgccgtggaacgacccgctgctgatccaggtcggctcctaccagcgcgccctggagctgctggacatcccgcacgccaagctgatcgtcgacctggtggtactggtcgccgtggccagttgcctgaactcggcgatctacacctcgtcgcggatggtcttctccctggccaagcgcggcgacgccccgagcgtgctcaagctgaccaacaccgcccacgtaccacgcccggcggtgctggccagcaccgcggtgggcttcctcaccaccatcgtcaactacttcgcaccggagaaggtcttcaccttcctcctcgccagctccggcgccgtggcgctactggtgtacctggtgatcgccgtggcccagttgcgcatgcgcaagcaattgcaggccagcggccagcccatcgagttccgtatgtggctatatccctggctgacctgggcggtgatcctgttcatcgtcgccgcgctgagcatcatgctgatcatgccggagcaccgacacgaggtgttcgccaccgctctgctgacgatcttcaccgtctgcctcgggctgctcaacgcgcgacgcaagccgcgcctcggcgaggactacgccgggaagacggcgcgggtctga

SEQ ID NO: 7339 - DNA, 900 bp, Pseudomonas aeruginosa
atgaaagttctcatcctggcggcctatgcgctgagcatcctctatgtccattttcgcggccgggtacgccacaagctgtcgcgccaattgagcgaccactccagcttcctcgctccgatcaactgcctgatgtacctgttctcgaaggtaccgaaccgcccttacctggcaccgcagaccttccccgaactgcaggttctggtcgacaactggcaagccatccgcagcgaggcgctgcacctgcacgacgccggcaacatcaagcgttccgaacagtacgacgatatcggtttcaactcgttcttcaagagcggctggaagcgcttctacctgaaatggtacgacgaggcccatccctccgccggacaactctgcccgcagaccaccgccctgttgcggcagattccctcggtcaaggcggcgatgttcgccgaactgccgccgggctcgaagctggtgcgacaccgcgatccctacgcaggctcgctgcgcttccacctgggactgttcacccccaacgacccggcctgcttcatcgaggtggacggcgagcgctaccactggcgcgacggcgaggcggtggtgttcgatgaaaccttcatccactacgcggaaaacgccaccgaacacaaccgcatcattctcttctgcgacatcgagcggccgctgacccagggctgggccaccgccttcaaccgctggttcagccgcaacgtgatggctgccgcggccgccccgaacaacgcaggcgaccggaccggcggactcaatcggatcttcgacagcctctacaagatccgcctgcagggcaaacgtttgaagaagcgcaaccgcaagctctactacctgcagaaatggggcttcttcgccctggtactggctttcatcctgtggatctga

SEQ ID NO: 7340 - DNA, 1254 bp, Pseudomonas aeruginosa
atgagccagtccctcaagcgcgcgctgttcagcgccctcctcgtgatcctggtgtcctatccgatcctaggcctgaagctgcgcaccgtcggcatcaagctcgaggtcctcggcgccgatgcgcagaccctctggaccatcgccgcggccgccctggccatgttcgtctggcagctgttccgcgaccgcatcccgctcaagctgggtcgcggcgtcggctacaaggtcaacggcagcggcctgaagaacttcctcagcctgccatcgacccagcgctgggcggtcctcgccctggtcgtggtggctttcgtctggccgttcttcgcctcgcgcggggcggtggacatcgccaccctgatcctgatctacgtgatgctcggcatcggcctgaacatcgtggtcggcctggccggcctgctcgatctcggctacgtcggcttctacgcggtaggtgcctacacctacgcgctgctcgccgagtacgccgggttcggcttctggaccgccctgccgatcgccgggatgatggccgcgctgttcggcttcctcctcggcttcccggtgctgcgcctgcgcggcgactacctggcgatcgtgaccctcggcttcggcgagatcatccgcatcctgctgcgcaacatgaccgagatcaccggcggccccaacggcatcggctcgatccccaagccgaccctgttcggcctgaccttcgaacgccgcgcgccggaaggcatgcagaccttccacgagttcttcggcatcgcctacaacaccaactacaaggtcatcctgctctacgtggtggccctgctgctggtgctgctggccctgttcgtgatcaaccggctgatgcgcatgccgatcggtcgcgcctgggaagcgctgcgcgaggacgaagtggcctgccgcgctctcggtctcaacccgaccatcgtcaagctctccgccttcaccatcggcgccagcttcgccggtttcgccggcagcttcttcgccgcccgccagggcctggtgacgcctgagtccttcaccttcatcgagtcggcgatgatccttgcgatcgtcgtgctcggcggcatgggttcgcagctcggcgtgatactcgccgcggtggtgatggtgctgctccaggaaatgcgcgggttcaacgaataccgcatgctgatcttcggcctgaccatgatcgtgatgatgatctggcgtccccagggactgctgccgatgcaacgcccgcacctggagctgaagccatga

SEQ ID NO: 7341 - DNA, 372 bp, Pseudomonas aeruginosa
atggcaactatcaaccagctggtgcgtaagccgcgcaagcgcatggtcgacaagagcgacgtgcctgcgctgcaaaactgcccgcaacgtcgtggcgtatgcacccgcgtatacaccaccacgccgaaaaagccgaactcggcactgcgtaaggtatgccgtgtacgtctgaccaacggtttcgaggtttcctcgtacatcggtggtgaaggtcacaacctgcaagagcacagcgtagtgctgatccgtggcggtcgtgtaaaggaccttccgggcgtgcgttaccacaccgtgcgcggttcgctggacacctcgggtgtcaaagaccgtaagcagggtcgttcgaagtacggcgccaagcgtccgaagtaa

SEQ ID NO: 7342 - DNA, 2130 bp, Pseudomonas aeruginosa
atgagcgagcagaacaacgagcagcgcagccaggcggccggcaccgacaccgtcgaccgtggcaacagcaacgccaagctggaacagctggaggcctatcgcgaggacgccaccggagaggccctgagcaccaataccggcacccgcatcgccgataaccagaacaccctgaaggccggcgagcgcggaccgtcgttgctcgaagacttcatcatgcgcgagaagatcacccacttcgaccacgagcgcattcccgagcgcgtggtccacgctcgtggctcggcggcgcatggctacttcgaggcctacgaggacctcagcgacctgaccaaggccggcttcctcgccgaggcgggcaagcgtaccccggtcttcgtgcgtttctccaccgtgcaggggccgcgcgggtccgcggatacggtgcgtgacgtacgcggcttcgccgtgaagttctataccgacgaaggcaacttcgacctggtcggcaacaacatgccggtgttcttcatccaggatgcgatcaagttccccgacttcgtccatgcggtgaaacccgaaccgcacaacgagattcccaccggagcgtctgcccacgacaccttctgggacttcgtttcgctgaccccggagtcggcgcacatggtcatgtggctgatgtccgatcgcgccattccgatcgcctaccgcaacatgcagggcttcggcgtgcacaccttccgcctggtcaacgcggccggcgagagcgtgctggtcaagttccactggcgaccgaagtccgggacctgctcgctggtctgggacgaggcgcagaagctcgccggcaaggaccccgacttcaaccggcggaccctctgggaggacatcgagaagggcgactatcccgaatgggagctgggcctgcaggtgatcccggagaaccagcaggacagcttcgacttcgacctgctcgaccccaccaagctggtgcccgaggagttggtgccggtaagggtggtggggcggatggtactcaaccgcaaccccgacaatttcttcgccgagaccgaacaggtggcgttccacgtcggccacgtggtccccggaatcgacttcaccaacgacccgctgttgcagggtcggctgttctcctataccgacacccaactgctgcgcctgagcgggccgaacttcaacgaaatcccgatcaaccgcccgctgtgtccgttccacaacaaccagcgcgacgcgccgcaccggcagaccatcaaccgcggccgggcttcctatgaaccgaactcgatcgacggcggctggccgaaggaaaccccgccggcggcgcgcaacggcggcttctccacctaccacgagccggtcagcggcagcaagctgcgcaagcgtgccgactccttcgccgatcatttcagccaggccgcattgttctggcacagcatgagcgaggccgagcaggcgcatatcgtcgccgcctacagcttcgaactgtccaaggtcgagcggcaatcgatccgtgagcgcgaagtcaaccagatactcctcaacatcgatccgcaactggccgccagggtcgcggcgaacgtcggtgtgcagctcgccgcgccggccaacccgacaccgcagccgaagccgtcgccggcgctgagccagatgaatctgctgtccggcgacatccgttcgcgcaaggtggcgatcctgatcgccgacggcgtcgccgagagcgacgtcagcgacctgcgcgacgcgctccgccaggagggcgcggacgccaagctgatcgcgcccagcgcttcgccggtgcaggctgaaaacggcgccgaactgagccctgagggaacctgggacggcctgccgtcggtagccttcgacgcggtcttcgtgcctggcggcgcggccagcagccaggccatcggcgctgacgggcgcggcctgcactacctgctggaagcctacaagcacctgaagccagtggccttcgccggcgatgcccaggcgctggccagccagctttcgttgcctggcgaccccggcgtggtgctcggcgccacggccaccgatgtcttccccggcctgcgccaggcattgatgcagcaccggatctggcagcgcgaggcggcgaccaaggcgatccccgcctga

SEQ ID NO: 7343 - DNA, 3189 bp, Pseudomonas aeruginosa
atgaatttctcccaattcttcatccagcggccgatcttcgccgcggtgctgtcgctgctgatcctgattggcggcgccatctccctgttccagctacccatcagcgaatacccggaagtggtgccgccgaccgtcgtggtccgcgccaacttccccggcgccaacccgaaagtcatcggcgagaccgtcgcctctccccttgaacaggcgatcaccggggtggagaacatgctctacatgtcctcccagtcgacctccgacggcaagctgaccctgaccatcaccttcgccctcggcaccgacctggacaacgcccaggtgcaggtgcagaaccgcgtcacccggaccgagccgaagctcccggaagaagtgacccggctcggcatcaccgtcgacaaggcctcgcccgacctgaccatggtcgtgcacctgacctcgccggataaccgctacgacatgctctacctgtcgaactacgcggtgctcaacgtgaaggacgaactggcccgcctcgacggcgtcggcgacgtccagttgttcggcctcggcgactattcgctgcgcgtctggctggacccgaacaaggtcgcctcgcgcaacctcaccgccaccgacgtggtcaacgccatccgcgagcagaaccgccaggtcgccgccggcaccctgggcgcgccgccggcgccgagcgataccagcttccagttgtcgatcaacacccagggtcgcctggtcaccgaggaagagttcgagaacatcatcatccgcgccggcgccaacggcgagatcacccgtctgcgcgacatcgcccgggtcgagctgggctccaaccagtacgccctgcgttcgctgctgaacaacaagccggcggtggcgatcccgatcttccagcgtcccggctcgaacgccatcgagatctccaacctggtgcgggagaagatggccgagctgaagcacagcttcccgcaaggcatggactactccatcgtctacgacccgaccatcttcgtccgcggctccatcgaggcggtggtgcacaccctgttcgaagccctggtgctggtggtgctggtggtgatcctgttcctgcagacctggcgcgcctcgatcatcccgctggccgcggtgccggtgtcgctgatcggcaccttcgcggtgatgcacatgctcggcttctcgctcaacgcgctgtcgctgttcggcctggtgctggccatcggcatcgtggtggacgacgccatcgtggtggtggagaacgtcgagcgcaacatcggcctcggcctcaagccggtggaagccaccaagcgtgccatgcgcgaggtgaccgggccgatcatcgccacggcgctggtgctctgcgcggtgttcatcccgaccgcgttcatctccggcctcaccgggcagttctaccgccagttcgccctgaccatcgcgatctccacggtgatctcggcgttcaactcgctgaccctgtcgccagcgctggcggcggtcctgctcaagggccaccacgagccgaaggaccgcttctcggtgttcctcgacaagctcctcggcagttggctgttccgtccgttcaaccgtttcttcgaccgcgccagccatggctacgtcggcacggtgaaccgggtcctgcgcggcagctcgatcgccctgctggtctacggcggactgatggtgctgacctacttcggcttctccagcacgccgaccggtttcgtcccgcagcaggacaagcagtacctggtggccttcgcccagttgcccgacgcggccagcctggaccgtaccgaggcggtgatcaagcagatgtccgagatcgccctggcgcagcccggcgtggcggactcggtggccttccccggcctgtcgatcaacggcttcaccaacagcccgaacagcggcatcgtgttcaccccgctgaagccgttcgacgagcgcaaggacccgagccagtcggccggggccatcgccgccgcgctgaacgccaagtacgccgacattcaggacgcctacatcgcgatcttcccgccgccgccggtacaggggctggggaccatcggcggcttccgcctgcagatcgaggaccgtggcaaccagggctacgaggagctgttcaagcagacccagaacatcatcaccaaggcccgtgcgctgcctgagctggaacccagctcggtgttctccagctaccaggtcaacgtgccgcagatcgacgccgacatcgaccgcgagaaggccaagacccacggcgtggcgatcagcgacatcttcgacaccctgcaggtctacctcggctcgctgtacgcgaacgacttcaaccgcttcggccgtacctatcaggtcaacgtccaggccgagcagcagttccgcctcgaacccgagcagatcggccagctgaaggtgcgcaacaacctcggcgagatggtcccgctggcgtccttcatcaaggtcagcgacacctccggtccggaccgtgtgatgcactacaacggcttcatcaccgccgaactcaacggcgccccggccgcgggctacagctccggccaggcgcaggcggcgatcgagaagctgctgaaggaggaactgcccaacggcatgacctacgagtggaccgagctgacctaccagcagatcctcgccggcaataccgcgctgttcgtcttcccgctctgcgtgctgctggccttcctcgtgctggccgcccagtacgagagctggagcctaccgctggcggtgatcctgatcgtgccgatgaccctgctgtcggcgatcaccggggtgatcctggccggcagcgacaacaacatctttacccagatcggcctgatcgttctggtggggctggcgtgcaagaacgcgatcctgatcgtcgagttcgccaaggacaagcaggaggaaggcatggaccgcgtcgccgcggtgctggaagcctgccgcctgcgcctgcggccgatcctgatgacgtccatcgccttcatcatgggtgtggtgccgctggtgatctccaccggcgccggcgccgagatgcgccatgcgatgggcgtggcggtgttctccgggatgatcggggtgaccttcttcggcctgctgctgacgccggtgttctacgtcctcatccgccgcttcgtggagaaccgcgaagcgcgccgcgccgccaacgacaaaggcctgccagaggtgcatgcatga

SEQ ID NO: 7344 - DNA, 1155 bp, Pseudomonas aeruginosa
atgctagggttgcccctcgaccgtcgagagggcccgccgatgcccgctttgccgttgtcccgccgcgccctcgccgcgctggccctggtattcgccctccctgccctggccgaagactggcccgacaccgactggccccgtgcccaacagcccgcggggccggcgctggaggcattcgagcgctatgccttcggtcgtcgcgacgatgttcgtcgcaaaggcatccgcaccgacgcggtagtggtgatccgcgacggtcgtctggtctatgagcgctacgccggcccgagccgtgcagagaccccgcaccttacctggtcggtgagcaagagcctgctcgccacgctgcttggcgtcgccgagggcgaagggcgcttccagctcgacgacccggtggcgcgctactacccgccgttcgcccgtcatcccgaggtgacgttgcgccacctgctgaactggtcttccggactggactggcaggaggactacgagttcgcgccattgaaatcctccgtggtggcgatgctctacacccgtgggcgtgacgacatggccggcttcgtcgccgaaaccccgcaggcccggccgccgggccggcgtttccgctactccagcggcgacagcaacgtgctggcggcggccctccacggcatgctcggcgcggactatgccgagtacccctggcgcgcgctgttcgagccgctgggcatccgttcggcggtatgggagcgagacgccgccggcacgttcgtcggctcgtcgtacgtctacatgagcgcccgcgacctggcgcgcgtcggcctgctgatgcagcgccacgggcgctggcgcgagcggcaactgctgccgctggcatgggtcgagttcaacctgacacccttcgcccgctaccggccgagcgcggaagaggagggcgaggcggtgccgggcggccagtggtggttgaaccgtgcggtgaaaggcgcgccggcgccctggccggacgtcgccgagaccgccttcgccgcgctcggccactggggccaggcgctctacgtgctgcccgaggagaagctggtgatcgtgcgctacgccgacgaccgcgacgggcgtttccgccacaacgaattcctgcgcctggcacaggcggcgttcgccggggaggcgcggccatga

SEQ ID NO: 7345 - DNA, 576 bp, Pseudomonas aeruginosa
atgctgaagaagacccttgccgcgctggcgctcggctccgcactgttcaccgccggccaggcaatggccgcggactacaagatcgacaaggaaggccagcacgccttcatcgagttccgcatcaagcacctgggctatagctggctgtacggccgcttcaacgacttcgacggcagcttcaccttcgacgagaagaacccgtcggccgacaaggtcaaggtgaccatcaacaccaacagcgtggacaccaaccatgccgagcgtgacaagcacctgcgcagcggtgatttcctcaacgtcagcaagaacccgaccgctaccttcgaatccaccgaagtgaaggccaacggcgacagcgccgacatcaccggcaacctgaccctgaacggcgtgaccaagccggtcaccatcaaggccaagctgatcggccagggcgacgacccgtggggcggctaccgtgccggcttcgaaggcagcgccaccctgaagctgaaagacttcggcatcaagatggacctcggcccggcatcccaggaagtcgagctgctgctctccgtcgaaggcattcgccagtaa

SEQ ID NO: 7346 - DNA, 1356 bp, Pseudomonas aeruginosa
atgaatgcaaccgcgctttccccgaacccggcgccggccatttcccggcgcaccatgctgatcgccttcgtcttctgcttcctcggcctgctcgccgacggcgtcgacctgatgttcctggcctacagcctcaacagcctgaaggccgaattcggcctgagcaacttcgaagccggctccctcggcagcctgactctcgccggcatggccgtcggcggcatctatggcggctggtgctgcgaccgcttcggccgggtgcgggtggtgacctggaccatcgtgctgttctccatcggtaccgcgttgctggggctgacccagaactactggcagttcgcgctgatccgcttcgtcgcctcgctcggcctcggctcgctgttcgtcgcctgcaacatcctgatgtccgagtgcgtcggaaccaggtaccgcaccaccatcctcgccgccatgcaggccggctggaccgtgggctacctggtggcgaccctgctggcggggcagatcatccccgagttcggctggcgcaccttgttcttcaccgccgtggcgccggcgctggtctgcctggccctgcggccctgggtgccggagtcgccgtcctggctcgcggcccaggccgggcgccagcgtcccggcgcggctccgcagagccacgccgaggctggcggtgccggcccgctgggacggatgttgggcgatccggaaacgcgcggcatgttcctgctctggagcctcacctcctgcttcctgctgttcggctactacggcaccaacaactggatgccgtcctacctggagagcgagttggggatgaacttcaagtcgatgaccggctacatggtcggcacctacagtgcgatgatcctcggcaaggtcgccgccggtgtctgcgccgatctcttcggtcggcgcctgaccttcgccgccggggccatcggcagcgccgccttcatgccgttgatcgtgttctaccactcgccctccaacatcctctggatcctcatcaccttcggcttcatctacggcgttccggtcggggtgctggccacctacatgaccgagagcttctccacccgcgtccgcggctcggcggtgggcaccgcctacaacctggggcgtatcggcgcggcggtggcgcccgccggcatcggcctgctggccacccacgtgtcgatcggcgcgggtttcctggtgatgggcatcacctacgtgctcaccgggctgatcccggcgctgttcattgcggaccggctctacgacccgaaccgcgagtcccgcgatgccgagagcgcttcccgacggcaagcgccgggcagtgccgtggataccgccgagcggcgcgcggccaaggcctga

SEQ ID NO: 7347 - DNA, 1395 bp, Pseudomonas aeruginosa
atggcacgtttcacccatagcgtcggcggcgaaacctaccgcttcgacagcctcaaggacgtgatggccaaggccagccccgcgcgctccggcgatttcctcgccggcgtcgcggcgagcaacgacggcgagcgggtcgccgcgcagatggccctggccgacatcccgctcaaacacttcctcgacgaggcgctgattccctacgaggacgacgaggtcacccgcctgatcatcgacacccaccagcgcgacgccttcgccccggtgtcccatctcaccgtcggcggcttccgcgactggctgctcggcgacgccgccgacgaggccagcctgcgcgccctggctccgggcctgacgccggaaatggcagcggcggtatcgaagatcatgcgtgtccaggatctggtcctggtggcgcagaagatccgcgtggtcacccgcttccgcaacaccctcggccttcgcggccggctctccacccgcctgcaaccgaaccacccgaccgacgacccggccggaatcgccgcgagcatcctcgacggcctgctgttcggcaatggcgacgcgatgctcgggatcaatcctgccaccgacagcatggcctcgatctgcgccctgctggagatgctcgacgcgatcatccagcgctacgagattcctacccaggcctgcgtgctgacccacgtcaccagctccatcgaggcgatcaaccgcggcgtgccgctggacctggtgttccagtcgatcgccggcaccgaggcggccaatgccagcttcggcatcagcctgaagatcctccaggaaggctacgaggccgggctcagccagaagcgcggcaccctaggcaacaacctgatgtacttcgagaccggccagggcagcgcgctctcggccaacgcccaccacggcgtcgaccagcagacctgcgagacccgcgcctatgcggtggctcgtcacttcaagccgttcctggtgaacaccgtggtcggcttcatcggtcccgagtacctgtacaacggcaagcagatcatccgcgccggcctggaagaccacttctgcggcaagctgctcggcgtgccgatgggttgcgacatctgctacaccaaccatgccgaggccgaccaggacgacatggacatgctcctgaccctgctgggcgtcgccgggatcaacttcatcatgggcattcccggctccgacgacgtgatgctcaactaccagaccacctccttccacgacgccctctatgcgcgccagacgctgggcctgaagccggcgccggaattcgaggactggttgcagcggatgggaatcttcacccaggccgacgggcgcatccgcttcggtgacgagttaccgccggcgttccgccaggccctggcgcaactggcctga

SEQ ID NO: 7348 - DNA, 1065 bp, Pseudomonas aeruginosa
atgagcagcactcccagcctttcccattcccctgccgagctttaccgcgcctggcaggacctgcgcgccgagcgaccgcagctacgcgcgcgcgacgccgccgcgctgttgcaggtcagcgaaggcgagctggtcgccagccgggtcggcatcgatgccgtgcgcctgcggccggactgggccgccttgctgccggcgctcggcgaactggggccgatcatggcgctgacccgcaacgagcattgcgtccacgaacgcaaggggccgtatcgcgaagtgacggtctctgccaatgggcagatgggcctggtggtctcgccggatatcgacctgcgcctgttcctgggggggtggaacgccgtcttcgccattgccgaggagacagcgcggggtacccagcgcagcatccaggtgttcgaccagcagggcgtggcggtgcacaaggtgttccttgccgaggccagcgacgtccgcgcctgggaaccgctggtcgagcgcctgcgggctgccgagcaggatgccgtgctggcgctgcacgaaccccgcgcaccggctgcggcgctcgtcgatgcgcagatcgatgccgccgccttgcgcgaaggctgggccgcgttgaaggacacccatcatttccacgccctgctgaagaagcatggcgcgcagcgcacccaggcgctgcgcctggctggcggcgaatgggccgagcgcctggataatggcgacctggcgaaactcttcgaagcggcggccgaaagcggattgccgatcatggtgttcgtcggcaacgcccactgcatccagatccataccgggcctgtgtgcaacctgaagtggctggacgactggttcaacgtgcttgatccggaattcaacctgcacctgaagaccaccggcatcgccgagctttggcgggtgcgcaagccgagcaccgatggcatcgtaaccagctgggaggccttcgacgccgacggcgaactgatcgtgcaactgttcggcgcgcgcaagcccggcgagcccgagcgcgacgactggcgcgaactggccgaatccttcaaggcgctctga

SEQ ID NO: 7349 - DNA, 960 bp, Pseudomonas aeruginosa
atgtctcgtccgttcctgcgtcgcttggccatcgtgtttgccgcttccgtcgtcctgtcgggcattggtggcgcacaggccgaggaggtcctgcgcatcggcttccagaaatcctcgactctgctgaccctgatccgcagccagggcaccttcgagcgcgagttggctaggcagggcatccgggtgtcctggcatgagttccccagcggcctgccgttgctcgaatcactcaatgtcggcaacgtcgatctctccgccgacgtcgccgacaccgtgccggtgttcgcccaggcggcgggtgctcgcctgacctacttcgcccgcgaaacaccttcgcccgcggcgcaggcgatactggtcggcgaacattcgccgctgaagtccctggccgagctgaagggcaggcgcatcgccgtgaccaaggccgccggcagccactacctgctgatcgccgcgctggccagcgccgggcttgagttctccgacatccagccagcctacctgacgccagccgacggccgcgccgccttcgagaacggcaaggtcgacgcctgggtgacctgggacccctacgtggcaagcgcccagcgccagcaacgcgcgcgggtactggccgacggccagggcctggccagctaccagcgctactacctcgcctccagcgactacgccaggaaacatcctgaagtgctccagcaggtcttcgccgaactgcagcgcaccgggcgctggctcaagagccacccggccgacgcggccaaggtgctggggccgctgtggggcaatctcgatgccgctaccgtcgagcaggcgaatgcgcggcgcagctacgacgtacaaccggtgagcgcagatggtctcgacgagcaacagcgcatcgccgacgccttccacgcccagggactgctacccaaaccggtggatgcgcgcgccgtggaggtatggcagccgcggcactga

SEQ ID NO: 7350 - DNA, 780 bp, Pseudomonas aeruginosa
atgaagaagctcgcacttctcggcgccctggcgctgtccgtgctctccctgcccactttcgccgccgacaagccggtgcgcatcggcatcgaggcggcctacccgccgttctcgctgaagaccccggacggccagttggcaggcttcgacgtggatatcggcaatgccctctgcgaagagatgaaggtgcagtgcaagtgggtcgagcaggagttcgacggcctgatcccggcactcaaggtgcgcaagatcgatgcgatcctctcgtcgatgaccatcaccgacgagcgcaagcgttcggtcgacttcaccaacaagtactacaacactccggcgcgcttcgtgatgaaggaaggcgccagcctcaacgatcccaaggccgacctgaagggcaagaaggccggcgtgctgcgtggcagtaccgccgaccgctacgcctccgccgaactgaccccggccggcgtcgaagtggtgcgctacaactcccagcaggaagccaacatggacctggtggccggtcgcctcgacgcggtggtcgccgattcggtgaacctcgaggacggcttcctcaagaccgatgccggcaagggctacgccttcgtcggtccgcaactgaccgatgccaagtacttcggcgaaggcgtcggcatcgccgtgcgcaagggcgatagcgagctggccggcaagttcaacgcggccatcgacgcgctgcgcgccaacggcaagtacaagcagatccaggacaagtacttcagcttcgacgtctacggttcgaactga

SEQ ID NO: 7351 - DNA, 1278 bp, Pseudomonas aeruginosa
ttgctcggctgccagcaggcgctggagctggaggacatcccctgcatcggcgtcggcagcgccgaggaggcgctgcaacgggtcgaccgcgacttcgccggcatcgtcgtcagcgacatccgcctgcccggcatcgacggcctgaccctgctggagcgtctcaaggccctcgacccgagcctgccggtggtgctgatcaccggtcacggcgacatctccatggcggtacaggcgatgcacgccggcgcctacgacttcatggagaagcccttctctccggaacgcctggtcgaggtcgcccgccgcgccctggagcagcgcgggctggcccgcgaggtcagcgcgctgcgtcgccagttggccggccgccaggacctggcgcaacggatcatcggccgctcgccggcgatccaggcgttgcgcgagctgatcgccaacgtcggcgacacctcggccaacgtgctgatcctcggcgagaccggcaccggcaaggagctggtggcgcgttgcctccacgactatagccggcgccaccagcatgccttcgtcgcgctgaactgcggcggcctgccggagaacctgttcgacagcgagatattcggccacgaggcgcacgccttcaccggtgccaacaagcggcggatcggcaagatcgagcatgccaacggcggcacgctgttcctcgacgagatcgagagcatgccggtcaacctgcagatcaagctgctgcgggtgttgcaggaacacaccctggaacgcctcggctcgaaccagtcgatcccggtggactgccgggtgatcgcggcgaccaaggcagacctcgccgccatgggcaagagcggccagttccgcagcgacctctactaccggctcaacgtggtgagcctggaactgccggcgctgcgcgaccgccgcgaggacatcctgctgctcttcgaacacttcctccagcagtcctcgctgcgcttcgaccgccccgcgccggaactcgaccgtgccaccgtggccagcctgatggcccacgactggccgggcaacgtacgcgaactgcgcaacgtcgccgaacgcttcgccctcggcctgccggtgttcaacaagggcggccaggccgtacagaccggcggcccgcgcttcgccgaagcggtggaggcattcgagaaggccctgctcggcgacgccctggcccgccaccacggcaacctgacccaggccagccaggacctgggcatggccaagaccacactgttcgacaaggtgaagaagtacggcctgcaatag

SEQ ID NO: 7352 - DNA, 897 bp, Pseudomonas aeruginosa
atgagcgacctccctcccctcaccgccctgcgcagcttcgaagcggtcgcccggctcggcagcatcagccaggccgccagcgagctgcacgtcacccactcagcgatcagccagcagatcaagctgctggaaaacctcctcggcctggccctgttcgtccgcgaggggcgcggcctgcgcctgagcgagaacggccggttctacgccctgcaggtacgcgcctcgctgggcgagatcgccgacgccacgcgggtggtgcgggcgcgtccacgggagggtgagctggtggtcacggtgatgccgtccttcggcctgaactggctgctgccgcgcctgccgcgctttcgcaagcgccatccgcactgtcgcgtgcggctggtggccagtcttgacgtgcagaacctgcgccagggcctggccgacctcggcgtacgcatcggcaagggcgactgggaaggggtcggtcgggaacgcctgttcgacgacgagttgctgatggtcgccgcgcccgacttcaacggcggccgcctgccgcgcacgccgagcgagatcgtcgcctgccctacactgcgctccaccgaatcctgggcgctctggtgccagcgcgccggcgtggcggaaccgcagcacggactgctgatcaatgactcgaacctgctgctggaagccgtgcgcctgggccagggcatcgccctggagcgtcgcagcctggtcgccggcgccctcgccgagggccgcctggtgcaactgggcgacatccgcgtgccctacccctatccctactggctggtctggccgcagcgcgagccgccgagcgaccgccaccaggccttcgccgactggctgcgcgaggaggcccggcgctaccaggccgagcaaccgccgctcagcgaatga

SEQ ID NO: 7353 - DNA, 1407 bp, Pseudomonas aeruginosa
atgggcatgatcgccaatacccaactgaaagccgcacggggaccgctgctgctcgactggcgccccgaggaccccgagttctgggcgcgcaacggcaagcgcatcgccagccgcaacctgtggatctcgatccccgcgctgctgctcgccttcgccgtgtggatgatctggagcacggtgactgtgcgcctgaacagcgccggcttcgccttcagcaacgaccagctgttcctgctcgcggcgctgccgtcgatctccggcgccaccctgcgggtgttctattcgttcatggtgccgatcttcggcggtcgtcgctggaccgccctgagcaccgcctcgatgctgatcccgtgcatctggctgggcttcgccgtgcaggacccgagtaccccgtactgggtgttcgccctgatcgcgctgctctgcggcttcggcggcggcaacttcgcctcgagcatgtccaatatcagcttcttctatccgaagagccagcagggcaccgccctcggcctgaatgccgggctcggcaacctcggcgtctcggtgatgcagttcgccgtgccgctggcggtggccggcggcctgttcggcgccttcggcggcgagccgcagcagctcggcgacggcggtcgcctgtggctgcagaacgccggctggatctgggtgccgttcatcgccgtggtatcggtcgcggcctggttcgggatgaacgacatcgccgacgccaaggcctcgttccgcgaccaggcggtgatcttcaagcgcaagcacaactggctgatgtgctggctgtacgtggccaccttcggctcgttcatcggcttctcggccggcttcgcgatgctcagcaagacccagttccccgacgtcaacccgctgcaatacgccttcctcggtccgctggtgggcgccctcagccggcctctgggcggctggctggcggacaagttcggcggcgcgcggatcaccctgtggaactacgcgctgatgatcggcggggtgttcgcggtgatcgccttcctgccgggcgacggcggccagggcaacttcttcggcttccttggcgccttcatcctgctgttcttcttcgccggcatcggcaacggctccaccttccgcatgatcccggtgatcttccgcaacgagtgggcccggcgggtgcgcgacggccaggccgacgaagccggcgcggcgcgcaacgcgagcatggagtcggccgcggtgatcggcttctccgccgccatcggcgccttcggcgggttcttcatcccgaaggcgttcggcacctcgctgcacatgaccggcagcgccgagggcgccctctacgtgttcatcgcctactacctgagctgcatcgtcgccacctggtggtggtacgcgcgcaagggtgcggagagtccctgttga

SEQ ID NO: 7354 - DNA, 1296 bp, Pseudomonas aeruginosa
atggcttccctacgtcagaaacagtactccgtcctcggcatgagtaccttgtccttcgcggtgaatttcgccgtgtggacgatgttttcgatcatcggcatccgcatcaaggacgagctcggcctgagcgaatcccagttcggcttgatggtcgccctgccgatcctcaccggctccctggtgcgcctgccgctgggcctgatcaccgaccgcttcggcggccgcatcgtgttcttcatccacatgctgctggtggccatcccgatctacggcctggccttcgccagccagtactggcactacctggtgctcggcctgttcgtcggcctggccggcggctccttcgcggtcggcatcgcctacacctcggcctggttcgagaaggagcgccagggcaccgcgatgggcatcttcggcgccggcaacgccggcgcggcgatcaccaacctggtggcgccgatgatcgtggtcgccttcggctggcgcatggtgccgcaggtctactcggtggccatgctggtcaccgccgtgctgttctggctgttcacctggaccgatccggcgcaccttaagggtgccgccgaggccagccagcggccgaacctggccaagcaactggcgccgctcgccgagctgcgcgtctggcgcttcggcctgtactacttcttcgtcttcggcggcttcgtcgccctggccctgtggctgccgaagtactacatcgccgaatacggcctggacctgaagaccgcatccttcatcaccatgctgttcaccttgccgtccggcctgatccgcgccctcggcggctggttcagcgaccactacggcgcgcgctcggtgaactggggcgtgttctgggtctgcctggtgtgcctgttcttcctctcctacccgcagaccaccatgaccatccacggcatccagggcgacctcagcctgggcatcggcctgaacgtctggctgttcaccttcctggtgttcgtcgtcggcattgcccagggcttcggcaaggccagcgtgtaccggatcatccacgactactacccgagcaacatgggcaccgtcggcggcatggtcggggtgatcggcggcctcggcggcttctgcctgccgatcctgttcggctacgccgccgaccacatcggcgtgcgctcctcctgcttcatgttgctgttcggcctgaccgtggtctgcatggtctggatgcactacgcgatcaagcagcaacgccgcatcgacggccaggccgcctcggccgacgtcgaccttcctcccacccttcccacccactcctga

SEQ ID NO: 7355 - DNA, 888 bp, Pseudomonas aeruginosa
atgcggcgcgaaagtctgttggtatcggtttgcaagggcctgcgggtacatgtcgagcgcgttgggcaggatcccgggcgcagcacggtgatgctggtcaacggcgcgatggcgaccaccgcctcgttcgcccggacctgcaagtgcctggccgaacatttcaacgtggtgctgttcgacctgcccttcgccgggcagtcgcgtcagcacaacccgcagcgcgggttgatcaccaaggacgacgaggtggaaatcctcctggcgctgatcgagcgcttcgaggtcaatcacctggtctccgcgtcctggggcggtatctccacgctgctggcgctgtcgcgcaatccgcgcggcatccgcagctcggtggtgatggcattcgcccctggactgaaccaggcgatgctcgactacgtcgggcgggcgcaggcgctgatcgagctggacgacaagtcggcgatcggccatctgctcaacgagaccgtcggcaaatacctgccgcagcgcctgaaagccagcaaccatcagcacatggcttcgctggccaccggcgaatacgagcaggcgcgctttcacatcgaccaggtgctggcgctcaacgatcggggctacttggcttgcctggagcggatccagagccacgtgcatttcatcaacggcagctgggacgaatacaccaccgccgaggacgcccgccagttccgcgactacctgccgcactgcagtttctcgcgggtggagggcaccgggcatttcctcgacctggagtccaagctggcagcggtacgcgtgcaccgcgccctgctcgagcacctgctgaagcaaccggagccgcagcgggcggaacgcgcggcgggattccacgagatggccatcggctacgcctga

SEQ ID NO: 7356 - DNA, 1137 bp, Pseudomonas aeruginosa
atggctgacggattacgcgtagccctggtcgccggcgaggcctccggcgacatcctcgggtccggactgatgcaggcgctgcgggcgcggcacccggatatcgagttcatcggcgtcggtgggccgcgcatggaggccgaagggctgtccagctatttccccatggagcgcctgtcggtgatgggcctggtagaagtgctgggcaggctgccggagttgttgcgacggcgcaagcgcctgatccgcacgctcatcgaggcccggccggatgtgatgatcggcatcgacgctcccgacttcaccctcggcgtcgaacacaagctgcgccaggctggcctgcgcaccgtgcattacgtcagcccttcggtgtgggcctggcggcagaagcgggtgctgaagattcgcgaagcctgcgacctgatgctggcattgttccccttcgaagcacgtttctacgaagagcatggggtgcccgtgcgtttcgtcggccaccccctggccaacaccattcccctgcaggcggatcgcgctgcggcccgcgcgcggctcggattgccggcggacggacaggtgctggcgctgatgccgggcagtcgcggcggcgaggtcggcaagctcggcgccttgttcctcgacaccgcccagcgcctgctcgtcgaacggccgggcctgcgtttcgtgctgccctgcgccagcgctgcacggcgcgaacagatcgagcagatgctccagggccgcgagcctctgccgctgacgctgctcgacggcgcttcccatgaagcgcttgccgcctgcgatgcggtgctgatcgcctccggtaccgcgaccctcgaggcgctgctctacaagcggcccatggtggtggcttatcgggtcgccgggctgacgtaccggattctcaagcgcctggtgaaaagcccttacatctccctgccgaacctgttggccggacgcctgttggtgccggaactgatccaggacgccgccaccccgcaagcgctagccgcaaccctctcgccgctgctggacgacggctcgcagcaggtggaattcttcgatgccatccatcgggccttgcgccaggatgcttcggcacaggcggcggaagccgtcctgcaactggtggagcgccgctga

SEQ ID NO: 7357 - DNA, 1320 bp, Pseudomonas aeruginosa
atgaaaacgccgctctggttcccgcaaagcttcttcgcccgcaccctctggctggtgctgatcgtcgtgctgttctccaaggcgctgaccctggtctacctgctgatgaacgaggacgtgatcgtcgaccgccagtacagccacggcgcggcgctgaccatccgcgcgttctgggctgccgacgaggagtcgcgcgcggccatcgccaaggcttccggcctgcgctgggtgccgagcagcgccgaccagcccggcgagcagcactggccgtacacagaaatcttccagcggcagatgcagatggagctggggccggacaccgagacccgcctgcgtatccaccagccgtcgcagctctgggtgcgcgcaccgagcctcggcgaaggctggctggcggtgccgctgtatccgcatcccttgcgtggccaacggatctggagcgtgctcggctggttcctcggcatcggcctgctctccaccgccgccgcctggatcttcgtccgccagctcagccagccgctcaagcgcctggtggtcgccgcccgccagttcggccaggggcgcagcgtgcgcctgccgctgggaccggagacgccgagtgaaatggccgaggtgtatcgcgccttcaaccagatggccgaggacatcgagcagggcgggcgcgaacgcgaattgatgttggccggtgtctcccacgacctgcgcaccccgctgacgcgcctgcgcctgtcgctggagttgctgccggagagcgaacgggagatggtcgaggacatgatccgcgacatcgaggacatggacgcgatcctcgaccagttcctcgccttcatccgcgacggccgcgacgagccggtggaggagggcgacctgaccgacctggtgcgcgaggtcgtggcgccgttcaaccagactcgcgagcaggtgcgcatggccttgcaaccggtaccggcgatgccgttgcggcgtgtgtcgatgaagcgtctgctgggcaacctgatcgacaatgccctgaaccacggcggcggttcggtggaggtggccagctacgtggccggcgaaagcgcggcgccctacgtggtgctgagcgtgctcgatcgcggccagggcatcgatcccgcggaagtggacagcatcttcaatcccttcatccgtggcgacaaggcgcgtggcggcaagggcaccggcctcggcctggcgatcgtcaagcgcatcgccgcccagcacggcggcagcgtcgaactgcgcaaccgcgatggcggcggcctcgaagcgcgggtctgcctgccgctggggttgctgctgccgcgcggcgcggcctga

SEQ ID NO: 7358 - DNA, 723 bp, Pseudomonas aeruginosa
atgcgcctgtcccgcttcttcgtcgaccagcctctctccctcggccagcacgacctgcccgaggcccaggcccactacatcggccgcgtgctgcggcacgccacgggcgacgccgtgcaactgttcgacggcagcggccgggaatacctcggcgagctggtcgaggtcggcaagaagaatgtccgcgtcgaactccgcgagcagttcgccggccagcccgactcgcccctgcgtatccacctggggcaaggcctgtcgcgcggcgagcggatggactgggcgatccagaaggccaccgagctgggggtggcggaaatcaccccgatcgtcagcgagcgttgcgaagtgcgcctgaaggacgagcgcgccgacaagcgcctgcagcactggcgccaggtggcgatcagcgcctgcgagcagtgcggccgttcgagcctgccgctgatccatccgcctctggccctggaggactggctgcgcgggcgggacgatgacctcaggctggtcctgcacccagtagccgcccccctggccagccatgcgccgccgtcgcgcctggccttcctggtgggtcccgaaggcggcctgagcgatgccgaggtggagcaggctcaggcggccggtttccactccgcgcgcctcggcccgcgagtgctgcgcaccgagaccgcgccggtggtagcgttggcggtggcccagcaactctggggcgacttcgcctga

SEQ ID NO: 7359 - DNA, 1416 bp, Pseudomonas aeruginosa
gtgaataccgttgcgcaacccacttcgcaacggatcgcacgcatggacacgcccgttaccttcgattggaagatccgcctgcccgacgtgctcggcgtactccgccgagactatgccggacgcttcccgcagttggcctccgccgcactggagacgctgctggagcgcctgcgcgacgaccttcccgaggatttcctgccagccctcggccaggagctggaatccctcggactggcgttggtggaacgcctggacgaagacgacagcctgaacctgtacgtggtcggcgccccccacagccagcgcctcctcgatgcgctcgcagcgcagggccacaacgcccgcacgctgcgccaggaaaacgcccccgagggcgcccgggcggccctccccgccgccgcgccggccggcctggcgccggcttcggcatacatctgcctcgaacacgccgagcacctggcgcccggcctggccatcgcccgcctgccgggcgaggacagccgcgacctgctggacctgcgccaatggcccaggctgcaacgcctgcccgatggcgcggaagaaacccagggcgcgttgctctgccgggccagttcggcggacggcctgcacgcctgggtcaggatgacccgttcgggaagcccctacgcctggctgcatcgctcccgcgacctcgcctcgttgacgcccgaactaccgcccttgccgctgccgccggcgcagtcgttgcgccaacgccgcaccccggaacttgccatcggcctggccggggacgacctgctcctggccgaccgcggcctgttcttcctctatccgggcttcgcccagggcaacgacgaaccgcggttgctcttcgaggtgccgcaagcgcggcgctccatcgagaatccgccggcggtcttcaccactccggaccagcgcgtctgcctgctctcccgcgggcagttcttcgaatggcgcgaggcacgcatccagcccctgccgttccccgtcggcaaggatctgcccgccgatccggcgcaaccgacctcggcggcgcccgggaccatcgtctggctggagcgtgaaacgctctgcgaaggccggctcgacagcggcgagatccgcagccactcgctggacggcctggccgaaggcccctacctgaagctccaggccctggacggaggctggctgctcctggcgccgtggctggaaccgcatcgctcgcgggacctcgcccagctctggcacctcgaatccggccgggcgctgcgcatccgctacggcgaactggacctggagggcggactacagcactgggcggagctgcccgacggccggatcgtcgtcggcgaccatgcccggcatgtcgacctcggcacgttcgaaagcctgcgccaacgcctgctgcggcggcgcctggcgccggcctga

SEQ ID NO: 7360 - DNA, 429 bp, Pseudomonas aeruginosa
atgaaaacctataccgcgaaaccggaaactgtacagcgcgactggttcgtcgtcgacgctgccggccagaccctgggtcgtctggcgaccgaaattgcccgccgcctgcgtggcaagcacaagcctgagtacactccgcacgttgacaccggcgactacatcgtcgtcatcaacgccgagcaggtgcgtgtgaccggtgccaagaccaccgacaagatgtactaccaccactccggcttcccgggcggcatcaagtcgatcaacttcgagaagctgatcgccaaggcccctgagcgcgtcatcgagaccgctgtaaaaggcatgctgccgaagaaccctctgggtcgcgatatgtatcgcaagctgaaggtgtacaagggtgccagccacccgcacaccgctcagcagccccaagaactgaagatttaa

SEQ ID NO: 7361 - DNA, 2394 bp, Pseudomonas aeruginosa
atgttgcgtcgttgctgtctgctcttcttctgtctgctgttgagcctgcccgtgcgagcggaggagtcggtcgccttgccgctgacggcggagctacggacctggctggcggagcatcgggaattgcgcgtcggggtggtcaccgaagcgccctatgcccagtacgaccgccgcctgcaacagtattccggggccaacgtggagctgatgggctggctggccacggcaatgcaggtgaccttgcggtggcagggctatcccgaccaggcggcgctcgacgatgccctgcgcgctgggcgcgtggatatcgctcccggcctcagccagaccccagccgggctgcgcttgtggctgttctccgatccctacctgcgggtttcccggctggtggtggggaagcgcgatggcagcggcagcgtcgaattggagcaactggagcgcgatacccgggttgccgtgcgggccggcagttcggtagccgactacctcagcagcacctatagcggcctgcaatgggtgtcggccgattccgaacgcgaggtgctgcgcgccgtgctcgccggacaggcacgctacgcggtgatcgacgaagcgcaactcagccgcctgacccgcgaaccggagttcgccgagctagcggtggttggcgatatcggctacccgcagctgctacgggtggcgacccgtcgcgactggccggaactggcgatggtggtcgaccaggcgttgcgctcgctgccgcgcaagtccctggaccagttgcacgagcgctggttgcaacccaagtatccgcgcctcggcgagtcgccggggttctggcagaacctgtcgatcctcctcggcctgctgctggccggcgcgctggtggcggtgttcctccagcggcgccagcagcatgcgctggaagcccggctgtacggcgcccgccgcgacctggagctgcgccaggcggccgaggaggcgctgcgcctgacccagttctccatcgacaacagcaccctgggcatcctctgggtcaactgggacagccgcgtacgctacgccaaccgcgccgccgaacagatgctcggccatgccgacggccaactcgtggaccgtccgctggccgacttcgagcccggcctggacatggaccgctggttgaatctttggcgtcgtgcgcgcaatagcgaggagggcccgctcagcttcgagacccgctgcctgcgcgccgacggcagttggctgccggccgacgtctcgcttagcttcctgcgcttcggcacgtccgagtatctggtggtgttcctcagcgacgtcaccgagcgccgccgtgcccgcgaggcattgcaggaaagcgaggcgcggatgaagggcatcgcctccaacgtgccgggcatggtcttccgcctggagcgcccgcgggccggcgcgttttccgacttcgcctatatcagcgagggcagcgaggcgctggtcggctacagcgctcgcgaactgatcgaaagcggccgcggcattcgtggcctggtccatcccgacgaccgcgagcgctactggtcgagccagatggctgccctcgacgagaatcgcgactggcattggcagggccgcatcctcacccgccagggcgaattgcgctgggccgacatcaaggcttcggcgcgctgtttcgaggatggtcgtgcggtctgggacggggtggtctgggacatcaccgcgaacaagcagatcgaactcgaactcggcgagtcgcgcgcccagctccgcgagctgtcggcgcacctggagtcggtgcgggaggaggagaaggcgcgtatcgcccgcgaggtccatgatgagctgggccaggtgctgacggtgctgaagctggaaacctcgatgtgcgagctggcctatgccgatgcccaggagggcctgcgcgaacgcctgggcaacatgaaaaagctgatcgcccagttgttccagctggtgcgcgacgtggctaccgcactgcgcccgccgatcctcgacgccggaatcggctcggcggtggagtggcaggcgcggcgcttcgaggcgcgcacgcagattccctgcctggtggaggtgccggagaactcgccgcagttggtcgacgccaaggctatcggcctgttccgcatcctccaggaggcgttgaccaatgtcatgcggcatgccgaggcgcatactgtgcaactgcgtctgctgcgcgagggcgacgagctgtgcctgagcgtcagcgacgacggtcgcgggttcgatgttgccacggtggggcgtggcagttccttcggcctggtcggcatgcgcgagcgggtgctgatgatgggcggtacgctggacatcgacagtgcccccggcgagggcaccacgctcagcgtgaggattccgctgggcgtcgcgggcccgtga

SEQ ID NO: 7362 - DNA, 918 bp, Pseudomonas aeruginosa
atgttgcgtcgttgctgtctgctcttcttctgtctgctgttgagcctgcccgtgcgagcggaggagtcggtcgccttgccgctgacggcggagctacggacctggctggcggagcatcgggaattgcgcgtcggggtggtcaccgaagcgccctatgcccagtacgaccgccgcctgcaacagtattccggggccaacgtggagctgatgggctggctggccacggcaatgcaggtgaccttgcggtggcagggctatcccgaccaggcggcgctcgacgatgccctgcgcgctgggcgcgtggatatcgctcccggcctcagccagaccccagccgggctgcgcttgtggctgttctccgatccctacctgcgggtttcccggctggtggtggggaagcgcgatggcagcggcagcgtcgaattggagcaactggagcgcgatacccgggttgccgtgcgggccggcagttcggtagccgactacctcagcagcacctatagcggcctgcaatgggtgtcggccgattccgaacgcgaggtgctgcgcgccgtgctcgccggacaggcacgctacgcggtgatcgacgaagcgcaactcagccgcctgacccgcgaaccggagttcgccgagctagcggtggttggcgatatcggctacccgcagctgctacgggtggcgacccgtcgcgactggccggaactggcgatggtggtcgaccaggcgttgcgctcgctgccgcgcaagtccctggaccagttgcacgagcgctggttgcaacccaagtatccgcgcctcggcgagtcgccggggttctggcagaacctgtcgatcctcctcggcctgctgctggccggcgcgctggtggcggtgttcctccagcggcgccacagcatgcgctggaagcccggctgtacg

SEQ ID NO: 7363 - DNA, 1707 bp, Pseudomonas aeruginosa
atgcaaagactgtcgcgtatcggccgcaacaccctcgccgtctccgtttccaccttgctcctcagcgcctgcaaccagggcgacgatgcgccgaagcctgcggcagtcgcgccgcaaccggccgcaccgagcatggctgcactgagcatcccgctatgcctcaacggccagtgcgcggtgatcgaccaggacgccaagctgctcgtgccgttcgacaacgactacgacaatatcgtcgccagcgcctaccagggcaccctgatggcggcgcgcgaggagcgctggaacctgatccaggcgaaggacggcaaggtgttgcgcgacgatatcggcgaagccctgtcgctgctcacccccaacctctatggcttcgtccgcgatggcaagtacggcgtggtcgacggccagggcaaggaagtccaggcgccgcgtttcgacgacatctaccccaacagtgccaacgaattcatcatctacgagatcgatggcaagcgcggcatcctcgatgccaagggcaagcagctcaccgaggcgctctacgacaccaccctggtcaacggcagcgtcgccgaacacggtggcttgatcagcgccgagcgtggcgaggagaagtggatcatcaacctcgctaccggcgaacagaaggccgtggcctacgagagcctgggcgacctccacgacggcgtgatgagcgccagcgtcatcggcaagggctcccaactggtggatgccaagggcgacgtggtcggtgacggcaagagctacgattacctgggcaccccggccaacggcctggtcgcgttccgcgagaagtacgacagcccctgtggctacctcgactaccagggcaaggtggcgatcgccgcccagttcgccggttgcggcgccttcggcaagcagggcgggctggcccagcagcgcatggaagatggctcgtcgggcaagtacggcctgatcgatcgcagcggcgcctggaaggtgcagccgcagtacgattcggccgacagcgccggcctcaccgcgcttggctacaccgtcgacgtgcccggcctggctgccgtcggcgtgagcaccggcctgttcagcgccgacttcggcatcttcaacctcgacgaaggcagcgagtgggtgaagccgggttatgcgcagatcggcgcgctgggcaacgacctgttcgtcgtggcgaagaagggcgggccgcagaagaccgtcagcttcatgggttcggaaagccaggtgccggtggtgggcctgatggaccgcagcggcaagatgctgctggagccggacgaactgatcagcatccagtctgcttatgacggtcgtttcctggaaggtctcgacggtatggacaacgctgcccacaccgtgttgctcgatcgccagggacgcacgctggttccagcgctctggcagaagctggaggtgaatccgcagcagggttacatcctgggctacgaagtcagcggcactggcgacgaggcgacggaaaccttgcgcgcactgtacgacctgaacggcaagccgcgcttcaccgtggccaccaccgattgcggcgccgaacagttgctcgacggcaatggcaaggcgatctggccgcaggacccgaccccgtattgccagtcggacgacgagcaggacgacgaaggcgagccggagcaggagccggcgcccgtcgaagagagcgaggaaaccagcgagagctga

SEQ ID NO: 7364 - DNA, 939 bp, Pseudomonas aeruginosa
atgaagacgacgattcgccagctgggctgcgccctgctgatcctggccagtggcgccgccctggccgccgaacccgagcagtgccgcacggtgcgcctgggcacggtgaactggaccgacgtggtcgccagcagcgccgtggccgaagccttgctcgacggcctgggctaccaggtgaagcagaccagcgcctcgcaacagatcgtcctggccggcctggccgacaagcagctggacctgttcctcggctactggcaaccgaccatgcagccggtcgccaggccttacctggacaaaggccggatcgaagtgatcgagccgccgaccctggccgacgcgcagtccacctatgcggtgccgagctacgtcgccgagggcgggctgaagaccttcgccgacatcgcccgcttcaaggacaagcttggcggccgcatctacgctatcgagccgggcagcggctcgaaccgcatcacccggaagatgatcgacgacaaccgtttcggcctgaagggcttccagctggtggagtccagcgaggccgggatgctcacggcggtgaagcgggcgatcaagcgcaagcagtgggtggtgttcttcggctggaagccgcatccgatgaacctgcagatcgacatgacctacctcaccggcagcgaggatgtgttcggtcccgacgaaggcgcggccaccgtctccaccatgaccgccgccggctaccaggcgcagtgcggcaacgtcgcccggctgctgcacaacctgcgcttcagcagcgcccaggtcagccaggtgatggcgccgatcctcgatcgcacccagcccctcgacgccgcgcggcagtggctgaaggccaaccccgagccgctgaaggcctggctggatggcgtgagcaccttcgacggcaaggacggcctggccgcgctccaggcctcgctgaagtaa

SEQ ID NO: 7365 - DNA, 390 bp, Pseudomonas aeruginosa
atgcgccatcgtaaaagtggtcgtcacctgagccgcaccagcgcgcaccgcaaggctatgttccagaacatggcggtgtcgctgttcgaacacgaactgatcaaaaccaccctgcccaaggctaaggaactgcgtcgcgttgccgagccgctgatcaccctggccaaggaagacagcgtcgccaaccgtcgcctggctttcgaccgtacccgttcgaaagctgccgttggcaagctgttcaacgacctgggcaagcgctacgccaaccgtccgggcggctacctgcgcatcctgaagtgcggtttccgcgctggcgacaacgcccccatggcgtacgtcgagctggttgatcgtcctgtcggcggtgaagtcgtagaagctgccgaataa

SEQ ID NO: 7366 - DNA, 471 bp, Pseudomonas aeruginosa
atgccaagacgtcgtgtagcggccaagcgtgaagtgctggctgatccgaaatacggaagccagatcctggccaagttcatgaaccacgtgatggaaagcggcaagaaagccgttgccgagcgtatcgtttacggtgcgctggacaaggtgaaggaacgcggcaaggccgatcccctggaaaccttcgaaaaagctctcgatgccatcgctccgctggtcgaagtgaagtcccgccgcgtaggtggtgcgacttaccaggttccggtcgaagtccgtccgtcccgtcgtaatgccctggccatgcgttggctggtggacttcgcccgcaagcgtggcgagaagtccatggctctgcgcctggctggcgagctgctggatgccgctgaaggcaagggcgcagcagtcaagaagcgtgaagacgtgcaccgtatggcagaggccaacaaggccttctcgcactaccggttctaa

SEQ ID NO: 7367 - DNA, 894 bp, Pseudomonas aeruginosa
atgtcccattcagatcagagccagcgtttccttttcgacgataccgacgtgcgcggcgagatggtcgatctcgagcgcagctacagcgaagtgctggccaaacatccctatccggaaccggtcgcgcagctgctcggggagatgctcgcggcggcctcgctgctctgcggcacgctcaagttcgacggcctgctggtattgcaggcgcgctccagcggcgcggttccgctgttgatggtggagtgttccagcgaccgccaggtgcgtggcctggcccgctattcggcggagtccatcggcgccgacgccggcatgcaggaactgatgcccgaaggcgtgctgaccctcaccgtggacccggtcaagggccagcgctaccaggggatcgtcgccctggagggggtgaacctggcggaatgcctgtccaactacttcgccagctcggaacagctgccgacccgtttctggctcaacgccaacggccgccgtgcccgcggcctgctgctgcagcagcttcccgccgaccgcctgaaggaccccgaggcccgcgaggccagttggcagcacctgaccaccctggccgacacgctgaccgccgaagagctgctggcgctggacaacgagaccgtcctgcaccgcctctaccacgaggaaaccgtgcgcctgttcgagccgcaaccgctggtcttccattgcagttgctcgcgggaacgttcggccaacgccctggtcagtctcgggcaggccgactgcgagcggctgctcgaggaggaagaaggctcgatcagcatcgactgccagttctgcaaccagcgctacctgttcgacgcctccgacgtcgcccagttgttcgctggcgctggcagccaggggccttccgagacccgccactga

SEQ ID NO: 7368 - DNA, 192 bp, Pseudomonas aeruginosa
gtgaagtggttcaacacctcaaaaggtttcggcttcatttcccgcgattcgggcgaggacatcttcgtccacttccgagcgattcgcggcgaaggccaccgcatcctcatcgaaggccagcgcgtggagttctcggtggtacaacgggacaagggcctgcaggcggaagacgtgatcgcctcccgccgctga

SEQ ID NO: 7369 - DNA, 1062 bp, Pseudomonas aeruginosa
atgcataacgacaattccaccgagaagcgcgccgacttctatcgacgcatccgccagcagcacctcaccccgctctgggaagccctgcacagcctggtcccggcgcaacccgccggcggctgccaggcggcgctgtggcgctatcgcgaactgcgcccgttcctgctcgaggcaggcgacctgatcagcgccgaggaagcggtgcgccgcgtgctggtgctggagaacccggaccttcccggccagtcgtcgatcaccccgagcctctacgccggcctgcaactgatcctgccgggcgagatcgcccccagccaccggcacacccagtcggccctgcgcttcgtcgtcgagggctacggcgcctacacctcggtggacggcgaacgcacccgcatggagccgggcgacttcatcatcaccccgtcctggacctggcacgaccacggcaaccgcgccgccgcggaaggcggcgagccggtggtctggctggacggcctggacatcccgatgctgcgtttcttcggcgccaccttcgccgaaaaccatgatgaaccggtacagccgttgcgacgtggcgaaggcgacagcctcgcccgctacggcagcaacatgctgccgctgcgccatcagccgacgacgccgacctcgccgctgttcagctacccctacgcgcgcagccgcgaggccctcgagcgcctggcgcgcctcgaacggcccgatccctgggaaggccacaagctgcgctacgtcaacccggccaccggcggctgggccatgccgaccatcgccacctgcctgcaactgctgccggccggcttcctcgggcagcccgcgcgcagcaccgacgccagcgtctattcggtggtggaaggcagcggcgtggcgcagatcggcggccggcgcttcgccttcgaggccaaggatctgttcgtcgtgccctcctgggccgagctgcgcctggaagccggcgccaccgactgcgtgctgttcagtttctccgaccgccctgtgcagcaggcgctcggcatcctccgcgaatcccgcgaaaccctcgcccactga

SEQ ID NO: 7370 - DNA, 1164 bp, Pseudomonas aeruginosa
atgtcgtctgaacgcgttctcagcaatgcccgggtagtcagcgccgagcgggtcttcgtcggcagcgtgctgctgcgcgacggcctgatcgccgcggtcgacgaaggccgcagtcacctggccggggccgaggacctggggggcgactacctcctgcccggcctggtcgagctgcacaccgacaacctggagaagcacatgaccccgcgtcccggcgtcgactggccgtcggcctcggcggtgctggcgcacgacgcgcagatcgtctccgcggggatcaccacggtgttcgacgcactgtccatcggcgacgtcaaccccaagggcaagcgcatgcagcagttgccgaagatgctcgaggccatcggcgaggccgccgccagcggcgacgcgcgcgccgaccatcgcctgcacctgcgttgtgaggtcagccatccgcagacgctggaggtgttccgcgaactggtcgagcatccgctggtgcaactggtctcggtgatggaccacgcccccggccagcgccagttcgccaggctggagaagtaccgcgagtactaccagggcaagtaccacctgagcgatgccgagatggacgccttcatcgtcgagcaggtagccaactccgagcgctacagcgacgccgcccgtgcggccatcgtcgatgtctgccagggacgcggcctgtcggtggccagccatgacgacgcgaccctcgcgcatgtccgcgagtcggccggctacggcatggccatcgccgagttcccgaccaccgtggaggccgccagggccagccacgagcacggcctgcaggtgctgatgggcgcgcccaacgtggtccgcggcggttcccactcgggcaacgtggcggcggcgcaactggcgggaatcggcgtgctggatatcctttccagcgactactatccggccagcctgctgcatgcggccttgctgctcgccggcgagcacagcgagtatgatgcgatccgttacgacctgccgcgcgcggtggcgatggtcagccgtaccccggcgctggccgccgggctgaccgatcgtggcgaaatccgcgtcggcctgcgcgccgatctgctgcaggcgcgggcgctcggcaacaaccagccggtggtgcgtcaagtctggcgcggcgggcagagagtgttctga

SEQ ID NO: 7371 - DNA, 1353 bp, Pseudomonas aeruginosa
atgaccgacctgaatcgcaccgccttgccctcgcgcacggacgggaccgtggaaaagaccgacaccctcgtcgtcggcgccggccaggccggcgtggcgatgagcgagcacctgagccggctcggcgtgccgcacctggtcctggagcgcaaccgcatcgccgaggcctggcgcagcggacgctgggattcgctggtggccaacggcccggcctggcacgaccgcttcccgggaatggaattcgacatcgatcccgacggtttccccggcaaggaccaggtggcggcctatttcgaggcctacgcgaagagattcgacgcgccgatccgtaccggcgtcgaggtgaggaaggtggtgcgcaatgtcggccgccccggcttcaccgtggacacctccgcagggaccatcgaggccaaccgcgtggtcgccgccactggcccgttccagcgtccggtgatcccgccgatcgcgccgcgcgacgagcgtatccggcagatccactcggcccactactacaacccgcagcagctgcccgaaggtgcggtactggtggtcggcgccggttcgtcgggggtacagatcgccgacgagctgcaacgtgccgggcgccaggtctacctctcggtgggcgctcatgaccgtccgccgcgttcctaccgcaaccgcgacttctgctggtggctgggcgtgctcggcgaatgggatgcggaagtcgccaagcccgggcgcgagcatgtgaccatcgccgtgagcggtgcccgcggcggacataccgtggacttccgcgccctggcgcatcagggcgtgaccctggtcggactgaccgaatccttcgtcgacggcgtcgcgaccttccggccggacctggcggagaacctggcgcgcggcgacgagaactacctggcgttgctcgacgccgccgacgcctatatcgcccgcaacggccttgacctgccggaagagcccgaggcgcgccgccggctgccggacccgcagtgcgtgaccgatccgatcctcgaactggacctggccgaggccggggtgggcagcatcatctgggccaccggctatgccgtcgacttcggctggctgcaggtcgatgccttcgaccgcgacggcaagccgcgccaccagcgtggcgtgtccagcgaacccggcgtgtatttcatcggcctgccctggctgtcgcggcgcggctcctcgttcatctggggcgtctggcacgacgcgcgccatgtcgccgaccacatcgccatccagcgcaagtacctcgcataccgcgacgctgcccagcgccaggaacaggaccgcgcctcgcaagctccgcaaaccagcctccaggaagtcagctga

SEQ ID NO: 7372 - DNA, 1965 bp, Pseudomonas aeruginosa
atgtacatccccaaccgccagccccggctgcgctccgcgccggcccgggccggcttcgccttcgccgggctgctgccgctgctgggcggccaggcccaggccgtcgaattcagcttcctcgacaacgaggtgtccggttcgctcgacaccaccctgtcctacggcaccctgtggcgggtgcaggggcaggacaagagcaacaatgacatcaacaccaacgacggcaaccgcaacttcgataccggcctggtttccgaggtctacaagatcacctcggacctggaggcgacctggcgcaactatggcgtgttcatccgcggcacggcgttctatgacacccagatcatggacaagcgcaacgactactacagccacaacgatccatcgcagccgagccagagctatccccacgacgaccgtttcaccagccagacccgcgacatcgccgggcacaaggcggaaatcctcgacgcctacgtctacggcagctgggacatcggcaacatgccgctgagcgcgcgcttcggccgccaggtgttcaactggggcgagggcatcttctaccgtggcggggtcaacaccaccaacccggtggacgccgccaagtaccgcctgcccggttccgagctcaaggaagtgctgatgccggtggaagcgctgagcttcaacatcggcctgaccgacaacctgtcgatggaaaccttctaccagtggaactggaaggaaacccgcctcgacccggtcggtaccttcttctccgagaccgacctgttcgccgacggcggcaacaccggctacagcgacttcaccggtaccgcgctggacaccccggtgcccggcttcggcaacgtcatcggcctgtaccaggcgctgggcaacaatccgctgctcagcggcgcgctgaagaacaccggcctctatgccaacggcgtgaccccggcctacggcaacgtgatgaaggtgtcgtccatcggcaaggacatcaacgcgcgcaacgacggccagttcggcgtggccttccgctacatcgccgaggaactgaacagcaccgagttcggcttctacttcgtcaattaccactccaaggaaccgaccctgtacgccgacatcggcgactatgccggggccgacctggcggcgctggccaacaccctgcggccgatcgccggcaacctcgccgaagccctggccaacggcctggtgaccgccgacgtgatgggcaacatcaatgcccggcgcgagttcgccgaagacatccgcatgtacggcttcagcttcaacaccacggtgggcgacgcctcggtgttcggcgagctggcctaccggccgaacctgccgatcggcatcgccgccaccaacgacctgatcggcgacctcgcccacggtgcggcggaagccgccaacggcggacagatcaacgtcggcgggcagatggtcggcctcggcgggcagatccacaactacgagcgggtcgaggcgttcaacacctccctcgggaccatctacaacttcggtccgtcgctgagcttcgactcgttgaccggcgtcgccgagctggcttcggaacacctgcgcggcagcagcctgaagtacaccgcctacgacggcagcacccgctactatgccgggcgcggcaacagctcgtacgtttccggcggcgaccgtggcgaccaggtgaaccgcaacgcctacggctacaccctgctgctcagcggcacctggaacgacgtgttcgccggggtcaacgtgtcgccctacgtggtctacaaggacgacttcgaaggcaactcctaccagaccggcaacttcatcgaaggtcgcaaggcctacaccctggggatcaaggccacctacctgaacagcctggaaggcgaactgcagtacaccgagttctacggcggcgggcagaacaacaacatccgcgaccgcgacaacatcggcctgaccgtgaagtactccttctga

SEQ ID NO: 7373 - DNA, 1806 bp, Pseudomonas aeruginosa
atgcctgattacaaggcccccttgcgtgatatccgtttcgttcgcgacgagctgctgggctacgaagcgcactaccagagcctgccgggcgccgaagacgcgactcccgacatggtcaacgccatcctcgaggaaggtgcgaagttctgcgaacaggtgatcgctccgctgaaccgcgtcggcgacctggaaggctgcacctggagcgccgacggcgtgaagaccccgaccggcttcaaggaggcctaccagcagttcgtcgaaggcggctggccgagcctggcccatgacgtcgagcacggcggccagggtctgccggaatccctcggcctggccatcagcgagatggtcggccaggccaactggtcctggggcatgtacccgggcctgtcccacggcgccatgaacaccctgcatgcccacggcaccgccgagcagcaggcaacctacctgaccaagctggtctccggcgagtggaccggcaccatgtgcctgaccgagccgcactgcggcaccgacctgggcatgctgcgcaccaaggccgagccgcaggccgacggtagctacaaggtcaccggcaccaagatcttcatctccgccggcgagcacgacatggccgacaacatcgtccatatcgtcctggcccgcctgcccgacgccccgcagggcaccaagggcatctcgctgttcatcgtgccgaagttcctgcccaacgccgaaggcaacgccggcgagcgcaacgcggtttcctgcggttccatcgagcacaagatgggcatccacggcaacgccacctgcgtgatgaacttcgacgccgccaccggcttcctgatcggcccgccgaacaagggcctgaactgcatgttcaccttcatgaacaccgctcgcctgggtaccgcgctgcaaggcctggcccatgccgaagtcggtttccagggcggcatcgcctatgctcgcgagcgtctgcagatgcgctcgctgaccggtccgaaggcgcccgagaagcccgccgacccgatcatcgtgcatcctgacgtgcgccgcatgctgctgaccatgaaggccttcgccgaaggcaaccgcgcgatgctgtacttcgccgccaagcaggtcgacatcgtccagcgcagccaggacgaagagcagaagaaagccgccgactcgatgctggccttcctcacgccgatcgccaaggcgttcatgaccgaagtcggcttcgagtccgccaaccacggcgtgcagatcttcggcggccacggtttcatcgccgagcacggcatggagcagaacgtccgcgacagccgcatctcgatgctgtacgaaggcaccaccggcgttcaggccctcgacctgctgggtcgcaaggtgctgatgacccagggcgaggcgctgaagggcttcaccaagatcgtgcacaagttctgccaggccaacgaagccaacgaagccgtcaaggaattcgtcgctccgctggcacagctgaacaaggagtggggcgacctgaccatgaaggtcggcatggccgccatgaaggatcgcgaggaagtcggcgccgcttcggtggactacctgatgtactccggctacgcctgcctggcctacttctgggccgacatggcgcgcttggccgccgagaagctggccgccggcaccggcgaggaagccttctacaaggccaagctgcagaccgcgcgcttctacttccagcgcatcctgccgcgtacccgcgcccacgtcgccgccatgctgtccggcgccaacaacctgatggagatggccgaggaagatttcgccctcggttactga

SEQ ID NO: 7374 - DNA, 1227 bp, Pseudomonas aeruginosa
atgaccgccaccagcgacctgatcgagtcactgatttcctatagctgggacgactggcaggtgacccgccaggaagcccgccgggtgatcgccgcgatccgcaacgacaacgtgcccgatgcgaccatcgccgcactcgacaagagcggctcgctgatcaagctgttccagcgggtgggcccgccggaactggcgcgctcgctgatcgccagcatcgccgggcgcaccaccatgcagcgctaccaggcacgcaatgccttgatccgcagcctgatcaataatcccctgggcacccagaccgacaactggatctacttccccaccatcaccttcttcgacatctgcgccgacctcgccgacgccgctggccgcctgggcttcgccgcggccggcgccaccggggtggccagccaggcgatccagggtccgttcagcggggtcggcgccaccggcgtcaatccgaccgacctgccgtccattgccttcggcgaccagctcaagctgctcaacaaggacccggcgaccgtcaccaagtacagcaacccgctcggcgacctgggcgcctacctgagccagctttcgccgcaagacaagctgaaccaggcacagacgctggtcggccagccgatcagcacgctgttccccgacgcctatccgggcaacccgccgtcgcgggccaaggtcatgtccgcggccgcgcgcaagtacgacctgacgccgcaactgatcggcgcgatcatcctcgccgagcagcgtgaccagacccgcgacgaagacgccaaggactatcaggcggcagtcagcatcaagagcgccaacacctccatcggcctcggccaggtggtggtctccaccgcgatcaagtacgagctgttcaccgacctgctcggccagccggtgcgccgcggtctgtcgcgcaaggcggtcgccaccctgctggcttccgacgaattcaacatcttcgccaccgcccgttacatccgctacgtcgccaacctcgcgtcgcaacaggacctgcgcaagttgccgaagacccgcggcgcatttccctccatcgatctccgcgcctacgccggcaatccgcgcaactggccgcgggacaatgtccgcgcgctggcctcggaatacacctcgcggccctgggacgacaacctgtcgccgggctggccgatgttcgtcgacgatgcctacgccaccttcctcgaccctggaatgaggttcccatga

SEQ ID NO: 7375 - DNA, 1902 bp, Pseudomonas aeruginosa
atgcaccctccgaaaatcctgctgtggctgctgccgctggtctgcgcgttcagccttggagctcttgccgacacggccgtcgacccctcccaagccttgcatctgttgagttacctggcggccgactatccgccgaccgtggctgacggcaagatcgtcgaccccagcgaataccaggaacaggtggagttcgtcggcaacctgcaggcattggtcctgaccctgccgatgcgccccgagcgcgccgagctggagaggggcgtcgccagcctgcgccaggccatcgagcagcgcttgccgggaagggacgtggccctccaggcgcgcaacctcgaggcacgggtggcggatatctaccaggtggtgcagacccccgcgatcacccccgacccgagccgcgcggcgccgatctatgcccagcagtgcgcgatctgccatggcgatgcgggcaagggcgacggccccgccggcatcggcctggaaccgccgccagcgaacctcaccgatcgccagcgcctcgaccacctgagcctctacgacctgcgtaacgtcatcggcctgggcgtggccggcaccgacatgccggcgttcgccgaccagctcgacgaacgccagcgctgggacctggccagctatgtggccggcctgagcgccggcagtgcgcagccggacaaggcccatgcctacccgctggcgaccctggccacgcagactccggccgaagtcgccgagcacgacggcgaggccgctgcggagagcttccgcgccctgcgtgcgcatccgccgctggagcagcgcggtcctgggcagttgatcgactataccgccgccaccctggacaagagcttcgcggtctatcgcgaaggcgaccgcgaccaggcctacgacctgtcggtggcggcctacctggagggcttcgagctggtggaaagctcgctggacaacgtcgacgccgatttgcgccgctccaccgagaagcagctgatggcctaccgccaggcgttgcgcgatggcctcccggaaacccaggtggcgcaacagctggagctggccaagggcaagctggcagaggccgccaagcagcttggcggcgactcgctgagtttctccatcagtttcgtttccgccttgttgatcctgttgcgcgaaggggtagaggcaatcctggtgcttgccgccatcctcgccttcctgcgcaataccgggcaggaaagtgccgtgcgtggcgtgcacgtcggctgggggctggccttcgtcgccggtttcgccacctgggcgttggccgcctatgtgatcgatatcggcggtgcccagcgcgagctgatggagggcttcacctctctgttcgcctgcgtgatggtgctctggctcggcgtctggatgcacgaccgccgccacgcggcagcctggcaggactacatccgcagcagcctggtgggcggtggcggacgcttcggcttcgcagtgctggcgttcttctcggtctaccgcgagttgttcgaggtcatcctgttctacgaaaccctctggttgcaggccggaccggccgggcacaatgccgtgatcggcggcgcggcgaccgccgtggtcctgctgatcggcctggcctgggtgatcctgcgtggttcggcgaaactgccgctggggttgttcttcagcatcaacgcggcgttgctctgtgcgctctcggtggtgttcgccggacatggcgtcatcgccttgcaggaagccggggtgatcggcacccgtccggtgccgttcttcgacttcgactggctggggatcaaggccgacgcctattcgctgtcggcccaggccatggcgctggtggccatcgcgctgctctacggacgtagccggatcgtcgagcgccggcgtgcggcggccaacgcggccgactga

SEQ ID NO: 7376 - DNA, 1401 bp, Pseudomonas aeruginosa
atgaaactcacgctcacccctcccctgacccccagccactggatgcgctcgaccgacctggccgacgccaccagcgcccccctcgtcggcacccactcggcggacgtggcgatagtcggcggcggtttcgtcgggctctggaccgccatcaccctcaagcaactggagccggacgcacgggtcctgctgctggagcaggacgtctgcggcggcggcgcttccggcaggaacggtggtttcgtgatgtcctggtggccgaagatcggcaccttgctgggcttctgcagcgaggcgcaggcgcgcttccttggcgaaagcgcggagcgggcgatccaggaactcggggagttctgcgcgcggcatgacatcgatgcgcacttccagcagaagggctggctgtggaccgccaccacggcgcaccacctcgacgcctggaacgataccctcgccgcctgcgaacggctcggcgtcagtcccttcgaacgcctcgacgccagcgaagtggcacgccggaccggttcgccggtgcatctcgccggggtcttcgagcgcagcaatgccaccgtgcaaccagccttgctggtgcaaggcatgcgccgcgtggcgctggccctcggcgtggaaatccacgagcgttgtggcgtcagccagatcgttcccggccagccggcacagctgctgagcgccggggcccgggttcaggccaaggcggtggttctcgcgaccaacgcctggtcggccgccctgcccaggctctccaggctgatcgtgccggtgaacagttccatcgcggttaccgaggcgataccgcaacggctggagcgaatcggctggaccggcggggaagccatcaccgattcccaactgatggtggactactaccgcaccacccgcgacgggcgcatcgccttcggcaagggcaccggcgccctcagctacggctcgcgcatcggccgggtattcgacgtcgaccgggagagcctggccctgaccgaggccgacttccgccgcacctatccctcgctaggcgacatcccgctggtcgacggctggtccggccccatcgaccgtacctacgacagcctgccggtcttcggccgcctgcacgagaacatccactacggcatcggctggagcggcaacggcgtgggaccgagccgcctgggcgggcggatcctcgccagcctcgccctcggccgcgacgacccgtggagccgttgtccgctggtagaacgccgctgccggagcttcccccccgagccgctgcgctacctgggtggctccctggtgcgcaacgccgtcctgcgcaaggaacgcgcggaactcgccggtaccgcgccctcggccaccgaccgctttctcgcgcgcttcgcccccgccggccttgaagacaaatcctga

SEQ ID NO: 7377 - DNA, 1146 bp, Pseudomonas aeruginosa
atgatcatttccgcttccaccgactaccgcgccgccgcccaacgcaagctgccgccgttcctcttccactacatcgacggcggcgcctacgccgagtacaccctgcgccgcaacgtcgaggacctgtcggccatcgccctgcgtcagcgggtgctgaagaacatgtccgagctgagcctggaaacccgcctgttcgacgagaccctggcgatgccggtggcgctcgccccggtcggtctcaccggcatgtacgcccgccgcggcgaggtccaggcggcgcgcgcggcggcggcgaagggcgtgcccttcaccctgtcgacggtatcggtgtgcccgattgaggaggtcgccccggccatcgaccggccgatgtggttccagctctacgtgctgaaggaccgcggcttcatgcgcaacgccctggagcgggccaaggccgccggcgtcaccaccctggtgttcaccgtcgacatgccggtccccggcgcccgctaccgcgacgcccattccggcatgagcggcccctacgccgcgccgcgccgcatcctgcaagccatgacccacccggcctgggcctgggacgtcggcctgctgggcaagccccacgacctcggcaacatttccgcctaccgcggcaacccgaccggactggaggactacatcggctggctgggcgccaacttcgacccgtcgatttcctggaaggacctggagtggatccgcgagttctgggacggcccgatggtgatcaagggcatcctcgacccggaggatgccagggatgcggtgaagttcggcgccgacggcatcgtcgtctccaaccacggcgggcgccagctcgacggcgtgctgtccagcgcccgcgcgctgccggcgatagccgatgcggtgaagggtgaactggcgatccttgccgactccggcatccgcaccggtctcgacgtggtgcggatgatcgccctcggcgccgacagcgtgctgctcggccgcgccttcgtctacgccctggccgccgccggcgaggccggggtgcgcaacctgctcgaactgatcgaaaaggaaatgcgcgtggccatggtcctcaccggggccaagtcgatcggcgagatcagcgccgactcgctggtccgcgaactgggcgcctga

SEQ ID NO: 7378 - DNA, 546 bp, Pseudomonas aeruginosa
atgagcagccttaccgtctatcacgagaaccagccggagcagccgctgaagctgctgacccatgccgaggacatcgcttcgaccctggccgaggtcggcgtccgtttcgaacgctgggaagccgccgcgccgatcgccgccggcgccagccaggacgaggtgatcgccgcctacgcccacgagatcgagcggctcaagcgcgagcgcggctacatcaccgtggacgtggtcagcctgaacagcgaccacccgcagaaggccgaattgcgcgccaagttcctcgacgagcaccgccatggcgaagacgaggtgcgcttcttcgtcgccgggcgcggcctgttcgtcctgcatatcgaggagcatgtctacgccgtgctctgcgagcgcaacgacctgatctcggtgccggccggcacccgccactggttcgacatgggcgagcacccgcatttcgtcgccgtgcgcctgttcaacaacccggagggctgggtcgcccagttcaccggcgacgacatcgccagccgcttccccctgctggaagactga

SEQ ID NO: 7379 - DNA, 618 bp, Pseudomonas aeruginosa
atgaacgacaaccgtgaacagctgacccagcagatcatcgacgccggccggttcctctacggccgcggctggtcgccggcaaccagcagcaactactccgcgcgcctggacgaacagcgcgcgctgctcaccgtctcgggcaagcacaagggccagttgggcttcgacgacgtgctggccaccgacctggccggcaacagcctggaaccgggcaagaaaccctcggcggagaccctcctgcacacccagctgtatgcctggaacccggcgatcggcgcggtgctgcatacccactcggtgaatgccaccgtgctttcccgcctggtccgcggcgaccgcctggtgctgcaggactacgaactgcagaaggccttcgccggggtcaccacccacgaaggccaggtcgaggtgccgatcttcgacaacgaccaggacatcgcccgcctggccagccgcgtgcagccctggctggaggcgcatccgcactgcccggggtatttgatccgcggccacgggctgtacacttggggcgcgcgcatgagcgatgccctgcgtcaggtggaagctttcgagtttctgttcgagtgtgaactgaaagtactgagtctgagccgatga

SEQ ID NO: 7380 - DNA, 687 bp, Pseudomonas aeruginosa
atgttttcttcgtccaagctggtcaacgcggttgcccagcgcctgctcgacaccatcgagcagggtcgctgggtcgccggccagatgttgcccggccagcgcgagctggctgaacagatggaaatcagccggccgagcctgcgcgaggcgatcatggtcctggagaccctgggcgtggtccgttcgctgccgggcaagggcgtgatggtcctcgaacgcagcgaaccgctgcgcgaggtcgcggcgcccggcgaggcgaccatggaagacgtcctgcaactgcgctatgcgctggagccgttcatcgtcggcatcgtcgcgcagagcgccggggcggcggagatcagcgaactgcggctgttgctgctggacctgcgcgaagcggtcgaggatggcgacccgcaggctctggttgaggcctacacggccttccaccggcgcctggtgaagctcacctcgaacccgatcttcctcagcgtttccgaacagatcggcagcgccctggaacgcagcgacaacctggtgcgccgccagccggaatacgccgaggagatcctccaggaacacgacgccatcctccgtgcgatccgccagcacgacagcgagcgggcgagccaggcgatgcgccagcacatcctcaacgaaggcgcgcgcctgaacatcgacctgcgcttgccgcaggtctga

SEQ ID NO: 7381 - DNA, 2454 bp, Pseudomonas aeruginosa
atgcccgattccgtcgctgccggcctgcgcctggcgccagaagaactgacccgcccgttcgctcccgagcaattcaccttcgacaccaccgatgacctggagcccttccgcggcgtgctgggccaggagcgtgcggtcgaggcgctgcagttcggtgtggcgatgccgcgtccgggttacaacgtattcgtcatgggcgagccggggaccggacgcttctccttcgtcaaacgctatctgcaagccgagggcaagcgcgtcgccacgccctccgactgggtctacctgaacaatttcgacgagccgcgcgaacctcgggtgatcgagctgccgccgggcagcgcgaccgaattcagcgccgacatcgaccgtctgatcgacaacctgatgtcgaccttcccggcggtcttcgagcatccggcctaccagcagaagaagaacgccgtcgaccgcgctttcaaccagcgctacgaccgcgccctggactcggtggagcggcgcgccctggagaaggacgtggcgctgtaccgcgacagcgccaacgtcgccttcaccccgatgaaggacggcaaggccctcgacgaggccgaattcgcccagttgcccgaagccgagcgcgagcgtttccacaaggatatcgccgccctcgaggagtacctcaacgaggaactggcgagcctgccgcagtggaagcgcgagtcgagcaaccagttgcgcgagctcaacgaggaaaccatcaccctggccctgcagcccctgctggcgcctctggtggagaagtacaacaacaacccgggcgtctgcgcctacctgcaggcgatgcaactgaacctgctgaagaccgtggtcgaccaactggtcgacgacagccgcaccgacgcccagcgcaagcaagggctgatcgagcagtacgcgccgaaccaggccatcgtccaccacgcgaccagcggcgcgccggtggtgttcgagtcgcacccgacctacgacaacctgttcggccgcatcgagtacagctcggaccagggggcgctctacaccagctaccggcagttgcgtccgggggcgctgcaccgggccaacggcggcttcctgatcctggaagcggaaaagatgcttggcgagccgttcgtctgggacgcgctcaagcgtgccctgcagtcgcgccagttgaagatggagtcgccgctggccgaactcggccgcctggctgcggtttccctgaccccccaggtgatcccgctgcaactgaaggtgatcatcatcggctcgcggcagatctactacaccctgcaggacctcgatccggacttccaggagatgttccgggtgctggtggacttcgacgaggacatcccgctgggcgaggacagcctcgaacagttcgcccagttgctcaagacgcgcacctcggaagagggcatggcgcccctcagcggcgcggcggtggcgcgactggcgacctacagcgcgcgcctggccgagcaccaggggcggctttcggcacggatcggcgatctgttccagttggtcagcgaagccgatttcatccgtcagctggcgaacgaggaggtgatccagctcggccacatcgagcgtgccctcaaggccaagcagacccgcaccggacgggtgtcggcgcggatcctcgacgacatgctggcggggatcatcctgatcgacaccgctggcgccgcggtcggcaagtgcaacggactgaccgtgctggaggtgggcgactcggtgttcggcgtgccggcgcggatttccgcgaccgtctatccgggcagcagcggcatcgtcgatatcgagcgcgaagtcaacctcggccagccgatccactccaagggcgtgatgatccttaccggctacctgggtagccgctacgcccaggagttccccctggaaatctccgccagcatcgccctggaacaatcctacggctacgtggacggcgacagcgcctcgctgggcgaggtctgcacgctgatctcggcgctgtcgcggacgcccttgaagcagtgcttcgccattaccggctcgatcaaccagttcggcgaggtgcaggcggtcggcggcgtcaacgagaagatcgagggcttcttccgcctctgcgaagcgcgcggcctgaccggcgaacagggtgtgatcatcccgcgcgccaacgtcactaccctgatgctcgacgagcgcgtgttgcaggcggtgcgcgccgggcagttccacgtctacgcggtgcgcgaggtggacgaggcgctggcgctgctggtgggcaagccggtcggtgcccaggacgagaagggacgcttcccgaaaggcagcgtgaacgatctggtcgtggcgcgcttgcaggagatatccgaactcggcatggaagaggacgacaaggaaaaggacaagccggcggagaaagagaccgtcgcggcgaaggacaaggccgcggcgaagaaggactga

SEQ ID NO: 7382 - DNA, 1317 bp, Pseudomonas aeruginosa
atgatccgtaagcactcgctcggcttcgttgccagcgctctggctctggccgtatctgcccaggcgttcgccggcaccgtgaccaccgacggcgccgatatcgtgatcaagaccaagggtggcctcgaagtcgccaccaccgacaaggaattcagcttcaagctgggcggtcgcctgcaggccgactacagccgtttcgacggtttctataccaagaatggcaacaccgccgacgccgcctacttccgccgcgccttcatcgaactcggcggcaccgcgtacaaggactggaaataccagatcaacttcgacctgtcgcacaacaccggcagctccgacaacggctatttcgacgaagcttcggtcacctacaccggcttcaacccggtcaacctgaagttcggtcgcttcgaccccgacttcggcctggaaaaggccaccagctccaagtgggtgaccgctcccgagcgtaacgccgcctacgaactggccgactggatcaacacccaccaggacggcatgggcgcccaggtcaactcgaccctcgccgacatggcctacctgtccgccggcgtatccgccaaggacgccgacgacagcgacggcgacagcgtcaagcagttcaacttccgcggcgtgttcgcgccgatgcacgaagccggcaatgttctgcatgtcggcgtgaactatgcctaccgcgacctcgacgacaccgccttcgactcgcgcatccgtccgcgcctgggcatgcgcggcatcgccaccagcggcggcaacgacgccggtgacaacggcaaccgcgcgaccttcggcggtgtctccaactcgccggccggttcctacaaggacgatagcgtctggggcctggaaggcgcctgggcaatgggcccgttctcggcccaggccgaatacctggcacgcaagctgaaggccgatgacaacgcctacaaggacatcaaggccaagggttactacgcgcaactggcctacaccctgaccggcgagtcccgccagtacaagctggaaggtgccaagttcgactccgtcaagccggaaaacaaggaaatcggcgcctgggaagtgttctaccgctacgacaacatcaaggtggaagacgacaacgtggtcgccgataccgccactcgcgaagtcggcgacaccaaggccaaggcccacaacctgggcgtgaactggtacgtcaacgatgcggtgaagatcagcgcggcctacgtcaaggcgaagaccgacaagatcaccaacaacaatggcgacgatgacggcgacggcttcgtgacccgtttgcagtacgtgttctaa

SEQ ID NO: 7383 - DNA, 534 bp, Pseudomonas aeruginosa
gtggctaagcgttggtacgttgtgcatgcatactcgggctacgagaagcatgtcatgcgctcgctgatcgagcgtgtcaagcttgctggcatggaagaagagttcggcgagattctggttcccaccgaagaagtggtggagatgcggaacggccagaagcgcaagagcgagcgcaaattcttccctggctatgtgctggttcagatggaaatgaacgaaggtacctggcacctggtgaaggataccccgcgtgtcatgggcttcatcggcgggactgccgacaagccggctccgatcaccgatcgtgaggctgatgcaatcctgcgtcgcgtggccgatagcggcgacaagcccaagccgaagaccctgttcgagccgggcgagaccgttcgtgtcatcgatggtcctttcgccgacttcaatggtgtcgtcgaagaagttaactacgagaagagccggatccaagtggccgtgctcatctttggccgctctaccccggtggagctggagttcagtcaggtcgaaaaggtctaa

SEQ ID NO: 7384 - DNA, 432 bp, Pseudomonas aeruginosa
atggctaagaaaatccaggcttatatcaagctgcaagtaaaggccggtcaggccaacccgtcgccgccggtcggccctgccctgggtcagcacggcgtgaacatcatggaattctgcaaggcgttcaacgccaagacccaaggccaagagccgggcctgccgactcctgtgatcatcaccgtttacagcgaccgtagcttcaccttcgaaaccaagagcaccccggctgccgtcctgctgaaaaaagcagctggcatcaccagcggctccgctcgtccgaactcccagaaagtcggtaccgttacccgtgcccagctggaagagatcgccaagaccaagcaggctgacctgaccgctgctgatctggacgctgctgtacgtaccatcgctggctccgcgcgcagcatgggcctgaacgtggagggtgtgtaa

SEQ ID NO: 7385 - DNA, 1620 bp, Pseudomonas aeruginosa
atgaccgagtacgcaacgaccccttcctacacagtgcctgcgaccacgccccaggaggagcgcaaggtgatcttcgcctcctcgctgggcacggtcttcgagtggtacgacttcttcctctacggcgccctggcggcggtgatcagcaagcagttcttcgccggcgtcaacgacaccacggccttcatcttcgccctgatggccttcgccgccggcttcctggtgcggcccttcggcgcgctggtgttcggccgcctgggcgacatgatcgggcgcaagtacaccttcctggtgaccatcctgttgatggggttgtcgaccttcgccgtcggcctgctgcccacctatgcctcgatcggggtcgccgcgccgatcatcctggtcaccttgcgcatgctccagggcctggccctgggcggcgagtacggcggcgcggcgatctatgtcgccgagcacgccccggcgaacaagcgcggtagctacaccagttggatccagtccaccgcgaccctcggcctgttgctctcgctgctggtgatcctggcctgtcgccagttgaccggcgacgagttcgagacctggggctggcgcctgccattcctgctgtccatcgtcctgctgggcatctccacctggatccgcctgtccatgcgcgagtcgccagcgttcctcaagatgaaggccgagggcaaggtcagcaaggcgccgctgcgcgagtccttcacccagtggggcaacctgaaggtggtgctgaccgcgctgttcagcatcaatgccggccaggcggtgaccttctacacggcgcagttctacgtgctgttcttccttacccaggtgctcaaggtcgatggcggcaccgccaacggtctgctgatcgtcgccctggtgcttggcgcgccgttcttcatcgtcgccggctggctgtccgaccgcatcggccgcaagccggtgctgctggccggcctgttgctcgccacgctgttctacttcccgctgttcaagggcctgacccactacgctaacccggccatcgaccaggccagccggcagtcgccgatcagcgtggtggccgacccggcgacctgcactttccagttcgacccggtaggcaaggcgaccttcgacagcccctgcgacaaggtcaagaccttcctggtcaaggccggcctgccctactcgacggtggcggcgcccgccggcagcgacgtcagggtgcggatcggcgagaccgagatcgccggcttcgacgccgaagcgatggcggccgcggtgaagacggcaggctatccgcagcaggccgacggcagccaggtgaacaagccgatggtgatcgccatcatcttcgctctggtactgatctccaccctctgctacggcccgctggcggcgctgatggtcgaactgttcccgacccgcatccgctattcctcgctgtccctgccgtaccacatcggcaacggctggttcggcggcttcctgcccacggtctcgttcgccctggtggtgtacaccggcgacatcttctacggcctctggtatccggtgctgatcaccggcggtagcctggtctgcgccttgctgttcctccgcgaaacccgccataccgacatccaccggtga

SEQ ID NO: 7386 - DNA, 2172 bp, Pseudomonas aeruginosa
atggaagctgagaaaaccccggataacgtcgtgatcctcaaccacgaccccatcgtcgacccgttgcgccagggcttgttgctgctctgccggcagcttggccgaccgctcggcgacgccgaactggtggacggcatgccgctggagcacggtcgcctgccgttgcacctggtggcccgcgcgttgcgccgcgccgacatcaccgcccaggtcacccgccagccgttgcgccggatcgatcgctacctgctgccggccctgctgctgctcgacgacggccgcgccctggtgctggtgggcaacgacggcgagcacgccgaggtgctggtaccgcagagcgacggcggaagccagaggatgccgctggccgagctggaagcgctgtacagcggcacggcggtcttcgccaagtgccgctaccgcccggacgggcgggtcggcgactacgccagcgccttgcccgaacactggttcttcggcccgctcaagcggctctggcgttcctacgccgaggtcaccgccgcggcgttggtggccaacgtcctggcggtcgcctcggcactgttcgccatgcaggtctacgaccgcgtggtgcccaacgcggcgttcgacaccctgtggatcctcgccagcggcgtggccctggcgatcgtcctcgacggtgtcctgcggatcatgcgcggccacctgctcaacgtgctcggcaagcgcctcgacctgcaactctcgaccctgctgttctcccgcgtgctgagcacccgggtcgccgccaagccggcgtcgatgggcgccttcagtacccaggtgcgggagttcgagtcggtgcgcgagttctttacctcgtccagcgcggcgctgatcagcgacctgccgttcgtggcgatcttcctgctgatcatcgccgtgatcggcggccatgtggtctgggtgccgctggtggcctgcgtgctgatgatcctgccggggctgctgacccagcgcctgctcggccacctgtcgcggcagaacctgcgcgaaggggcgatgaagaacggcgtgctgctggaagccttcgagcacctggagacggtcaaggcgacccgcgccgaaggccgctgcctgcaccagtgggaaaccctgaccggcgaactggccggtacggcgatgaagacccatactctggcctcgaccctgagctactcggcgagcatcgtccagcagctctgctacgtcggcgtggtggtcttcggcgtctatcggatcagcgagggcgcgatgaccgtcggcggcctggtggcctgctcgatcctcgcctcgcgggccatcgcaccgctgtcgcaggcggccggcatcctcggtcgctggcagcacaccaaggtggcgatggaaggcctcgaccaactgatgagcgccgagcaggagcgaccccagggcaagcgcttcgtgcacaaggagcgcctgcagggacattaccgcctggagggcgtgcgcctggcccacggcgacagcccgccggtggtcgacgtgcaggccctgaacatccgcgccggcgagcgggtggcgctgctcggcggcaacggcgccggcaagtcgaccctgctgcgcctgctcagcggcctgctcgacgcgcaggcgggacgcctgctgctggacgacgtcagcctgacccagatcgacccggccgaccgccagcgcggtatcggctacctgccgcaggacgtggcgctgttccatggcagcctgcgcgacaacctcaacctggagaacgccgcgctgggcgacgaggaactgctggagaccctcgacggggtcggcctgggcgccttcgtccgcggccacccgctggggctggacatgccgatccagggcaacgccagcctgtccggcggccaacgccaggccgtcgggctggcccgggtgctgctacaggaccctccgatcctgctgctcgacgagccgaccgcggccttcgaccagggcagcgagaaacaggtcatcgactacctgcagcaatggttgggcaagcgcaccctggtcatcaccacccacaagaaaagcatgctcgccctggtcgagcgtgcggtggtcctgcgccagggcagggtgatcatggacggcccgctggagcaggtggtgcagggcaaccaggtacaggcaccgcaggccgccgaaggaggcaaccatggactctga

SEQ ID NO: 7387 - DNA, 516 bp, Pseudomonas aeruginosa
atgtcccgacccaccctgcaagtcgacctgctggtcgagtccttcaactacaaggcctggtccgaccgccgcaccctcgatgccatcgcccggatcgacgccgaggcgttcccggcctcgctggccttcgccttgcaacagctcaatcacatggcgatcgtcgaggaactgttcagggcgcgcctgctgggcgagccggcgccccaccaacagaccaacagcgaggtggtgcctggctacgacgtcctgcgtcgccggctggaggattcggccgcctggttcgccggctatgtcgccgagctgccgctggagcgtcgcggcgaatggctgcgcttccgcttcgccgatggccgcgacggcggcatgacgcgccaggagatcctcttccatatcgtcaaccatggcacctaccatcgcggcgccatcggtcatgccctcgacctggcgggcgcgccccggccggcggatacctacaccctgtatatccactccgcgcagccggagcggcgggaatag

SEQ ID NO: 7388 - DNA, 2658 bp, Pseudomonas aeruginosa
atgaccgacaccgcacgcgccgacgcgctgctggccgacctgcccgctgacgggcgcggccgcctgaaagtctttctcggcgcggcgccgggggtgggcaagaccttcgccatgctgcaggccgcccaggcccagttgcgccagggcgtgaaactgcgcgccggggtggtcgagacccactcgcgggcggaaaccgagtccctcctcgcaggcgtgccgcagcagccgctgcgcagcctcgagtatcgagggatgaaactgcaggaaatggacctcgacggtctcctcgccgacccgccggcgctggccctggtcgacgaactggcccacagcaacgttcccggcagccgccacgccaagcgctggcaggacatccaggagttgctggcggcgggaatcgacgtctacacaacggtcaacgtccagcacctggagagcctcaacgaccaggtccgcgacatcaccggcgtgcaggtccgcgagacggtgccggactgggtgttgcaggaggcctacgagatcgtcctcatcgacctgccgccgcgcgagctgctggagcgcctgcgcgagggcaaggtctacgtgccggaacaggcgcgggcggcgatcgatgcgttcttctcgcagaccaacctcaccgcgctgcgtgaactggcgatgcagaccgccgccgcgcgggtcgacgccgacctcaaccaccgctaccgccagcgcggcgaggaagcgccggcgttgcgcgggcggctgctggtgggcatcgacggtgacgaacaggccgaacgcctggtgcgccacgcctgccgggtcgccgaacgtcggcacctgccctggagcgtggtacacgtcgataccggcggcttgcgcggcgagcaggcgcggatgcgcctgcagggtgcgcagcaactggccgagcggctcggcggcgagatcgtcgtgctgcgcgccggcgaggtggcgcggaccctcctgcaacatgcccgcgagcgccgcgccagcctggtcctggttggccagtcgcggcgccgctggtatcgccgggccttcggcggtggtctcgccgggcgtctgctgcgcgacggccagggcctggagatcagtgccctggacagcgaggccgacctgcgcccggcggaaccgcggccacgctatccggtggtgtggaacgactatctgctggcgctgctggcgaccgccctggccagcggcctggcctggatcgtggcgcacctgctggagctgccgaacatctccctggtgttcctgatggcggtgctgctggtggcagtgcgcagcagcctgatgccggcactgctgtgcgcggtggcgtcgttcctggcctatgacttcctgttcatcccgccgcatttttccttcgccatccatcgccacgaagacctgctgagcctggcgttcttcctgttcatggccggcctcaccggcaacctggcggcacgccagcggcgccagctggaggcgctgcgcgatacccaggaggaaaccagcctgctgctggagctgtcgcgcaagctcaccgccgccaccgaccgccaggcggtgctggccgccgccgcccagcagttcgacgactggaaggacgtcgaggtctgcctgctcggtcaggtcaatggcgagtggaagaccgaggccggcgtgcagcggcaactcgccgaccaggaacgggtcgccgcggactgggcctgggcccacgaccagccggccggcctcggtactggcacgctgcccggaggacgctggtggtggtggccgctgtcggcggaagagggaccgctggcactgctcggtgtcgcgccgctggacggccagccgctgagcccgcagcgccggcgcctgctcgccgccctcggccagcctctggcccaggccctggcgcgggctcgcctggccgaggacctggaggccgcgcgcctgcacggcgagaccgagcaactgcgcagcgccttgctcgcctcggtgtcccacgacctgcgcacgccgctgacggccatgcgcggctccatcgacagcctgctggcgctgggtgaggcgatcccgccggcggatcgtcgcgaactgctggaaagcacccgcgacgaggccgagcgactggaccgctatatccagaacctgctcgacatgacccgtctcggccacggtggcctgaagctggcgcgcgactgggtggcgccgggcgacatcgttggcagcgcgctgaaccgcctgcgcgcggtgctggcgccgtaccgggtgcaggcgatcgtggccaacgacctgccgttgctctacgtgcatgcggcgctgatcgagcaggcgctgatcaacgtgctggaaaatgccgcgcgcttctcgccgaaccacggccggttgcgcatcgaggtcagccaggatgccgccgagctgcgtttcgcggtgagcgacgaggggccggggattcccgaggccgagcgggagaagatcttcgacatgttctacaccgctgcccgtggcgaccgcggtggccagggcaccggcctgggcctggcgatctgccagggcatgatcggcgcccacggcgggcgcatcagcgtcggcgaaggcctcgacggtcgcggcaccacgctggtcctgcacctgccgctgcatccgcagccggacctcgggcaactggagggcgacgaatga

SEQ ID NO: 7389 - DNA, 717 bp, Pseudomonas aeruginosa
gtggcggtgggcttcttcgcccaggtgatcgacggtgcgctgggcatggcctacggcattactgccaccaccttcctgctcagcgctggcgccacgccggccgctgccagcgccagcgtgcacatcgccgaagtgttcaccaccggcttttccgggatttcccacgtcaagctcggcaacgtcaacaagtcactcttcctccgcctgctgctgccgggaatgatcggcgcggtgctcggcgccgtgctgataacccgcttcgacggccaccagctcaagcccttcatctccgcctacctgctgctgatgggcctgtacatcctgagcaaggcctaccgccacgtgatcaagcgccgggcaccgcgccacgtggccaagctggcactcttcggcggcttcgtcgatgctgccggcggcggctggggcccggtggtcaccagcagcctgatcggctcgggtagcgacccgcgcaccaccatcggctcggtgaacttcgccgagttcttcctgaccatcgccagcgccacctccttcatcctcctcgctggccagccggacacctggaagatggtcgccgggctggtcttcggcggcctgttcgccgcgccgttcgccgccctgctgtgcaagaagctttcgccgcgcaccctgctggtcatcgtcggcaccctgatcaccctgatcagcgcctacaacatctacatcggcctgcgctga

SEQ ID NO: 7390 - DNA, 1566 bp, Pseudomonas aeruginosa
atgcagttcggcgccaagccgctgttcgagaacgtttccgtcaagttcggcaacggcaaccgctacggcctgatcggcgccaacggttgcggcaagtcgaccttcatgaagatcctcggtaacgacctggagccgagcgccggccaggtcatgctggaacccaacgtgcgcctgggcaagctgcgccaggaccagttcgcctacgaggacttcagcgtcatcgatacggtgatcatgggccacgaggaactctgggcggtgaaggccgaacgcgaccgcatctactccctgccggaaatgagcgaggcagatggcatggcggtggccgagctggaagtccagttcgccgagttcgacggctacaccgccgagtcccgcgccggcgagctgctgctcggcctgggcatcccgctggagcagcacttcggcccgatgagcgccgtcgctcccggctggaagctgcgcgtactgctggcccaggcgctgttctcggacccggacgtgctgctgctcgacgaaccgaccaaccacctggacatcaacaccatccgctggctggaaggcgtgctcaccgcgcgcaacagcaccatgatcatcatttcccacgatcgccacttcctgaacagcgtctgcacccacatggccgacctggactacggcgagctgcgcctgttcccgggcaactacgacgagtacatgaccgccgccgaacaggcccgcgagcgcctgctgtcggacaacgccaagaagaaggcgcagatcgccgagctgcaatccttcgtcagccgcttctcggccaacgcctccaaggccaagcaggccaccagccgcgcccggcagatcgacaagatccagctggaggaggtcaagccgtccagccgggtcagcccgttcatccgcttcgagcaatacaagaagctgcaccgccaggcggtgaccgtggaaaacatcagcaagggctatgacggcaagccgctgttcaagggcctgagcctgcaggtcgaggccggcgagcgcgtcgccatcatcggccccaacggcatcggcaagaccaccctgttgcgctgcctggtcggcgacctgccggtggacggcggcgaggtgaaatggaccgacagcgccgacgtcggctatttcgcccaagaccatgccgacgacttcgccgacgacatgagcctgttcgactggatggcccagtggacccagggcggcgaacaactggtgcgcggcaccctcggccgcatgctgttctccaacgacgagatcaagaagtcggtgaaagtgatctccggcggcgagcagggccgcatgctgttcggccggctgatcctcaagcgccccaacgtgctggtgatggacgagccgaccaaccacctggacatggagtccatcgaggcgctgaacctggcgctggacaactatccgggcacgctgatcttcgtcagccacgaccgcgaattcgtttcctcactggctacccgcatcatcgagctgggcgagaacggcgtgaccgacttcagcggcagctatgacgactacctgcgcagccagggcgtgatcgtctga

SEQ ID NO: 7391 - DNA, 3057 bp, Pseudomonas aeruginosa
atggcttttaccgatccgttcatccgtcgtccggtcctggcgagcgtggtcagcctgctgatcgtcctgctcggcatgcaggccttcagcaagctggtgatccgcgagtatccgcaaatggagaacgcgctgatcacggtgaccacgctctacgccggcgccaacgcggaaaccatccagggctacatcacccagccgctgcagcagagcctggccagcgccgaaggcatcgactacatgacctcggtgagccggcagaactattcgaccatctccatctacgcgcggatcggcgccaataccgatcgcctggtcaccgagctgctggccaagtccaacgaagtgaagagccagctgccgccggacgccgaggacccggtgctgcagaaggaggccgcggacgcctcggcgctgatgtacatcagcttctacagcgagcagatgaacaacccgcagatcaccgactacctgtcgcgggtgatccagcccaagctggcgaccctgcccggtatcgccgaggcggagatcctcggcaaccaggtgttcgccatgcgcctgtggctggacccggtgaagatggccgcgttcggcgtcaccgccggcgagatcaaccaggcggtgcagcagtacaacttcctcgccgccgccggcgaggtgaagggccagttggtggtcaccagcgtcaatgcttccaccgacctcaagtcgccccaggccttcgccgccatcccggtgaagaccgacggcgaccgccgggtgctgatgggtgatgtcgcacgggtcgaactgggcgccgccagctacgacgcgatcagttcgttcaatgggattccctcggtctacatcggcatcaagggcacgcccagcgccaacccgctggacgtgatcaaggaagtgcgggcgaagatgcccgaactggaagagcaattgccgcccaacctcaaggtgtccatcgcctacgacgccacgcgcttcattcaggcctccatcgatgaagtggtgaagaccctcggcgaggcggtgctgatcgtcatcgtggtggtgttcctgttcctcggcgcgttccgttcggtactgatcccggtggtgaccattccgctgtcgatgatcggcgtattgttcttcatgcaggccatgggctactcgatcaacctgctgaccctgctggcgatggtcctggccatcggcctggtggtggacgacgcgatcgtggtggtggaaaacatccaccgccacatcgaggagggcaagccgcccttcgaggctgccctggagggcgcgcgggagatcgccgtaccggtggtcagcatgaccatcaccctcgccgcggtctacgcgccgatcggcttcctcaccggcctcaccggcgccctgttcaaggagttcgccttcaccctggccggcgcggtgatcatttccgggatcgtcgccctgaccctgtcgccgatgatgtgctcgcgcctgttgcgccacgaggagaatccctcgggcctggcgcatcgcctcgacctgatcttcgagggcctgaagcaacgctaccagcgcgccctccacggcaccctggacacccgtccggtggtcctggtgttcgccgtgctggtactggcgctgatcccggtactgctgatgttcaccaagaaggagctggcgccggaagaggaccagggcatcgtgttcctcatgaccaactcgccgcaaaccgccaacctcgactacctgaatcgctacaccgccgagttcgaaggcatcttccgcagcttcccggagtattactcggcgttccagatcaacggctacaacggcgtccaggccggcatcggcggcatgctgctcaagccctgggacgaacgcgaaaagagccagatggaattgctccatgcggtgcaggcgaagctcaacgagattcccggcgtgcagatcttcgccttcaacctgccgtcgctaccgggcaccggcgagggcctgccattccagttcgtgctcaacaccgccaacgactacgagtcgctgctgcaagtggcgcaacgggtgaagcagcgcgccagcgagtccggcaagttcgccttcctcgatctcgacctggcgttcgacaaacccgagctggtggtcgacatcgaccgcgagaaggccgcgcagatgggcgtctccatgcaggacctgggggtggcgctggccagcctgctcggcgagggcgagatcaaccgcttcaccatcgacgggcgcagctacaaggtcatcgcccaggtcgaacgcccctatcgcgacaatcccggctggctcggcagctactacgtgaagagccgcaacggccaactggtcgccctctcgaccctgatcgagacccacgaacgggcacggccacggcaactgaaccagttccagcagctcaactcggcgatcatctccggcttccccatcgtcagcatgggcgaggccatcgagacggttcagcagatcgcccgcgaggaagccccgcgtggcttcgccgtcgactacgccggcgcttcccggcaatacgtgcaggaaggcagcgcattgctggtcaccttcggactggccctggcgatcatcttcctggtcctcgccgcacagttcgaaagcttccgcgatccgctggtgatcatggtcaccgtgccgctgtcgatctgcggtgcgctgataccgctgttcctcggcgtgtcgagcctgaacatctatacccaggtcggcctggtgaccctgatcggcctgatcagcaaacacggcatcctgatcgtcgagttcgccaaccagttgcgccacgaacaggggctggggcgtcgcgaggccatcgagcaggccgccgcgatccgcctgcggccagtactgatgaccaccgcggcgatggtgctcggggtgatcccgctgatcctcgccaccggcgccggggcggtcagtcgcttcgacatcggcatcgtgatcgcgaccggcatgtcggtgggcaccctcttcaccctgttcgtcctgccgtgcatctacaccctggtggccaggccggatgccccgccaggcgtgacgcaagcggcaaacgcacactga

SEQ ID NO: 7392 - DNA, 4200 bp, Pseudomonas aeruginosa
ttgaaagacttgcttaatctgttgaaaaaccagggtcaaatcgaagagttcgatgccatccgtattggcctggcttcgcccgagatgattcgttcctggtctttcggcgaagttaaaaagccggaaaccatcaactaccgtaccttcaagccggagcgcgacggcctgttctgcgccaagatcttcggcccggtgaaggattacgagtgcctgtgcggcaagtacaagcgcctcaagcaccgcggtgtgatctgcgagaagtgcggcgtggaagtcgccctggccaaggtgcgccgcgagcgcatgggccacatcgagctggcttcgccggttgcccacatctggttcctgaagtcgctgccgtcccgtatcggcctgctgctggacatgaccctgcgcgatatcgagcgcgtgctctatttcgagagctacgtggtgatcgatccgggcatgaccaccctggaaaagggccagctgctgaacgacgagcaatacttcgaggccctcgaagagttcggtgacgatttcgatgctcgcatgggcgccgaagctgttcacgaactgctcaacgccatcgacctggagcacgagatcggccgcctgcgcgaagagattccgcagaccaactcggaaaccaagatcaagaagctgtccaagcgcctgaagctgatggaagccttccagggctccggcaacaagcctgagtggatggtcctgaccgtcctgccggtgctgccgccggacctgcgtccgctggttccgctggatggcggtcgcttcgcgacttccgacctgaacgacctgtatcgtcgggtgatcaaccgtaacaaccgtctgaagcgcctgctcgacctggctgctccggacatcatcgtgcgcaacgaaaagcgcatgctgcaggaagccgtcgacgccctgctcgacaacggccgtcgcggtcgcgccatcaccggctcgaacaagcgtccgctgaagtcgctggccgacatgatcaagggcaagcaaggtcgcttccgtcagaacctgctcggcaagcgcgtggactactccggtcgttccgtgatcaccgtgggcccgaccctgcgcctgcaccagtgcggtctgccgaagaagatggccctggagctgttcaagccgttcattttcggcaagctggaaggtcgtggtatggccaccaccatcaaggccgccaagaaaatggtcgagcgcgagctgcccgaggtctgggacgttctcgccgaagtcatccgcgagcatccggttctcctgaaccgtgcgccgaccctgcaccgtctgggcatccaggcgttcgagccggtcctcatcgaaggcaaggcgatccagctgcacccgctggtctgcgccgcgtacaacgccgacttcgacggtgaccagatggccgtccacgttccgctgaccctcgaggcccagctggaagcgcgcgcgctgatgatgtccaccaacaacatcctgtcgcccgccaacggcgagccgatcatcgttccgtcgcaggacgtggtaatgggtctgtactacatgacccgtgaagcgatcaacgcgaagggcgagggcatggccttcgccgacctgcaggaagtcgaccgcgcctaccgcagcggccaggcgtccctgcacgctcgcgtaaaagtgcgcatcaacgaaaagatcaagggtgaagacggccaactgaccgccaatacccgtatcgtcgacaccaccgtcggccgcgcgctgctgttccaggtcgttccggccggcctgccgttcgacgtggtcaaccagtcgatgaagaagaaggcgatctccaagctgatcaaccactgctatcgcgtggtgggtctgaaggacaccgtcatcttcgccgaccagctgatgtacaccggtttcgcctactcgaccatttccggcgtgtccatcggcgtcaacgacttcgtcatcccggacgagaaggcgcggatcatcaacgccgccaccgacgaagtgaaggagatcgagagccagtacgcctccggcctggtaacccagggcgagaagtacaacaaggtgatcgacctgtggtcgaaggccaacgacgaagtgtccaaggcgatgatggccaacctctcgaaagagaaggtcgtcgatcgcgagggcaaggaagtcgaccaggagtccttcaactccatgtacatgatggctgactcgggtgcgcggggctccgcggcccagatccgtcagctggcaggtatgcgtggcctgatggccaagccggacggctcgatcatcgagaccccgatcaccgcgaacttccgtgaaggcctgaacgtactccagtacttcatctccacccacggtgctcgtaagggtctggcggataccgcgctgaagaccgcgaactccggttacctgacccgtcgtctggtcgacgtggcccaggatctggtagtgaccgagatcgattgcggtaccgagcacggcctgctgatgtcgccgcacatcgaaggcggcgacgtggtcgaaccgctcggcgagcgcgtgctcggccgtgtgatcgcgcgcgacgtgttcaagccgggcagcgacgaggtcatcgtgccggccggcaccctgatcgacgagaagtgggtggacttcctcgaagtgatgagcgtcgacgaagtggtggtgcgttccccgatcacctgcgaaacccgtcatggcatctgcgccatgtgctacggccgcgacctggcccgtggccatcgcgtcaacatcggcgaggcggtcggtgtcatcgctgcccagtccatcggtgagccgggcacccagctgaccatgcgtaccttccacatcggtggtgcggccagccggacctccgcggccgacaacgtccaggtgaagaacggcggcaccatccgcctgcacaacctgaagcatgtggttcgtgccgacggcgcgctggtcgcggtttcccgttccggcgaactggcggttgccgacgacttcggtcgcgagcgcgagcgctacaagctgccgtacggtgcggtgatctcggtcaaggaaggtgacaaggtcgacccgggcgctatcgtcgccaagtgggacccgcacacccacccgatcgtcaccgaggtggacggtaccgtggccttcgtgggcatggaagagggcatcaccgtcaagcgtcagaccgacgaactgaccggcctgaccaacatcgaagtgatggatccgaaggaccgtccggctgccggcaaggacatccgtccggccgtgaagctgattgatgccgcgggcaaggacctgctgctgccgggtaccgacgtaccggcgcagtacttcctgccggccaacgccctggtcaacctgaccgacggcgccaaggtgagcatcggtgacgttgtcgcgcgtatcccgcaggaaacctcgaagacccgtgacatcaccggtggtctgccgcgcgttgccgacctgttcgaggctcgtcgtccgaaagagccttcgatcctggcggaaatcagcggcaccatctccttcggcaaggagaccaagggcaagcgccgcctggtcatcacgccgaacgatggcagcgatccgtacgaggagctgattccgaagtggcgtcacctgaacgtgttcgaaggcgaacaggtgaaccgcggcgaagtcatctccgacggtccgagcaacccgcacgacatcctgcgcctcctgggcgtgagctcgctggcgaagtacatcgtcaacgagattcaggacgtctaccgtctgcagggcgtgaagatcaacgacaagcacatcgagaccatcctgcgtcagatgctgcgcaaggtcgaagtcagcgagtccggcgactccagcttcatcaaaggcgaccaggtggaactcacccaggtgctggaagagaacgaacagctcggtaccgaggacaagttcccggccaagtacgagcgggttctgctgggtatcaccaaggcctccctgtcgaccgagtcgttcatttccgcggcgtcgttccaggagaccacccgcgtcctcaccgaggcggcggtcaccggcaagcgcgacttcctgcgtggtctgaaagagaacgtggtcgtgggtcgcctgatcccggccggtaccggtctggcttaccacagcgaacgcaagcgtcagcgcgacctcggcaagccgcagcgtgtgagtgccagcgaggcggaagccgcactgaccgaagcgctgaactcgagcggtaactaa

SEQ ID NO: 7393 - DNA, 2244 bp, Pseudomonas aeruginosa
atggtacaggtgagagcgcaccagccggtcaacaccgacggcagtatcaacctcgaggcctggctggaccacgtccagaacctcgtccccgggctcgatcgtcagggcttgctggaggcttgcgagttcgctcgcgaatccgagcagcgagcgatcgccgcacagaactcctgggcggaaggcacgtccagcttccagaccggactggaaatcgccgagatcctcgcggatctcaagctggatcaggagtccctggtcgccgcggtcatctatcgaggcgtgcgggaaggcaagatcaccctggaagcggtcaacaagcatttcgggccggtggtggccaagctgatcgagggcgtgctgcgcatggccgcgatcagcgccagcctcaatccgcgccattccatggtgctgggtacccaggcgcaggtggagaacctgcgcaagatgctggtggcgatggtcgacgacgttcgcgtcgccctgatcaagctggccgagcgcacctgcgccattcgcgcggtgaagaacgccgacgaggaaaagcgccaccgcgtcgcccgggaagtcttcgatatctacgcgccgctggcccaccgcctgggcatcgggcatatcaagtgggagctggaggacctgtccttccgttacctcgagcccgaccagtacaagcagatcgccaagctgctgcacgagcgccggctggatcgtgagcagtacatcgccaacgtgatgagccagttgaaggaagctctcgcggccaccggcgtacaggccgatctcagcggacgggcgaaacacatctattcgatctggcgcaagatgcagcgcaagggcctggacttcagccagatctacgacgttcgcgccgtgcgcgtgctcgttccggagatgcgcgactgctacaccgcgctgggcatcgtgcataccctctggcggcacattcccaaggagttcgacgactacatcgccaaccccaaggaaaacggctatcgctcgctgcataccgcagtgatcggccccgaggggaaggtgctggaagtacagatccgtacccactccatgcacgaagaggcggagctcggagtctgcgcgcactggcgctacaaggggaccgacgtcaaggccagctccaaccattacgaggaaaagatctcctggctgcgccaggtgctcgaatggcacgaggaactgggcgacatcggtggcctggcggagcaactgcgggtcgatatcgagccggacagggtctacgtcttcactcccgacggccatgccatcgacctgcccaagggcgcgaccccgctggatttcgcctatcgggtccacactgaagtcgggcacaactgccgcggggcgaagatcaacggacgcatcgtgccgctgaactacagcctgcagaccggcgagcaggtcgagatcataaccggcaagcacagcggtccgagccgcgactggctgaacagcaacctgggctacgtcaccacctcccgggcgcgggcgaagatcgtccactggttcaagctgcaggcgcgggaccagaacgtcgctgccggcaaggccctgatcgaacgcgagctgtcgcgcctggcgctgccgccggtggatttcgaccggctggcggagaaggccaacgtgcgtaccgccgaggatatgttcgccgctctcggcgccggcgacctgcgcttggcgcacctggtcaactatgcccagcaactggtcgagccggaccgcgacagcgagcaactcgaactgatcccgcgcaagccgagcaagatcggccacggcaagcgcggcgacgtgcagatccagggtgtcggcaacctcctgacgcagatggccggctgctgccagccgctgccgggagatcccatcgtcggctacatcacgctgggccgtggggtcaccatccaccgccaggattgcgccaccgcgctgcaactggcgggacgcgaaccggagcggatgatccaggtcagctgggggccggagccggttcgcacctatccggtggatatcgcgatccgtgcctatgatcgttccggcctgttgcgcgacgtgtcccaggtgctgctcaacgagcggatcaacgttctggcggtgaatacccgttcgaacaaggaagacaacaccgcgaccatgcaactgaccatcgagattcccggtctggacgctcttggacgcctgctggcgcgcgtctcgcaactgcccaacatcatcgaggcgcggcgcaaccgtacgccttga

SEQ ID NO: 7394 - DNA, 1383 bp, Pseudomonas aeruginosa
atgaccgctcagctcaacccgcagcgcgacacccgcgactaccagcaactggacgccgcgcaccacatccacgccttcctcgaccagaaggcgctgaaccgcgaaggcccgcgggtgatggtccgcggcgatggcctgcagctctgggacaacgacggcaagcgctacctggacggcatgtccggcctctggtgcaccaacctcggctacggccgccaggacctcgccgccgccgccagccgccagctggaacaactgccgtactacaacatgttcttccacaccacccacccggcggtggtggagctttccgagatgctcttcagcctgctgccggaccactacagccacgcgatctacaccaactccggctccgaggccaacgaggtgctgatccgtaccgtgcggcgctactggcagatcctcggcaagccgcagaagaagatcatgatcggccgctggaacggctaccacggctcgaccctgggcagcaccgcgctcggcgggatgaagttcatgcacgagatgggcggcatgctgccggacttcgcccacatcgacgaaccctactggtacgccaacggcggcgagctgagcccggccgagttcggtcgccgcgcggcgctgcaactggaggagaagatcctcgaactgggcgcggagaacgtcgccgccttcgtcgccgagcccttccagggcgccggcggcatgatcttcccgccgcaaagctattggccggagatccagcgcatctgccggcagtacgacgtgctgctgtgcgccgacgaagtgatcggcggcttcggccgcaccggcgaatggttcgcccacgaacacttcggcttccagccggacaccctgtccatcgccaagggcctgacgtccggctacatccccatgggcggcctggtactcggcaagcgcatcgccgaggtgctggtggagcagggcggggtgttcgcccacggcctgacctattccggccacccggtggcggcggcggtggccatcgccaacctcaaggcgctgcgcgacgagggcgtggtcacgcgggtcagggaggagaccggcccctacctgcaacgctgcctgcgcgaggtcttcggcgaccatccgctggtcggcgaggtccagggcgccggcttcgtcgccgcgctgcagttcgccgaggacaaggtgacccgcaagcgcttcgccaacgagaacgatctggcctggcgctgccgcaccatcggcttcgaggagggcgtgatcatccgctccaccctcggccgcatgatcatggccccggcgctggtggccgggcgtgccgagatcgacgaactgatcgacaagacccgtatcgcggtggatcgcaccgcgcgcgagatcggcgtgctctga

SEQ ID NO: 7395 - DNA, 603 bp, Pseudomonas aeruginosa
gtggccgcccacgcggccgggccggacaagcggcccctgactcgttatcatggcggcgttttccactggaccaccaccatggctgaatttcacgacgacgactcgcaattcgaagagaagagcaagtcgcagatcaaacgcgagctgcatgccctgcaggacctcggcgagcgcctgaccaccctgcaaccgcagttgctggagcgcctgccgctcaccgacccgctacgcaaggcgctgctcgaggcgccgaagcacaaggcgcacatcgcccgcaaacggcatatccagtacatcggcaaactgatgcgcgaccaggacgtggacgccatcgtcgccctcatcgaccaggtggactcctccacccgccagtacaacgaacgtttccatgccctcgaacgttggcgcgaccagttgatcgccggcggcgacgcagcgctcgacgccttcgtcggggagttccccgagtgcgatcgccagcacctgcgcggcctggtccgccacgcccagcacgaggccgcgcacaacaaaccgccggccgccgcacgcaaagtgttcaagtacatccgcgagctggacgaaaccaagcgcggcctgcgctag

SEQ ID NO: 7396 - DNA, 606 bp, Pseudomonas aeruginosa
atgaacaaacttctcgtgagtctgctgttgaccctgggtctgaccggccttgcccatgccgctggcgatgccgccgcgggccaggcgaaagccgcggtatgcggcgcctgtcacggtgcggatggcaacagcccggcgccgaacttcccgaaactggccggccagggcgagcgttacctgctcaagcagatgcatgacatcaaggacggcaagcgtaccgtgctggaaatgaccggcctgctgaccaacctcagcgaccaggacctggccgacatcgccgcctacttcgccagccagaagatgagcgtcggcatggccgatccgaacctggtggcccagggcgaagcgctgttccgcggcggcaagatcgccgaaggcatgccggcctgcaccggttgccattccccgagcggcgtcggcatcgcaaccgccggtttcccgcacctgggcggccagcacgcgacctacgtggccaagcagctgaccgacttccgcgaaggcacccgcaccaacgacggcgacaccaagatcatgcagtccatcgccgccaagctgtcgaacaaggacatcgccgcgatttccagctacatccagggtctgcactga

SEQ ID NO: 7397 - DNA, 2295 bp, Pseudomonas aeruginosa
atgacaaataatagtgcgccaccacttgtcgtgaccagaggaaatgataatggttacgagcctgggtcgatggttattacgcatgtacaggctagtgggctagacataatccagtacattccaggtcgctcaagctacggtactccaccatttgtcccgccaggaccaagcccgtatgttggccctggaatgcaagagtacaggaggctaagagatactcttgataagtccaattcagaactcaagaaaaacctgaagaataaaaccttgaaggaggtagatgaactcaagagtgaagcggggttgccagttaaagcggtcagtgccaatgacatccgcgatgaaaagagtatcgttgatgcactcatggatgccaaagcaaaatcgctaaaggccattgaggatcgcccggccaatctttatacggcttcagactttcctcagaagtcagaggcgatgtaccagaatcagttgctagccagtcgaaagttctatggagagttccttgatcgacatatgagtgagctggccaaagcgtacagcgctgatatctataaggcgcaaatcgctatcttgaaacaaacgtctcaagaactggagagtaaagcccggtcaatggaggcgcaagcccagcaggtcactcaacagctcggtgccgacttcaacgcgatcaccactccgaccgccaccaaggtccagcaacgtgtgaaagcagtggatgctagtctgtctcaggtttccacccaggtcagtggtgcagtcgcctcggcaacccaggcggtgcaggtcaagacagcgcaagcccagcaacaagccaacagccagatttcgtccagccagaacctgatcagcgcggcatttcggaatcagattgccttggcagcacaggccagtggagaagcccaggtcacggctttcaacacccaagtcaagcagatcgtcaacgaagccacggcgttttcgacagcacgaaaacaagcgctggctcagtttgctgccaatgcggccgccgaggtcgaaaccgaggtcaacaggctaaccgcccaggtcaaggcaagccccaccaaggcggcttcgcaagctgcacaagcaacccttcgacaattcactgaaagcacctatgccaaggtgaacacctatgcccagcagaccgaagcagagctgcaggccaaagccaaggaggtttcggcagcggtagccgaggcacagcgtgcggcgaccaacgatttgcaaaaaacagccgatgtagtaccaggtcagatcatccaggctgcgaacaccttggcgatgccggctacctctacgccgctggtttcggtggccgggtttggtagtgcggcagtggagacggctcgcctggcggcttccctaacgaatgctgtcaatcgcctggttcagattgctggtagtggacccggcgcatacgttgccaccttcgcggtgctgtcgctgtattccgaccaggctggtaaagacagtgacaaggttcctgccggcgttcgcaatgcattggcactggaggcgtccgctctggggcttcctggcacggctgatttgcaaagcgtcgccaaggcaggtggcacggttgatatgccggtacgactcacgagtgctgcacaagagagcccgagtggtaaatcgcagattgccgcgatgttgaccaacggtgcaactgtccccaagggcgtgcctgttcgcgccgcgaccctcaatgctgcgacgggccggtatgaggtgacggttcccgcaaagtccaccgtgccgaatacaccaccgctgatcttgacctggacccctgccacccctccaggaagccagaacccctcaagcaccactccggtcgtaccgcagccggttccggtgtatgagggagcaacgatcaccccagtacaggccgagccggagtcctatccgggagtgccgttagatctggacgatctgatcgtgatcttcccggtgggctcgggggttaagccaatctatataatgttcaatcataaccctcatgatgttgttattgatgataagatcagagagcaaattccaattagagggtggactgaggttgaagttagagatgttatcggaaaaggtgcaacaggtagttcttcagataagcgtcggcctaataagacgatagatgggctggggcggaatgactctgcaacagtatatggaagtcctcctaatggatatatagttgtgaacgataggacaggtgaaattattcaaattgcagatcggaacgattccgcatgggcggttgacgggcgaatcatctggagaaataagtaa

SEQ ID NO: 7398 - DNA, 289 bp, Pseudomonas aeruginosa
attgatgataagatcagagagcaaattccaattagagggtggactgaggttgaagttagagatgttatcggaaaaggtgcaacaggtagttcttcagataagcgtcggcctaataagacgatagatgggctggggcggaatgactctgcaacagtatatggaagtcctcctaatggatatatagttgtgaacgataggacaggtgaaattattcaaattgcagatcggaacgattccgcatgggcggttgacgggcgaatcatctggagaaataagtaatgatcaatcc

SEQ ID NO: 7399 - DNA, 858 bp, Pseudomonas aeruginosa
atggccacagtggaaatactcggggcggaatgccgcgcggggggcgcggtgaacgacgatgcgctgggctgcacggcgcaggccgcctgggtgatcgacggtgccaccagcatcggtcgcagcgtgctgggcgtggaaagcgacgcgcgctggctggcccaggcggtggaccggcacctgcggttgctgctggaagtcgagcccgagcaatccagcgagaccctgctgcggcgcctgctcaacgatatccagggcgacttccgcgcccagagcggccgcgactggcacgacctcgaagacatgccggcggcctgcctgagcctgctgcggattcgcggcggagaaatcgaactgctcaacatcggcgacagccggatcctcgtcgaaggcgccgacggccaggtacgcagcttcggcgattcggccctacacgaactggatcggcaatccctggcgcatttctgccggatgcgcgaggaacatccgcagtgggatcacgccgaactgttcaaggccagccgcccgcgcgtgcggcagaaccgcctgctgatgaacaagcccgagggctactgggcgctggacatcagcgaccgctggctcggccaggtgcagcgcgagaccttgccgctcgccgcgttgcgttccttcgtgctgatgaccgacggcttcgaccggctggtcgagcctttccgccgctataccgacgaacagttgctgcggcgcctcgaggacgtcggagtgagcgccatgctcgacgagttgcgcgagatcgaacagggcgacgaccaggccctggctttcccgcgtttcaagatccacgacgacgccagcgcgctgtggggtcggatcgcggggtga

SEQ ID NO: 7400 - DNA, 927 bp, Pseudomonas aeruginosa
atgatcgacatagacagactgagcaaacgcttttccggccggacggtggtaaacgacttgagcttccgcatcgaccggggagagatcgtcggtctcctcggccccaacggagcgggcaagtcgaccaccctgaagatgctttccggcttcctcgcgccgagcgccggcagcgtacgcatcttcggcttcgacatgcaggacaaggcgcgccaggcacagaagctgatcggctacctgccggagaacgctcccagctacggagaaatgacggtcgagggctttctcgccttcgtcgcgtccatccgcgactacagcggacgggaaaaacgtcggcgcatcgacagcgccatggactgcatggagctgcgggatgagcgcaggagcatcatcgaaaccctgtccaagggcttcaagcgccgcgtcgcgctggcccaggcgatcctccacgatcccgagctgctcctgctcgacgagcccaccgacggcctcgacccgaatcagaagcaccaggtccggcaactggtgaaaaacctctcggaaagcaagatcgtggtgatttccacgcacatcctcgaggaagtctcgttcatgtgcagccgcgccctggtgatcaacggcggccgcctgctggccgacaacaccccaggcgaactcaggacccgcagccgctaccaccatgccgtcagcctcagcatcgaagcaccggtagacccgctggccatcgccatgctccccggcgtcgccggtatcgaaggacgccccgaccgggccggcaccctgaccattctggcccgccccggcgcgcagatccttcccgcgctcaaccgcctgatccacggcagcggctggcgggtatccggggtgcgtaccgaacacggccaactggaagaagtgttccgccaactgacccgagaaccccccgcatga

SEQ ID NO: 7401 - DNA, 1443 bp, Pseudomonas aeruginosa
atgaccgtgaacgcgagtattttttggtacgactacgaaaccaccggcatcgaccctcgccgcgaccggccgttgcagatcgccgggatccgcacggacgaggcgctgaacgagatcggcgagccgatgaacctgtattgccgtcccagcgacgatatcctgccccaccctatggcttgcctgatcaccggcatcactccccagcggctggccgagcgggggctgtccgaggccgacttcatgacccgggtacacgcccagctggcgcagccggcgacctgcgtggccggctacaactccctgcgcttcgacgacgaagtgacgcgctacagcctgtaccgcaacttcttcgatccctacgcccgcgagtggcaaggcggcaatagccgctgggacctgatcgacatggtccgtaccgcctatgccctgcgcccggagggcatccagtggccgcagctggacggccggctgtcgctgaagctggaaatgctcaccgcggcgaacggcctggagcatgggcaggcccacgacgcgctttccgatgtccgcgccaccattgccctggcccgcctgatccgtcagcgccagccgcgcctgtacgattacctctaccagttgcgcagcaagcacaaggtgctcgaccaggtgcgcctgctgcagccgctggtgcatgtctccggacgcttttccgcggagcgccatttcctctcggtggtcctgccgctggcctggcacccgcgcaaccgcaatgctctgatcgtctgcgacctctgcgccgatcccgcgccgctgctggagttgtcggccgaagacttgcgcaggcgcctgtatacccgtcgcgacgaactggccgagggcgagttgccggtgccgctgaagcagatccaggtcaaccgttgcccggtggtggcgccgctgtcggtattgcgcgccgaggatcgccagcgaaccggcatcgaactcgatgagtgccagcaaaaagccgagctgttgcgccagcatcaaaccgtctgggcggacaaactgacagcgctatatggcgaagaaagtttctccgccagcgacgaccccgagcaacagttgtatgacggatttattggcgatcgggatcgacgcctttgtgaacagctgcgccttgccgaaccggagcaattggccaaagaacaatggcccttcgacgatgcccgtttgcaggagttgttctttcgctatcgtgcgcgaaatttcccggaaactttaaatgtggccgagcgccaacaatgggaaagcttctgccgcaatcgtttgtcccatgaagaatacggcgcaccgaatactttgccggccttcgaggcggcgctggaggcttgtcggcaagagcagggcggcacactgccggcggtacttgcggcctggcgcgattacgccgcggaactgcgtcaacgctattcgctggagacttga

SEQ ID NO: 7402 - DNA, 1047 bp, Pseudomonas aeruginosa
atgagcacaataccagaccgatatgaatttgataaaaaaattgatggcggcatgggtacaatcttcgtctgcaatgatagaattttagaaagaaaagtagctataaaatttattcaagctcatgaagagaatcgacgcatccttgatgaactcaatgctttaatgaaggtacgatccaagcacgtagtccaggtttacgacgtcatagaagacaacgaacgcgggcttggcatcgtacaagaatatatctacggcaatgacttatcaaattactcccccccgctaaatacactcgatttttacttaaaaatctggcaaatcgcctcaggaatatcagacatacatgctgtaaacataattcatagagatatcaaaccaaacaacatgatgctagaccatgaaagcatcattaaaatatttgactttggcttagcaagacacacacaagaaaatgcatccacaattggatttgtcggcacccatggattctcagctccagagctgtataccgacgcacctcatttcaccactgctattgatgtttatgcattcggcgttaccgcactatttttagcaaatggcaccttaccttcagaagtactctatgcttatggcaagccagtacctaataatctttttacctccctgccaatagcaaatgaaattgcaagcctgcttcagagttcgttagtagcactaccagaagaccgccccccaatatggtcaatcaaagagacacttgagaagcacatattagaaaacagacatcaagcgctaataacacacaaaggaaatccaacctacttaaacaaagatcggaaaaaaataacactttcggtagatagagttggagttgtcgacgtccagtataacggcttagatttcattataaccagggcagagggagaagtcttcattaataacgctcccattttagttaattcaaaaatacccactagttgcgtcttggcaatcggcaattcacaaagaagtaatcaggagcgctcctttattacgttcgacctatctcatccggagataaactta

SEQ ID NO: 7403 - DNA, 753 bp, Pseudomonas aeruginosa
atgaccgtctatttcatcggcgccggtcccggcgaccctgacctgatcaccgtcaaggggcagcgcctgatccgccagtgcccggtgatcctctacgccggctcgctggttccgcaagcgctgctcgaggggcaccaggccggccaggtggtgaacaccgccgagctggacctcgaacagatcgtcgagctactcgcgcaagcccatcgccgcggcctcgacgtagcccgcgtgcattccggcgatccctccctgtacggcgccatcggcgagcagatccgccacctgcgcgaactcggcatcccctatgagatcgtccccggggtcaccgccaccgccgcctgcgccgccctgctcggctgcgagctgaccctgcccgaagtgtcccagacgctgatcctgacccgctacgccgcacgcacgaagatgccggaaggcgagagcctgggcgacctggcgcggcaccgggcgaccctggcgatccacctgggcgtcgcccacctggcgaagatcgtcgaggaactgctgccgcactacggcgccgactgcccggtcgcggtgatccaccgggccagttggcccgaccaggaacaggttcgcggcaccctcggcgacatcctgcccaaggtcgccgccaggaatttccgccgcaccgcgctgatcctggtcggcgaggtgctggccgccgaaggcttcgccgactcttcgctgtaccgcgccgagcatcgacatctctatcgacccggcgaatga

SEQ ID NO: 7404 - DNA, 948 bp, Pseudomonas aeruginosa
atgaaacgattcctcctcggtctggttctgctgctggcggtcgccgccggcgtcctctacttcgtcccggctaccctcctcgccagcgtacgcaccgtcgagcgcggtctcgccggtctcagcgagcacagcgtgcaggtcgacaacctggagatcgcctacctggaaggtggctcggagaagaacccgaccctgttgctgatccacggcttcggcgccgacaaggacaactggctgcgcttcgcccggccgctgaccgagcgctaccatgtggtcgccctcgacctgcccggcttcggcgacagcagcaagccgcaacaggccagctacgacgtcggcacccaggccgagcgagtcgccaatttcgccgccgccatcggcgtgcgccgcctgcacctggccggcaactccatgggcgggcacatcgccgcgctctacgcggcgcgccatccggaacaggtgctatcgctggcgctgatcgacaacgccggggtgatgccggcgcgcaagagcgaactgttcgaggacctggagcgcggcgagaatcccctggtggtgcgccagccggaagacttccagaagctgctcgacttcgtgttcgtccagcaaccgccgctgccggcgccgctcaagcgctacctcggcgagcgcgcggtagccgcgtcggcgttcaacgcgcagatattcgaacaactgcgccagcgctacatcccgctggagccggaactgccgaagatcgaggcaccgaccctgctgctgtggggcgaccgcgaccgcgtgctggacgtctccagcatcgaggtgatgcgtccgctgctgaagcggcccagcgtggtgatcatggaaaactgcggacacgtgccgatggtcgaacgcccggaggaaaccgcgcagcactaccaggccttcctcgacggcgtacggaacgcccaggtggccggtcgctga

SEQ ID NO: 7405 - DNA, 1272 bp, Pseudomonas aeruginosa
atgaccatcagtatccgaggcgcccgcgtcatcgacccggccagtgacctggaccaggtcggcgacctccacatcgaggctggcaagatcgtcgccatcggcgccgcgccggccggcttcagcgcccagaagaccctcgacggcgccggcctggtggccgcgccgggactggtcgatctgagcgtcgccctgcgcgagccgggctatggacgcaagggcaacgtcgaaagcgagacccgcgccgccgcggccggcggcaccaccagcctgtgctgcccgccctacacccggccggtgctggacaccccggcggtggccgagctgatcctcgaccgcgcccgcgaggccggcaacgccaaggtctaccccatcggcgcgctgacccgcggcttcggcggcgagcaactgtcggaactggtggccctgcgcgacaccggttgcgtggccttcaccaatggcctgcatggcttcgccagcaaccgcatcctgcggcgcgccctggagtacgcggcgaccttcgacctgacggtgatcttcacctcgcaggacaccgatctcgccgaaggcggcctcgcccacgaaggcccgaccgccagcttcctcggcctcgcggggatcccggagaccgccgagaccgtggccctggcccgcaacctgctgctggtggaacagagcggcgtgcgcgcgcacttcagccagttgaccagcgcccgcggcatcgaactcgtcgcccaggcccaggcccgtggcctgccggtgacctgcgacgtggcgctgtaccagttgatcctcaccgacgaagcgctggtgggcttctccagcctctaccacgtgcaaccgccgctgcgcaccagggccgaccgcgaagccctgcgcgaggcggtgaagaacggcgtggtacaagccatcgccagccaccaccaaccccacgaggcggacgccaagaacgcgccgttcgccgccaccgagccgggcatcagcggcgccgagctgctgctgccgctggcgatgacgctggtgcaggacggcctgctcgacctgccgaccctgctcgcccgcctctcccacggcccggcccaggcactacgcctgcctgccgggcgcctggcggtgggccaggccgccgacctggtgctgttcgacccgcagggttcgaccctggccggtgagagctggtactcgaaggggcagaacagcccgttcgtcggtcactgcctgccgggacgagtgcgctacaccctggtggacggacacctgacccacgagggctga

SEQ ID NO: 7406 - DNA, 414 bp, Pseudomonas aeruginosa
atgctgcaacccaagcgtacgaagttccgcaaacaaatgaccggccacaaccgtggtctggctcatcgtggtagtaaggtcagcttcggtgagtacgcactgaaggccactagccgtggccgccttactgctcgtcagatcgagtccgcgcgtcgtgcgctgacccgtcacgtgaagcgtggcggcaagatctggatccgcgtattccctgacaagcctgtcaccaagaagcccctcgaagttcgtatgggtaaaggtaagggtggggtcgagtactgggtagcccagatccagccgggcaaggtcctgtacgagatcgagggtgtttccgaagagctggcgcgtgaggctttcgccctggctgctgcaaagctgcccctcgccacctcctttgttaagcggacggtgatgtga

SEQ ID NO: 7407 - DNA, 1203 bp, Pseudomonas aeruginosa
atggcttggaacgagccgggtgacaactcgaacaacaacgatcgagacccgtggggaggccgccgcggtggtggtggcggcggtggtgaccgcaaggggccgcccgacctggatgaggctttccgcaagcttcaggacagcctgaacgggctgttcggtggaaaaaaacgcagtggcaacggttccggctccggttccggcggcaagggcggtggcctgggcctgttcggcatcggcctggcgatcctcgccgtgctctggctgtacaacgccatctatgtggtggacgagcaggagcaggcggtcatcctgcgcttcggcaagtattacgagacggtcggtcccggcctgaacttctacttcccgccgatcgacaagcgcttccaggagaacgtcacccgcgagcgtgcgtacagcaagcaggggcagatgctcaccgaggacgagaacatcgtcgaagtgccgctgaccgtgcagtacaagatcagcaacctgcaggacttcgtgctcaacgtcgaccagcccgaggtcagcctgcagcaggcgaccgagagcgcgctgcggcatgtcgccggctccaccaccatggaccggatcctcaccgaaggccgcgagcagatggcgaccgaggtgcgcgagcgcctgcaacgcttcctggatacctacaggaccggtatcaccgtgacccaggtgaacatccagagcgcccaggcaccgcgtgaggtgcaggaagcgttcgacgacgtgatccgggcccgcgaggacgagcagcgcgagaagaaccaggccgaagcctatgccaacggcgtggtgccggaggcacgtggccaggcccagcgcatcatcgaagaagccaacggttaccgcgacgaggtgatttcgcgcgcccagggcgaggcggatcgcttctccaagctgctggtggaatatcgcaaggctccggaagtgacgcgcgagcgtctgtacctggacaccatgcaggaagtcttcagccagaccagcaaggtgctggtgaccggtcagcaggggcagaacaacctgctctacctgccgctggacaagatgatcgatggtcgtaacgccgcgcccgctacgggggccggtgcttccgccggtggtggcagcgccagcgcttccgacctggggtcgcggatcgtcaacgatctgcgccagcaagacgcgcgtacgagggagagccgctga

SEQ ID NO: 7408 - DNA, 2742 bp, Pseudomonas aeruginosa
atgagccaagcgcccctcgtcctggtggacggttcctcgtacctgtaccgcgccttccatgccctgccgccgctgaccacctcgaccggcaagcccaccggtgcggtgaagggcgtgctgaacatgctcctgagcctgcgcaagcagtacccggacagcccgttcgcggtggtcttcgacgccaagggcccgaccttccgcgacgagctgttcgccgagtacaaggccaaccggccgtcgatgcccgacgacctgcgggtccaggtcgagccgctgcatgccagcgtccgcgccctcggcctgccgctgctgtgcgtggagggggtcgaggccgacgacgtgatcggcaccctggcgcgcagcagcgccgcggctgaccgcccggtggtgatttccaccggcgacaaggacatggcgcaactggtcgacgggcacattacgctggtcaacaccatgaccggtagccgcctcgacgtggatggcgtgaaagagaaattcggcgtcggtcctgagctgatcatcgatttcctcgccctgatgggcgacaaggtcgacaacatccccggcgttccgggtgtcggcgagaaaaccgcgctgggcctgctgaccggtgtcggtggcggcctggaggtgctctacgccagcctggacaaggtgcccgagctaccgatccgcggcgccaagggcttgccggcgaagctcgaggaaaatcgcgagcaggcgttcctgtcctatcaactggcgaccatcaagaccgacgtcgaactggacgtggagatcgacaagctgtatcccggcgagccgcagcgcgaagcgctgatcgccctgtaccgcgagctggagttcaagaactggctggacgacctcctgcgcgaggccaaggaggccggcgagaacggcgaggcggaaacgcctatccaggccgaggtcgactacgacgtggtgctcgaccaggccggattcgacgcctggctgaagaagctggaggaggccgagctgatcgccttcgataccgagaccaccagcatcgacgcccagcaggcgcaggtggtgggggtgtccttcgccgtgaaggagggcgaggccgcctacgtgccgctggcccacagctacatgggcgttccggagcaactggatcgtgacgcggtgctgcgtgcgttgaaaccgctgctggaggatccgaagaagctcaaggtcggccagcatgccaagtacgacatcaatgtcctggccaatgccagcacccccatcgcgctgcggggcgtagcctacgacaccatgctcgagtcctatgtgctggactccaccgccactcgccacgacatggacagcctggccctgaagtacctcggccacagcaccatccgtttcgaggacatcgccggcaagggcgccaagcaactgaccttcgaccagatcgccatcgaacaggccgggccctatgcggcggaggacgccgacgtgaccctgcgcctgcaccaggccctgtggcagaagctggaggcgatcccgtccctggccagggtcctgaccgacatcgagatgccgctggtaccggtgctggcgcggatcgagcgcaacggcgcgctggtcgacgccaacctgctgggcatccagagccgcgaactgggcgagaagatggtcgccctggagcgccaggcatacgacctggcagggcaggaattcaacctcggctcgcccaagcagctcggcgcgatcctctacgacaagctcggcctgccggttctgagcaagaccgcgaccggccagccgtccaccgccgaggcagtgctcgccgaactggccgagcaggacttcgagctgcccaaggtgatcatgcagtaccgctccatgagcaagctcaagagcacctacaccgaccgcctgcccgagcagatcaacccgcgtaccggacgcatccatacctcataccaccaggcggtggcggctaccgggcggctgtcgtcgagcgacccgaacctgcagaacatcccgatccgtaccgcggagggccggcgcatccgccaggcgttcgtcgcgccgcagggctacaagctattggccgcggactactcgcagatcgagctgcggatcatggcccacctggccaaggacgatggcctgctggatgccttccgccacgacctggacgtacaccgcgccaccgcggcggaagtcttcggcgtgccgctggaagacgtcagcggcgaccagcgacgcagcgccaaggcgatcaacttcggattgatctacggcatgagcgccttcggcctggccaagcagatcggcgtcgagcgcaaggaggcccaggcctacatcgaccgttacttcgcccgctaccccggcgtcctggcgtacatggagcggacccgcgcccaggccgcggagcagggcttcgtcgaaaccctgttcggccgtcgcctgtacctgccggagatccattcgaagaacggtgccatgcgcaaggccgccgagcgcaccgcgatcaacgcgccgatgcagggcaccgcggcggacatcatgaagcgcgccatggtcgctgtggataactggctgcaggaaagcggcctcgatgcccgggtgatcctccaggtgcacgacgaactggtgctggaagtgcgcgaggacctggtcgagcaggtgtgcgagggaatccgcccgctgatgagcggagcggcgaccctggacgtaccgctggtggtcgaggcgggtgtcggttcgaactgggacgaagcccactga

SEQ ID NO: 7409 - DNA, 585 bp, Pseudomonas aeruginosa
atgaaaaccagctacgacgacacccgccagcatctgctcgataccggataccggatcatggcggtcaaaggcttctccggagtcggcctcaacgaaatcctgcagagcgcgggcgttcccaagggctcgttctaccattacttcaaatccaaggaacagttcggccaggccctgctggaggactacttccgcgtctacctggcggacatggaccaacgcttctccgcgccagggctgaatgcccgcgaacgactgatgagctactggcagaagtggctggacaacgcctgcccgccctgcgacgagcagcgctgcctggtggtcaagctcagcgccgaggtcgcggacctttcggaaagcatgcgcatcaccctgcgcgacggctccgacgggatcatcgaacgcctggtcggctgcctcgggcagggccgcgacgacggctccctcgcgccctgcgatgcccggcacatggccagcgcgctgtaccagttgtggctcggcgcgagcctgctgagcaagctgcaccgcagcccgggaccgctggaaacagccatgcagaccacccgcagcctgctggaaatctga

SEQ ID NO: 7410 - DNA, 798 bp, Pseudomonas aeruginosa
atgacccatcgcctgcacgcggacgccgtgaccttgcgccgcgacgcgcggaccgtttcgcggaatctctcgctggccatccccgagggttcgttcagtgtgatcgtcgggcccaacgcctgcggcaagtcgaccctgctggcggcattgtcgcgcctgttggcgccggccgagggccgggtggtgctggacggcagggatatccacagcctgccgggacgggaagtggcgcggcgtctcggcctgctgccgcagagcgcgctggcgccggatggcatcacggtggccgagctggtggcgcgcgggcgctatccgcaccagtcgttcctgcgccagtggtcgccggcggatgagcgcgcggtagcggcggcgttacgcgccacgcgggtcgacggcctggccgagcgaccgctcgatgcgctctccggcggccagcggcaacgcgtgtggatcgccatggtgctggcgcaggaaaccccgttgctgctgctcgacgagccaaccacctacctggatatcgtccaccagatcgaattgctcgaactgctcgccgagctgaatcgccaggggcgcaccatcgtcgccgtgctgcacgacctcaaccaggcctgccgctatgcctcgcacctgatcgccatgcgtgacggcgcgatcctcgccgagggcgcgccggcgcatatcttcaccgagcgtctggtggaggaggtgttcggcttgcgctcgttgatcatcgccgacccggtcagcggcacgccgctgctggtgccgcgcgggatcgccgccgacgcgccgggctga

SEQ ID NO: 7411 - DNA, 1200 bp, Pseudomonas aeruginosa
atgctgtcggtgttgcgccccttcccgtcgccgctgttgagccggcacggcatcgacctggacttcccgctgctggcgggttgcctggcgctgctcggcctcggcctggtgatggtgacttccgcctcttccgaggtggcggcggcgcagtcgggcaacccgctgtacttctccgtccgtcacctgatctacctggtgatcggcctgatttcctgcggcctgaccatgatggtcccgatggccacctggcagcgctggggctggaagctgttgctggtcgccttcggcctgctggtgctggtgatcacccccggtatcggccgcgaggtgaacggctcgatgcgctggatcggcttcggcctgttcaacatccagccttcggagatcgccaaggtctgcgtggtgatcttcatggccggctacctgatccgccgccagcaggaggtccgggaaagctggatgggcttcttcaagcccttcgtggtgttgctgccgatggccggcctgctgctgcgcgagccggacttcggcgccaccgtggtaatgatgggcgctgccgcggccatgctgttcctcggcggggtggggctgttccgcttcggcctgatggtgctgctggcggtcggcgcggtggtcctgctgatccagacccagccctaccggatggcacgcctgaccaacttcaccgacccctgggccgaccagttcggcgccggctatcagttgagccaggcgctgatcgccttcggccgcggcggctggttgggcatgggactgggcaacagcatccagaagcagttctacctgccggaggcgcacaccgacttcgtcttcgccgtgcttgcagaggagctgggcatcgtcggcgccctggcgaccgtcgccctgttcgtgttcgtcagcctgcgcgcgctgtacatcggcatctgggccgagcaggccaagcagttcttctccgcctacgtggcctacggcctggccttcctctggatcggccagttcctgatcaacatcggggtgaacgtcggcctgctgccgaccaagggcctgaccctgccgttcctcagctacggcggcagttcgctggtgatctgctgtgcctgtctggggatgttgctgcgcatcgaatgggaacggcgaacccacctgggtagcgaggaatatgagttcaacgaagaggactttgccgatgaaaggtaa

SEQ ID NO: 7412 - DNA, 1347 bp, Pseudomonas aeruginosa
atgacccttacctccattggtccggccaaccgcatggcgcgttcggcggaaacccatccgctgacctggcgcctgcgcgaagacgcccagcccgtctggctcgaggaatatcagagcaaggacggctatgccgcggcgcgcaaggcgctgacccagatggcccaggacgacatcgtccagaccgtcaaggactccggcctcaagggccgcggcggcgcgggcttccccaccggagtgaagtggggcctgatgccgaaggacgagtcgctgaacatccgctacctgctgtgcaacgcggacgagatggagccgaacacctggaaggaccgcatgctcatggagcagctgccgcacctgctggtggaaggcatgctgatttccgcgcgcgcgctgaaggcctaccgcggctacatcttcctgcgcggcgaatacgtcgacgcggcgcgcaacctcaaccgcgccatcgacgaagccaaggccgccggcctgctcggcaagaacatcctcggcagcggcttcgatttcgagctgttcgtccacaccggtgccggccgctacatctgcggcgaagagaccgcgctgatcaactcgctggaaggccgccgcgccaacccgcgttccaaaccgcccttccctgccgccgtcggcgtctggggcaagccgacctgcgtgaacaacgtggagacgctgtgcaacgtgccggccatcgtcggcaacggcgtggactggtacaagaccctggcccgccccggcagcgaagacatgggcaccaagctgatgggcttctccggcaaggtgaagaaccccggcctgtgggaactgccgttcggcgtcagcgcccgcgagctgttcgaggactacgccggcggcatgcgcgacggcttccagctcaaggcctggcagcccggcggcgccggtaccggcttcctgctcccggagcacctggatgcgcagatgttcgccggcggcatcgccaaggtcggcacccggatgggcaccggcctggccatggcggtggacgacagcatcaacatggtttccctgctgcgcaacatggaagagttcttcgcccgcgagtcctgcggctggtgcaccccctgccgcgatggcctgccgtggagcgtgaagctgctgcgtgccctggagcggggcgaaggccagcccggcgacctcgagaccctcgagcagctggtcaacttcctcggcccaggcaagaccttctgcgcccacgcgccgggagccgtcgagccgctgggcagcgccctcaagtatttccgtgccgaattcgaggcgggcatctcccgccagccttcggccgcgccgcgcccggcaacggtcggcgcctga

SEQ ID NO: 7413 - DNA, 897 bp, Pseudomonas aeruginosa
gtggccctgcaggtcgccagtgcgccccacggcagcagcgaggacagcacctcggcgagcctgccggcgaactatccctatcacacgcggatgcgccgcaacgagtacgagaaggccaagcacgacctgcagatcgaactgctcaaggtgcagagctgggtgaaggagaccggccagcgcgtggtggtcctgttcgaaggccgcgacgccgccggcaagggcggcaccatcaagcgcttcatggaacacctgaacccgcgcggcgcgcggatcgtagccttggagaaaccgtcctcccaggagcagggccagtggtatttccagcgctacatccaacatctgcccaccgccggcgagatggtcttcttcgaccgctcctggtacaaccgcgccggcgtcgagcgggtcatgggcttctgttcgccgctgcaatacctggagttcatgcgccaggcgccggagctggagcgcatgctcaccaacagcggcatcctgctgttcaagtactggttctcggtgagccgcgaggaacaactgcggcgcttcatctcgcgccgcgacgatccgctcaagcactggaagctgtcgcccatcgacatcaagtctctggacaagtgggacgactacaccgccgccaagcaggcgatgttcttccataccgacaccgccgacgcgccgtggacggtcatcaagtccgacgacaagaagcgcgcgcgactcaactgcatccgccacttcctgcactcgctggactacccggacaaggaccggcgcatcgcccatgagcccgacccgttgctggtggggccggcctcgcgggtgatcgaggaggacgagaaggtctacgccgaggcggccgccgcgccgggccacgcgaacctggatatcccggcctga

SEQ ID NO: 7414 - DNA, 1275 bp, Pseudomonas aeruginosa
gtgagtgaatatatcgagaccgacgacgcaagttacttccgggtcaggcgccaggcctatgtttccgcggaactgcaccggcgcgaactgcacgagatattcgacgacagctggctgtatgccgcccacctcagcgaactgcgcgagcccggcgacttcatcacccgcgacgtcggcgggcgcaacctgatcatccagcgtcgcgccgatggcgagccggcggtctacctgaacgcctgcgcgcaccgtggggccaaggtctgcgccgagcgccagggcaacagccagcgtttcacctgtccctaccatggctggacctacgacagccacggcagcctgatcggcctgccggacaaggccgcctaccagcatgccgggcaatgccatccggagctgtccctgacacaggtgaaacacgcggtctaccgcaacttcctgttcatccactacggcgcccggcaagcgtccctggaaacctacctgggccaggcgaaggactatatcgacctgatctgcgaccagtccgaggcggaactggagatcatccccggcggcttcgagcattcgatcaaggccaactggaagctgctcgcggaaaacggcgtggacgcctaccacctgccgttcgcccacaagcgctacctggaatacctgaataccctcggcaccgatccggagtcgcacaagcgccatggccgcggcgaagcgctgggcaacggccacgcgctgatcatcagcggcccgccgtccaccggacggccgatcgcctactggagtccgttgttcccggaagcgctcaagccgtccatcgccgccaagttcgaacgcctggtggaacgcttcgggcaggcgcgggcagaggacatcgcccacaccaacaaaagcctgttcatctttcccaacctggtgatcaacgacatcctcggcctgaacatccgctcgttcttcccgaccgccgccgatgaggtcagcgtcaccgtatggggcgccggcttcgccgatgagacccgcgaggagcgggcggcgcggatcaatgggttgatctcgttcatcggcccgggcggtttcggcacccccgacgacgtcgagatcctcgaatcctgtcagcgcgcctacgcccacgccgccctcggctacagcgatttttcccgcggcatgggaccggcaacccgccgccacgtcgacgaggagcagaaccgcggcttctggcgcgagtggagccgccggctcgggcagcagcccgccgccctgcggcgtctcgccgtggccgtctga

SEQ ID NO: 7415 - DNA, 924 bp, Pseudomonas aeruginosa
atgggcaaagtcgctctggctgccaagatcacccacgtaccctcgctgtacctgtccgagctgcccggcccgcgccacggctgccgccagccggcgatcgacgggcaccgcgagatcggccggcgctgccgcgaactgggggtcgacaccatcgtggtgttcgacacccactggctggtcaacgccggctaccacatcaactgcgcgccgcacttcgaggggctctacaccagcaacgagttgccgcacttcatcgccaacatggagtacggcttccccggcaacccggagctgggccgcatcctcgccgagggctgcaacgcgctcggcgtggagaccctggcccacgacgccaccaccctcggcccggagtacggcaccctggtaccgatgcgctacatgaaccaggaccgccacttcaaggtggtctcggtctccgccctgtgcaccgtgcattacctgaacgacagcgcgcgcctgggctgggccatgcgcaaggcggtggaagagcactacgacggcacggtggcgttcctcgccagcggctcgctgtcccaccgcttcgcccagaacggccaggcgccggacttctccgaccgcatctggagcccgttcctcgaggttctcgatcatgaagtcgtgcagatgtggcaggagggccgctgggccgagttctgcgggatgctccccgagtacgcctccaagggccatggcgaaggcttcatgcacgacaccgcgatgctcctcggcgccctcggctggtcggcctacgacggcaaggcggaggtcgtgacgccctacttcggctcctccggcaccgggcagatcaacgcggtattcccggtcaccgcccaggacggctcggcgatccccgccgcccaggccggcaacccggccggcgccagttgcgccagccgcctctga

SEQ ID NO: 7416 - DNA, 393 bp, Pseudomonas aeruginosa
atgccgcacttcatcgccgaatacaccgacaacatcgaagccgaagccgacctgcccggcctgttcgagaaggtccacgcctgcctcggcgccagcggcgttttcccgctcggcggcatccgcagccgcggcgtgcgcctggacacctggcgcatggccgacggcaggcacgactacgccttcgtccacatgaccctgaaagtcggcgccggtcgcgacctggagactcgccggcaagtcgccgaggcacttttcgaggtgatcaccgcgcacttcgccgagctccaggcgcgacgcctgctggcgctgtccttcgaactcaccgaactggacgcggagctgaactacaagcgcaacaacgtgcatgaattcctgaacaacccggcggactga

SEQ ID NO: 7417 - DNA, 195 bp, Pseudomonas aeruginosa
atgccaaagatgaagaccaaaagtggcgcggccaagcgcttcaagaagactgctggtggcctcaagcacaagcacgccttcaagagccacatcctgaccaagatgaccaccaagcgtaagcgtcaactgcgcggcacctcgatgctgaacaagtctgacgttgcgcgcgtagaacgctccctgcgtctgcgctga

SEQ ID NO: 7418 - DNA, 357 bp, Pseudomonas aeruginosa
atggctcgtgttaagcgtggcgttatcgcccgtcgtcgtcacaagaaaattctgaagctcgccaagggctactacggtgcacgctcgcgcgtgttccgcgttgccaagcaggcggtgatcaaggctggccaatacgcctaccgtgaccgtcgtcagcgcaagcgtcagttccgcgcactgtggatcgcccgtatcaacgctggtgctcgtcagaacggtctgtcctacagccgtctgatcgctggcctgaaaaaggcggccatcgagatcgaccgtaaggtcctggccgatctggcagtgaacgaaaaagcggcgtttaccgcgattgtcgagaaagcgaaggcaagcttggcttaa

SEQ ID NO: 7419 - DNA, 480 bp, Pseudomonas aeruginosa
atgataactattttttttgaaactggtgaagagctggatttgcctttggataattttgctaagtcaaacttaagtgggctagagctgcatcgggcaatttttgatggtttagatctttcagaggctgattttactgcctcaaatttgaggaacgcttcttttaatcatgctctgttgggtggtgctgtaatgaatagtgcagcgcttatgaatgcaagttttgttgatgctataatgaaaggtgtaaaacttgtggatgctatggcggcttatgctgatttttcaggggcagatctttccatggctagtctaaaaaatgctgatataggcggttctaatttcataaattccaatttgcgagatgttaatattgatgtagcgaggatagatggcgctgtttttcggggtgccatatataatgatagaacgatttggcctaaaggatttattccggaaaattttggtgcgattaaaggctga

SEQ ID NO: 7420 - DNA, 501 bp, Pseudomonas aeruginosa
atgagccagagcaacctgattcagaccgaccgtttcgtcctcagcgaaaccgagcgctcgtccatcgagcatgaaatgcatcactacgaggacccgcgcgcggcgtccatcgaagccctgaagatcgtccagaaacagcgcggctgggtgccggacggcgccatcccggcgatcggcgaggtgctggggatcccggccagcgacgtcgaaggcgtcgccaccttctatagtcagatattccgccagccggtgggccgccacatcatccgcgtctgcgacagcatggtctgctacatcggcggccacgagtcggtggtcggcgagatccagaagcaactcggcatcggtctcggccagactaccgccgacggacgcttcaccctgctcccggtctgctgcctgggcaactgcgacaaggccccggcgctgatgatcgacgacgacacccatggcgacgtgcgtcccgacggtgtcgccaaactgctggaggcctacgtatga

SEQ ID NO: 7421 - DNA, 1998 bp, Pseudomonas aeruginosa
atgcccagccgtcgtgagcgagccaatgccatccgtgcactgagcatggatgccgtgcagaaagccaacagcggccacccgggcgccccgatgggcatggccgatatcgccgaggtcctctggcgcgactacatgcagcacaacccgagcaacccgcagtgggccaaccgcgaccgcttcgtgctgtccaacggccacggctcgatgctgatctactccctgctgcacctcaccgggtacgacctcggcatcgaggacctgaagaacttccgccagctcaactcgcgcaccccgggccacccggagtacggctacaccgccggcgtcgagaccaccaccggtccgctcggccagggcatcgccaatgcggtgggcatggcgctggcggagaaggtcctggccgcccagttcaaccgcgacggccacgcggtggtcgaccactacacctacgccttcctcggcgacggctgcatgatggaaggcatttcccatgaggtcgcctcgctggccggcaccctgcgcctgaacaagctgatcgccttctacgacgacaacggcatttccatcgacggcgaggtccacggctggttcaccgacgacaccccgaagcgcttcgaggcctatggctggcaagtgatccgcaacgtcgacgggcatgacgccgacgagatcaagaccgccatcgataccgcgcgcaagagcgaccagccgaccctgatctgctgcaagaccgtgatcggtttcggctcgccgaacaagcagggcaaggaagagtgccacggcgcgccgctgggcgccgacgagatcgccgcgacccgcgccgcgctgggctgggagcacgctccgttcgagatcccggcgcagatctacgccgagtgggacgccaaggaaaccggcgccgcccaggaagccgagtggaacaagcgtttcgccgcctaccaggctgcccatccggaactggccgccgaattgctgcgccgcctgaagggcgagctgccggccgacttcgccgagaaggccgcggcctacgtcgccgatgttgccaacaagggtgagaccatcgccagccgcaaggccagccagaacgcgctgaacgccttcggcccgctgctgccggagctgctcggcggttccgccgacctggccggctccaacctgaccttgtggaagggctgcaagggcgtcagcgccgacgacgccgccggcaactacgtgttctacggcgtgcgcgaattcggcatgagcgcgatcatgaatggcgtcgccctgcacggcggtttcattccctacggtgcgaccttcctgatcttcatggaatacgcgcgcaacgccgtgcgcatgtccgcactgatgaagcagcgcgtgctctacgtgttcacccacgactccatcggcctcggcgaggacggcccgacccaccagccgatcgaacaactggccagcctgcgcctgaccccgaacctggacacctggcgcccggccgacgcggtcgagtcggcggtggcctggaagcatgccatcgagcgcgccgacggtccgtccgcgctgatcttctcccgccagaacctgccgcaccaggcgcgcgacgtcgcccaggtggccgacatcgcccgcggcggctacgtgctgaaggactgcgaaggcgagccggaactgatcctgatcgccaccggttcggaagtcggcctggccgtgcaggcctacgacaagctcagcgagcagggccgcaaggtccgcgtggtatcgatgccatgcaccagcgtctacgagcagcaggacgagtcctacaagcagtccgtgctgccggtggaagtcggcgcgcgcatcgccatcgaggccgcccatgccgactactggtacaagtacgtcggtctcgacgggcgcatcatcggcatgaccagcttcggcgagtcggcgccggccccggcgctgttcgagcacttcggcttcaccctggacaacgtcctggcggtggccgaggagctgctggaagactga

SEQ ID NO: 7422 - DNA, 522 bp, Pseudomonas aeruginosa
atgtggtttcttgggaagatggggttcacgtacggctcctcgcattatcgctacgaaggttttgaaggtaaggttttggaagtaggtagtgggccgatcggctttttcgagaaggtcgaaggcgtgacagtgactgcccaggactcattgatggggctgtatgcagagaatcttccattctcgattctcggggaaagaggttcttcttgttatataagggatggtgttgccgatatagagagtgcgttcgatttcgtcgtttgctcaaatgtgcttgaccatacggccgactggatccagttcctggttgactgtgtgggcaggttgaggacgggcggtgagctactgttggtgactgactctcgcggagttccagcaatcgggcatacacagatattcagccatgatcaactggttcgtgtcttggagttgctgggagcaaagcagttcaaggtgaaagccgtcgagcgggaggatggcgttcactgtgactatcgtcattattttcgggtggttttctga

SEQ ID NO: 7423 - DNA, 765 bp, Pseudomonas aeruginosa
gtgggcggtacgcccgtacggctgttctgcctgccgtattccggcgccagcgccatgacctacagccgctggcggcgcaagctgccggcctggctggcggtgcgtccggtggagttgccggggcgcggggcgcggatggccgagccgttgcagaccgacctggcgagcctggcgcagcaactggcgcgcgagctgcacgacgaggtccgccagggcccctacgcgatgctcgggcacagcctcggcgccttgctcgcctgcgaggtgctgtatgccttgcgcgagctgggttgcccgacgccgctggggttcttcgcctgcggcaccgcggcgccgtcgcgacgcgccgagtatgaccgcggtttcgccgaaccgaagagcgacgccgagctgatcgccgacctgcgcgacctgcaaggtacgccggaagaggtgctgggcaaccgcgagctgatgagcctgaccctgccgatcctgcgcgccgatttcctgctctgcggcagctatcgtcaccagcggcgcccgccgttggcctgtccgatccgaacgcttggcggcagggaggacaaggccagcgaagaacagttgctggcctgggccgaggaaacccgcagcggtttcgaactggaactgttcgacggcgggcacttcttcatccatcagcgcgaggccgaggtgctggcggtcgtcgagtgccaggtcgaggcctggcgcgcggggcagggcgccgcggcgttggcggtggagtcggcggcgatctgctga

SEQ ID NO: 7424 - DNA, 882 bp, Pseudomonas aeruginosa
atgatgcgtccattatgtttttttctcttgatttttttgttgtcgggaaatcctgtcatggcggctgaactacgaccttttatatgcgttaacgaaaaagaccacttgccatctctagatcctcaggctgatgcatggtatcgggaggcagtagctctcgccaagcccgataccctgcgtccctgggatcgtatcgtcgatctatacagtaaggcagttgagcgtggtcactggaaggctatgcataacttggcgagcctctatcgtaccggttggccaggcggtgtggagaaggatactcagaaagctctagatctctaccagaagatgatcgatttgaaggttcctcaaggtttctacgatatggcggcaatgatcggaaatcgtgctggcgtcaagaatcctgcgactgatggacttacctttctcgataaggctgcaagcttgggtaatccaccagcattaactgagttaggaaggctatatatatatgttgctggtcaggatgagttggggctgaaatatacgaactgtgctgcaggccagggctatgctcctgccaattacgagttggcgatgtactatcgtttggtggcacataactacccaaaggcggcaggctattaccttcttgctgcaagccaaggaaatgatgatgctgccttcttcatgtccggagtttttgataagactagtcccgatgttgacagaatgtggtacgcccccgatgagaagctgcacaaactatatgatggtatttacgatcaacttgccgctgatcctgatttgcgttttcccaacttgataaaggaccatcctctgcctcctcacccgacccagggctacgacgcagatcggcccgactggaaaccggggcagtga

SEQ ID NO: 7425 - DNA, 891 bp, Pseudomonas aeruginosa
gtggccagcctggtgaccgctgttctatttctagtggtgtgtatcagctgggggactacctggctcggcatcaagatcgccgtggagagcgtgccgccgctaactgccgccggattgcgctttctgatcgcatttccgcttttcctgctctttgcgcggctgcgccacgagacgatctttttcccgcggcgactcctggccttcttcgtcttcgtgacgctcggctacttcagcgtgccctactacctgctgaactatggcgagcaatacgtcgcttcaggtcttaccgcgctgctgttcagcagcatgcccgtgttcatcctgatcttctccgcgatcttcctgcgcgagcgcatctacctgtcgcagatccttggtattgcgattggcttcggcagcctgttcatgatcatcaggtctcaagggctgcatctggactacacggagttgttaggcgtacttgccatcctgctcgcggcgatcatgcacgcactcagctacgtcatcaccaaaaggcaaggtgctgacatcggcgtgatcaccttcaatacgctgcccattggcatcgccggcttggggctgttcatggccggactcgtgatggaacacccgaacctgtctgccgtcacaagccgatcttgggctgccctgatctatctcggtctggtggcatcagtcgggggattcatcgtgtacttcttcctgctcaagcgtttgagtcccgttgtgctgtcgtttgtcttcatcattttcccggtgttcgccgtgatcatcggcgcctggtacgaaggggttgccatctctcgcgagttgattggcttcaccgtgctcctattggctggatttgccatcaccaagcttcccatcgagaagctgctcggcaggaggtga

SEQ ID NO: 7426 - DNA, 1083 bp, Pseudomonas aeruginosa
atgaaagcttctctgctgaaaaagctggatgtcctcagcgatcgctacgaagaactgacggcgctgctcggcgacgccgaggtgatcagtgaccagacccgcttccgcgcctattcccgcgagtacgccgaggtcgaaccggtgatcctggcgttccgcgactaccgcaaggtgcaggccgacctcgagggcgcccaggcgttgctcaaggacagcgacccggagttgcgcgacctcgccgaggaggaggtcgccgaagcgcgcggccgcctcgccgccctcggcgacagcctgcagcgcatgctgctgccgaaggatcccaacgacagccgcaacgtgttcctggagatccgtgccggcaccggtggcgacgaggcggcgatcttctccggcgacctgttccgcatgtattcgcgctacgccgagcgccagggctggcggatcgagacgctgtcggagaacgagggcgagcacggtggctacaaggaagtgattgcccgggtcgagggcgacaacgtctacgccaagctcaagttcgagtccggcgcgcaccgcgtgcagcgggtgccggaaaccgaatcccagggccggatccacacttccgcctgcaccgtcgcggtgctgccggagccggacgagcaggcagcgatcgagatcaacccggccgacctgcgggtggacacctaccgttcctccggtgccggcggccagcacgtcaacaagaccgactcggcggtgcgcatcacccacattcccagcggcatcgtggtcgagtgccaggaagagcgctcgcagcacaagaaccgcgccaaggccatggcctggctggcggccaagctcaacgaccagcagcaggccgcggcgcagcaggcgatcgccagcacgcgcaagctgctggtgggctcgggcgaccgctcggagcgcatccgtacctacaacttcccgcaagggcgggtcaccgaccatcgcatcaacctcaccctgtactccctgggcgaggtgatggagggcgcggtggaacaggtgatcgagccgctgctgcaggaataccaggccgatcaactggcggccctgggcgactga

SEQ ID NO: 7427 - DNA, 2331 bp, Pseudomonas aeruginosa
atgccacgttgtagtacccgttccgcccagcgcctgtctccgctgttcctggtcctgtcgctggccgtcctcggcctggcgccgccggtccatccggcacctgccgagactgccgccgcgcaagaggaagagcagtggacgatcaacatgaaggatgccgagatcggcgacttcatcgagcaggtatcgagcatcagcggccagaccttcgtcgtcgatccgcgggtgaaggggcgggtcacggtggtatcccaggcgcggctcagcctggcggaggtctaccaactatttctttcggtgctcgccacccacggctacgcggtgctgccgcagggcgaccaggcgcgtatcgtgccgaacatggaggcacgccaggacgccgcgcagaagaccgtccgcgatgggccgggcagcctggagacgcgggtggtccaggcgcagcagacctcggtggcggaactgatcccgatgatccggccgctggtcccggcccatggccatctggccgccgtaccgtcggccaacgcgctgatcgtcagcgaccgccgctccaacatcgagcgcatcgaggcgatcgtgcgcagcctcgaccgggccggcgaacatgactacagcatctacgacatgcgccatgcctgggtcgcggaaatcgccgaggtgctcgatcgcagcgtcaccccggccgccgggaagagcgccgccaccgtccaggtccttgccgacagccgcagcaaccgcctggtcctgctcggtccgccgcaggcgcgagcgcgcttgctgcggctggcgcagtcgctcgacgtcccctcgtcgcggtcggcgaacagccgggtgatccgcctgcgccatggcgacgccaagacccttgccgccaccctcggggagatcggcgaatcgctgcacggcgagcggggccaggatggccggggaagcggcaagcgcggcctgctggtgcgcgccgacgaatcgctgaatgccctggtgatcctcgccgacccggaggatgtcggcctgctcgaggacatcgtccgccagctcgacgtgccgcgcgcgcaactgctggtggaggcggcgatcgtcgagctgtccggcgagatcggcgacgccctcggggtgcaatgggcgctgcgtagcgggcatgtcgccggcggcgctggcttcgccgacagcgggttgtccatcggcaccctgctgggcgcgctgcaggccggcaagccgccggcagagctgcccgacggtgcgatagtcggcctcggcagtcgcgatttcggcgcgctggtcaccgcgctgagccgcaatagccgcagcaacctgctgtcgacgccgagcctgctgaccctggacaaccagaaggcggaaatcctggtcggccagaacgtgccgttccagaccggcagctacaccaccagcgccagcggttcgagcaatccgttcaccactgtcgagcgcaaggatatcggggtgaccctcaaggtcacgccgcacatcggcgaggaccgcatgctgcgcctggagatcgagcaggaaatatcctccatcgcgccaaccgccaccctggcggcgaaggcggtggacctggtgaccaacaagcgctcgatcaagagcaccgtactggctgacgacggccaggtcatcgtcctcggtggattgatccaggacgacctgcagcgcagcgattcgcgggtaccgctgctgggcgacatccccggcgtcggccggctgttccgctcgtcccgcgagacccgggtgaagcgcaacctgatggtcttcctgcgaccgagcatcgtccgcgatgccgccggcctggagcgcatcagccatggccgttaccgttccatccagttgctgcgcggtgccgccggcgaaccggcgcgcccgctgttcgaggatgccggcgccatcgacctgcgtcccgccgcccaggtcgcaccggcacctattggctcgccgcgcagctatccggctccagccccggtgctgatggagaagccgcgcctggcggacccggcgtccctgggcgacggtcgcggcggcgaggtgctggaggttcgccagggcacgcacgcgccgcagccgccgtcaccccagcgctacgccgtgcgattggtcgagggcagcagcgaagccttcatgcgcgcgctgatcgagcggcatccgggcctgtcgttgcgtttgcgccgcgaactgcgcgatggccaggagctgttcgcggtggagcggggcgactacctcgacccggagcaggcacgccgggccctggcggaactgcccgaaagcctgccgcgagggaaggcgcgggtgattgcgcatacgccgggaagcgccctgtga

SEQ ID NO: 7428 - DNA, 1008 bp, Pseudomonas aeruginosa
ttgaggatcggaatcgtcaatgacatgccgttggccgtcgaggcgctgcgccgcgcgctggccttcgagccgcagcaccagatcgtctgggtcgccagcaacggtgccgaggcggtgacccagtgcgccgccgatacgcccgacgtggtgctgatggacctgctcatgccggtgatggacggcgtcgaggcaactcgtcggatcatggcggaaagtccttgcgcgatcgtgattgttaccgtcgatatcgagcagaatgtgcaccgggttttcgaagcgatgggatatggggcgctcgatgcggtgaacacgccggcgctgggcatcggcaacccgcaaacggcggcggcgccgttgttgcgcaagattcagaacgtcggctggctgatcggccagcgcgataaccgtggcaaggtccaggtggtgccgccgaaggccggcggggcgcgccagcgtctggtggcgatcggcgcttcggctggcggtccggcgtcgctcgcggtgttgctcaagcaactgccggccagtttcaatgccgcagtggtgctggtgcagcatgtcgacgaggtattcgccgccggcatggccgaatggctggccagcgaatcgaagctgccggtgcgcctggcgcgcgatggcgagccgccgataccggggcagatcctgctggcggggaccaacaatcacatccgcctgctgcgcaacggttcgctggtgtacaccgccgaaccgcgttctttcgtctaccggccgtccatcgacgtgtttttcgagagcgtggcgaattattggcgtggcgatgccgtgggcgtgctgctgaccggcatgggccgcgacggcgcccagggcctcaagcagatgcgcgagcgcggtttcctcaccatcgcccaggaccaggccagttgcgcagtctacgggatgccgaaggccgcggcggcgatcgatgcagcggtgcagatcctttccctggaaaagatcgccccgcgcctggcggaggtattcgattag

SEQ ID NO: 7429 - DNA, 1464 bp, Pseudomonas aeruginosa
atgaactgcagggcatcggcgacgctctggatcaggtcgtcttgcttgatcacggccatggagcacggtcctcttcaggcgggtaattcggatgcggggcagggtcacggagccggccgcagccgaggagcgcgccggtcaggcaccggcgcaaaaaaggcgcgacagtatagccgttccggcgagacgggcgcacgcgccgacgatcagaccttggtcggccagccggctggtcggccgataaatccgcggtccgctagctggcagttcgttcgactaggcaacccgcagggggcagggtacattgcggccaggtgccattacgggacggagcccatgcgcacagacaagcctcctctgaaacagcgtgcgctgcaaaagctcttgctccgccggttcggcatggccgcaggcacctacctgctcggcctggtcctgctctggctggcgctactcagcggcttctaccgcgcagcgccgaccaccgcggcggccagcaccaccctggtggtggcttgccaactggccttcctctggctgttcgccagcggacgcaacctgcgttacgccgatcccagcctgaccgagccgcaggtgctggtggcgatcgcctggctgacctatttcctctaccacgtcgacagcctgcgcggcaccttcatggtgttctacgtgctggccctgctgttcggcgtgttccaactgccgccgcgggtcttcgcccgctgtgcggcgctggcgttcatcgctttttccggcatctacctggtagaggccttgcagcagcgtctcgagctaccgggccgggctgcattgcaggtgctcgtgatgttcatcgtaatggtctggctgagcctgttcgccagctacatacaggcgatgcggcaacgcatgcgccagcgccgctatgccttgcaggcgcaccaggacacgctgcgcggcatgatgcgccaactggaagacctggtggccaccgacgaactcaccggtctgttcaaccgccggcatttcatgcgcatggccagccgggcgctggaagacctgctgccgaaccggcagcacggcctggcgctgatcgacctcgatcacttcaagcggatcaacgaccgccacggccacgccgccggcgatcgggtcctgcagaccttcgccgcggtggcgcgttcctgtctgcgcgatggcgacgtcctggcccgttacggcggcgaggagttcgtcctgctgctgccccacgccgacgcggaacagctggaaagctgttgcgagcgcctgcgcctggcgttccaacaggcggaaccggtcggggtcacggtggataccctgagcctttcggtgggcatgaccctgctgtatgccgacgacgatctcgacgaggccttgcagcgggccgaccaggcgctctaccgtgccaagcgcggcggacgaaaccgctgcgacgccacctgggaggtcaccagtgcctga

SEQ ID NO: 7430 - DNA, 2523 bp, Pseudomonas aeruginosa
atgacgcaagtcacggtgaaagaactggcccaggtggtcgacacaccggtggagcgcctgctgctgcagatgcgtgacgcaggtctgccgcacaccagtgccgaacaagttgtaacggatagcgagaagcaagccctgctgacccacctgaaaggcagccatggcgatcgcgccagcgagccgcgcaagatcaccctgcaacgcaagaccactaccacgctgaaagtgggtggcagcaagacggtgagcgtcgaagttcgcaagaagaaaacctatgtcaagcgcagccccgacgagatcgaggccgagcgccagcgcgaactcgaggagcagcgcgcggcggaagaggcggagcgtctgaaggccgaagaggccgctgcccgccagcgtgccgaagaggaagcgcgcaaggccgaggaagctgcgcgtgccaaggctgcccaggaagcagcggctactgccggtgccgagcctgccgtggtggcggatgtcgcggttgccgaaccagtggccaagcctgccgccgtggaagagcgcaagaaggaagagccgcgccgcgtgcccaagcgtgacgaggacgatgaccgccgcgaccgcaagcacacccagcaccgtccctcggtcaaggagaaggaaaaggttcctgctccgcgcgtggctccacgcagcaccgacgaggaaagcgatggttaccgtcgcggcggtcgtggtggcaagtcgaagctgaagaagcgcaaccagcacgggttccagaacccgacaggaccgatcgtgcgtgaagtgaacatcggtgagaccatcaccgtagccgagttggccgcccagatgtcggtcaagggtgccgaagtcgtcaagttcatgttcaagatgggctccccggtgaccatcaaccaggtcctggaccaggagaccgcccaactggtcgccgaagagctgggccacaaggtcaagctggtcagcgagaacgcgctggaagaacaactggccgagtccctgaagttcgaaggcgaggcggtcacccgcgcgccggtcgtcaccgtcatgggccacgtcgaccacggcaagacctcgctgctcgactacatccgtcgcgccaaggtcgccgcgggcgaggccggcggcatcacccagcatatcggtgcctaccacgtcgaaaccgagcgtggcatggtgaccttcctggatacccccggccacgccgcgttcaccgcgatgcgtgcccgtggcgcccaggcgaccgacatcgtgatcctggtggtcgcggccgacgacggcgtcatgccgcagacccaggaagccgtgcagcacgcgaaagcggcgggcgtgccgatcgtggtcgcggtgaacaagatcgacaagcccgaggccaacccggacaacatcaagaacggcctggccgctctcgacgtgatcccggaagagtggggcggcgacgctcccttcgtcccggtttcggcgaagctcggtactggcgtcgatgaactgctcgaagcggtcctgctgcaggcggaagtgctcgaactgaaagccactccgtcggccccgggccgtggcgtggtggtcgagtcgcgcctggacaagggacgcggcccggtggccaccgtgctggtccaggacggtaccttgcgccagggcgacatggtgctggtcggcatcaactacggtcgtgtccgcgccatgctcgacgagaacggcaagccgatcaaggaagccggcccgtcgatcccggtcgagatcctcggcctggacggtacgccggatgccggtgacgagatgaccgtggtcgccgacgagaagaaggcccgcgaagtcgccctgttccgtcaaggcaagttccgtgaggtgaaactggcgcgtgcccatgccggcaagctggaaaacatcttcgagaacatgggccaggaagagaagaagaccctgaacatcgtcctcaaggccgatgtgcgcggttcgctcgaggctctgcaaggctcgctcagcggcctgggcaacgacgaagtgcaggtccgcgtggtcggtggcggcgtcggtggcatcaccgagtccgacgccaacctggcgctggcttccaacgcggtgctgttcggcttcaacgtgcgcgccgacgccggcgcgcgcaagatcgtcgaagccgaaggtctggatatgcgttactacaacgtgatctacgacatcatcgaggacgtcaagaaggccctgaccggcatgctcggcagcgacctgcgggagaacatcctgggcatcgccgaggtgcgcgacgtgttccgctcgccgaagttcggcgcgatcgccggctgcatggtcaccgagggcatggtgcaccgcaaccgtccgatccgcgtgctgcgcgacgacgtggtcatcttcgaaggcgagctggagtctctccgtcgcttcaaggacgacgtcgccgaagtgcgtgccggcatggagtgcggcatcggcgtgaagagctacaacgacgtcaaggtcggcgacaagatcgaagtgttcgagaaggtcgaagtcgcacgcagcctttga

SEQ ID NO: 7431 - DNA, 1134 bp, Pseudomonas aeruginosa
atgacccacgacctggccgccagcggccttcgcttcggcatcgaggaagaattcttcctgctcgatgcctccgacctggacatcgtccgctccgcccccgccggattcgtcgcggcctgccgtgacacgctcggcgagcatttcgccgaggagatgttcgaatgccaggtcgaggtggccagcccggtgttctccaccctggccgaggccgcgcgcttccacggtcaggcccggcaacgcctggcgcatctggccatggacttcggcctgcgctcgctctgcgtcggcacccatcccttcgccgactggcggcgggcgcgaagcaacccggcggcgcacttcgcccgcctgttcgaggaccaggggcgggtggcccggcgcagcctggtctgcggcctgcacgtgcatgtggagataccgccgagccacgaccgcatggctgtgctccagcgcgtgttgccgtggctgccgctgctgctggcgttgagcgcatcctcgccgttccgcggcggccggcgcagcggcctggcgagctatcgacgggcactctgcggcgagtggccgaggatgaacattcctcctgccttgcccgacgaggacgcctatcgccgccacctggcgctgctgcgcgagaccggctgcatccgcgaggatggccaggtctggtggatgatccggccgtcatcccatgtgccgaccctggagctgcgtatctgcgacgcctgcccgcgcctggccgacgcgctgagcctggccgggctgttcagggcgctggtgggcgaagcgctgggcgcggacccgcgtgcgttgccggtcgcgcgcgacgcctgcctggaggaaaactactggcaggcgctgcgttacggttgcgccggccgctatctcgtcgaaggccgctgcgtaggtgccggggactggctggaaatggcctggcgacagtgccggccgcaggcccgccagggcaacgaatgggcctaccagcatgcctgcgggttactcgaagagacctccgccgcccgccagttgcggcgttaccggaggttgcgcgaagcgggccaggagcgccatccggcactgcgccggctggtggaggagctgctggaggaaaatctccagccggccttggccggctag

SEQ ID NO: 7432 - DNA, 765 bp, Pseudomonas aeruginosa
atgcttccggaccccctgcccgtcccgctcttcgccctgcgcatcgaccgcgcagccagccgcacggcctcccaccgccatgcctgcggccagctctactgcctggagcgcggccttctggtggtcgaggacgagcatggccgccaggccctgcctccgcgccagatcgcctggatcccaccgggtcacccacactcggcgcactcccacggcagcctggcgggctggagcgcctacctcgccgccgaacactgccgcgacctgccccggcaccccggcgtgctcgcctgctcggctttcgtggcgctgatcgtcgaacgcgccacccgctggccgaccggctccgcctggagcaccgaacgcgagaacctgctgcgcgtgctgctggacgaactgcgccacgccgtgccccagcggacccgcctgccctatccgggggattcgcgcctgcgcaggatcgccgaggcattgctggccaaccccggcgatccgcggccggcggccgaatgggcacgctgggcgggcctcagcagccgtagcctgagccggctgttcggcgccgagaccggtatgagcttcgcgcaatggcggcaactggcgcgactgcacgcggccgtcgaacggctggcagcgggccaggcggtcggcgaggtcgcctggtcgctcggctacgaaagcccgagcagcttcgccagtgccttccgcacagtattcggcgagacgccgtccggctattccagtcgcgccaacgaagcgctagcctga

SEQ ID NO: 7433 - DNA, 903 bp, Pseudomonas aeruginosa
atgattttgttcgactacaagttgctcgccgcgctggccgcggtggtggagcagggcggtttcgagcgcgccgcacaggcgctggggctgtcgcaatcggcggtatcgcagcggatcaagctgctcgaggcgcgggtcggccagccggtcctggtgcgcgagacgccgccgcatcccaccgatctcgggcgccgcctgctcaaccatgtgcagcaggtgcggctgctggagggcgacctgcagcgctgggtgccgaacttggatgaaggcggtgccccggaacgcctgcgcatcgctctcaacgccgatagcctggcgacctggtgggccgccgcggtgggcgatttctgcgccgagcggcgggtgctgctggaccttgtggtggaggaccaggaggtcgggctcaagcgcatgcgcgcgggcgaagtggccggctgcgtctgcggtagcgcgcggccggtggccggcgcgcgttcgctgctgctcggagccatgcgttatcgcggcctggccagcccggatttcattgcccggcactttccccgcggggtcgaggcggccgccctggccggcgtgccggcgatcgtgttcggcccggacgacctgctgcaacaccgctttctcaaggacctcggcgtcgagggcggtttcatccaccacctctgcccgtcctcggaaggtttcgtccgcctcaccgccggcggtctcggctggggcctggtgccggagcgccaggtgcaaggcgagctggcgcgcggcgaactggtcgagctgctgcccggccaggtcatcgacgtaccgttgtactggcactactggcgcaacggcggcgaactgctcgcgtcgctcaccgagcacctgctcgcccgcgccggcgacggcttggtgcgggtgtcaggctga

SEQ ID NO: 7434 - DNA, 2187 bp, Pseudomonas aeruginosa
atgaacgacgacctctccctcctgctgaactccctcaacgacccgcagcgccaggccgtggccgcgccgctgggccgccaactggtcctcgccggcgccggctcgggcaagacccgcgtgctggtgcaccggatcgcctggctgatccaggtcgagcacgcctcgccctacagcatcctgtcggtgaccttcaccaacaaggcggcggcggagatgcgccaccgcatcgagcagttgctcgggatcaatccggcgggcatgtgggtcggcaccttccacggcctcgcccatcgcctgctgcgcgcgcactggcgcgaggccgggctgagcgagaacttccagatcctcgacagcgacgaccagcaacgcctggtcaagcgggtgatccgcgaactcggcctcgacgagcagcgctggccggcgcgccaggcccagtggttcatcaacgggcagaaggacgagggcctgcggccgcaacacatccagcccggcggcgacctgttcctcgccaccatgctgaagatctacgaagcctacgaggcggcctgcgcccgcgccggggtgatcgacttctccgagctgctgctgcgcgccctggacctctggcgcgaccatcccggcgtgctcgagcactaccagcggcgcttccgccatatcctggtggacgagttccaggacaccaacgccgtgcaatacgcctggctgcggattctcgccaagggcggcgacagcctgatggtggtcggcgacgacgaccagtcgatctacggctggcgtggcgcacggatcgagaacatccagcagttcagcgacgacttcgccgatgccgaggtgatccgcctggagcagaactaccgttccaccgcgtcgatcctcaaggccgccaacgccctgatcgccaacaaccagggacgcctgggcaaggagttgtggaccgacggcgaggacggcgagtcgctgagcctgtacgccgcgttcaacgagcacgacgaggcgcgctacgtggtcgagtcgatcgagagcgcgctcaagggcggcctggcgcgcagcgagatcgccatcctctaccgctccaacgcccagtcgcgggtgctggaggaagccctgctgcgggagaagattccctaccgcatctacggcggccagcgcttcttcgagcgtgccgagatcaagaacgccatggcctacctgcgcctgctcgacggccgcggcaacgacgcggcgctggaacgggtggtcaacgtgccggcacgcggcatcggcgagaagaccgtggagagcatccgcgaattcgcccgcggcaacgatgtgtcgatgtgggaggcgatccgcctgatgatcgccaacaaggtcctgcccggccgcgccgccagcgccctgaccggcttcgtcgagctgatcgagaatctttcggcgaaggtcatggacatgccgctgcacctgatgacccagacggtgatcgagcagtccggactgatcagctaccacaaggaagaaaaaggcgagaaaggccaggcccgggtggagaacctcgaggaactggtcagcgccgcccgcgccttcgagaacagcgaggaagaggaagacctcaccccgctgcaggccttcctcagccacgcctccctggaggccggggaaacccaggccgacgcccacgaggacagtgtccagctgatgaccctgcacagcgccaagggcctggagttcccgctggtgttcctggtcggcatggaggaagggctgttcccgcacaagatgagcctggaggaatccggccgcctggaagaggaacgccgcctggcctacgtcggcgtcacccgcgccatgcagcgactggtcctgacctacgcggagacccgccggctctacggtagcgagacctacaacaaggtttcgcgcttcatccgcgagatcccgccggcgctgatccaggaagtgcgcctgtccaataccgtcagccgcccctacggcggcacctcgcgcagtgccggcggcaacctcttcagcggcgccggggtgccggagacgcccttctccctcggccagcgggtgcgccacgcgctgttcggcgaagggactatcctcaacttcgaaggcgccggcgcccaggcccgggtgcaggtgaatttcgagagcgaaggcagcaagtggctgatgctcggctacgccaagctggaagccctgtag

SEQ ID NO: 7435 - DNA, 1791 bp, Pseudomonas aeruginosa
atgagtgagcgcggagaccgcctgagctgggcggagattcgtcgactcgcactgcgccacaagaaagccctgttgttcgccaacctggtggcggtgctggccaccctctgcaccgtgccgattcccttgctgctgccgctgctggtggacgaagtgctgctcggcaagggtgacggcgcgctgcgtttcatggaccgcctgttgcccgccgactggcaggtggcgttcggctacatcggcctgatgctggcggcgacccttctgttgcggggggcggcgctggtattcaacgtgctccaggcgaagctgttcgcgcggctgtccaaggacatcgtctaccgcatccgcctgcgtctgatcgagcgcctccggcatatcgccctgggcgaatacgaaaccctcggcggcgggtcgatcagcgcccacctggtcaccgacctggataccctggacaagttcgtcggggaaaccctcagccgcttcctggtcgccttgctgacgctgctcggcaccgccgcgatcctggtctggatgcactggcagctggccttgctgatcctgctgttcaacccgctggtgatctggtccacggtgcagctgggcaagcgcgtcaagcatctcaagaagctcgagaacgacagcaccgcgcgcttcacccaggcgctcaccgagaccctcgaggcgatccaggaagtccgcgccggcaatcgccagggctatttcctcggccgcctcggccaccgcgcccaggaagtccgcgactacgccgtggcctcgcaatggaaaagcgacgccgccgggcgcgccagcggcctgctgttccagttcggcatcgatgtgttccgcgccgcggcgatgcttaccgtgctgctctcggacctgtcgatcggccagatgctcgcggtgttcagctacctctggttcatgatcggtccggtcgaacagctgctcggcctgcaatacgcctactacgccgctggcggcgcgttgcagcggatcaacgagttgctggcgcgggccgacgagccgcgctacccgccgctgcgcgatccgttcgccggccgcacgaccgttggcatcgaggtgcgcgggctggatttcgcctacggcgaggacaaggtcctggagcagttggacctgaacatcggcgccggcgagaaggttgccctggtcggcgccagcggcggcggcaagagcacgctggtgcaactgctactcggcctctacagtgcgcagcgcggcagcatccgctacggcggggtgcccctggaggaaatcggcctggactgcgtgcgcgaacatgtcgcggtggtcctccagcatccggcgctgttcaacgacagcgtgcgggccaacctgaccatgggccgcgaacgcagcgaccaggcctgctggcgggctttggagatcgcccagttggccgacggcgtgcggcgcctgccgcaggggctggacaccgtggtcgggcgttccggggtgcgcctgtcgggcggtcagcggcagcgcctggcgatcgcccggatgatcctcgccgagcccaaggtggtgatcctcgacgaggccacctcggccctcgacgccgctaccgagtacgccctgcaccaggcgctcggcgacttcctcgaaggccgcaccacattgatcgtggctcatcggctgtcggcggtgaagcaggccgaccgggtcctggtcttcgatggcgggcatatcgccgaagacggcgaccaccagcaactgatcgccgaaggcggcctctacgcccggctctacggacatctgcaacagatgtga

SEQ ID NO: 7436 - DNA, 1398 bp, Pseudomonas aeruginosa
atggacgacaacaagaacaaggtcctgcggttgcgcgatgtggtgctctacacggtctcggcgatgctcttcatggaccagatcgccctggcttcctccctcggtccgtcgagcctgttctggtggctctacgtgctggtcctgctgttcctgccgatggccatgatgacctccgagctgggcaccgccttccccgccaacggcggcgtctaccactgggtgcgcagcgccttcggcttccgctggggggcccgggtgtcatggatgtactgggtcaacaacgcactgtggatgccttcggtctacaccctgttcggcagcatgctcggcgccttctatttccccgagctgagcctctggggcaagatcgccatcggcatcgccctggcgctgctcaccgcggcgttcaacgtggtcgcgctgcgcctgggcaagtggctgccgaacctcggcgcgctgctcaagctgctcgcggtgctcgccctgggcgtcggcggcctgcacttcggctggaaccatggcttcgccaacgacttcagcctggactccatcgtcccgtcctcgccgggccagatggccgcgctgggagtgatggtctatggcatcatggggaccgagctggcctgttgcagcgccgcggagatgcgcaacgcgcgccgcgacatcccgcgcgcggtgctgatctccgggctgatcgtcggcgccttcaacatcttcggcaccctcggcgtgctggccgcggtaccggccgaggaaaccgacgtcacccggatcttcgcccataccctctacaacatctacggccacgacggcgccggcgggatgctcgccgacctggtcggcgccttcgtcctgttcaccctcttcaccaacatggtcacctggagcatgggcaccaaccgtgccgcggtggaagcggccaaggccggcgagctgccggcgctgttcggcgtggtccattcgcgccacggcacgccgatcggctcggcggtgctggcctcggcggtgagcatcgtcctgctgctgctctacggcctggtggcgcacactgccgaggaactgttctggaccctgctgtcgatcttcgccatggttttcatgatgccctatgtgctgatgtgcctggccttcgtccgcctgcgccgcgccgacccgcgtccacggccctaccggatgccgctgggcgaccgcctggccagtctctgggcgctgttcgtcgcgctgcatgtgctggccggcatctgcctgttcgtcgtcacccccggcgcgccgatggactgggcctacgccggcaagatcgtcggcggcgtggcgctggccctggccgtgggcgaactgctgatccgccaggcggcgcgaaggcgcggcgtgatgtcactgcgcggtgcctacggttga

SEQ ID NO: 7437 - DNA, 999 bp, Pseudomonas aeruginosa
atgttcaagccgtttgtcggtgtggcgctcgccgcactgttcgccgtttccgccgtcgcccatgccgaggacgccggcccggtcgtgatcaagttctcccatgtggtctccgacgacacgcccaagggcaagggggcgctgttgttcaagaagcttgccgaggagcgtctgccgggcaaggtcaaggtcgaggtctaccccaactcgacgctgttcggcgacgccgacgagatcgaggccctgcgtgccaacaaggtgcagatgctggccacctcgctgtccaagttcgagccctataccaagcaactccaggtgttcgacctgccgttcctgttcgatgacctggaggccctgaagcgtttccagaagcgcgacaagagccgcgaactgctgcgctccatggccaagcacggtatctatggcctggcctactggaacaacggcatgaagcagctttccgccactcgcgagctgcaccggccggacgatgccaagggcctggtcttccgtatccagccgtcgtcggtgctggaagcgcagttcgccatgctcggcgccaccgccaagcagttgtcctacgccgagaccctcaaggccatgcaggccggcagcgtgcagggcaccgagaacacctggtcgaacctcgccggacagaagatcgacagcgtgcagccgtacatcaccgagaccaatcacggcgcgctcagctacatgctgatcaccagttcggcgttctggaccggcattccctaccaaacccgcaccgaactggagagcatcgtcgacgaggtcaccctggtggtgaacaaggaagccgaagcgctcaaccagaaggagcgcgagcacctgctggccgccggcaagagccgtctggtcagcctcagcgcggaagagcacgaggcctggcgcaacgccatgaagccgctgtggaagaactacgaggcgcagatcggcagcgacgtgctgcgtgcggcccaggtggtcaaccgcaagcgctga

SEQ ID NO: 7438 - DNA, 300 bp, Pseudomonas aeruginosa
atgaaccaggaacgcgtattcaaagtgctgcttggtccgcacatctccgagaaagccacgggtctcgcggacggcaagagccaattcgttttcaaggttgccaccgatgcaaccaagctggaaatcaagaaggccgtagaaagcctgttcagcgtgaaggtacagcgcgtcactaccctgaacgtcaagggtaagaccaagcgcaccgctcgcggtctgggcaagcgtaacgactggaaaaaagcgtacatcgctctccagccgggccaagatctcgatttcgccaccagcgctgagtaa

SEQ ID NO: 7439 - DNA, 2586 bp, Pseudomonas aeruginosa
atgaataacccatccactacgaaagcaccgctggccgactacctcgctcatcttcccctggcggaagaggagcgggagcggcttggcgagtccgcttccttctccgagctgcacgctcgcctggcgggagcggaaggcgccgctgccgatgccgggggcgatcccgccctggcctcggtacgcgcccgcctgcagctgggcacccctgagctggacgacgccgagatgttcggcgtcgacgcccagggtcgcaccttcctcaagatttccccgccgatccgccgtaccaaggtgattcccgagccctggcgcaccaacatcctggtgcgcggctggcgtcggctgaccggacgcagcaacccgcccaagcccaagcgtgccctgccgcgggcccgctggcagcgggtcggctcgctgcgccggttcatcctgctgttgttgatgctggcgcagacctcggtcgccacctactacatgaaaggcatcctgccctaccagggctgggccttcgtcgacctggaggagctggcccagcagagcctgctggataccgtccagcaggtgctgccctatgtcatccagttcggcatcctggcgctcttcgcgatcctcttctgctgggtctcggccggcttctggaccgcgctgatgggcttctgggagctgctcaccgggcgtgaccgctaccggatctccggcagcagcgccggcagcgagccgatcgccgccgacgcccgcacggcgatcgtcatgccgatctgcaacgaagacgtgccgcgggtattcgccggcctgcgggcgaccgtcgagtcgatggccgccaccggcgagatggagcgcttcgacttcttcgtcctcagcgacaccaacgacccggatatcgccgtcgccgagcagcaggcctggctcgagctgtgccgcgagaccaagggcttcggcaagatcttctaccgtcgccgccggcgccgggtgaagcgcaagagcggcaacatcgacgacttctgccggcgctggggcggcgactaccgctacatggtggtgatggacgccgacagcgtgatgagcggcgactgcctggccaagctggtacgcctgatggaggccaatcctgaggcggggatcatccagaccgcgccgaaggcgtccggcatggacaccctgtatgcgcgcatgcagcagttcgccacccgcgtctacggcccgctgttcaccgccggcctgcacttctggcaactcggcgagtcgcactactggggccacaacgcgatcatccgcatgcagcccttcatcgaccactgcgccctggcgccgttgccgggcaagggctcgttcgccggcgcgatcctgtcccacgacttcgtcgaggctgcgttgatgcgccgtgccggctggggcgtgtggatcgcctacgacctcgacggcagctacgaagaactgccgccgaacctgctcgacgaactcaagcgcgaccgccgctggtgccacggcaacctgatgaacttccgcctgttcctggtcaagggcatgcacccggtgcaccgcgcggtgttcctcaccggggtcatgtcctacctgtcggcgccgttgtggttcttcttcctggtgctttccaccgcgctgctggcggtgcaccaactgatggagccgcagtacttcctggaaccgcggcagctgttcccgatctggccgcagtggcatccggagaaggccatcgcgttgttctccaccaccctgaccctgttgttcctgcccaagctgctcagcgtaatgctgatctgggccaagggcgccaagggtttcggcggggtgatccgggtgaccctgagcatgctcctggagatgttcttctcggtgctgctggcgccggtgcgcatgctcttccacacccgcttcgtgctggccgccttcctcggctggtcggtgcagtggaactcgccgcagcgcgacgacgacgccacgccctggagcgaggcgatccgccggcacggcatgcagaccctgctgggtatcgcctggaccctgctggtggcctggctcaacccgcgcttcctgtggtggctgtcgccgatcgtcggttcgctgatcctgtcgatcccggtatcggtgatctccagccgggtgaagctgggcctgcgcgcccgcgacgaaaagctgttcctgatcccggaggagtacgacacgccgcgcgagctgcgcgccaccgacgagtacacctacgagaaccgctggcatgcgctcaaggatggcttcctcaaggccgccgtcgatccgttgctcaacgccctggcctgcgccatgggcacggctcgccacaaccgtgcgcaggccatcgagacggtgcgtggcgagcgtatcggcaaggccatcgataagggcccggaacagctcgacggcgccacgcgcctggctctgttgagtgacccggtagcactttcgcgcctgcatacgcgggtctgggaagaggaccgcgacgactggctcggccgctggcgcaaggccgaggcggacgacccccacgccgccagcgtaccgctggcccaggtagtgcccggcgacgccggcctgctgcccgccgcccagtcctga

SEQ ID NO: 7440 - DNA, 789 bp, Pseudomonas aeruginosa
atggctaaggtattcgcgatcgccaaccagaaaggcggtgtcggcaagaccacgacctgtatcaacctcgcggcctccctcgtggcgaccaagcgccgcgtcctcctgctggacctggatccccagggcaacgccaccaccggcagcggcatcgacaagcacaacctggagcactccatctacgacgtgctcaccggcgagtgcaacctcgccgaggccatgcagttctccgaacacggcggctaccagttgctgccggccaaccgcgacctgaccgccgcggaagtggtgctgctggaaatggacatgaaggaaaatcgcctgcgcaacgcgctggcgccgatccgcgagaactacgactacatcctcatcgactgcccgccgtcgctgtcgatgctcaccgtcaacgcgctgaccgccgccgacggcgtgatcatccccatgcagtgcgagtactacgcgctggaggggctgaccgacctgatgaacagcatccagcgcatcggccagttgctcaacccgacgctgaagatcgagggtctgttgcggaccatgtacgatccgcgcatcagcctgaccaacgatgtctccgcgcagttgcaggagcatttcggcgacaccctctacagcaccgtcatcccgcgtaacgtgcgcctcgccgaagcccccagcttcggcatgccggcgctggtttacgacaagcaatcccgcggcgccatcgcctacctggcgctggccggcgagctggtccgccgccagcgcgccaaaggccgcgccgcaaccgcataa

SEQ ID NO: 7441 - DNA, 1110 bp, Pseudomonas aeruginosa
atgctcaagctgaacgccgtggatacggctccgctcgtgtcgtccgacacccttgccccccttccgccgctgcgcgcgcagcagatcgccttcgaacaggccctgcccgcgcaccgaccgccggcgcccaggccaccgttcgacaagggcgacgaaacgacggaggccgccgcgacagccgacgcgccgacctcgacgcctctcgccgaccagcccgcggcgcctgccgccgaccggccgccgaccattcggcagccccccatgccagttgccgcggacgcaacgccaacgccaacgccaacgccaacgccaacgccaacgccaacgccaacgccaacgccaacgccaacagtgtcgccgtccggatcggtagcacggcaagcgccggcggtctccgcgcgcgtcgcggcgtccacgcaagcccgggagccggccagcgtttcggcgcctccggtcgacgaaccgccgctggtgccggtgtcctcccacccgcaaatcgcaggtcggacgcatgagcggccacagcccggccccggcttcccggcgaaaaccgcagccgaggtcgcgcccacggcgcaggccagtgtccaggcttcgccgcccgcgccgacagcgggcggcgaaggccgcggagaggagcgtcggcaacccggagaaaccgatccatccgcactgccccccgacgaccaagcgcctgtgccactgcctgccatgcaaacccccggcgaccgcctgctggcacgcctgctggcatcgagcgggagccggccactgccgctggccgatctcgcgcgcctgctcgatgccgtgcaggggcgcatccaggtcgccagcgcagccgaaagccatgcggcgcgcctgcaggtgcgactgccccagctcggcgccgtggaggtgcaggtcctgcatggccatggccagttgcagatcgagatcagtgccagccccggcagcctggcgttgctccagcaagcccgtggcgagttgctcgaacgcctgcaacggctgcatccggaacaaccggtgcaactcaccttcaaccagcagcaggacagcggccagcgctcgcggcaacgtcgctacctgcatgaagagtggcaagccgaatga

SEQ ID NO: 7442 - DNA, 471 bp, Pseudomonas aeruginosa
atgaaagcactactgatcgccgccggcgttgccgctctttccagcaccgccatggccgccaaactggatgaaaaggttccctacccgaaggcagatgccggcttcacccgccaggtcatccacctgccgaaacaggacgcggaagacgcattcaaggtcgagatcatcgccggcaagaccctcgaggccgactgcaaccagcagcgcctgggcggcgagctggaagaacacaccctggaaggctggggctactcctactaccgcctggacaaggtcagcgggccgatgagcacgatgatggcctgccccggccagaagaaggagcagcgcttcatcccggtggtcggcgaaggcttcctgctgtgctacaacagcaagctgccgatcgtggtctatgcgccgaaggacgtggaggtccgctatcggatctggtcggcgtccgaaaaggtcgagaaagcggtcagcgaataa

SEQ ID NO: 7443 - DNA, 324 bp, Pseudomonas aeruginosa
atggctaaggccgatgatacgtcgaatcccgcaataaccgcacagtccccttccaccttcatccccctgcgacgcacctcgcaatgcaaccagcaccccggttgcgccaccctctacctggacagcagcgcagccagcgaagacctgttcgacaccgcccgccgccggctggagtcggcgatcggaacgctgagcgtcctcgacctgctcgacgaaaccgaagagcccggtgaaagcatctgccgcatcaccggttccctgctgtcgttgctcagcgacgccctgtcactgttcgaggcggaatacgcacgcagacaccgataa

SEQ ID NO: 7444 - DNA, 1005 bp, Pseudomonas aeruginosa
atgacctcccagatcaatcggcaataccagttggcccagcgtcccagcgggctgcccggccgcgacaccttcagtttcgtcgaaaccccgctcggcgaaccggccgagggccagatcctggtgaagaacgagtacctgtcgctggacccggcgatgcgcggctggatgaacgacgcccgctcctacatcccgccggtggggatcggcgaggtgatgcgtgcgctcggcgtcggcaaggtgctggtttcgaagcaccccggcttccaggccggcgactacgtcaacggcgccctcggcgtgcaggactatttcatcggcgagcccaagggtttctacaaggtcgacccgtcccgcgcgccgctgccacgctatctctcggcgctgggcatgaccggcatgaccgcctacttcgcgttgctcgacgtcggccagccgaagaacggcgagaccgtggtgatctccggcgccgccggtgcggtgggcagcgttgccgggcagatcgccaggctcaagggctgccgggtggtgggcatcgccggcggcgccgagaaatgtcgcttcctggtcgaagaactgggcttcgacggcgccatcgactacaagaacgaagacctcgccgccggactcaagcgcgaatgcccgaagggtatcgatgtgttcttcgacaacgtcggcggcgaaatcctcgacacagtgctcacccgcatcgccttcaaggcacgcatcgtcctctgcggggcgatcagccagtacaacaacaaggaagcggtgcgcggcccggccaactacctgtcgctgctggtcaatcgggcgcgcatggaaggcatggtggtgatggactatgcccagcgcttcccagaaggcctgaaggagatggccacctggctggcggaaggcaagctgcaatcgcgcgaggacatcgtcgaaggcctggagaccttccccgaaacgctgctcaagctgttcagcggggaaaacttcggcaagttggtgttgaaggtctga

SEQ ID NO: 7445 - DNA, 978 bp, Pseudomonas aeruginosa
atggtgaccgaacacatatttgattttgaatggcgccctctgcagaactatcttcgtgatcgtgatatcgcaataccaccctttgcggcagaacaagagtcaagaagtgacgcactttacaactggatagtcagcaaggggtattcaggaaaagaaggactgaatcttggaacttattaccatatatctgattatggcgtgataggattggcgttgctatgcgccgagaacgtaggtgatattttgaaagtcatcagggcctatgtcaagttgttcaatcgtgatatagctaatgttggcgtcaagcctagggagaattacgaagtagaaatccatatttcagttaactttaagccagagtggaatgacgcatcccgtcagtttcatgtaaatgttatagcctctgcaacctacaagctcattatggatctgttaggtaatgactttcccatctctgcattgacagtgcctgtgcacggcgcagataaaacaatatatgaaggtttcttttctttgcctgtgaagcatgaaggaaatgacataatatttagctttccagctcatcagttgaatagaacactggcgactgccaatccggcggtatttcagtcggccctgactatggcaggtgagagtttcaatgctctgttggaagtagagatgggagggctccgtcagcgaatcgagttattccttgattccataccagatcaataccctagcttggtgactaccgcaaagtatttacgcatgaatgagcggacggtaagacgtcgcttggcggacgagggctgcacttatcgccagattgtagataaggcccgcaaagaacgagcaattgcactgctactgaattcatcgataccagttgatcgtattagcgatattctggggtactcggaaacagcgagttttagacatgcattcagacgttggaccgggcagtctactacagaattcagaaacagtttccactga

SEQ ID NO: 7446 - DNA, 1611 bp, Pseudomonas aeruginosa
atgagcaaacgccccaacttcctggtgatcgtcgccgacgacctgggcttctccgatatcggcgccttcggcggcgagatcgccacgccgaacctcgacgccctggccatcgccggcctgcgcctgaccgacttccacaccgcctcgacctgctcgccgacccgctcgatgctgctcaccggcaccgaccaccacatcgccgggatcggcaccatggccgaggcgctgaccccggaactggaaggcaagccgggttacgaagggcatctcaacgagcgcgtggtggcgctgccggagctgctccgcgaggccggctaccagaccctcatggccggcaagtggcacctcggtctgaagccggaacagacgccccatgcacgcggtttcgagcgttccttctcgctgctgccgggcgccgccaaccactatggtttcgagccgccctacgacgaaagcactccgcgcatcctcaagggtacgccagcgctctacgtggaagacgagcgctacctcgacacgctgccggagggcttctattcctccgacgccttcggcgacaagctgctgcaatacctcaaggagcgcgaccagagccggccgttcttcgcctacctgccgttctccgcgccgcactggccgctgcaagcgccgcgggagatcgtcgagaagtaccgcggtcgctacgacgccggtccagaagcgctgcgccaggaacgcctggcccggctcaaggagctgggcctggtggaagcggacgtcgaagcccatccggtgctcgccctgacccgcgagtgggaggccctggaggacgaggaacgggctaagtcggcgcgggcgatggaggtctacgcggcgatggtcgagcgcatggactggaacatcggcagggtcgtggactacctgcgccggcagggcgagctggacaacaccttcgtcctgttcatgtccgacaacggcgccgaaggcgccctgctggaggcgttcccgaaattcggcccggacctgctgggctttctcgaccggcactacgacaacagcctggaaaacatcggccgcgccaattcctacgtctggtatggcccgcgctgggcccaggcggccaccgcaccatcgcgcctgtacaaggcgttcaccacccagggcgggattcgcgtgccagcgctggtgcgctacccgcggctaagccggcagggtgcgatcagccatgccttcgccacggtgatggacgtcaccccgaccctcctcgacctcgccggtgtccgccacccaggcaagcgctggcgcggccgcgagatcgccgagccgcgcggcaggtcgtggctgggttggctttccggcgagaccgaggcggcccacgacgagaacaccgtgaccggctgggagctgttcggcatgcgtgcgatccgccagggcgactggaaggcggtgtacctgccggccccggtgggcccggccacctggcagctctacgacctggcccgcgacccgggcgagatccacgacctcgctgacagccagccgggcaagctggcggagctgatcgagcattggaagcgatacgtcagcgagaccggtgtcgtagagggggcttcgcctttcctggtgcgataa

SEQ ID NO: 7447 - DNA, 2280 bp, Pseudomonas aeruginosa
atgcacccttgccataggccgagctttgccttcttgcgccacccgttgtccattgtcgtctgtctggccctattggcaggttgcagtacttccccattgcagtttcccgaaccattgctcgcgaagtcggaaaaagccaaggcaaccgagggcgtagccctggtgagcgacgacggaaagaaagccccggcatcgttggctgttccgaagacggagttcagtggcacgcccacatcgcctcggtcgatcgtaggcggtgtagtcgatcgaatggacaaggcgatcctcgacgacaagaaggctgacatcagtctgaacgtggaggacgtacagcttgccgcattcatcaacgaggtattcggcaacatcctcggtttgccgtttgagatcgaaagcgctctgaaggaaaagactgatcgcgtgaccgttcgtttggaacagccgcagactgcacagatggtctacgaagtcgcgcgccaggtgctcgtcaactacggcgtggagatactccaccaaggcgatatctatcgcttccagatcaagcaggtagggctcagcccggacgagccgcccattctcatcagtggcgaagcacggcctagcgtgccgattgcctatcggccggtatttcaattcgtggcgttgcacagcgtcgaccccaaggatgtgattccctggttgaacagtgcctacgaaaaatccggcctgagcgtgatggccgatggtgcgcggagtggcttgatgctcaagggcatgtcttccatcgtcaaccaggccaccgaagccgtccgccttctcgatcaacctttcatgcgtggacgtcacagcctgcgtatcgacccggccttcgtcagtgctgccgacatggccagtcaactcaagaccgtgattgcggcgcaaggctacagcgtcggtatcggcgaagcggtcggcagtataatgctggtaccgctggaaagttccaatggcctcattgtcttcgccaacgatggccaacttctcgacttggtgcgcgagtgggcgcagcaggtcgacagggctccgatggcggttgccgcaggtatcggcgaggagaaggaaggactgttcttctacgaagctcgcaatacccgtgtcaccgaactggccaagtcgttgcgggcattggtatcggggttcgccggggagggtgcctacgggatcacctccggactgcaaagcagcgcttccaagcgatctggcggtggcaggcgcgccggagacgatggtgcggcaccggcggtggctcccttgctgcaagccgcaggtgccgccgcgttggtggggggcgacggtgctaacggtttgctcggtggcttggcggccggtatcagcggcagcggcaccatagtggaggacgagaatcgaaacgccatcttgttccgaggagcggcgcgtacctggcagcagatgcagggcttgctccgggaaatggacaagccggcccgccaggtattgatcgaggtgacggtggccagcgtaagtctcagcgacacccaggagttgggcgtggagtgggagatgctcaacggcagcttcaatagcgcgacctcgaccggaagcaagggcagcgccgggaaaggaggcttcaactacgtcatcaacaccgccggaggcaataccgcagccatccaggcaatggcggacaatcaacgagtccgggtactcgccactccccgtatcttggtcaagagcggcgagcaggccaacatcaatgtcggtcgggatattcctatcccaacggcccaggtcaatgacgacagcaccactgctggaagcaccaacctgcgcaatgaaattgcctaccgctctaccggcacaattctgaatgtcgcccccgtagtctactcggatagtcgggtcgatcttacggtcagccaggagttgagcgacagtggcggttcttccggcggcggtggcaaggccagtggtggaggaatcagcgctccggagatttccaggacgtcgctggaaacatcgcttacgttgaaaagcggtgggtcggtgctgatgggggggctgattcgggacaacataacggactccaacgctggcgtgcctctcctgaaggacattcccgggatcggtttcctcttcggacgccagaaagccgtgaagacccgtgaagaagtcatcatgttgatccagccttacgtgctggaaagtgatgccgatgccagggaagtgacggaaaagctgcacgccatgctgagcaagacactggcctgctccgatagaccgggcgcctgccgtatggaatga

SEQ ID NO: 7448 - DNA, 1230 bp, Pseudomonas aeruginosa
atgctgaacggcttgtggttgggttttttcctggtggcggcggcgagtgcgctggcgcgctggttgatcggcggcgatgcgacggtgttcgcggcgatggtggagagcctgttcgccatggccaagctggcggtcgaggtgatggtcctgctgttcggcaccctgacgctctggctcggtttcctgcgcatcgccgagaaggccgggctggtggagcgcctggcggtgctgctcggtccgctgttccgccggctgatgccggaagtgccgccggggcatccggcgatcggcctgatcaccctgaacttcgccgccaatggcctgggtctggacaacgccgccacgccgatcggcctgaaggcgatgaaggcgttgcaggagctcaatcccagcagcaccaccgcgagcaatgcgcagatcctcttcctggtgctcaacgcctcgtccctgaccctgctgccggtgactatcttcatgtaccgcgcgcagcagggcgcggccgatccgaccctggtattcctgccgatcctcctggccaccagcgcctcgaccctggccggcctgctgtcggtggcgctgatgcagcgcctgcgcttgtgggacccggtggtgctggcctacctgatccctggcgcgttgctgctggccggcttcatggcggtgctcggcacgctctcggccaccgcgctggcgcagctgtcctcgctgctgggcaacctgacgctgttcagcctgatcgtgctgttcctgatcgtcggcgcgctgaagaaggtgccggtctacgagagcttcgtggagggggcgaaggaaggtttcgacgtcgccaggaacctgttgccgtacctggtcgcaatgctttgcgcggttggcgtgttgcgcgcctccggggcgctggaagtggtactcggcgggatacgctgggcggtcgaggggctgggttgggacagccgcttcgtcgaagcgctgcccaccgcgctggtcaagccgttctccggcagcgcggcgcgggcgatgctgctggagaccatgcagacccacggcgtcgacagtttcccggcgctggtcgccgccaccgtgcagggcagtaccgagaccaccttctacgtgctcgccgtctattttggctcggtcggcctgcagcgcgcgcgccacgcggtgggctgcgcgctgaccgcggacctggccggggtcatcgcctccatcgccgtgtgctactggttcttcgcctga

SEQ ID NO: 7449 - DNA, 15450 bp, Pseudomonas aeruginosa
atgaacgcagaagattccctcaagctcgcccgccgctttatcgaactacccgttgagaagcgtcgggtcttcctcgaaaccctgcgaggggagggaatcgatttctcgctgttcccgattccggccggcgtgtcttcggccgagcgcgaccgcctgtcctacgcccagcagcgcatgtggttcctctggcacctggagccacagagtggcgcctacaacctgcccagcgcggtgcgcctgaacggaccgctggatcgccaggcgctggagcgcgccttcgccagcctggtgcagcgtcatgaaaccctgcgtacggtgttcccgcgcggcgccgacgacagcctggcgcaggcgcccctgcaacgccccctggaggttgccttcgaggattgcagcggcctgcccgaggacgagcaggaagcccgcctgcgcgaggaggcgcagcgcgagtcgttgcagccgttcgacctgtgcgaggggccgttgctgcgggtccgcctgatccgcctgggcgaggagcggcatgtgctgctgttgaccctgcatcacatcgtgtccgacggctggtcgatgaacgtgctgatcgaagaattcagtcgtttctacagtgcctatgcgactggcgcggagcccggcctgccggccttgccgatccagtacgccgattacgccctgtggcagcgcagctggctggaggccggtgagcaggagcgccagctggagtactggcgcggcaagctcggcgagcggcatccggtcctggagttgccgaccgaccacccgcgtccggcggttcccagctaccgtggcagccgttacgagttcagcatcgagccggccctggccgaggccctgcgcggcaccgcccgacgccaggggctgaccctgttcatgctgttgctcggcggcttcaatatcctcctgcaacgctatagcgggcagaccgacctgcgggtcggcgtccccatcgccaaccgcaaccgcgccgaggtggaagggctgatcggcctgttcgtcaacacccaggtgctgcgctcggtattcgacggccgcacgtcggtggcgaccctgctggccgggctcaaggacaccgtgcttggcgcccaggcccatcaggatctgccgttcgagcgcctggtcgaggcgttcaaggtcgagcgcagcctgagccacagcccgctgttccaggtgatgtacaaccaccagccgttggtggccgacatcgaggcgctggacagcgtggccggcctgagcttcggccagctcgactggaagagccgtaccacccagttcgacctgagcctggatacctacgagaagggcggccgcctgtacgccgcgctgacctacgcgaccgacctgttcgaggcgcggaccgtcgagcgcatggcgcggcattggcagaacctgctgcgcggcatgctggaaaacccgcaggccagcgtcgactcgctgccgatgctcgatgccgaggagcgcggccagttgctggaaggctggaacgccactgcggccgagtacccgctgcaacgcggcgtgcaccggttgttcgaggagcaggtcgagcgcacaccgacggcgccggcgctggccttcggcgaggagcgcctggactacgccgagctgaaccgccgggccaaccgcctggcgcatgccctgatcgagcgcggggtcggtgcggaccgcctggtgggcgtggccatggaacgttccatcgagatggtcgtggccctgatggcgatcctcaaggccggcggcgcctacgtgccggtggacccggagtatcccgaggagcgccaggcctacatgctggaggacagcggcgtgcaactgctgctcagccagtcgcacctgaagctgccgctggcgcaaggtgtgcagcggatcgacctggaccaggccgatgcctggctggaaaaccatgccgagaacaatccaggggtcgagctgaacggcgagaatcttgcctatgtcatctacacctccggttccaccggcaagcccaagggcgccggcaaccgccattcggcgctgagcaaccgcttgtgctggatgcagcaggcctacggcctgggcgtcggcgacacggtgttgcagaagaccccgttcagcttcgacgtgtcggtctgggagttcttctggccgctgatgagcggagcacgtttggtggtggccgcgccgggcgaccatcgcgatccggcgaagctggtggagctgatcaatcgcgagggggtcgatacgctgcacttcgtgccgtcgatgctgcaggcgttcctgcaggatgaagacgtcgcctcctgcaccagcctgaaacgcatcgtttgcagcggcgaggcactgccggcggacgcgcagcagcaggtgttcgccaagctgccgcaggccggcctctataacctctatggcccgaccgaggcggccatcgacgtcacccactggacctgcgtggaggagggcaaggacgcggtgccgatcggccggccgatcgccaacctggcctgctacatcctcgatggcaacctggagccggtaccggtgggcgtgctcggcgagctgtacctggccggtcggggcctggcccgtggctaccaccagcgtccggggctgactgccgagcgtttcgtcgccagcccgttcgtggccggggagcggatgtaccgcaccggcgacctggcgcgctaccgcgccgacggggtgatcgagtacgccgggcggatcgaccaccaggtgaagctgcgcggcctgcgcatcgagctgggcgagatcgaggcgcgcctgctggagcatccgtgggtgcgcgaggcggcggtgctggcggtggacggcaagcagttggtcggctacgtggtgctggagagcgagggcggcgactggcgcgaagcgctggccgcgcacctggcgacaagcctgccggaatacatggtgccggcgcagtggctggcgctggagcggatgccgctgagtccgaacggcaagctggatcgcaaggcgctaccggcgcctgaagtaagcgtggcgcaggcaggctacagcgcaccgcgcaacgcagtggagcgaaccctggcggaaatctggcaggacctgctgggcgtcgagcaggtcggcctggacgacaacttcttcagcctcggcggcgactcgatcgtctcgatccaggtggtcagtcgagcgcgccaggccggattgcaactgagcccgcgcgacctgttccagcaccagaacatccgcagcctggccctggcggccaaggcgggtgcggcgacggcggaacaggggccggcaagcggcgaggtggcgctggcgccggtacagcgctggttcttcgagcagtcgattcccaaccgccagcactggaaccagtctctcttgttgcaggcgcgccagccgctcgacggcgaccggctggggcgtgccctggaacgcctgcaggcgcagcacgatgccctgcgcctgcgtttccgcgaagagcgcggcgcctggcaccaggcctacgccgagcaggccggcgagccgctgtggcgccggcaggcggggtccgaggaggtgttgctggcgctttgcgaagaagcccagcgcagcctcgacctcgaacaggggccgctgctgcgtgcgctgctggtggacatggccgacggcagccagcgcctgttgctggtcatccaccacctggcggtggacggggtgtcctggcgcatcctgctggaagacctgcagcgtctctatgccgacctcgacgccgatctcgggccgcgtagcagttcctaccaggcctggagccggcacctgcacgaacaggccggcgcgcgcctggacgaactcgactactggcaggcgcaactgcacgacgctccgcatgcgctgccatgcgaaaacccgcacggcgccctggaaaaccgccatgagcgcaagctcgtcctgaccctggacgccgagcgtacccggcagttgctgcaggaagccccggcggcctaccggacccaggtcaacgacctgctgctgaccgccctggcccgcgcgacctgccgctggagcggcgacgccagcgtgctggtgcagctcgaagggcacggccgcgaggacctcggcgaggccatcgacctgagccgcacggtgggctggttcaccagcctgttcccgctgcgcctgaccccggccgcggacctcggcgagtcgctgaaggcgatcaaggagcaactgcgcggcgtgccggacaagggtgtcggctacggcctgctgcgctacctggctggagaggaggctgcgactcgcctggccgcactgccgcagccgcggatcaccttcaattacctgggccggttcgaccgtcagttcgatggagcggcgctgctggtaccggccacggaaagcgccggcgccgcccaggatccgtgcgccccgctggccaactggttgagcatcgaaggccaggtctacggcggcgagctgagcctgcactggagcttcagccgggaaatgttcgccgaggcgaccgtccagcgcctggtcgatgactacgcgcgggagctgcacgcgctgatcgagcattgtctcgacccgcggcatcggggtgtgacgccgtcggacttcccgctggccgggctttcccagacgcagctcgatgaattgtccttggatcctgattcggtgcgggacatctatccgttgtcgccgatgcagcagggcatgctgtttcacagtcttcatggaacggaaggcgactatgtcaaccagttgcgcatggatatcggcggattggacccggatcgcttccgcgcagcctggcaggccaccctcgatgcccatgagatcctgcgcagcggattcctctggaaggacggctggcctcagccgttgcaggtggtattcgagcaggcgacgctggagctgcggctggccccgccaggcagtgatccgcaacggcaggcagaggctgagcgcgaagccggtttcgacccggccagggcgccgttgcaacgcttggtgttggtgccgctggcgaatgggcggatgcacctcatctatacctatcaccacatcctgatggatggctggagcaacgcccaactgctcgccgaggtactgcagcgctatgcggggcaggaggtagccgctaccgttgggcgttaccgcgactacatcggttggttgcagagccgcgatgcgaaggcgaccgagtccttctggcgcgatcggctggcctccctggagatgccgacacgcctggcgcgccaggcgaggacggagcagcctggccagggtgagcatctgcgcgaactggatccgcagacgacccgccaactggcgtccttcgcccaaggtcagaaggtcacgctcaacaccttggtgcaagcggcctgggcgctgctcctgcagcggcactgcgggcaggagacggtagccttcggcgccaccgtggccggacggccggcggaactgccaggcatcgaggcgcagatcggtctgtttatcaataccctgccggtgatcgccgcgccgcagccacagcagagcgtcgcggactacctgcaggggatgcaggcgctcaacctggcgctgcgcgaacacgagcatacgcctctgtacgacatccagcgctgggccgggcatggcggcgaggctctgttcgatagcatcctggtgttcgagaacttccccgtggccgaggctctgcgccaggctcccgccgatctggagttctccacgccaagcaaccacgagcagaccaactaccccctgacgctgggtgtcaccctgggtgagcgcctgagcctgcagtacgtctatgcgcggcgcgatttcgacgcagcggacatcgccgaactggaccgtcatctgctgcatctgctgcagcggatggccgagacccctcaggcagcgctgggcgagctggccctgctcgacgccggggaacgccaggaggcgctgcgggattggcaggcaccgctcgaggcgctgccgcggggcggcgtcgcggcggccttcgcgcatcaggcagcgtcggcgcctgaggcgatcgcgctggtatgcggcgacgagtatctcagctatgccgaactggatatgcgcgccgagcgtctggcgcgtggcctgcgggcgcgcggcgtggccgcggaagcgctggtggcgatcgctgccgagcgctccttcgacctggtcgtcggcctgctgggtatcctcaaggccggtgccggctacctgccgctggatccgaactaccccgcggagcgcctggcgtacatgttgcgcgacagcggcgcgcgctggctgatctgccaggaaaccctggcggagcggctgccctgcccggcagaggtcgagcggctgccgctggagaccgccgcctggccggcgagtgcagatacgcggccgctgccggaggtagctggcgagacgctggcctacgtgatctatacgtccggctcgaccggccagcccaaaggagtggcggtcagccaggcggcgctcgtcgcgcactgccaggcggcagcacgcacctacggcgtcggccctggcgactgccaactgcagttcgcctcgatcagtttcgatgccgctgccgaacaactcttcgtacctctgctggcaggagcccgggtcctgctcggcgacgctggacagtggagcgcgcaacatctggcggatgaggtggagcggcacgcggtgactatcctcgatctaccgccggcttatcttcagcaacaggcggaggagttgcgccacgccggccgccggatcgcggtacgcgcctgtatcctcggcggcgaagcctgggacgccagcctgctgacccagcaggcggtgcaggctgaagcctggttcaacgcctacggtcccaccgaggcggtgatcactccgctggcctggcactgtcggacgcaagagggcggcgctcccgctatcggccgcgcgctcggtgcgcgccgggcctgcatactggacgcagccctgcagccatgtgcgccggggatgatcggcgagctgtacatcggcggccagtgcctggctcgtggctacctgggccgccccggccagaccgccgagcgtttcgtggccgatccgttctcaggttcgggcgagcgcctgtatcgcaccggggacctggcgcgttatcgcgtcgacggtcaggtcgaatatctcggccgggccgatcagcagatcaagatccgtggtttccgcatcgagatcggcgaaatcgagagccaactgcttgcacacccgtatgtggcggaagcagcggtcgtggcgctggatggcgtcggtggtccgctgctggcggcctacctggtggggcgtgacgctatgcggggtgaggaccttctggcggagctgcgcacctggctggccggacgcttgcctgcgtacatgcaaccgacggcttggcaggtgctgtccagcttgccgctgaacgccaacggcaagctggatcgcaaggcgctgccgaaggtggacgcggctgcccgccgccaggccggagagcctccgcgggaggggctcgaacgttcggtcgcagcgatctgggaggcgctgctcggtgtcgagggcatcgcccgcgacgagcacttcttcgaactcggcggtcactccctcagcgccacccgggtggtctcgcgcctgcgccaggacctggagctggacgtacccttgcgcatcctgttcgagcggccggtcctggcagacttcgccgcttccctggagtcccaggcggcgagcgctgcccctgtgctgcaaatattgccgcgagtcgccgagctgcctttgtcgcatgctcagcaacgcatgtggttcctctggaaactggagcctgaaagcgcggcctatcatctccccagcgtactgcacgtgcgtggcgtcctggaccaggcggcgttgcagcaggccttcgattggctggtgctgcgccacgagaccttgcgcacccgcttcgaggaggtcgacggtcaggcgcgccagacgatcctggcgaacatgccgttgcgcattgtcctggaggattgcgccggggcgagcgaagcaacgttgcgccagcgggtggccgaggaaatccgccagccattcgacctggctcgtgggccgctgctgcgcgtgcgtctgctggcgctggctgggcaggagcatgtgttggtcatcacccagcaccatatcgtgtccgacggttggtcgatgcaggtgatggtcgacgaactgctccaggcctatgccgcggcgcgccgcggcgaacaaccgacgctggcgccattgacgctgcagtacgccgactatgctgcctggcatcgcgcctggctggacagcggcgagggcgcgcggcagctggattactggcgtgagcgcctgggcgccgagcagccggtcctggaactgcccgccgaccgggtgcgcccggcccaggccagcggacgcgggcagcgtctggacatggcgctgccggtgtcattatcggaggagctgctggcctgcgcccggcgggagggtgtcaccccgttcatgcttctattggcctcgttccaggtgctgttgaagcgctatagcgggcagtcggacattcgcgtcggggtacctatcgccaaccgcaaccgcgccgaggtcgagcgcctgatcggcttcttcgtcaatacccaggtgctgcgttgccaggtcgatgctggcctggctttccgcgatctactgggccgcgtgcgcgaggcggcgctgggcgcgcaggcgcaccaggatctgccgttcgagcaattggtcgatgccttgcagcccgaacgcaatctcagccacagcccgttgttccaggtgatgtataaccaccagagcggcgagcggcaggatgcccaagtcgatggtttgcacatcgagagttttgcctgggatggtgctgccgcacagttcgatcttgccctcgatacctgggaaaccccggacggccttggggcggcgctgacctacgcgaccgacctgttcgaggcgcggaccgtcgagcgcatggcgcggcattggcagaacctgctgcgcggcatgctggaaaacccgcaggccagcgtcgactcgctgccgatgctcgatgccgaggagcgtggccagttgctggaaggctggaacgccactgccgccgagtacccgctgcaacgcggcgtgcaccggttgttcgaggagcaggtcgagcgcacgccgacggcgccggcgctggccttcggcgaggaacgcctggactacgccgagctgaaccgccgggccaaccgcctggcgcatgccctgatcgagcgcggggtcggtgcggaccgcctggtgggcgtggccatggagcgttccatcgagatggtcgtggccctgatggcgatcctcaaggccggcggcgcctacgtgccggtggacccggagtaccccgaggagcgccaggcctacatgctggaggacagcggcgtgcagctgctgctcagccagtcgcacctgaagctgccgctggcgcaaggcgtgcagcggatcgacctggaccaggccgatgcctggctggaaaaccatgccgagaacaatccggggatcgagctgaacggcgagaatcttgcctatgtcatctacacctccggctccaccggcaagcccaagggtgccggcaaccgccattcggcgctgagcaaccgcttgtgctggatgcagcaggcctacggcctgggcgtcggcgacacggtgttgcagaagaccccgttcagcttcgacgtgtcggtctgggagttcttctggccgctgatgagtggggcacgtttggtggtggccgcgccgggtgaccatcgcgacccggcgaagctggtggcgctgatcaaccgcgaaggggtcgacacgctgcacttcgtgccgtcgatgctgcaggccttcctgcaggacgaagacgtcgtctcctgcaccagcctgaaacgcatcgtttgcagcggcgaggcgctgtcggcggacgcccagcagcaggtgttcgccaagctgccgcaggccggcctctataacctctatggcccgaccgaggcggccatcgacgtcacccactggagctgcgtggaggagggcaaggacgcggtgccgatcggccggccgatcgccaacctgggctgctacatcctcgatggcgacctggagccggtgccggtgggcgtgctcggcgagctgtacctggccggtcggggcctggctcgtggctaccaccagcgtccggggctgactgccgagcgtttcgtcgccagcccgttcgtggctggggagcggatgtaccgcaccggcgacctggcgcgctaccgcgccgatggggtgatcgagtacgccgggcggatcgaccaccaggtgaagctgcgcggcctgcgcatcgagctgggcgagatcgaggcgcgcctgctggagcatccgtgggtgcgcgaggcggcggtgctggcggtggacagcaggcagttggtcggctacgtggtgctggagagcgagggcggcgactggcgcgaagcgctggccgcgcacctggcgacaagcctgccggaatacatggtgccggcgcagtggctggcgctggagcggatgccgctgagtccgaacggcaagctggatcgcaaggcgctgccgcgaccgcaagctgctgcggggcagacgcatgttgcgccgcagaatgaaatggagcgacgtatcgcggccgtctgggcggacgtgctgaagctggaggaggtgggcgccaccgacaacttctttgccctgggtggcgattccatcgtttcgatccaggtggtgagtcgatgccgtgcggcgggcatccagttcactccgaaggacctgttccaacaacagaccgtacaggggctggcgcgagtcgcccgcgtaggggctgcggtgcaaatggagcaggggcctgtgagcggcgagacggtgttgttgccgttccagcggttgttcttcgaacagccgattcccaatcgccagcactggaaccagtcattgctgttgaagccgcgcgaggccctgaatgcgaaggcactcgaagcggccttgcaggccctggttgaacatcacgacgcattgcgtctgcgcttccatgaaacggacggaacctggcatgccgaacatgccgaagcaacgctgggcggtgcgctgctctggcgtgccgaggcggtggaccgacaagcgctggagtcgctctgcgaggagtcgcagcgcagcctggacctggccgacggcccactgttgcggagcctgttggtggatatggccgacggcggccagcgtctgttgttggtgatccaccatctggtggtggacggggtgtcctggcgcattctgctggaggatttgcaaagggcttaccagcagagcctccgtggagaagctccgcggctgcctggcaagaccagcccgttcaaggcctgggccggccgagtgagcgagcatgcccgtggtgagtcgatgaaggcgcaattgcagttttggcgcgagctgctggaaggtgcgccggccgagcttccgtgcgagcatccgcaaggcgctctggagcagcgtttcgctacctccgtgcagagtcgcttcgaccgcagcttgaccgaacgcttgctgaagcaggcgccggcagcctaccggacccaggtcaacgatcttctgctgaccgccctggcgcgagtggtctgccgttggagcggcgcctcttcaagcctggtacagctggaagggcatgggcgcgaggagctgttcgccgatatcgacctgagtcgcaccgtgggttggttcaccagtttgttcccggtgcgcctgagcccggtcgcggatcttggcgagtccctgaaggcgatcaaggaacagttgcgtgcgattcccgacaagggcctgggttatggcttgctgcgctatctggctggagaggaaagtgcccgggtcctggcggggttgccgcaggcgcggatcactttcaattacctgggccagttcgacgctcagttcgacgagatggctctgctggacccggctggcgaaagcgcgggggcagagatggaccccggcgctccgctggacaactggctgagtctcaatggccgggtgttcgacggtgaactgagtatcgactggagcttcagctcgcagatgttcggcgaggaccaggtgcgtcgcctggccgatgactatgtggctgagctgacggcgctggtcgacttctgctgcgattcgccacggcatggcgcgacgccttccgatttcccgctggcggggttggaccaggcgcgtctggatgccctgccggtcgcgctggaagaggtcgaggacatctatccgctgtcacccatgcagcagggcatgctgttccattcgctgtacgagcaggcatcgagcgactacatcaatcagatgcgtgtggatgtgtccggcctcgatctcccgcgcttccgcgcagcctggcagtccgccctggaccggcacgcgatcctgcgcagtggtttcgcctggcagggggagctgcagcagcccttgcagatcgtctatcgacagcgccagttgcccttcgccgaagaggacctgagccaggcggcgaatcgggacgccgcgctgctcgcgctggctgcggccgagcgcgaacgcggtttcgaactgcagcgtgcgccactgttgcggctgctgttggtgaagactgccgaaggtgagcatcacctgatctacacccatcatcacatcctgctggacggatggagcaatgcccagttgctcagcgaggtgctggagtcctatgccggacgctcgccggagcagctccgggatggccgctatagcgactacatcgcctggttgcagcggcaggacgcggcagctaccgaggcattctggcgcgagcagatggcggctctggacgagccgacgcgattggtcgaggcactggctcagccgggactgacatcggccaacggcgtcggagagcacctgcgtgaggtggacgcaacggctaccgcgcggctccgggatttcgcccggcgccaccaggtcactctcaataccctggtccaggcgggctgggcgctgctcctgcaacgctataccggacaacacaccgtggtcttcggcgccaccgtctccgggcgccctgccgatctgccgggtgtcgagaaccaggtcgggttgttcatcaataccttgccggtggtggtaacgctggctccacagatgaccctcgacgaactgctgcaagggctgcaacggcagaacctggcgttgcgcgaacaggagcacacgcctctgttcgagctgcagcgctgggcggggttcggcggcgaggcggttttcgacaacctgttggtgttcgaaaactacccggtggacgaggtgctcgaacggtcctccgctggaggcgtgcgtttcggtgccgtagcgatgcacgagcagaccaactatccgctggccctggcgctgggtggcggggatagcttgtcactgcaattcagctacgatcgcggactgttcccggccgctacgatcgagcgcctgggtcgccacctgacgactctgctggaggcattcgccgaacatccgcagcgacgtctggtcgatctgcagatgctcgagaaggcggagcttagcgctatcggcgctatctggaaccgcagcgattcgggctatccggcaacgccgctggtacaccagcgagtggccgagcgggcgcgtatggcgccggatgcggtggcggtgatcttcgacgaggaaaagctcacctacgccgagctggatagccgggccaaccgcctggcacatgcgttgatcgcccgaggcgtcggccccgaagtgcgtgtggcgatcgccatgcagcgcagcgcggagatcatggtggcgttcctggcggtactgaaggccggcggcgcctacgtgccgctggacatcgaatacccgcgcgagcgcctgctgtacatgatgcaggacagtcgcgcgcacctgctgctgacccatagccacctgctggagcgtctgccgatccccgaggggttgtcctgcctgtccgtggatcgcgaggaggagtgggccggcttccccgcccatgatccagaggtggcgctgcacggcgacaacctggcctatgtgatctacacctccggctccaccggcatgcccaagggcgtggcggtgtcccacggtccgttgatcgcccatatcgtggctaccggcgagcgctacgagatgaccccggaggactgcgagctgcacttcatgtcgttcgccttcgacggttcccacgaaggctggatgcacccgttgatcaacggcgcgcgggtgctgatccgcgacgacagcctgtggctgccggaacggacctacgccgagatgcatcgccacggggtaacggtgggggtgttcccgccggtgtacctgcagcaactggccgagcatgccgagcgcgacggcaatccgccgccggtacgggtctattgcttcggcggcgacgcggtggcgcaggccagctatgacctggcgtggcgggcgctgaagccgaagtacctgttcaacggctacggcccgaccgagacggtggtgacgccgctgctgtggaaagcacgggcgggcgatgcctgcggcgcggcctacatgccgatcggtacgctgctgggcaaccgtagcggctacatcctcgacgggcagttgaacctgctgccggtaggcgtggcgggcgaactgtacctgggcggggaaggggtggcgcgcggctacctggagcgtccggcgctgaccgccgagcgtttcgtgccggatccctttggcgcgccgggcagccggctgtaccgcagcggcgacctgacccgtgggcgtgcggatggggtggtggactacctcggacgggtggaccaccaggtgaagatccgaggcttccgcatcgaactgggagagatcgaggcgcgcctgcgcgagcatccgtcggtgcgcgaggcggtggtggtggcccagccgggcgcggtgggccagcagttggtgggctacgtggtggcgcaggcgccagcggtcgcggattcgccggaagcgcaggcggagtgccgggcgcagttgaagacggcgctgcgcgagcgcctgccggaatacatggtgccgtcgcacctgttgttcctggcgcggatgccgctgacgccgaacggcaagctggaccgcaagggcctgccacagccggatgcgagcctgttgcagcaggtctacgtggcgccgcgaagcgatctggagcaacaggtcgcggggatctgggcggaggtcctgcaattgcaacaggtcgggctcgacgacaacttcttcgagcttggcggccactcgttgctggcgatccaggtgactgcccggatgcagagcgaggtcggcgtggagctgccgctggcggcgctgttccagaccgagtcgctgcaagcctatgccgagcttgccgcggcgcagacttccagcaatgacaccgatttcgatgaccttcgtgaattcatgagcgaactagaggcgatctga

SEQ ID NO: 7450 - DNA, 2049 bp, Pseudomonas aeruginosa
atgcagcagggcatgctgttccattcgctgtacgagcaggcatcgagcgactacatcaatcagatgcgtgtggatgtgtccggcctcgatctcccgcgcttccgcgcagcctggcagtccgccctggaccggcacgcgatcctgcgcagtggtttcgcctggcagggggagctgcagcagcccttgcagatcgtctatcgacagcgccagttgcccttcgccgaagaggacctgagccaggcggcgaatcgggacgccgcgctgctcgcgctggctgcggccgagcgcgaacgcggtttcgaactgcagcgtgcgccactgttgcggctgctgttggtgaagactgccgaaggtgagcatcacctgatctacacccatcatcacatcctgctggacggatggagcaatgcccagttgctcagcgaggtgctggagtcctatgccggacgctcgccggagcagctccgggatggccgctatagcgactacatcgcctggttgcagcggcaggacgcggcagctaccgaggcattctggcgcgagcagatggcggctctggacgagccgacgcgattggtcgaggcactggctcagccgggactgacatcggccaacggcgtcggagagcacctgcgtgaggtggacgcaacggctaccgcgcggctccgggatttcgcccggcgccaccaggtcactctcaataccctggtccaggcgggctgggcgctgctcctgcaacgctataccggacaacacaccgtggtcttcggcgccaccgtctccgggcgccctgccgatctgccgggtgtcgagaaccaggtcgggttgttcatcaataccttgccggtggtggtaacgctggctccacagatgaccctcgacgaactgctgcaagggctgcaacggcagaacctggcgttgcgcgaacaggagcacacgcctctgttcgagctgcagcgctgggcggggttcggcggcgaggcggttttcgacaacctgttggtgttcgaaaactacccggtggacgaggtgctcgaacggtcctccgctggaggcgtgcgtttcggtgccgtagcgatgcacgagcagaccaactatccgctggccctggcgctgggtggcggggatagcttgtcactgcaattcagctacgatcgcggactgttcccggccgctacgatcgagcgcctgggtcgccacctgacgactctgctggaggcattcgccgaacatccgcagcgacgtctggtcgatctgcagatgctcgagaaggcggagcttagcgctatcggcgctatctggaaccgcagcgattcgggctatccggcaacgccgctggtacaccagcgagtggccgagcgggcgcgtatggcgccggatgcggtggcggtgatcttcgacgaggaaaagctcacctacgccgagctggatagccgggccaaccgcctggcacatgcgttgatcgcccgaggcgtcggccccgaagtgcgtgtggcgatcgccatgcagcgcagcgcggagatcatggtggcgttcctggcggtactgaaggccggcggcgcctacgtgccgctggacatcgaatacccgcgcgagcgcctgctgtacatgatgcaggacagtcgcgcgcacctgctgctgacccatagccacctgctggagcgtctgccgatccccgaggggttgtcctgcctgtccgtggatcgcgaggaggagtgggccggcttccccgcccatgatccagaggtggcgctgcacggcgacaacctggcctatgtgatctacacctccggctccaccggcatgcccaagggcgtggcggtgtcccacggtccgttgatcgcccatatcgtggctaccggcgagcgctacgagatgaccccggaggactgcgagctgcacttcatgtcgttcgccttcgacggttcccacgaaggctggatgcacccgttgatcaacggcgcgcgggtgctgatccgcgacgacagcctgtggctgccggaacggacctacgccgagatgcatcgccacggggtaacggtgggggtg

SEQ ID NO: 7451 - DNA, 870 bp, Pseudomonas aeruginosa
atgaagcgctggaatttctccaacgtcatgctgatcgtcggcctgctcttcatctacctgccgatgctgatcctggtgatctattcgttcaacgcctccaagctggtgacggtgtggggcggctggtcggtgaagtggtacgtcggcctgctggacaacacccaactggtcagttcggtcggacgctccctggagatcgccttctatacggcgttctcctcggtgttcctcggcaccctggcggccttcgtcctcacccgtatcccgcgcttccgcggtcgtacgctgttcggcggcatggtcaccgcgccgctggtgatgccggaagtgatcaccggcctgtcgctgctgctgttgttcgtggccatggcgcaactgatcggctggccgcaggaacggggtatcgtgaccatctggatcgcccacaccagcttctgctcgtcctacgtggcggtggtggtgtcggcgcgcctgcgtgaactcgacctgtcgatcgaggaagcggcgatggacctgggcgccaagccctggaaggtgttcctgctgatcaccatcccgatgatcgcgccctcgctggcggcgggcggcatgatgtccttcgccctgtcgctggacgacctggtactggccagcttcgtctccggacccggctcgaccaccttgccgatggaagtgttctcggcggtacgcctgggcgtgaagccggagatcaacgcggtggccagcctgatcctgctgagcgtttcgctgttcaccttcttcgcctggtacttcacccgccaggccgaggagcggcgtcgccgggcgatccagcaggcgatggaagagaccgcgaccgactggcagaaaggctcgccgaccccggcctga

SEQ ID NO: 7452 - DNA, 1464 bp, Pseudomonas aeruginosa
gtggtccaggaagcgccgcgcaacagccgcgaccgcgcgcagctgttcgcggtcggcatccagcgggcgatccgcagcctgtgcgggccgctgatccgcgccagccagttgtactgcccggtccccgaggggctttggctggaactccaccagctctaccagttggccagccagcgcggcgtgcatcgtctcgcggtgcgcgacgaactggccaagcacacccccggcctgagcgtcgagcaggcctacctgattccgctgctgctcggctgcgcgcgctgcaaccagatgcgccagaacaacattgcacggctcgccgaggtgctcgaaccctggagccagctgctgtcgatacagagcgcgacgctgcccggctcgctgttcatcgccgtgccgcagatcgacggcccgccgcgctaccgttcgctgtacccggagacccaactggccagtgccctgggcatcgacacccagccgctggtcgagctgatccgcgaatacctgctgcagcccgaggccgaacgcgcgaaagcacgcctgccgctgatcgaaggggtgaccctggacctgctgcaacatctctcctcggcctggggtgacatcgccgaacgtaccttccagcgcacccagggccagggccagttgaccctgtgcatcggcatgagcgccctgcactacttcctcgccgggcgccgcccgttcaacgaggtcctgcagatccaggaagcgcccgaggcgcctcgcttcaaggccgacgtccaggacgcctgggccggcgccttcgatgcacagaaggtcaccgactggcagcccggcatgccgctggaggaaatcgagtaccgcccgcaccagtcgccccgcagtgtgcaacccgggcacccgcaggcccacgcacaggctgacgccaccgaggactacccgacctacgccctgcccatcgtcaaccacagccccggcggctattgcctgagctggccgaaggaggtgcccgcccaactgcaggcgggcgaactggtcggcctgcaggaccttccaggccaggcgtggagcatcgcggtggtgcgctggatccgccaggtacgcaatggcggcacgcagatgggcatcgagatgatcgccccggcggcacagccctgcggcctgcaactgctgcgcaagaccgagcagagcagccactacctgcgcgccctgctgctgccggcgatcgccgcgatctcgcggccggcgacggtgatcaccccgcgcctgccgttccaggagggcagccgggtgcagatcaacctgcacggcgaggagcggcgcgcggtgctgaatcgccggcaggcctcgaccggcagcttcagccagttcgaataccgctcggcggaaccggtgaacaccccgagcgataagccggtcacagcgccagtggcccggccgcctgcgggggaggaagattttgactcgctctggaagtctctgtag

SEQ ID NO: 7453 - DNA, 2493 bp, Pseudomonas aeruginosa
atgcccgagctgcttgcccactatccgttcaccgatacggcctaccacgagttgctcgatcgccagggcggcgtgcgtccccattggcagcggctgttccgccaactggagcgcagcagccctgagcaactgcgccagcgccaggccctggtggaacggcagatccaggagaacggcgtcacctacaacgtttacgccgatcccaagggcaccgaccgcccctgggcgctggaccttctgccgaacctgctgtccgccgccgagtggcagccgatcgccgctggtgtggcgcagcgtgctcggctgctcaatgcgctgctggccgacctgtacggcgaccagcgtctgctcgccgaagggctgctgcccagcgaactggtcttcggccatccgaacttcctctggccggcgctcggcatccggccgcccggcgggattttcctgcacagctatgccgtggacctggcgcgcgatgccgacggacgctggcaggtccttgccgaccgcacccaggctccgtccggcgcgggctatgcgctggagaaccggcagatcgtctcgcgggccttgccggaactctatcgcgacctgcgcgtgcagcatctcgccgggtatttccgcaccctgcaggagaccctcgccagccaggccgccggcgacggcgagacgccgctggtggtgctgctgactcccggacgtttcaacgaaacctacttcgagcatctctacctggcgcgccagctcggttttccgctggtcgaggggcacgacctgacggtgcgcgacgccaccctctatctcaagaccctcggcggcctgaaacgggtgcacgcggtattgcggcgcctcgatgacgatttctgcgacccactggaattacgtaccgactcggcgctgggcattcccggcctgctcgaggcggtacgccagggacgcgtgctggtggccaacgcactgggcagcggagtgctggagtcgcccggcctgctcggcttcctgccgcaggcctgtcgccgcctgcttggcgaggaactggcgctgccctcgcttgacacccgctggtgcggcgagccgcaagccctcgaggcgatactcgcggcactgcccgacctggtgatcaagccggcctttcccggccagcgctgcgaacctctgttcggccacgccctcgacagtgccggcctggcatccctcggcgagcgcttgcgcgagcgcccgcaggcctacgtggcgcaacgcctggcgcagttgtcccaggcaccggtctggcgcgacggcaaggccggcgtcggcctgcagtcgcgggccatcggcatgcgcgtattcgccgtcgccgccagcgacggccgctactgggtgatgcccggcggcctgacccgcgtagcctcggcggcggacgccgaagtggtgtcgatgcagcgcggcggggcgagcaaggacacctgggtgctggccgagcgagcagtcggcggcgagccgttgcgaccgcgccggctcggcgtgcgcgacctggtccgcgaagacccctacctgccgtcgcgggtggtggagaacctgttctggtacggccgctatgccgagcgttgcgacgaccatgcgcgcctgttgcgggtggtgctgtcgcgctacgtggatgccgatggcgacgaagaggcgttgcgcagcgccctggccctggccggcggcatcggcctgctgcccggggatggcgagccgttggaaaggtgcctgttgcgggcgttgctcgacgagcactggccggcgagcctgtgcgccaacctgcggcgcctgcactgggcggcggcgcaggtgcgcgggcgcttgtccggggagaactggctggccttgctggagctgcaacgcgacatgcaggcgctcgatccggcacgcaccgacctcggcgaagcgctggacttcctcaaccggctagtgatgtccctggccgcgttgtccggtttcgccctcgacgacatgacccgcgacgacggctggcgtttcctgatgatcggccggcgcatcgagcgcgtgcgcttcttcgccgagagcatcgccgccttcctcggtagcgcctgggacgccggcgcgctggagtggctgctggagctgggtaacagcggcatcacctaccgctcgcgctacctggcgtcgccgcagctggtcccggtgctcgacctgctcctgttgcacgagcagaacccgcactcgctgcgcttccagttgcaggccctggagcgttcgctggagcgcctgcacgaggagttcggcgcgccacgcgagcgggaactcaggaccctgggcgaacgcctgcgcagcttcgatctggcggccctggaaagcccgctgttcggcgcggcaggactcgacgaggtgctcgtcgggctggcgcgactgctgcgcgacatcgccgcctgcgccggacaggtctccgatcggctaggcttgcgctatttcgcccatgtcgacgatgtcagccagagaacggtatccacctga

SEQ ID NO: 7454 - DNA, 705 bp, Pseudomonas aeruginosa
gtgttgagaagcagcagaaggctgctggtcaggccggtcaacagttcccgcatggttggtttccctgtcctgggtgtgggtcgacgcggcccatcatacgcatccgcgccgcgccgcccaagccgccggcgtggcgaacgaaaccgcgccgtgctagtcctatgtggacctcgtatcacttcaggagatgcccgcgtgaagcgtgcccttgccttgctctcgctgttcgccctgccggtcctcgccgccgaacccaacctctacggccgctacgaatgggtctccctgccggagctggaccgcaccctgcaggcgaagatggacaccggcgcctacacctcctcgctgtcggccaaggacatcgagttgttccagcgcgacggcgaggagtgggtgcgcttccggctggccaccaaggaggccgacggctcggtgttcgagcacaagctggcgcgcatcggcaagatcaagaaccgcgccgacaaccgcagcggcgaggacgaggatgaggaccgcctgagcgaacgcccggtgatcgacctgcaggtctgcctgggcggagcgatgaagaccatcgaggtcaacctcaccgaccgcagcgccttcaactatccgttcctgatgggcaccaagggcttgcgcaaattccacgtcgcggtcgatccctccgagcgcttcgtcgccgacaagcccacctgcaagtaa

SEQ ID NO: 7455 - DNA, 990 bp, Pseudomonas aeruginosa
atgcccgccagccttcctctgtccgctgccgaaacggtggcgccgccatcgccgcggacgctgatcatcgacaccgatccgggcgccgacgatgtgatcgccctgctgttcgccatggcctcgccgaaggagctgaagatccaggcgctgaccaccgtcgccggcaacgtgccgctggaaaagaccgcgcgtaacgcccggctggcccgcgagtggggcaagcgcccggatatcccggtctacgccggcgccccgcgaccgctgctgcgcacgccgatctacgccgccgacgtgcacggcagcgaaggcatcagcggcgtcgaggtgcatgagccgaagcagccgctggccgaaggtaacgccgtggactacctgatccgcaccttgcgtgcggcgccggagaagagcgtgaccctggccatgctcggcccggagaccaacctcgcgctggccctgacccaggccccggacatcgtcaagggcgtccgcgagatcgtgatcatgggcggcgcccacttcaacggcggcaacatcaccccggccgccgaattcaatatcttcgccgacccccacgcggcggaaatcgtgctcaagagcggggcgccgatcaccatgctgccgctcgacgtgacccacaagatcctcaccagccccgagcgcatcgccaagctgcgcaacctcggcaaccaggccggcaagaccgtcgccgacatcctcgacgcctacgtccagtacgacatcaagtactacggcctgaagggcggcccggtgcacgacgccacggtggtcgcctacctgctcaagccctcgctgttcaagggcaagcggatcaacgtgcaggtcgacagccgcgagggcatcaccttcggccagaccgtggccgactggtacggcggcctcaagcagccggccaacgtcgagtggatcaacgagggcgatgcccaggggttcttcgacctgctcaccgagcgtatcgcccgcctgccctga

SEQ ID NO: 7456 - DNA, 462 bp, Pseudomonas aeruginosa
atggcgcatctggtctggcaggatgacctgaataccggtattcaggtcatcgacaatcaacacaaacgcatcgtcgagatgatcaatcacctgcacgacgcccagcaaggcaaggaacacgcggcgatcgccgaggtgatcgaggagctggtggactacacgctgtcgcacttcgccttcgaggaaaccctgatggaggacgccggctaccagttttcccgggcgcacaagaagatccacgagctgttcatccgccgggtctccgaataccgggtgcgcttccaggccggcgaggatgtcggcgacgaactcaagggcttgctctcgcgctggctgttcaaccacatccgcaacgacgacgccggatatgtggatgcggtacgccacagcatgtccgaactggtcaaggacaagagcgagggcggttggttgtcgcgctcgatgaagcgcttcttcggctga

SEQ ID NO: 7457 - DNA, 975 bp, Pseudomonas aeruginosa
atgggacagttgatcgatggccgctggcacgaccagtggtatgacacacagaaagacggccgcttccagcgcgaaaacgcccagcgccgccattggctgggcgagccggcgttccccgccgagggcgggcgctaccatctctatgtctcgctggcctgcccctgggcccatcggaccctgatcgtgcgcaagctgaaggggctggagtcgctggtcgatgtttcggtggtcagttggctgatgcgcgagaacggctggaccttcgaccccgcccacggctccaccggcgatcgcctcgacggcctggcctttctgcaccagcgctacacccgcgacgacccgcactacagcggccgggtcacggtgccgctgctgtgggacaagcaggcgcagaagatcgtcaacaacgaatcagccgatatcgtccgcatcttcaacagcgccttcgacgccatcggcgccaacgcgctggacttctacccggagccgctgcgcgaggagatcgaacgcctcaacggacgcatctatcctgcggtcaacaacggcgtgtaccgtgctggcttcgccactcgccaggacgcctacgaggaggccttcgtccagttgttcgaggagctggactacctggaaggcttgctcggcgaacgccgctacctggccggcgaatacctgaccgaggccgatatccgcctgttcaccaccctggtgcgcttcgatgcggtgtaccacggacacttcaagtgcaacctgcggcgcatcgaagactacccgaatctctccggctggttgcgcgagctgtaccaacgcccgggcatcggcgagacagtggacttcgaacatatcaaggggcactactacgccagccaccgcaccatcaacccgaccgggatagtaccgctgggcccgcgtctcgacctggcgcgcgcgccaggccgggaacgacttcccggcaagggcatctggggagaaggctga

SEQ ID NO: 7458 - DNA, 1266 bp, Pseudomonas aeruginosa
atgacccagacactctcgctgcgagctgtcctctgcgccaccaccctggtttccccgttcctggcgcaggccgcgacggaatccgaggtcgaggcgctgaagaaggaactcctggagctgcgccaacgctacgaggcccagcagaacgccctgatggtcctcgaacagcgcgtgcgccaggtcgaggcgcaaccccaggcgccgcagccgcaacgcctggtcaagtcgatccagccgccggcgcaggcgcgcaacgacgccaacgcggtcgccggcacctacggcgccagcctcaaggacgatggcgcgcccgcgcccagcgtggaaaacatctaccaggacgccagcggcttcttcggcggcggcaccttcagcctggagaccggcctcacctacagccactacgacacccgccagttgttcctcaacggcttcctggcgctggactcgatcttcctcggcaacatcggcgtggaccagatcgatgccgacatctggaccctcgacctgaccggccgctacaactggaaccagcgctggcaggtggatatcaacgccccggtggtctatcgcgaatcgacctaccagtccgccggcgccggcggctcgacctcgcagatcaccgagaaatcggtgaccggcgacccacgcctgggcgacgtcagcttcggcgtcgcctacaagttcctcgacgaaagcgagagcaccccggacgcggtggtcagcctgcgggtcaaggcgcccaccggcaaggatccctacggcatcaagctgaagcaggtaccgggcaacaacaacctcaacgtgcccgacgacctgcccaccggcaacggcgtctggtcgatcaccccgggcatctcgctggtgaagacggtggacccggcggtgctgttcggcagcctgtcgtatacctacaacttcgaagagtcgttcgacgacatcaacccgcagcaaggcgtgaagaccggcggcaaggtcaagctcggcaactggttccaactcggcgtcggcgtggccttcgcgctgaacgagaagatgagcatgtcgttctccttctccgaactgatcagccagaagagcaaggtcaagcaggacggccagagctggcagaccgtcagcggcagcgacgccaacgccggctacttcggcctgggcatgacctatgcggtgagcaacaggttcagcatcgtgcccagcctgtccatcggcatcactccggacgcgccggacttcaccttcggcgtgaaattcccctactacttctga

SEQ ID NO: 7459 - DNA, 1128 bp, Pseudomonas aeruginosa
atgcggcaaagattctggcaaggaacattcaagaccctgggcttcctcggcctgacggcggggctcgccgcccaggccgcggagccgtccggcaaggccctcagcgccgccgccggcgtgccctggccggcggtcatcgcccaccgcggcgcctcgtacgacgcccccgaggaaaccgccgcggcctacctgctggcccgcgacctcggcgccgactacctggaagccgacgtgcagcgcagccgcgacggcgtgctggtcgccctccacgacgacaccctggagcgcaccaccgacgtcgccgaggtcttcccggagcgcgccaaggacccggtgagcagcttcactctcgccgaactcaagcgcctggacgccggctcctggttcaatcgcgccttcccccaacgcgcccggcccggcttcgtcggcctgcgcatcctcaccctcgacgagatgctcgacatcgccgagggcggcgccaacaagccgggcctgtacctggagaccaaggtaccggcgcaattccccggcatcgaagacgacctgcgcaagctgctggaacgccgcggctggctgcaaccccgcgagcgcgccgccgccgggcatgtcgacgtggcccacggcaatggccgggtgatcctgcagaccttcgagaagagcagcctggaactgctgcaagaaagcatgccgcaagtgccgaagattctcctgctgtggctcggtgacggctacctggaagcccgttcgccagtgaccttcaaggaatccggggaaaccgacaaggcggccttctacgccaggcaggaagtgaagtccgaagccgagttcggcgcctggctggactgggccaaggcccacggcgcgctgggcaccgggccctcggcgaccctcagcgaacgcggcgaacagagctacgccgacctggtgaaaccctggatgaaccgcatgacccacgcgcgcgggttgttcatccatgcctactcggtggactcggcggaagacttcaaggccctaggcgcggccggcgtcgacggtttcttcaccaaccgcacctcggaactgctgaagttccagggccgcccggcggcgcaagacatggacgcgctgctgcgccggcacggctactga

SEQ ID NO: 7460 - DNA, 1146 bp, Pseudomonas aeruginosa
atgaaaatgctgaagcgctttatcgtgaagaagaacgaacgcggcctgctgtattccgaaggcgacttcctcgccgtgctcgaaccgggcacctaccgccgcttcgatccgtacgaccgcctgagcctggaaagcttcagcctgaacaccccgcagtttgaacaccgcctggccggctacctgcggcagagcgaaccgcaactggtggagcgctacttcacccggatggacctgggcgacaacgaggccggcctgcgctacgaggacggcgtgctggtggagttgctcgcaccgggcagccgccgactgtactggaaaggccagaccgagcagcgcctggagcgcatcgacctgacccaggactatcgattgtccgccgcgctggtcgcccagttgcaccagccgaacctgcgcgaccgcgccctggcgggcctggacgcagtgttgctggtccaggtgccggcgttccaggtcggcgtgctcaaggtcgacggcgcccttgccggcctgctgcaagctggacaatacggtttctggcgctacaaccggcaagtcagcgtggaactggtcgacacccgtatccaggcgctggaggtcagcggccaggagatcctcacccgcgacaaggtcagcctgcgcctgaacctcgccgccaattggcgctacagcgacgtgctcaccgccttctcgcggctgagcaaaccgctggagtatctgtaccgcgagctgcagttcggcctgcgggcggcagtgggcacccgcaccctcgacgaactgctggagaacaagcagtcgatcgacgaagcggtcagcgcccacctggccgccaagctggaagacaacggcctggaagtgagcggcctgggcgtacgcgacatcatcctcccgggcgaaatgaagaccctgctggcgcaggtggtggaggcggagaaggcggcccaggccaatgtgatccgccgccgcgaggaaacctcggcgacccgctcgctgctgaataccgcgaaggtcatggaggaaaacccgaccgcgctgcgtctgaaggaactggaaaccctggagcgggtggccgagcgcatcgaccggatttcggtattcggtggcctggaccaggtattgaacggactggtcacgctgaagcaggcctga

SEQ ID NO: 7461 - DNA, 696 bp, Pseudomonas aeruginosa
atgagttcagcggaagtattggccagcgtggatatcgtggcgttgcgcctgaaccccgggcacggactggagctgttgctgatccgccgcgcccaggcgcctttcgccggccagtgggccttgcccggcgtgctggtcaacggccgcagcgccgaccacagcctcgacgacgcggcggtgcgcgccctgcgcgacaaggcgcggctggagccggcctacatcgagcaggtggccacggtcggcaacgcggtacgcgacccgcgcggctggtcgctgagcgtgttctacctggtgctggtcggtccggacacccaggtggaggacgacgacctcgacttcgtgccgctgcgcgacgttcgcagcgagcgcttcgccctgccgttcgaccacgcccaactggtacagcaggcctgcgagcgcctggcgagcaagtcggtgtacagcgccctgccgctgttcctgctggcgccgcgcttcaccgtggccgaggcgctgaaggccttcgagtgcgccatcggccaggaagtccagcattccagcctgcgcgggcgcctggagcggatgaaggaggctggctgggtcgaggacaccggcgaacgccagcgtccgcccatggggcgcccgcaacacgtcctgcatttcaccccgaagccgggcggcgccttcgttttcgaccgcagcctgctggcgtcctga

SEQ ID NO: 7462 - DNA, 2226 bp, Pseudomonas aeruginosa
atggcacttgcgcaacagacccgcctggtccgggtcgacagtccgctcggcgcggaggtcctgcaattgcagcgaatggagggtcgcgaagagctcggccggccgttcgcctacgagctggaactgatctcggaaaaccccgacctgccactcgacgggctgctgggcaagccggccagcctggcgctggaactgcacgacggcagccggcggcatttccacggcatcgtcgccgcttgcagccagggatccggcaacggccagttcgccagctaccaggtcaccctgcgcccctggctgtggctgctgacgcgcacctccgactgccgcatcttccagaaccagaaggtcccggacatcatcaagcaggtgttccgcgacctcggcttctccgacttcgaggacgccctgagccgctcctaccgcgagtgggaatactgcgtgcagtaccgcgagaccagtttcgacttcgtcagccggctgatggagcaggaaggcatctactactggttccgccacgagcagagccgccacatcctggtgctctccgacgcctacggcgcgcaccagagcccgccgaactacgccagcgtgccctactacccgccgaccctggaacagcgcgagcgcgaccatttctacgactggcacatggcgcgcgaggtgcagtccggctcgctgagcctcaacgactacgacttccagcgtcccggcgcgcgcctggaggtgcgttcgaacatcgcccgctcgcacgcggcggccgactacccgctgtacgactaccccggcgaatacgtgcagagccaggacggcgagcagtacgcgcggacccgtatcgaagccttgcaggcgcgctacgaacgggtgcgcctgcgcggccgcgcccgcggcctgggttcgggccacctgttcaagctcagcggctacccgcgcgaggaccagaaccgcgagtacctggtggtcggcgccgagtaccgggtggtccaggaactctacgagaccggcggcggcggggtcggcgcgcagttcgagagcgagctggactgcatcgatgccggccaggcctaccgccccttgccgaccactccgctgccgatcgtccgtggcccgcagactgcggtggtggtcgggcccaagggcgaggagatctggaccgaccagtacggccgggtcaaggtgcacttccactgggatcgccacgaccagtcgaacgagaacagctcctgctggattcgcgtgtcccaggcctgggccgggaagaactggggttcgatgcagatcccgcggatcggccaggaagtgatcgtcagcttcctcgaaggcgacccggaccggccgatcatcaccgggcgggtctacaacgccgagcagacggtgccctacgagctgccggcgaacgccacccagagcgggatgaagagccgttcgagcaagggcggcacgccggccaacttcaacgagatccgcatggaggacaagaagggcgccgagcagttgttcatccatgccgagaagaaccaggacatcgaggtcgagaacgacgagacccactgggtcggccacgaccggaccaagaccatcgaccacgacgagaccgtgcacgtgaagcacgatcgcaccgagaccgtggacaacaacgagaccataaccatcggcgtcgaccgcaccgagaaggtcggcaacaacgagaagatcagtatcggcgcgaaccgcaccgaggacgtcggcagcaacgagaccatcagcatcggcgtcgaccgcaccgagaaggtcggcagcaacgagaagatcagcatcggtgccaatcgcaccgaggacgtcggcaacgacgagaccatcagcatcggcgcgaaccgtagcgagtcggtgggcaacaacgagacgatcagcatcggcgccgaccgcagcgagtcggtgggcgccaacgagaccatcgacataggcggcaaccagagcaccagcatcggcaagaacgagtcgcgcagcgtcggccagggccgcgatacctcggtgggcaaggacgatagcctggacgtgggcaagagcttcacgctcaacgccggcgactcgatcaccctggtcaccggtgccgccagcatccgcatgaagaaggacggcagcatcgtcatcagcggcaagaacatcaccatcgacggatccggggcgatcaacgtcaaggccgacaagaacgtggtggtgaagggacgcaagatcctccagaactga

SEQ ID NO: 7463 - DNA, 1932 bp, Pseudomonas aeruginosa
atgcaactgacccgcctggtccaggtggattgcccgctggggccggacgtgctgctgttgcagcgcatggagggacgcgaggaactgggacggctgttcgcctacgagctgcacctggtatcggaaaatcccaacctgccgctggagcagttgctcggcaagccgatgagcctgtcgctggagctgcccggcggcagccggcgcttctttcacggcatcgtcgcgcgctgtagccaggtggccgggcacggccagttcgccggctaccaggccaccctgcggccctggccgtggctgctgacgcgcacctcggactgccgcatcttccagaaccagagcgtgccggagatcatcaagcaggtgttccgcaacctcggcttttccgatttcgaggatgccctcacgcgcccctaccgcgagtgggaatactgcgtgcagtaccgcgagaccagcttcgacttcatcagccggctgatggaacaggaaggcatctactactggttccgccatgagcagaagcgccacatcctggtgctctccgacgcctacggcgcgcatcgcagcccgggtggctacgccagcgtgccgtactacccgccgaccctcggccatcgcgagcgcgaccacttcttcgactggcagatggcacgcgaggtccagcccggttcgctgaccctcaacgactacgacttccagcgccccggcgcgcgcctggaggtgcgttcgaacatcgcccggccgcacgcggcggccgactacccgctgtacgactatcccggcgaatacgtgcagagccaggacggcgagcagtacgcgcgcaaccgcatcgaggcgatccaggcgcagcacgagcgcgtgcgcctgcgcggcgtggtgcgcgggatcggcgccgggcacctgttccgcctgagcggctatccgcgcgatgaccagaaccgcgagtacctggtggtcggcgccgaataccgggtggtccaggaactctacgaaaccggcagcggcggcgccggctcgcagttcgagagcgagctggactgcatcgacgccagccagtcgttccgtctcctgccgcagactccggtaccggtggtgcggggtccgcagaccgcggtggtggtcggacccaagggcgaggagatctggaccgaccagtacggccgggtcaaggtgcacttccactgggatcgccacgaccagtcgaacgagaacagctcctgctggattcgcgtgtcccaggcctgggccgggaagaactggggttcgatgcagatcccgcggatcggccaggaagtgatcgtcagcttcctcgaaggcgacccggaccggccgatcatcaccgggcgggtctacaacgccgagcagacggtgccctacgagctgccggcgaacgccacccagagcgggatgaagagccgttcgagcaagggcggcacgccggccaacttcaacgagatccgcatggaggacaagaagggcgccgagcagttatacatccacgccgagcgcaaccaggacaacctggtcgagaacgatgcctcgctgtcggtcggccacgaccgcaacaagagcatcggccacgacgagctggcgcgcatcggcaacaaccgcacccgcgcggtgaagctcaacgacaccctgttggtgggcggggcgaagagcgacagcgtcaccggcacctacctgatcgaggccggcgcgcagatccgcctggtctgcggcaagagcgtggtggagttcaacgccgacggcaccatcaatatctccggcagcgccttcaacctctacgccagcggcaacggcaacatcgacaccggcggccgcctcgacctcaattccggcggcgccagcgaggtcgacgccaagggcaagggcgtgcagggcaccatcgacggccaggtacaggcgatgtttccgccgccggcgaagggctga

SEQ ID NO: 7464 - DNA, 2181 bp, Pseudomonas aeruginosa
gtggctattggccagcctttcgcgacggcactgggttgtacgatcatctggcgcgctgctggcgcgttgttcgggccgcccgccgcaggtgactatcaaggaagattccccatgctgttctcccaacacacccgcctggtacacgtggactccccgctgggacccgaggtcctgcaactgcaacggctggagggtcgcgaagagctgggccggctgttcagccacgagctcgaactggtctcgagcaatcccgccttgcctctggatgccctgttgggcaagccgatgagcctcgcgctggaactccccggcggcagccggcggtatttccacggcatcgtcgcgcgctgtagccagggcgccggcgccggccagttcgccagctaccaggtcaccctgcggccctggctgtggctgctgacgcgcacctccgactgccgcatcttccagaaccagaaggtcccggacatcatcaagcaggtgttccgcgacctcggcttctccgacttcgaggacgccctgagccgctcctaccgcgagtgggaatactgtgtgcaataccgcgagaccagcttcgatttcgtcagccggctgatggagcaggaaggcatctactactggttccgccacgaaaagaagcgccacatcctggtgctctccgatgcctacggcgcgcaccacagcccggccggctacaccagcgtgccctattacccgccgagcctcggccatcgcgagcgcgaccacttcttcgactggcacatggcgcgcgaggtccagcccggctcgctgagcctcaacgactacgacttccagcgtcccggcacccgcctggaagtgcgctccaatgtcgggcgcgcccatgccgcggccgactacccgctctacgactaccctggcgagtatgtgcagagtcaggacggcgaacactatgcacggacccgcatcgaggcgatccagacccagtacgagcgagttcgcctgcggggatgcgccaggggtatcggggcgggccatctgttccacctgagcaactacccgcgcctggaccagaaccgcgaatacctggtggttggcgccgagtaccgggtagtccaggaactctacgagaccggtaatggcgggggcggcgcgcagttcgagagcgagctggactgtatcgacgccggccaggctttccgccccttgccgtcgaccccggtgccggtggtgcgcggcccgcagaccgcggtggtggtcgggcccaagggcgaggagatctggaccgaccagtatggccgggtcaaggtgcatttccactgggaccgccacgaccagtccaacgagaacagctcctgctggatgcgcgtctcgcaggcctgggccgggaagaactggggctcgatccagatcccgcggatcggccaggaagtgatcgtcagcttcctcgaaggcgacccggaccggccgatcatcaccgggcgggtctacaacgccgagcagacggtgccctacgagctgccggcgaacgctacccagagcggcaccaagagccgttcgagcaagggcggcacgccggccaacttcaacgagatccgcatggaggacaagaagggcgccgagcagttgttcatccatgccgagaggaaccaggacatcgaggtcgagaacgacgagagccactgggtcggccacgaccggaccaagaccatcgaccacgacgagacggtgcatgtgaagcacgatcgcaccgagaccgtggacaacaacgagaccatcaccgtgcatgccaaccgcagcaagacggtcgaccgcaacgagacggtcaggatcggcatgaacaagacggaaaccatcctcatggcctcgttgcagaacgtcggcatggggcgcatggaaaacgtcgggctcggctacagcctgaacgtcggcatgatgatgaacaccgtggtcgggctgaaccagagcacccaggtgatgaagaagaagaccttgtcggtgggcgatagctacgaagtgagcgtgggcggcagcgacgatggctctaagatcaccctggacggtcagagcatcaccctcggcagccagcgcatcgagctgaccgccgaccgcgagatcctcttgcgctgcggccagagcacgatccgcctgacgccgggggagatcgagatcctctcgcccaatgtcgatatcaactgttga

SEQ ID NO: 7465 - DNA, 1272 bp, Pseudomonas aeruginosa
gtgcagagtcaggacggcgaacactatgcacggacccgcatcgaggcgatccagacccagtacgagcgagttcgcctgcggggatgcgccaggggtatcggggcgggccatctgttccacctgagcaactacccgcgcctggaccagaaccgcgaatacctggtggttggcgccgagtaccgggtagtccaggaactctacgagaccggtaatggcgggggcggcgcgcagttcgagagcgagctggactgtatcgacgccggccaggctttccgccccttgccgtcgaccccggtgccggtggtgcgcggcccgcagaccgcggtggtggtcgggcccaagggcgaggagatctggaccgaccagtatggccgggtcaaggtgcatttccactgggaccgccacgaccagtccaacgagaacagctcctgctggatgcgcgtctcgcaggcctgggccgggaagaactggggctcgatccagatcccgcggatcggccaggaagtgatcgtcagcttcctcgaaggcgacccggaccggccgatcatcaccgggcgggtctacaacgccgagcagacggtgccctacgagctgccggcgaacgctacccagagcggcaccaagagccgttcgagcaagggcggcacgccggccaacttcaacgagatccgcatggaggacaagaagggcgccgagcagttgttcatccatgccgagaggaaccaggacatcgaggtcgagaacgacgagagccactgggtcggccacgaccggaccaagaccatcgaccacgacgagacggtgcatgtgaagcacgatcgcaccgagaccgtggacaacaacgagaccatcaccgtgcatgccaaccgcagcaagacggtcgaccgcaacgagacggtcaggatcggcatgaacaagacggaaaccatcctcatggcctcgttgcagaacgtcggcatggggcgcatggaaaacgtcgggctcggctacagcctgaacgtcggcatgatgatgaacaccgtggtcgggctgaaccagagcacccaggtgatgaagaagaagaccttgtcggtgggcgatagctacgaagtgagcgtgggcggcagcgacgatggctctaagatcaccctggacggtcagagcatcaccctcggcagccagcgcatcgagctgaccgccgaccgcgagatcctcttgcgctgcggccagagcacgatccgcctgacgccgggggagatcgagatcctctcgcccaatgtcgatatcaactgt

SEQ ID NO: 7466 - DNA, 930 bp, Pseudomonas aeruginosa
atgagtcggctgatgacctacaggacgctgctggcttgcctgctcgccgcgttgcttgcgctgctggtggcgggccagcagcagcgcgcgttcgagcgaatctggttcaagctggagcagcgctacggcggcgatgttgcgcgcgagaacgccctgcgcctggccgactatcgggtcgatatcgaagcccgcgtgctgggcgcggagtccaacgtgtcggcgctgtccttcgaccccagccggcgcagcctggtcagcgtgaccaaccaggacccgcatttcctcgagctgtcgctggacggcgaattgctgcgacgcatccccctgcgcggtttccaggatccggaggctatcgagtacatccggcccggcgtctacgtggtcgccgaggagcgtcgccaacgcctggtggagatccatgtcgacgccgacacccgggtgatcgacatcgacgatccgcgcaacgcccggaagttctccctgggcagtgcaaacaagcgcaacaagggcttcgaggggttggcctacgacccgctgcgcgagcgcctgttcgtggcccgggaaaaggcgccggtgggcatcatcgaggtaaacggcttcttcaacgaccgcggcgaggcgctcgacctgagcgtcggcggcgacccgcagcgcgatcgcgggttgttcctcaccgatctgtcgagcctctactacgacaaggccagcgatcacctgctggtgctttccgacgagtcgcgggtggtcatcgaactggatcgcgccggggatccgctcggcagcctgaccctgcgtggcggcaaccatggcctgacggacgacgtgccgcaggccgaagggttggcgatggacgaccggggcagcctgtacgtggtcagcgagccgaacctgttctaccgcttcagccgagcgctgccagcggccgactag

SEQ ID NO: 7467 - DNA, 7347 bp, Pseudomonas aeruginosa
gtgcaagcactcatagagaaggtgggctccctttccccccaggaaaggaaggcattggctgtcctgctcaagcagcaaggtgtcaatctcttcgagatcgcgccagtgttcaagcgccaggacggcgagcccctgcggctctcctatgcccaggagcgacagtggtttctctggcaactggagccggaaagcgcggcctaccatatcccgagtgtcttgcgtctacgtgggcggctggacctggatgccctgcaacgcagcttcgacagcctggttgcgcggcacgagaccctacgcacccgttttcgcctcgacggcgacgaggcgcgccaggagatcgccgcatccatggcattgccgttggatatcgtcgcgttggggccgctcgaggagggcgccctcgctcggcaggtcgagacgacgatcgcgcggccgttcgacctggagcgtgggccgctgctgcgggtgagcctgttgcggctggccgaggacgaccatgtgctggtgctggtccagcatcacatcgtgtccgacggttggtcgatgcaggtgatggtcgaggaactggtccagctctatgccgcctatagtcgagggctcgaggtagcgctgccggctttgccgatccagtacgcggactacgccctgtggcagcgcagctggatggaggccggggaaaaggagcgccagttggcgtactggaccggcctgctgggcggcgagcagccggtgctggagttgccgttcgaccggccgcgcccggttcggcaaagccatcgtggtgcccagttcatcctggaactggatattgatctgtcccaggcgctcaggcgcgtggcccagcaggagggggctactgccttcgccctgttgctggcttcgttccaggcgctgctgtatcgctacagcgggcaggcggatatccgtgtcggcgtgccgatcgccaatcgcaaccgcgtggagaccgagcggctgatcggcttcttcgtcaacacccaggtgctcaaggccgacctggacggtcggatgggcttcgacgagctgctggcccaggcccgccaacgcgcgctggaggcccaggcgcaccaggacctgccgttcgagcaactggtggaggccttgcagccggagcgcagtcttagccacaacccgctgttccaggtgctgttcaactaccagagcgaagcccgtggcaacggccaggcattccgcttcgacgagttacagatggaaagcgtgcagttcgacagccggacggcgcagttcgacttgacgttggacctgacggacgaagagcagcgtttttgcgccgttttcgactacgccaccgacctgttcgacgcctccaccgtggaacgcctggccggccattggcgcaacctgttgcgcggcatcgtcgccaacccacgacagcggctcggcgagttgccgctgctggatgcgccggagcgccggcagaccctctccgaatggaacccggcccagcgcgagtgcgcggtgcagggcaccttgcagcagcgtttcgaggaacaggcgcggcaacggccacaggcggttgcgctgatcctcgacgaacaacggttgagctacggcgaactgaatgcgcgggccaatcgcctggcgcactgcctgatcgcccgtggcgttggcgcggacgtgccggtcgggctggcgctggagcgttcgctggacatgctggtcggcttgctggcgatcctcaaggccggcggcgcctacctgccgttggacccggcggcgccagaggagcgcctggcgcatatcctcgacgacagtggggtacggctgctgctgacccaggggcatctgctcgagcgcctgccacggcaggcgggggtggaggtgctggccatcgacggactggtgctggacggctacgccgagagcgatccgctcccgacgctatcggcggacaacctggcctacgtgatctatacctcgggctcgaccggcaagcccaagggcacattgctcacccaccgcaacgcgctgcgcctgttcagcgccaccgaggcctggttcggcttcgacgagcgggacgtgtggacattgttccattcctacgccttcgatttctcggtctgggaaatcttcggcgcgctgctctatggcgggtgcctggtgattgtgccgcaatgggtgagccgttcgccggaagacttctaccgtctgctgtgccgcgaaggcgtgacggtgctcaaccagacgccgtcggcgttcaagcaactgatggcggtggcctgttccgccgacatggcgacgcagcagccggcgctgcgctacgtgatcttcggtggcgaggcgctggatctgcagagcctgcggccgtggttccagcgcttcggcgatcgccagccgcaactggtgaacatgtacggcatcaccgagaccacggtgcacgtaacctaccgtccggtgagcgaggccgacctggaaggtggcctggtcagtccgattggcgggaccatcccggacctgtcctggtacatcctcgaccgtgacctgaacccggtgccgcgcggcgcggtgggcgagctgtacatcggtcgcgccgggctggcgcgcggctacctgaggcggcccgggttgagtgccacccgcttcgtgccgaacccgttccccggcggcgccggcgagcggctgtaccgtaccggcgacctggcacggttccaggcggatggcaatatcgagtacatcgggcgtatcgaccaccaggtgaaggttcgcggcttccgtatcgaactgggcgagatcgaagcggcgctcgccggtctggccggggtacgcgatgccgtggtgctggcccatgacggagtcggcggcacgcaactggtgggatacgtggtggcggactcggcggaggatgccgagcgtctgcgggagtcgctgcgggagtcgctgaagcggcacctgccggactacatggtgccggcgcacctgatgctgctggagcggatgccgctgacggtcaatggcaagctcgaccggcaggcgttgccgcaaccggatgcgagcctgtcgcaacaggcctatcgagcgcccggtagcgagctggagcagcgcatcgcagcgatctggtcggagatcctgggagtggaacgggtcggcctggacgacaacttcttcgaactgggcggtcattcgttgctggctacccgggtgatttctcgggttcgccaggagcagcagttggacgcaagcctgaaggcgttgttcgagcggccggttctggaagcgttcgcccagggattggaacgcacgacggatgcggtctcgacgataccgcttgccgatcggcagcaaccgttggcactgtccttcgctcaggagcgtcagtggttcctctggcaactggagccggaaagcgcggcctaccatattccgagtgccttgcgcctacgcgggcggctggacgtggatgccttgcaacgcagcttcgacagcctggtcgcgcggcatgaaaccttgcgtacccgcttccggctggagggagggcgttcgtaccagcaggtacaacctgcggttagcgtttccatcgagcgggaacagttcggtgaagaaggcctgatcgaacggatacaggccatcgttgtgcagccattcgacctggaacgggggccgctgctgcgggtgaacctgttgcaactggccgaggacgaccatgtactggtgctggtccagcaccacatcgtgtccgatggttggtcgatgcaggtgatggtcgaggaactggtccagctctatgccgcctatagccaagggctcgacgtggtgttgccagccctgccgatccagtacgcggactacgccctgtggcagcgcagctggatggaggcgggggaaaaggagcgccagttggcgtactggaccggcctgctgggcggcgagcagccggtgctggagttgccgttcgatcggccgcgtccggcccggcagagccatcgtggcgcgcagttgggtttcgagctatcgcgggaactggtcgaggccgtgagagccttggcccagcgtgaaggcgccagtagtttcatgctgttgctggcctcgttccaggcgctgttgtatcgctacagcgggcaggcggatatccgtgtcggtgtgccgatcgccaatcgcaaccgcgtggagaccgagcggctgatcggcttcttcgtcaacacccaggtgctcaaggccgacctggacggtcggatgggcttcgacgagctgctggcccaggcccgccaacgcgcgctggaggcccaggcgcaccaggacctgccgttcgagcaactggtggaagccttgcagccggagcgcaatgccagccacaacccactgttccaggtgctgttcaaccatcagagcgagatacgctcggtgacgcccgaggttcagttggaggacctgcgtctggaaggcctggcctgggacggccagactgcgcagttcgacctgacgctggatattcaggaagacgaaaacggcatctgggcctccttcgactatgccaccgatctgttcgacgcctccaccgtggaacgcctggccggccattggcgcaacctgttgcgcggcatcgtcgccaacccacgacagcggctcggcgagttgccgctgctggatgcgccggagcgccggcagaccctctccgaatggaacccggcccagcgcgagtgcgcggtgcagggcaccttgcagcagcgtttcgaggagcaggcgcggcaacggccacaggcggttgcgctgatcctcgacgaacaacggttgagctacggcgaactgaatgcgcgggccaatcgcctggcgcactgcctgatcgctcgcggcgttggcgcggacgtgccggtcgggctggcgctggagcgttcgctggacatgctggtcggcttgctggcgatcctcaaggccggcggcgcctacctgccgttggacccggcggcgccagaggagcgcctggcgcatatcctcgacgacagtggggtacggctgctgctgacccaggggcatctgctcgagcgcctgccgcggcaggcgggggtggaggtgctggccatcgacggactggtgctggacggctacgccgagagcgatccgctcccgacgctatcggcggacaacctggcctacgtgatctatacctcgggctcgaccggcaagcccaagggcacgttgctcacccaccgcaacgcgctgcgcctgttcagcgccaccgaggcctggttcggcttcgacgagcgggacgtgtggacgttgttccattcctacgccttcgatttctcggtctgggaaatcttcggcgcgctgctctatggcgggcgcctggtgatcgtgccgcaatgggtgagccgttcgccggaagacttctaccgtctgctgtgccgcgaaggcgtgacggtgctcaaccagacgccgtcggcgttcaagcaactgatggcggtggcctgttccgccgacatggcgacgcagcagccggcgctgcgctacgtgatcttcggtggcgaggcgctggatctgcagagcctgcggccgtggttccagcgctttggcgatcgccagccgcaactggtgaacatgtacggcatcaccgagaccacggtacacgtaacctaccgtccggtgagcgaagccgacctgaagggtggcctggtcagtccgatcggcgggaccatcccggacctgtcctggtacatcctcgaccgtgacctgaacccggtgccgcgcggcgcggtgggcgagctgtacatcggtcgcgccggtctggcgcgcggctacctgaggcggcccgggttgagtgccacccgcttcgtgccgaacccgttccccggcggtgccggcgagcggctgtaccgtaccggcgacctggcacggttccaggcggatggcaatatcgagtacatcgggcgtatcgaccaccaggtgaaggttcgcggcttccgtatcgaactgggtgagatcgaagcggcgctcgccggtctggccggggtacgcgatgccgtggtgctggcccatgacggggtcggcggcacgcaactggtgggatacgtggtggcggactcggcggaggatgccgagcgtctgcgggagtcgctgcgggagtcgctgaagcggcacctgccggactacatggtgccggcgcacctgatgctgctggagcggatgccgctgacggtcaatggcaagctcgaccggcaggcgttgccgcaaccggatgcgagcttgtcgcagcaggcctatcgagcgcccggtagcgagctggagcagcgcatcgcagcgatctgggcggagatcctgggagtggaacgggtcggcctggacgacaacttcttcgaactgggcggtcactcattgttgctgctgatgctcaaggagcggatcggcgatacctgccaggctacgctgagcatcagccaactgatgacccatgccagcgtcgcggaacaggcggcatgcatcgaggggcaggcgcgtgagtcgttgctggtgccgctcaacggcaggcgcgaaggttcgccgctgttcatgttccatccgagtttcggctctgtgcactgttacaagaccctcgccatggcgctgcgggatcgtcatccggtcaagggtgttgtctgccgtgccctgctgggcgctggtcgcgaggtgccggagtgggacgatatggttgcggaatacgccgagcaattgctgcaggagcaccccgaaggggttttcaacctggcgggatggtcgctcggcggcaacctggcgatggatgtcgcggcccggctggagcagcgtgggcggcaggtggctttcgtcggctggatcgatgcaccggcaccggtcagggtcgaagcgttctggaacgagatcgggccgacgccggaggcagtcccgaacctatccgtgggcgagatgcgggtggaactgctcggtgtcatgtttccggagcgggccgagcatatcgaacgggcctggtcatcgatctgctccgccacgacggacgatgagcagcgctggacgaggatgagcgactgggcggaagcggagatcggcgccgagttcgcgacactgcgcagcgaaatcgcacagagcaacgaactggaagtgtcctgggagttgaaacagatcctcgacgagcgcctgaaagcgatggattacccgcgtctgacggcgaaggtcagcctctggtgggccgcgcgcagcaccaatgccatccagcggagcgcggtggagcgctcgatggccgaggcgatcggggctgagcgtgtcgaaccggtgcgggtgctggatacccggcacgacaagatcatcgaccaccctgagtttgtgcagagcttccgggccgccctggagcgtgccgggcgctga

SEQ ID NO: 7468 - DNA, 1128 bp, Pseudomonas aeruginosa
atgcagatccgcgccgatttcgacagcggcaacatccaggtcatcgatgccagcgatccccgccggatccgcctggcgatccgtcccgacctggccagccagcatttccagtggttccacttcaaggtcgagggcatggctcccgccaccgagcactgcttcaccctggtcaacgccggccagtcggcctacagccatgcctggagcggctaccaggcagtcgcctcgtacgatggcgaacgctggttccgcgtgccgtcgcaatacgacgccgacggcctgcatttccagctggaaccggaggaaagcgaagtccgcttcgcctacttcgagccctacagccgcgaacggcatgcccgcctggtcgaacgtgcgctcggcatcgagggcgtcgaacggctcgccgtcggcaccagcgtgcaaggccgcgacatcgaattgctgcgggtcaggcgccatcccgacagccacctgaagctgtgggtcatcgcccagcagcatcccggcgaacacatggccgaatggttcatggaaggcctgatcgagcgcctgcagcggccggacgatacggaaatgcagcgcctgctggaaaaggccgacctgtacctggtgccgaacatgaacccggacggcgcgttccacggcaacctgcgcaccaacgccgccggccaggatctcaaccgggcctggctggagccgagcgccgagcgcagcccggaagtctggttcgtccagcaggagatgaagcgccatggcgtcgacctgttcctcgacatccacggcgacgaggaaatcccccacgtattcgccgccggctgcgagggcaacccgggctatacgccccgcctggaacggctcgagcaacgcttccgcgaggaactgatggcgcgcggcgaattccagatccgccatggctacccacgcagtgcgccgggccaggccaacctggcgctggcctgcaacttcgtcgggcagacctacgactgcctggcgttcaccatcgagatgccgttcaaggaccacgacgacaacccggagcccgggaccggctggtccggcgcccgctccaagcggctcggccaggacgtcctgagcacccttgcggtgctggttgacgaactccgctga

SEQ ID NO: 7469 - DNA, 2073 bp, Pseudomonas aeruginosa
atgaacgctcagacccaggcgtccaagaacgccttgcacaaatcgctcgaacgtcgccacaacgcgtccaccagcctcgccgccttgtggcggccggcgctgctgcaagccttcgtcaagctcgacccgcgccagttgctgcgctcgccggtgatgctggtggtcgaactgaccgccgtgctcaccaccttgctgtgcttcgtccccgaccaggcggtgccgacctcggtggcgctgcagatcgccctctggctgtggttcaccgtgctcttcgcgaatttcgccgaagcgctcgccgagggacgtggcaaggcccgcgcggacagtctcaaggccggcagccagggcctctccgccaataagcggcgcgccgacggcagtttcgagagcgtcgttgccagcagcctgcgcaagggcgatgtggtacgggtccaggccggcgagatgattcccggcgacggcgaagtcatcgaaggcgtggcggcggtcaacgaggccgccatcaccggcgaatcggcgccggtgatccgcgagtccggcggcgatcgctcggcggtgaccggcaacacccaggtggtgtccgactggctgctggtacggatcggcgccaacccgggcgagtcgaccctggaccggatgatcgccctggtggaaggcgccaagcggcagaagacccccaacgaagtggcgctggacatcctgctgatcggcctgaccctgatcttcctgctggtagtggtgaccctcaagccgttcgccctgttcgccggcggcaacctgccgctggtgttcctggtggcgctgctggtgacgctgatcccgaccaccatcggcggcctgctctcggccatcggcatcgccggcatggaccgcctggtgcgcctgaacgtgatcgccaagtccggtcgcgcggtggaggcggccggcgacgtccacgtgctgctgctcgacaagaccggcaccatcaccttcggcaaccgccgctgcagcgcgctgtacgccgcgccgggggtgagcggcaaggaactggccgagggcgcgttgctggcctcgctggccgacgacaccccggaaggcaagtcgatcgtcgaatacctgcgcatcctgcatccgatcgaggagccgcgccgcgaggaactgacgccgatcgccttcagcgcggaaacccgcctgtccggggtcgactggaacggccaggtgtaccgcaagggggcggtggatgcggcgctgcgcttcatcgacctgccgcgggagaagatgcccgaggtgctttcgcgggaggtggacaagatcgcccagagcggcggcaccccgctgctggtggtagccaacggccggctgctcggcgccattcacctgaaggacgtggtcaagccgggcattcgcgagcgcttcgccgaactgcgccggctgggcatccgcaccgtgatggtgaccggcgacaacccgctgaccgccgctgccatcgccgccgaggctggggtcgacgacgtgatcgccgaggctaccccggagaagaaattggcgcggattcgccaggagcagggcgaaggtcgcctggtggcgatgtgcggcgacggtgccaacgacgccccggcgctggcccaggccgacgtcggcatggccatgaacgacggcacccaggccgcccgcgaggcggccaacctggtcgacctggacagcgacccgaccaagctgctcgacgtggtccaggtgggcaaggagttgctggtcacccgcggcgcgctgaccaccttctccatcgccaacgacgtggccaagtacttcgccatcctgccggcgctgttcgtcggcatctacccgcagctcgacgtgctcaacgtgatgcgcctgcaaagcccgcagagcgcgatcctgtcggccatcgtgttcaacgcgctgatcatcgtcgcgttgatcccactggccttgcgcggcgtgcgggtgcaggcggcggacgcttcgcaactgctgcagcgcaacctgctgatctatggcgtcggcggcctggtggcgccgttcctcgggatcaaggcgatcgacctgctgctgaccgccgtcggcctggcatga

SEQ ID NO: 7470 - DNA, 3141 bp, Pseudomonas aeruginosa
atgtcgaagtttttcattgataggcccattttcgcgtgggtgatcgccttggtgatcatgctcgcgggcggcctgtcgatcctcagtctgccggtcaaccagtacccggccatcgccccgccggccatcgccgtgcaggtgagctacccgggcgcctcggccgagacggtgcaggacaccgtggtccaggtgatcgagcagcagatgaacgggatcgacaatctgcgctacatctcctcggagagtaactccgacggcagcatgaccatcaccgtgaccttcgaacagggcaccgaccccgacatcgcccaggtccaggtgcagaacaagctgcaactggccaccccgctactgccgcaggaagtgcagcgccaggggatccgggtgaccaaggcggtgaagaacttcctcatggtggtcggtgtggtttccaccgacggcagcatgaccaaggaagacctgtcgaactacatcgtttccaacatccaggacccactctcgcggaccaagggcgtcggtgacttccaggtgttcggctcgcagtactcgatgcgcatctggctcgacccggccaagctgaacagctaccagctgacccccggcgacgtgagcagcgcgatccaggcgcagaacgtgcagatttcctccggccagctcggcggcttgccggcggtcaagggccagcagctcaacgccaccatcatcggcaagacccgcctgcagaccgcggagcaattcgagaacatcctgctcaaggtcaatcccgacggttcccaggtgcgcctgaaggacgtcgccgatgtaggcctgggcggccaggactacagcatcaacgcgcagttcaacggcagcccggcgtccggtatcgcgatcaagctggccaccggcgccaacgcgctggataccgccaaggcgatccgccagaccatcgccaacctggaaccgttcatgccgcagggcatgaaggtggtctacccgtacgacaccaccccggtggtctcggcctcgatccatgaggtagtgaagaccctcggcgaggcgatcctcctcgtgttcctggtgatgtacctgttcctgcagaacttccgcgccacgctgatcccgaccatcgccgtaccggtggtgctgctggggaccttcggcgtgctcgccgcgttcggcttctcgatcaacaccctgaccatgttcggcatggtgctggccatcggcttgctggtggacgacgccatcgtggtggtggagaacgtcgagcgggtgatggccgaggaaggcctgtcgccaagggaggcggcgcgcaagtccatgggccagatccagggcgcgctggtcggtatcgccatggtgctctcggcggtattcctgccgatggcgttcttcggcggctccaccggggtgatctaccggcagttctccatcaccatcgtgtcggccatggccctctcggtgatcgtggcgctgatcctcaccccggcgctctgcgcgaccatgctcaagccgatcgagaaaggcgaccatggcgagcacaagggcggcttcttcggctggttcaaccggatgttcctttccaccacccacggctacgagcggggcgtggcgtcgatcctcaagcatcgcgcgccgtacctgctgatctacgtggtgatcgtggccgggatgatctggatgttcacccgcattcccaccgcgttcctccccgacgaggaccagggcgtactgttcgcccaggtacagaccccgccgggctccagtgccgagcgtacccaggtggtggtggactcgatgcgcgaatacctgctggagaaggaaagctcttcggtcagctcggtgttcaccgtgaccggcttcaacttcgccggccgcggccagagttcgggcatggcgttcatcatgctcaagccctgggaagagcgtcccggtggcgagaacagcgtgttcgaactggccaagcgcgcgcagatgcacttcttcagcttcaaggacgcgatggtgttcgccttcgcgccgccgtcggtactggaactgggtaacgccaccggcttcgacctgttcctccaggaccaggcgggtgtcggccacgaagtcctgctccaggcgcgcaacaagttcctcatgctcgccgcgcagaacccggcgctgcaacgcgtgcgccccaacggcatgagcgacgaaccgcagtacaagctggagatcgacgacgagaaggccagcgccctcggcgtgtcccttgccgacatcaacagcaccgtgtccatcgcctggggttccagctacgtcaacgatttcatcgaccgtggccgggtcaagcgggtctacctgcagggcaggccggacgcgcggatgaacccggacgacctgagcaagtggtacgtgcgcaacgacaagggcgagatggtgccgttcaacgccttcgccaccggcaagtgggaatacggttcgccgaagctggagcgctacaatggcgtgccggcgatggagatcctcggcgagccggcgcccggcctgagttccggtgacgccatggcggcggtcgaggagatcgtcaagcaattgccgaaaggcgttggctactcctggaccggcctgtcctacgaggagcgcttgtccggctcgcaggcgccggcgctgtatgcgctgtcgctgctggtggtgttcctctgcctggcggccctgtacgaaagctggtcgattccgttctcggtgatgctggtggtgccgttgggcgtgatcggtgcgctgctggcgacgtccatgcgcggcctgtccaacgacgtgttcttccaggtgggcctgttgacgaccatcggcctgtcggcgaagaacgccattctcatcgtggagttcgccaaggagctgcacgagcagggcaagggcatcgtcgaggcggccatcgaagcctgccgcatgcgtctgcggccgatcgtgatgacctccctggcgttcatcctcggcgtggtcccgctggcgatctccaccggcgccggctcgggcagccagcatgcgatcggtaccggcgtgatcggcggcatggtcactgcgaccgtcctggcgatcttctgggtaccgctgttctacgtggcggtcagcacgctgttcaaggacgaggcgtccaagcagcaggcgtccgtcgaaaaggggcaatga

SEQ ID NO: 7471 - DNA, 1803 bp, Pseudomonas aeruginosa
atgaaacgaaccctgtactcgggcgtcggcctgctgctggtcggcctgctgttcctcgctttcaacctgctgtccagcctgctgctgcgcgaccagcagttcgacctcacccagcagaagctctacaccttcagcgccggcacccaggaagtcctcgacagtctcgacgaaccgctcaacctctacctgttcttttcgaaaagccgcgccagtgacctgcccgccctgcgcaactacgcccgccgcgtcgaggaagtgctggacctctatgcacggcggagccatggcaatgtccgattgttcgtgatcgatcccctgccattctccgacgacgaggaccgtgccgcgcgcttcggcctgcaggcgccgcccatcggcccgaatggcgaagccatctactttggcctggcggccaccaacccgaccgacggcctccaggtgatcccgttcttctcgccggaagaagagccgcttctggaatacgatctcagccgcctggtccaggcactcgcacagcgggaacgcacggtagtcggcctgatgagctcgctgccgatgaccgggcaggcgcccaccgacgggcagccgggcagcaggccctgggcgatgatggacaagctctaccaacagttcgacatccgcaccctggggctcgcttcgacggaaatccccgccgaagtctcggtgttgatgctggtgcaccccaggcaattgtccgaacagacccaatacgccatcgaccagttcgtcctgcgcggcggcaagctgctggccttcgtcgaccctctgagtctcgccgatgcagacggcgggaaaagctccgacctggccccgttgctgcgctcctggggcgtccagttgcggccggataccctgctggcggatgcctcgttcgccatgatcaagcccaacgccgaacgtcgcccggagcgcaatccgacctggctacacctccccggcgacacgttcccccacgacaacgtgctgaccaccggcctggaaagcctcaacctcgccagcgtcggcctgctcgaacctctcggcggagcctcgacgcgcttcattccgttgctgcacagctcggcgcacagcatgccgctgtcgctggaacgcttccgccaatcctcgacggagcagctcaacgccaccctggtcccgaccggggaacgctacgtgctggccgccaaggtcgaggggccggcgacgagtgccttccctgcggaccgcgggaagcaaggcgaaggcctgagcgacagcgcgaacatccatgtgctgttggtcgccgatacggacctgctgagcaatccgctctggctccaggaacagcccggccacaacgagccgcaggtatgggcggacaacgacctgttcgtcggcaatgccctcgactacctctccggttcggacgcgctgatcgacctacgctcgcgaggccatacgaagcgcccgttcacccgcgtggaagcgctccgccgcgaggccgggctgcgcgcccaggaacagctcaacgcgctgcagcaaagcctcaacgacaccgacaggaacctgcgcaccttgcagcaatcgatggacgccggcgaccaggaggtgactccggaaatggaagcgacgctgcgccgcttcatcgatgacaaattgcgcatccgccagcaactgcgtcaattgcagttccagctgaatgccgatgtcgagcgcctgggggaacaggtgaaactggccaatacggtcctgctgccggcactgctcaccctgttcctcctgctacattggagctggcgcagcatgcgccggaggaggggctga

SEQ ID NO: 7472 - DNA, 1608 bp, Pseudomonas aeruginosa
atggccatcctgcacacccagatcaatccacgctccgccgagttcgcggccaacgccgcgaccatgctggaacaggtcaacgccctgcgcaccctcctcggccgcatccacgaaggcggcggtagcgccgcccaggcccggcacagcgcgcgcggcaagctgctggtgcgcgaacgcatcaaccgcctgctcgaccccggctcgccgttcctcgagctttccgccctcgccgcccacgaagtctacggcgaagaggtcgccgccgccggcatcgtcgccgggatcggccgggtcgaaggggtggaatgcatgatcgtcggcaacgatgccacggtgaagggcggcacctactatccgctgaccgtgaagaagcacctgcgggcccaggccatcgccctggagaaccgcctgccatgcatctacctggtggactctggcggcgccaacctgccgcgccaggacgaggtgttccccgaccgcgagcacttcggccggatcttcttcaaccaggccaacatgagtgcccgcggcatcccgcagatcgccgtggtcatgggctcctgcaccgccggcggggcctacgtgccggcgatgtccgacgaaaccgtgatggtgcgcgaacaggccaccatcttcctcgccgggccgccgctggtgaaggccgctaccggcgaggtggtcagcgccgaggaacttggcggcgccgacgtgcactgcaaggtctcaggggtcgccgaccactatgccgaggacgatgaccatgccctggccatcgcccgccgctgcgtcgccaacctcaactggcgcaagcagggccagctgcaatgccgtgcaccgcgcgcgccgctgtaccccgccgaggagctgtacggggtgattcccgccgacagcaagcagccctacgacgtgcgcgaagtgatcgcacggctggtggacggctccgagttcgacgaattcaaggcgctgttcggcaccaccctggtctgcggcttcgcccacctgcacggctatccgatcgccatcctggccaacaacgggatcctcttcgccgaggccgcgcagaaaggcgcgcacttcatcgagttggcctgccagcgtggcatcccgctgctgttcctgcagaacatcaccggtttcatggtcggccagaagtacgaggctggcggcatcgccaagcacggcgccaagctggtgaccgcggtggcctgcgcgcgggtgccgaagttcaccgtgctgatcggcggcagcttcggcgccggcaactacggcatgtgcggacgcgcctacgacccgcgcttcctgtggatgtggccgaacgcgaggatcggcgtgatgggcggcgaacaggccgccggggtgctcgcccaggtcaagcgcgagcaggccgagcgcgccggccagcagctcggcgtcgaagaggaggcgaagatcaaggcgccgatcctcgagcagtacgagcaccagggccatccctactactccagcgcgcgactgtgggacgacggcgtgatcgatccggcgcagacccgcgaggtcctcgccctggcgctttccgccgccctcaacgcccccatcgagccgaccgccttcggcgtgttccgcatgtga

SEQ ID NO: 7473 - DNA, 1599 bp, Pseudomonas aeruginosa
atgtgcggcatcctcggttacgtcggcaccggtttcagtgtctcgcgcttcgccggagcgctacgcctgctggcccatcgcggcccgttcggcgagggcatcgcggccctgccgaacggcgccatcggcatgacccgcctgccgatgtccggcgccgcggcggtaccgctgccgccgcaggagggtcagcggcgggtcgcctacaacggcgaggtctaccaggccggctgcgaaatccatggcgagatccgcctgctgctcgacggcttgcagcgcggggtactgccggacggcatgtacgccctcgccagctgggacccgcagacccggcaattgaccctgctgcgcgacgagttcggcatcaagccgctgtactacagctaccagcccgagcgcggcctgctggccttcgcctccgagccgcgggcgctgctgcacctgctcggcggcgcccgcgccgacgccgaggcgatcgcccaggtggtcgccgccggcgtgccgctggaaggccagaccctgttccagcaggtccgtctgctgctgcccggcgaggtgttgcgcttcgatctctcccaggagcgtccgcgcctctgccagcgccagcggctggccaccgccccggccagcgaggtggacagcctcgacgagcagctcggcgaaaccctcgaacgctgccgccagaccttccgcccctgcgccctgctggtcagcggcggggtcgattccaacctgctcggcagctacctggacccgcagttgcaacgctttcacctgtgcctggaaggcgacgaggaaagcctgctgccacaccctcggctgcaacgcttcgagctgcgccaggaagccttcatgccgctgctgcgtcgcgcggtcggcaacttcggcggggcgacacggatgtccagcctgctgatgtaccagcgcctggccgacggtatcggcgagcagggctatcactgcgtgcttctcggcgaaggcgccgacgaactgttctggggctacccgcgccatctcgaactctggcgccggcgcgacacaccggaaccgcggcgctttgccgccgcctggttcggcgagtaccggcgcaaggccgcgctgctggcggaaccggcgggccgacgggtcgccgagcggatcgaggaactcgcccacgaggccctcggccagggcctcgaggcggcgatcggccagttcgacctgcactactcgctggagccgctgctgcgccgcgccgaccatctgctgatgtcgcgcaccatcgaagcgcgcaccccctacctgcatggcgccctggcgcagcgcgccgggcgcctccagcggatcgtcggcgacaccgccaaggcaccgctggtggcgctcctggagcagcgcgagaaacgctggcaggcgcagccgaaacggcatttccgcctgccgttcgaacgttggccgcaggccctcggggaaatgcgccggcacctcgccgaacgcctaccggcgctccacgacctcggcctggaaggcctggatgcaccgagcgtcgcggcgctgcccggcgaccagttgttcaccctcaccaccctgtcgctctggcagcaggaatacggagcctcgctatga

SEQ ID NO: 7474 - DNA, 1287 bp, Pseudomonas aeruginosa
gtgctgctcgacaacagctaccgcaacctctgcctgatctatgcggtcatgcgcgcgggcaagcatctggtgctgatcgatcccgagtggggggaggccgcgaagcaggccatcgtcgacgagatgcgcctggaagcgctggccagcgaacatccgctcgagggcgcgctggccgggctgcgcctggcgctggacttcgagcgcagcgcgacgcgccggctcgaccgcgccgcgcacagccatatgatcctgttcacctcgggcaccaccggccagccgaaaggcatcgaactcagccagcaggccatgctccatgcctaccgcatcggccgcgactgcctgggcatcggcgagcacacgcgctccggttgcttctaccggatcagcggcctgggcatcctcggcatcaatttcctcttcccgctgctgtacggcggcagcgcggtgctcctgccgctgcactgctgggccgacagcgaaggcttctgggaatgcgtggaacgcttcggcatcagtttcctctacctggtgccgccggtggtcaaccacatggtcaaggaaggctccccgccgccgcgccgcttgccgttgcagcgcctgctctgcgtcgccggctcggcgcgcctggacgccgacctgcaggcggccttccagcgcgactacgcggcgctggcgaacatctacggcctcagcgagtgcggcttcgccttcctcttcggcaagcgtcgcggcgatgcgttcgacaactcggtgggacctgccgtcggcctggaactcaagctgaccgaccccgacggccgcccgctggagggcagcggcgaacgcgggcgcctgtgggtgcgcacgccgagcctgttctccggctacgtcaaccgccccgacctgaccgcccaggtgctcgaggacggctggctgaacacccaggacctcgcctacttcgacgaggaccgctgcgtgcacgtcctcggccgttgcgacggcaccatcaacaagggcggcaacctgttccacctgaatgaatgcgaaagggcgctcaacggcctggacgaggtgatcgacgtctgctgcctgaaggtcgactgcccgctctatggcgaagactatgtcgccgtgatccacaccgcgccgcaggtcgagttcgccttcctgccctggctccagcagcagctcggcaccctccgcgcgccacagcgcgtggtgctgtcgcaccaggccctgccgctgaacggcgccggcaagcacgaccgccgtgcgctcgccgccctgctgcaacgggaagcctcgtga

SEQ ID NO: 7475 - DNA, 720 bp, Pseudomonas aeruginosa
atgtgcggcatcctcggttacgtcggcaccggtttcagtgtctcgcgcttcgccggagcgctacgcctgctggcccatcgcggcccgttcggcgagggcatcgcggccctgccgaacggcgccatcggcatgacccgcctgccgatgtccggcgccgcggcggtaccgctgccgccgcaggagggtcagcggcgggtcgcctacaacggcgaggtctaccaggccggctgcgaaatccatggcgagatccgcctgctgctcgacggcttgcagcgcggggtactgccggacggcatgtacgccctcgccagctgggacccgcagacccggcaattgaccctgctgcgcgacgagttcggcatcaagccgctgtactacagctaccagcccgagcgcggcctgctggccttcgcctccgagccgcgggcgctgctgcacctgctcggcggcgcccgcgccgacgccgaggcgatcgcccaggtggtcgccgccggcgtgccgctggaaggccagaccctgttccagcaggtccgtctgctgctgcccggcgaggtgttgcgcttcgatctctcccaggagcgtccgcgcctctgccagcgccagcggctggccaccgccccggccagcgaggtggacagcctcgacgagcagctcggcgaaaccctcgaacgctgccgccagaccttccgcccctgcgccctgctggtcagcggcggggtc

SEQ ID NO: 7476 - DNA, 1368 bp, Pseudomonas aeruginosa
atgtttggttccaacgacgacaagaaggccccgcagggcggggaaaagaaaggtctgttcggctggtggcggaaaaagccgcaagccggcgagcagcctgccgatcagcctgtcgagccggtctccgagacagcggccgccgagcagcgcgcgcctgccgatgacgtggcgcaatccctgacagaacagccaggtcggcagcagccctccgctgccgagccggccgagccgccggcgccggttgccgaagcgccgctcgccggtgacgagccagcgtcggccgaggagcattcgccccgccccgaggcgcccgtcgcacaacccgagcctatcctcgctgccgagcccgagcccgagcccgagcccgagcccgagcccgagcccgagcccgttgcgccgctggccgccgctccggcagtcagcgagccggcgaccaggccgggcttcttcgcccgcctccggcagggactgtccaagaccagcgccagcatcggcgaaggcatggccagcctgttcctcggccgcaaggaaatcgacgacgacctgctcgacgacatcgagacgcgcctgctgaccgccgacgtcggcgtcgaggccaccaccctgatcgtgcagaacctgaccaagcgcgtggcgcgcaaggagctggccgacagcggcgcgctgtacaaggcgctgcaggaagagctggccagcctgctgcgcccggtggagcagccgttgcaggtcgacgtcgcgcgcgagccctatgtgatcctggtggtcggggtgaacggcgtgggcaagaccaccaccatcggcaagctggcgaagaagctgcaactcgagggcaagaaggtcatgctggccgccggcgacaccttccgcgccgccgccgtggagcagttgcaggtctggggcgagcgcaaccgcatcccggtgatcgcccagcacaccggcgccgactccgcctcggtgatcttcgacgcggtgcaggccgccaaggcccgcggcatcgacgtgctgatcgccgataccgccggacgcctgcataccaaggacaacctgatggaggagctgaagaaggtgcgccgggtgatcggcaagctggacgagacggcgccccatgaggtcctgctggtgctcgacgccggcaccgggcagaacgccatcaaccaggccaagcagttcaacctcgcggtggagctgaccggcctggccctgaccaaactggacggcaccgccaagggcggggtgatcttcgccctggccaagcagttcggcctgccgatccgctatatcggtgtcggcgaggggatcgacgatctccgtaccttcgaggccgacgccttcgtccaggcactcttcgcagagcgggagaacgcatga

SEQ ID NO: 7477 - DNA, 768 bp, Pseudomonas aeruginosa
atgaaggggccggagaagaagcgcgcgaagatcgcgatcgacccgtccagcgagcggcagatggtcgatttgcaacgccgcctgctgttgcgcggcggcctgtccctgggcgccctggcgatgctctcggggtgccggctacaggatggcgattcggtcgacaaggtactctgggccatgtcgcgctggaacgaccgggtccaggcctggctgttcagccgtacgcggctggcgccgaccttcgatccgtcgcaggtggcctcgccgttccccttcaacgcgttctacccggcctacaacgtgccggagatcgacctgccggaataccgcctgcaggtttccgggcgggtccgcgacaagcgcccctggagcctggagcaactgcgccggctgccgcaggccagccaggtcacgcaactgatctgcatcgagggctggagcgcgatcggccagtggagcggagtgccgctgcgcacctttctggagctggtcggcgccgacacctcggcgaagtacgttggcttcaagtgcgccgaccgctactactccagcctcgacatgcccagcgcgctgcatccgcagacgctgctggcgctggagatgtccgggcaggcgctgccggaggagaacggctatccgctgcgcctgcggattcccaccaagctcggcttcaagaacgccaagcacgtggtggagatcttcgtcagcaacagcaatcccggaggttactgggaggaccagggctacaactggttcagcggagtctga

SEQ ID NO: 7478 - DNA, 756 bp, Pseudomonas aeruginosa
atgaccacccgcctgccccagctattgctcgccctcctcgccagcgccgtatccctggccgccagcgccgacgaggtgcaggtcgccgtcgcggccaacttcaccgcgccgatccaggccatcgccaaggaattcgagaaagacaccgggcacaggctggtcgccgcctacggcgccaccggccagttctatacgcagatcaagaacggcgcgccgttccaggtgttcctctccgccgacgacagcactccggcgaaactggagcaggaaggcgaggtcgtgcccggctcgcgcttcacctatgccatcggcaccctggcactctggtcgcccaaggccggctatgtcgacgccgagggcgaggtgctgaagagcggcagcttcaggcacctgtccatcgccaacccgaagaccgcgccctacggcctcgccgccacccaggcgatggacaagctcggcctcgccgccacgctcgggccgaagctggtggaaggccagaacatcagccaggcctaccagttcgtttccagcggcaacgccgaactgggcttcgtcgctctgtcgcagatctacaaggatggtaaagtcgcaaccggctcggcctggatcgttcccaccgagctgcacgacccgatccgccaggacgcggtcatcctcaacaagggcaaggacaacgccgccgccaaggccctggtcgactacctgaagggcgccaaggccgccgcgctgatcaagtcctacggctacgaactctaa

SEQ ID NO: 7479 - DNA, 780 bp, Pseudomonas aeruginosa
atgaaacacgcacgcatccgctaccagggccgggttcaccaggtcaccgtggaagacgccaacgccgtccgcctggccgacggcaccctgctcgccgaggaccgggtggagtggctgccgccggccaccgggagcatgttcgccctcggcctgaactacgccgaccatgccgccgaactgtcgttcaaggcgcccagcgaaccgctggcgttcctcaagtcgccgggcacctacaccggccaccgccaggtcagctggcgtccggacaacgtcgactacatgcactacgagtgcgaactggtggcggtgatcggcaagccggcgcgcaacgtccgccgcgaggacgccctcggctacctggccggctacacggtgtgcaacgactacgcgatccgcgactacctggagaactactaccggcccaacctgcgggtgaagaaccgcgacgccaccaccccggtggggccgtggatcgtcgacgcggccgaggttcccgagccgaaccggctgaccctgcgcacctgggtcaacggcgagctgcgccaggaaggcagcaccgcggacatgatcttcgacattccctacctgatcgaatacttctccagcttcatgaccctgcagccgggcgacatgatcgccaccggcaccccggaaggcctgtccgacgtggtccccggcgacgaagtggtggtggaggtggagggcgtcggtcgcctggtcaaccgaatcgtcagcgaggccgaattcttccgcgcccgcgcacaggagcacgcagaatga

SEQ ID NO: 7480 - DNA, 828 bp, Pseudomonas aeruginosa
atggacaaaccggcctcgcggcatttcagcgtcttgatcatcgatgatgaaccccaggtgacctcggaactccgcgaactgctggaaaacagtggctaccgttgcgtaaccagcacccaccgggagtcggcgatcgccagcttccaggccgacccgaacatcggcctggtcatctgcgacctctacctgggccaggacaacggtatccgcctgatcgagagcctcaaggaagtcgccggcaacggcaggttcttcgaatcgatcatcctcaccggtcacgatggccgccaggaagtgatcgaggccatgcgggtcggcgccgccgactactaccagaaaccggtggcgccgcaggaactgctgcatggcctcgaacgcctggagagccgcctgcacgagcgcgtccgcagccagttgagcctgagccacgtcaaccagcgcctggaatacctcgccgaatcgctgaactcgatctaccgcgacatccacaagatcaagtacgaggtacacggcaacagccagccgagcgccctcaggagcgaagacagccagccgtccgcgccgccggcgccggtcgcggaaagccaggtgtccccgagcaatccgctgttcggcaagctgtcgccccgccagcaggcggtggcgcggctggtgagcaagggcctgaccaactaccagatagcctacgagctgggcatcaccgagaacacggtgaagctgtacgtctcccaggtgctgcgcctgatgcatatgcacaaccgcacccagttggcgctggccctgtcgcctgcggcgatgcagcagggcagcggagcggtggtgcactga

SEQ ID NO: 7481 - DNA, 483 bp, Pseudomonas aeruginosa
atggagcaattagcactggccttgtgggcaagcgtttgcggatatcaggacatcaaacgtttgcgcgtctccaactggcttatcctgggcggatttcttatttcctttgtttatttatatgtgaaagagtcaagcctgaccggcgctacggttaatatggcaatgaccgcactttttataggcgtctgcctcagccttcccggctaccttctcggcaggctcggcgctgccgacgtcaagtacctggccgcactggggctggccagcgacccacttacggtgctctatagcctggccttcggctgcctgctgtgcatcgcgctattcatcctcgtaaagttattcaaacgttcggtagaaaagtccgcaatgaatgaagaagttcgccttcgaagggcaccgtcaaaaaacaagtcattcccttttatattcgccatgggcgccggccttttggcacatctgattatcaataaaattatctga

SEQ ID NO: 7482 - DNA, 1824 bp, Pseudomonas aeruginosa
atgagcaacaccatccaagcgaagaagaccggcgtcaccgataccatcctgcgcgatgcccaccagtcgctgctggcgacccgcatgcgcaccgaggacatgctgccgatctgcgacaagctcgaccgcgtcggctactggtcgctggaagtctggggcggcgccaccttcgacgcctgcgtgcgcttcctcaaggaagacccgtgggaacgcctgcgcaagctcaaggcggcgctgcccaacacccgcctgcaaatgctcctgcgcgggcagaacctgctcggctaccgccactacagcgacgatgtggtgcgcgccttcgtggccaaggcggcggtcaacggcatcgacgtgttccgcatcttcgacgcgatgaacgacgtgcgtaacctgcgcgtctccatcgaggcggtgaaggccgccggcaagcacgcccagggcaccatctgctacaccaccagcccggtgcacaccatcgaggccttcgtcgcccagggcaaggcgatggccgacatgggcgtcgactccatcgccatcaaggacatggccggcctgctcaccccctatgccaccggcgacctggtcaaggccctgaaggacgccctgccgctggacgtggtggtgcattcccatgacaccgccggtgtcgccagcatgtgccagctgaaggccgtggaaaacggcgccgaccgtatcgacacggcgatctccagcatggcctggggcaccagccacccgggcaccgagtcgatggtcgcggcgctgcgtggcaccccctacgacaccggcctggacctggagctgatccaggagatcggcatgtacttccacgcggtgcgcaagaagtaccaccagttcgagagcgaattcaccggcgtggatacccgcgtgcaggtcaaccaggtgccgggcgggatgatttccaacctggccaaccagctcaaggagcagggcgcgctgaaccgtatgggcgaggtgctcgaggaaatcccgcgggtccgcgccgacctcggtttcccgccgctggtgacgccgacttcgcagatcgtcggcacccaggcgttcttcaacgtgctcgccggcgagcgctacaagaccatcaccaacgaggtgaagctgtacctgcagggccgctatggcaaggctcccggcgaggtcaacgagcaactgcggcgccaggccatcggcagcgaggaagtcatcgacgtgcgcccggccgacctgatcaagccggagctgaacaagctgcgcagcgagatcggcaacctggccaagtccgaggaagacgtactcacctacgcgatgttcccggacatcgggcgcaagttcctcgaagagcgtgaggccggcaccctgaagcccgaggaactgctgccgattcccaccggcaagggcgtcgccgccgccggcgcggaaggcaccccgaccgagttcgtcatcgacgtgcacggcgagacctaccgcgtcgacatcaccggggtcggcgtgaagagcgacaacaagcggcacttctacctgtccatcgacggcatgccggaagaagtggtgttcgagccgctcaacgaatatgtcgccggctccgccagcggccgcaagcatgccagcgagccgggccacgtcagcaccaccatgccgggcaacatcgtcgacgtgctggtgaaggaaggcgatagcgtcaaggccggccaggcggtgttgatcaccgaggcgatgaagatggaaaccgaggtccaggccggcatcgccggtacggtcaaggcgatccacgtggccaagggcgaccgggtcaacccgggcgagatcctgatcgagattgcgggctga

SEQ ID NO: 7483 - DNA, 891 bp, Pseudomonas aeruginosa
atgcaatacctgtttcccctgctggccgtgttcatctgggccggcaacaccgtcgtcaacaagctcgccgtggggatcatccagcccgccgagatcggtttcttccgctggctgctggtcggcctggcgctgacgcccttcatgctcggcccggtgctgcgcaaccgccgctacatcctcgccaacctcggcaagttcgtggtcctcggcctgctcggcatggccgtctaccagagcctggcctactacgcggcagcgctgaccagcgccaccaacatgggcatcatcctgtcgctgatgcccctgatgtcgctgggcctggccagcagcatcctggcccaccggctgaacgccggggcgctgctcggcgcgctggtgtcgctggccggcgtggtgctggtgatctcccagggccatctcggcgctttgctggagcatggagtgaatctcggcgacgcgatgatgatcgtcgccaccctggcctatgcggtgtacagcgtgctgctgaagaaatggagcctgaagctgccggccatgcaactgctctacctgcaggtgctggtggcgatcctcgccctgctgccgctgtacctgctgtcgccgcgcaccggcctgaacgccgccaacctgccgctggtgctgtacgccgcgctgttcgcctcgatcgtcgccgcgctggcctggatgcacggtgtcgcccgtctcgggccgagccggatggccctgttcttcaacctgctgccgatcatcaccgcctgcatcgccaccctggtgctcggcgagcgcctgaccgtccatcacctggtcggcggcgcgctgaccctggccggggtcctgctggccgagttctggcagcgccgcccggcccgtctgcgttcggcaacctgctga

SEQ ID NO: 7484 - DNA, 1017 bp, Pseudomonas aeruginosa
atgagtgagaatcgtctcgccgccaaactgaccaaggtcgacaaggccgccatcctgctcctgtcgctcggcgagaccgacgcggcgcaggtgctgcggcacatgggaccgaaagaggtgcagcgggtcggcgtggccatggcgtcgatgcgcaacgtgcatcgcgaacaggtcgagcaggtgatgggcgagttcgtcgaagtggtcggcgaccagaccagcctcggcgtcggtgccgacggctacatccgcaagatgctcacccaggccctcggcgaggacaaggccaacaacctgatcgaccgcatcctcctcggcggcagcaccagcggcctggacagcctgaagtggatggagccgcgtgccgtggccgacgtgatccgttacgaacacccgcagatccaggccatcgtggtcgcctacctcgatcccgaccaggccgccgaggtgctcagccatttcgaccacaaggtgcgcctggatatcgtcctgcgcgtctcctcgctgaacaccgtgcagccctcggcgctgaaggaactcaacctgatcctggagaagcagttcgccggcaattccaacgccacccgcaccaccatgggcggggtcaagcgcgcggcggacatcatgaactacctcgacagctccatcgaaggccagctgatggattcgatccgcgaggtcgacgaagacctgtccggacagatcgaggacctgatgttcgtcttcgacaacctcgccgacgtcgacgaccgcggcatccaggcgctgctccgggaagtctcctcggacgtactggtgctggcgctcaagggctccgacgaggcgatccgcgagaaggtcttcaagaacatgtccaagcgtgccgccgagctgctgcgcgacgacctggaggccaaggggccggtacgggtcagcgaagtggaaggtgcgcagaaggaaatcctcaccattgcccggcgcatggccgagtccggcgatatcgtgctgggcggcaagggtggcgaggagatgatctga

SEQ ID NO: 7485 - DNA, 798 bp, Pseudomonas aeruginosa
atgaaaccgtatgacctgtccgaggcggtggcggtggtcaccggcggttcctccgggatcggcctggccacggtggaactgctgctggaggcaggcgccgccgtggctttctgcgctcgcgacggcgagcgcctgcgtgccgccgagtccgcgctacgccagcgcttccccggggcgcgcctgttcgccagtgtctgcgacgtgctggatgcgttgcaggtgcgcgccttcgccgaagcctgcgagagaacgctggggtgcgccagcatcctggtgaacaacgccggccagggccgcgtctcgaccttcgccgagaccacggacgaggcctggagcgaggaactgcaactgaagttcttttccgtcatccacccggtacgcgctttcctgccgcaactggaaagccgcgccgacgcggccatcgtctgcgtcaactcgctgctggccagccagccggagccgcacatggtggctaccagcgcggcccgcgccggggtgaagaacctggtgcgctccatggccttcgagttcgcgcctaagggcgtacgggtcaacggcatcctcatcggcctggtcgagtccggccagtggcggcgccgtttcgaagcccgcgaagagcgcgagctggactgggcgcaatggaccgcgcagctggcgcggaacaagcagattcccctgggacgcctgggcaagccgatcgaggcggcccgcgccatcctgttcctcgcatctcccctgtctgcctatacgacgggcagtcatatcgacgtttccggagggttgtcccgtcatgcgtaa

SEQ ID NO: 7486 - DNA, 1260 bp, Pseudomonas aeruginosa
atggatcgaaccttgtctgatcgtattttcccgcctgtcctcctgttgctcgccctggcctggctgctgccctggatgcctgcgcacgccgaagcgccggcggaatgggtcgccttgcccctgtcggagcgggtggtggatgccacccacacgctggacgaggcgacgcgccaacgcctggtggagaagctcgaggcgctggagcggcgacgcggtgcgcagatcgcggtggtgatgctgccgactaccggtaccctcgatatcgaagccttctccgacaagttgttccaggcctggaagctcggccgcaaggcggtcgacgacggtctgctgctggtggtggccaaggatgaccggcgcatgcgcatcgaggtcggctacggcctggagggtgcggtgcccgatgtggtcgccggacggatcattcgcgagcggatggccccggcatttcgcgagggcgactacgccggcgggatcgaggccgcggtggacgagctgatccgcctggtcgacggcgaaacgctgccggcggccgcgtcgtcgggtgcgccgaaagtctcgctggggcaattgccggcggaagcctgggcgctgctggtcgccttcatctacggatcgttggccggagtgctgttgagtgcccgggcgctgcgctggccctggctgctcggcggggcgctgctctgctggctgttgggcacgctggccggcgcttccggcgaatggatgagcgtgctgctggtcgctccgctgtgcatgctggtcggcggcgcgaccttcggcgcgctgtggacggtgcgcccggccttctacctggtgatcggcgtactggtctatgtagccctgctcgggctggcggcgcattggttcagcgcggtgtccttcatctacggcctgctgtggccggccggggtgctgatgctggcggttctctgctggtcgaactaccgcctgatgcgctcgctgtggcgcgagcggcggaaaagtttccaccgccgactatgggcgttgctggcggcctacctgctgctcggattgctgtccggtggcctggacgcaccgctggtctggctggccctgctaccgttccagctcatgctcgggctgctggtgttcggccaggtacgcctgagtgggggtggtggaggctcgtcgggaagctccggcggcggttcctcctcctcttcctcctcgtcgtccggcggcttttccgggggcggtggttccagcggcggaggcggtgcctcggacagttggtaa

SEQ ID NO: 7487 - DNA, 756 bp, Pseudomonas aeruginosa
atggtccggaggcgcgttatcccatgcttgctgctcaaggatcgcggtctagtgaaaaccgtgaagttcaaggagcccaagtacgttggagacccgatcaacgcaatacgcatcttcaatgagaaagaagtcgacgaactgattttgctggatatagatgcttccaggctcaatcaagagcctaactatgagttgatcgcggaagtggctggtgagtgttttatgcctatttgctatgggggcggtatcaagacattggagcatgcggaaaaaatcttttccctaggtgtcgaaaaagtttcgataaataccgccgctcttatggatctttcgttgattcgaagaattgccgataagtttggttcgcaaagcgtagttggctctatcgactgccgcaagggtttctggggaggacactccgtgttctcagagaatgggacgcgcgacatgaaacgctccccattggagtgggcgcaagcgctcgaagaggctggagtgggtgagatttttctaaattctattgatcgagatggagtgcagaaaggcttcgacaacgctctagtggaaaatatcgcttctaacgtccatgtgccagtgatcgcctgtggtggagctggctccatcgctgacctcatcgatctttttgagcgtacgtgtgtgtcggcagtagcggcgggaagcctattcgttttccatggcaagcatcgtgcggtactgattagttatccggatgtcaacaagctcgacgtcggttag

SEQ ID NO: 7488 - DNA, 444 bp, Pseudomonas aeruginosa
atgaactaccccgtgaatcccgacctgatgcccgcgctgatggcggtcttccagcatgtgcggacgcgcatccagagcgagctcgattgccagcgactcgacctgaccccgcccgacgtccatgtattgaagcttatcgacgaacaacgcgggctgaacctgcaggacctgggacgccagatgtgccgcgacaaggcactgatcacccggaagatccgcgagctggagggaagaaacctggtccgccgcgagcgcaaccccagcgaccagcgcagcttccagctcttcctcaccgacgaggggctggccatccaccagcatgcggaggccatcatgtcacgcgtgcatgacgagttgtttgccccgctcaccccggtggaacaggccaccctggtgcatctcctcgaccagtgcctggccgcgcaaccgcttgaggatatttaa

SEQ ID NO: 7489 - DNA, 879 bp, Pseudomonas aeruginosa
atgctcgatctggtcctgctccgtaccttcgtcagcgttgtcgacaccggcaacttcacccgcgccggcgaacacctgcacctgacccagtccaccgtcagccagcaggtcatccgcctcgaacagaacctcggttgccgcctgctcgaccgcagccagcggcaggttttgccgaccgaggaaggcgagcgtctgcttggctacgcgcggcgcctgctgcggctctcggacgaggccagcgaggccctcagcccggcccatggcgacggcgtgctgcgcctcggcgtgccggaagacctcgccggcgaagtgctgatgccggtgctgacgcgcttcaccgaagagcgtccgcgactgcgcctggaggtcgagagcggtctcagccatcacctgctgcgcctctatcgcagcggcgagctggacctgctgctggtcaagcagtggggggccgacagcgactgccatgcacgctgggccgagccgctgggctggttcggcagcgccgcgcggccgttcggcgagggttcgccggaggagccggtgccgctggtggtgttcccggtcggcgcgctgtatcgccaggagatgatccatgccctggagagcatcgggcgtcgctggcgcatcggctattccagcgccagcctggccagcctggtggccgcggtcggcgccggactgggggtcagcctgctgccgctgggctgcgtcgggcccgagcatcgcctgcttggcgcgcaggccggcttcccgcccatcgctggcctggagctggcgctctacgcgcggcccgagctggacagcgccgggcgcaccctccgcgaccgcctgcgcgacctctgcgatgcacgcctggaagggttgcagggcgagcgctga

SEQ ID NO: 7490 - DNA, 975 bp, Pseudomonas aeruginosa
atgtcccatcccttcgaccaactgacccccgacctcgtcctggatgccgtggaaagcctcggctatctcagcgacgcacgggtgctggcgctcaacagctacgaaaaccgcgtgtaccaggtcggcatcgaggacggcgagccgctgatcgccaagttctaccgaccggaccgctggagcgacgcggcgatccgcgaggagcacgccttctccgccgagctggcggaatgcgaggtgccggtggtggcgccgctgtcgcgcgacggcgaaagcctgttcgcattctccggcttccgcttcgccctgttcccccggcgcggcgggcgcgcgcccgagccgggcaatctcgaccagctctaccgcctcggccagttgctcggccgcctgcacgcggtcggcgccacgcggccgttcgagcaccgcgaggcgctcgctgtggataacttcggccacgcctcgctggccaccctgctggaaggcaatttcatccccaggagcctgctgccggcctacgagtcggtcgcccgcgacctgctgaaacgcctcgacgccctgttcgccgaggtgccctaccagccgatccgcctgcacggcgactgccatccaggcaacctgctgtgccgcgacgatgtctaccacatggtcgatctcgacgactgccgcatgggcccggccctccaggacctgtggatgatgctcgccggcgagcgccacgaacgcctggcgcagattgccgaactggtcgacggctacaacgagttccacgacttcgacccgcgccagctaccgctgctcgaaggcctgcgcagcctccgcctgatgcactacagcgcctggctcgcgcggcgctgggacgacccggcgttcccgccgagcttcccctggttcggcagcgaacgttactggggcgagcaggtgctggtgctgcgcgaacaactggcggcgctggacgaggaaccgctgcggctgttctga

SEQ ID NO: 7491 - DNA, 399 bp, Pseudomonas aeruginosa
atgagcgcacgcgtacgacccttcctgatgttccagggggtccaggccgaggcggccatgaacttctacctgtcactgttcgacgacgccgagatcctccagatccaacgctacggcgccgaggggccgggcccggagggctcggtgctgaaggcgctgttccgcctcggcgaccagagcgtgcattgcatcgacagccatgtgcggcacgccttcgatttcaccccggcgttctccttcttcgtcgactgcgagagcaacgcgcagatcgagcgcctggccgaggccctgagcgacggcggcaaggccctgatgccgctcggcgactacggcttcagccagcgtttcgcctggctggccgaccgcttcggggtgtcctggcagctcaatctggcctga

SEQ ID NO: 7492 - DNA, 1329 bp, Pseudomonas aeruginosa
atgccggcggtgccgctcgaatcccgtctgttacaggccctggcgccctggcgcgaagcggggggctggtgcgtggcgttttccggcgggctggattccacggtgttgctgcatctgctcgcccaactggcccggagcgaagccttgccggcgctgtcggcgctgcatgtccaccatggcttgcaggctgcggcggacggttggccggcgcactgccaggcggtctgccggtcgctgggtatcccgctgcgggtcgagcgggtgcaggtcgccgttggcggcagcatcgagcaggcggcgcgcgacgcccgctatcgcgcattccaggcgaacctgggcgagggacaggtgctgctcaccgcgcagcacctcgacgaccaggccgagaccttgctgttccgcctgttgcgtggagcgggcctgcgcggcctggcggcgatgccggcgagccggccgctgggcggtggccgcctgtgccgacccttgctcggggtttcccgcgccgaactggaagcctatgcgcaggcgcaccggctggactgggtggaggatccttccaaccaggatccgcgcttctcgcgcaactacctgcgccgggagatcatgccgcgtctcgcctcccactggccgcaggccgtcgccggcatggcgcgctgcgcggcgcatctgcgcgaggccgaagacctgctggctgaactggccgccatcgacctccgggcctgccgccaaccctcggaactggattggccggactggctggatctgccccggatcgccctggagcctctgcgccgcctcagcgctgcgcgccagcgcaacctgctgcgggcctggctgggacagctgacgcggttgccggacagtgaccactgggccggttgggagtcgttgcgcgacgccggcgacgatgccgacccgatctggcgcctggagagcggcgagctgcgtcgcggcgcggggcggatctggtggttgccggcggactggcgggcggcggcgggaccgttcgtctgggagcgtcccgctcatccattgcttcttcccggcaatggtcggctggcgttgctcggcgaggttccggcgggaccgttgcgcgtcgactaccggcggggtggggaggtgctggccctggccgggcgcggtcgccgcgacctcaagcgattgctcaacgaagcgggcgtaccgagcttcctgcgcggtcgtttgccgctgctcttccgagccgacgaactgctcgcggtggccaacattcctggcctggacagtccccgcgaggggggctggcgactgtcctggagcccgccgacgaacgacccgggtttgagctag

SEQ ID NO: 7493 - DNA, 945 bp, Pseudomonas aeruginosa
atggatatcctgttcaatatgcgcgcgttcgtcagcgtcgcggagaccggcagtttcactgccgccgcccagcgcctggacctgacgaccgcctatgtctcccgtgcggtggccaagctggaggcccacctgcagacccgcctgctgcatcgcaccacccggcgcatcgcgctgaccgaagccgggcagcgctacctgatgcgcgcccagcagatactcgcctacatcgaggaggccgaggccgaggcgggcgacgcccatgcgcggccgtcgggcacgctgaaggtccacgcgatgaccggcatcggccagcactacctgatcaaggccatctcgcaatattgcgagacctacccggaggttggcttcgacctgaccctggccaaccggatcaccgacattctcgacgagggctacgacatttccgtggtgatcgctcccgagctgccggactccggtttcgtctccaagtgcatcggccagacctacagcatcctctgcgcctcgccgggctacattgccgcgcatggcttccccaagctgccggcggagctgtccgcgcaccgttgcctgcgcctggtgaactcggtgatgtcgctggaccgctggctgttcgacgggcccgacggccaggaactggcctgcatcaaccagacgcatttccaggtcaacaccgccgacgccatgaccgaggcggtggtctccggcatgggtatcggcgcgctgccggtgtacgcggcggtcaacggcctgaaggacggcagcctggtgcgggtgttgccgcgctatagcctgttccatctcaacgtctacgccctctacccctcgcggcagtacctggatgcgaagatccgcacctgggtcgagttcctccgcgagcacatgccggcgatgctcgccgcggacgagcacagcctggcggagagcggtgggttggcgaactga

SEQ ID NO: 7494 - DNA, 648 bp, Pseudomonas aeruginosa
atgtccgccgaccgccactattcgcccatcgaccgtttcctgctgcaggccgactccgccctgcgcaccctgctgccgttcagcggccagccggcgcgaccgtcgccggccatcgtggaacccgatggcgaactgagcgaggaagacacccgccatatcgccggcctgatgcgcatcaaccacaccggcgaggtctgcgcccaggcgctgtaccagggccagtcgctgaccgccaagctgcccgaggtccgcgaggcgatggaggaagccgccgaggaggagatcgaccacctggcctggtgcgagcaacgcatccgccagttgggcagccgtcccagcgtcctcaatccgatcttctacggcctgtccttcggcgtcggtgccgccgccgggctggtcagcgaccgggtcagcctgggcttcgtcgccgccaccgaagaccaggtgtgcaagcatctggacgaacacctggcgcagattccccaggaggatcggaaatcccgtgccatcctcgagcagatgcgtatcgacgaggaacagcattcgagcaacgccctggccgccggcggcctgcgcttcccggcaccggtgaagctgggcatgagcctgctggcgaaggtgatgaccaagagcacctaccgcatctga

SEQ ID NO: 7495 - DNA, 4446 bp, Pseudomonas aeruginosa
atgaaagcaggtctgtaccatcctgaaacgttcaaggataactgcggatttggcctgatcgcccatatgcagggcgagccgagccatcaacttctgcaaaccgcaatcgaagcactgacctgcatgacccaccgcggtgggatcaatgccgatggcaagaccggggacggctgcgggctgctgatccagaagcccgacctgttcctgcgtgccgtcgccagggaagccttttctgtcgacctgcccgagcaatacgcggtgggcatggtgttcttcaaccaggacccggtgaaagccgaggcggcacgcgagaacatgaatcgcgagatcgtcgccgccggactggagctggtcggctggcgcaaggtgccgatcgataccagcgttctcggccgcctggcgctggagcgcctgccgcagatcgaacaggtgttcatcggcggcgccggcctgagcgaccaggacttcgccatcaagctgttcagcgcacggcgccgctcgtcggtggccaacgccgccgacagcgaccactacatctgcagcttttcgcacaagaccatcatctacaagggcctgatgatgccggccgacctggccgccttctatccggaccttggcgacgagcgcctgcagaccgcgatctgcgtattccaccagcgcttctccaccaacaccctgccgaaatggccgctggcgcagccgttccgcttcctcgcccacaacggcgagatcaacaccatcaccggcaaccgcaactgggcccaggcgcggcggaccaagttcaccaacgaactgatccccgacctggaagagctcggcccgctggtgaaccgcgtcggctccgactcgtcgagcatggacaacatgctcgaactgatggtcaccggcggcatggacctgttccgcggcctgcgcatgatcatcccgccggcctggcagaacgtcgaaaccatggacgccgacctgcgcgcgttctacgagtacaactcgctgcacatggagccctgggatggccccgccggcgtcgtgctgaccgacggtcgctatgccgtctgcctgctcgaccgcaatggcctgcgcccgtcgcgctgggtcaccacgaagaacggctacatcaccctggcttcggaaatcggcgtctgggactacaagcccgaggacgtcatcgccaagggtcgcgtcggcccggggcagatcctcgcggtggacaccgagaccggccaggtcctgcacagcgacgacatcgacaaccgcctgaagtcgcgccatccctacaagcagtggctgcggcagaatgccctgcgcatccaggcgaccctggacgacgaccatggcgtggccagctacgacgccgaccagctcaagcaattcatgaagatgttccaggtcaccttcgaggagcgtgaccaggtgctgcgtccgctcggcgagcagggccaggaagcggtgggctccatgggcgacgatacgccgatggcgatcctctcccggcgcatccgctctccgtacgattacttccgccagcaattcgcccaggtcaccaacccgccgatcgacccgctgcgcgaagccatcgtgatgtccctggaaacctgcctgggcgtcgagcagaacatcttcgaggaagccccgcaccatgccaaccaggcgatcctcaccactccggtgatctcgccggcgaagtggcggaccatcatgaccctggaccgcccgggcttcgaccgccacttcatcgacctcaactacgacgagtcgatgggcctggaggccgcggtgcgcaacatcgccgaccaggccgaggaggccgtgcgcggcggcaaggtgctgctgatcctcagcgaccgccatatcgctcccggcaaactgccggtgcatgctgccctggccgtcggcgcggtgcatcaccgcctggtgcagaccgggctgcgctgcgactccaacatcctggtggagaccgccaccgcccgcgatccgcaccatttcgcggtgctgatcggcttcggcgcctcggcggtctatccgttcctcgcctacgaggtgctggccgacctgatccgcaccggtgaagtgctgggcgacctctacgaggtgttcaagtactaccgcaaggggatctccaagggcctgatgaagattctctcgaagatgggcatctccaccgtcgcgtcctaccgtggcgcgcagctgttcgaggcggtgggcctgtccgacgaggtcaccgacctgtgcttcaccggagtcgccagccgcatccagggcgcgcgcttcgtcgatatcgagaacgagcagaagctcctggccgccgaggcctggagcaaccgcaagccgatccagcagggcggcttgctgaagttcgtctatggcggcgaataccacgcctacaacccggatgtggtgaataccctgcaggctgccgtgcagcagggcgactacgagaagttcaaggaatacaccgcgctggtggaccagcgcccagtgtcgatgatccgcgacctgttgcaggtgaagaccgccgcgcagccgctggcgctcgacgaggtggagccgctggaagccatcttcaagcgcttcgatgccgccgggatttccctcggcgcgctgtcgccggaggcccacgaggcgctggccgaggcgatgaacaccctgggcggtcgctccaactccggcgagggcggcgaggacccggcgcgctacggcacgttgaagagttcgaagatcaagcaggtggctaccggccgcttcggcgtgaccccggaatacctggtcaacgccgaggtcctgcagatcaaggtggcccagggtgccaagcccggcgagggcggccagttgccgggcggcaaggtcaacggcctgatcgcccgcctgcgctatgcggtgcccggcgtgaccctgatctcgccgccgccgcaccacgacatctactccatcgaagacctggcgcagctgatcttcgacctcaagcaggtcaacccgcaggcgctggtatcggtgaagctggtatccgagccgggcgtcggcaccatcgccgccggcgtggccaaggcctatgcggacctgatcaccatctccggctacgacggcggtaccggcgcctcgccgatcacctcgatcaagtacgccggctcgccctgggaactgggcctggcggaaacccaccagaccctgcgcggcaacgacctgcgcggcaaggtccgggtgcagaccgatggcggcctgaagacaggcctggacgtgatcaaggcggccattctcggcgccgagagcttcggcttcggcaccgcgccgatgatcgccctgggctgcaagtacctgcgcatctgccatctgaacaactgcgccaccggcgtggcgacgcagaacgacaagttgcgcaaggaccacttcatcggcaccaccgcgatggtgatcaacttcttcaccttcatcgccacggaaacccgcgagtggctggcgcgcctcggcgtgcgcagcctgggcgagctgatcggccgcaccgacctgctggagatcctccccggcgagaccgccaagcagcagaacctggatctcgctccgttgctgggcagtgagctgatcccggccgacaagccgcagttctgcgaggtggagaaaaacccgccgttcgaccagggcctgctggccgagaagatggtcgagctgtcgaaggccgccatcgaaggcctgagcggcggcgagtacgagctggacatctgcaactgcgaccgatccatcggcgcgcgggtatccggcgagatcgcccgcctgcacggcaaccagggcatggccaaggcaccggtggtgttccgtttcaagggcaccgcgggacagagcttcggcgtgtggaacgccggtggcctgcacctgtacctggaaggcgacgccaacgactacgtaggcaagggcatgaccggcggcaagctggtgatcaccccgcccaagggcagtccgttcaagacccaggaatcggccatcgtcggcaacacctgcctgtacggcgccaccggcggcaagctgttcgccgccggaaccgccggcgagcgcttcgccgtgcgcaactccggttcccatgcggtggtggaaggtaccggcgaccactgctgcgaatacatgaccggcggtttcgtctgcgtgctgggcaagaccggctacaacttcggctccggcatgaccgggggcttcgcctacgtcctcgacatggacaacactttcgtcgaccgcgtgaaccacgagctggtggaaatccagcggatcagcggcgaggcgatggaggcctatcgcagccacctgcgcaaggtcctggtcgagtacgtgaacgaaacggcaagcgagtggggcgcgaacatcctggaaaacctggatgactacctgcgtcggttctggctggtgaaaccgaaggcggccagcctcggttcgctgctgaccagcacccgtgccaacccgcaataa

SEQ ID NO: 7496 - DNA, 942 bp, Pseudomonas aeruginosa
atgagccgcaagctgcatatccacgcgcccgcgatccactacttcgacatggttcgccgctgccattcgatccgcgaagccgcgcggcgcctgaacgtcgcctcgtcggcggtgaaccggcagatcctcaagctggaggacgagatcggcgcgccgctgttcgaccgcctgcccggcggcctgcgcctgaccggagccggggagatcttcgcgcgccacgtcaccgtggtcctgcaggacatggagcgcgtgcgttccgaactggacgcgctgcaaggcctgcgcaccggccatgtggagatcgccaccatcgaagcggtgaccagcgacctgctgccctgcgtgctcaaggcgatgcgcgagcgctacccggacatcaccgtcggcgtcaccctgctcggttcccaggcgatacccgaggcggtgagcagtggcgcggtcgacctcggcctggccttcgccctgccgcgcagcgccgacctgcaacaggtcagcgtcggccatttccgcctcggtgccatcgtctccccgcagcacccgttggcgcgacaccaggccatcgccttcgccgattgcgtcgaacatggcctgatcatggccaagagcgagctgtccatccatcacctgctggcgccgctccagcgccgtttgcgcgaaccgcgccgggcggtgctggagagcagctccctggagctgtcgcgacaactggcgcggcgcgggctcggcgtcgccttccagacccgcctggggatcgaggccgacatcgcccagggcgagctgcgtttcctgccgctgaaagacaatggcggcatccacagcgacctcggcctctacgtgcgcaccggccgttacctgccggtggcggtggacgccctggcccggcagatcgccgaggaagtgcgcctgcgcgagcgcgaggaagcgcgcctgaacgaggcctga

SEQ ID NO: 7497 - DNA, 1059 bp, Pseudomonas aeruginosa
atgttcaagtccttgcaccagtacgcacacgtgttttcccggttgtccctgttcggcctggcgttcgccgcggcggcccaggcgcagagccagagcctgactgtgatctccttcggcggcgcgaccaaggccgcccaggaacaggcctatttcaaacccttcgagcgaagcggcggcgggcaggtggtcgccggcgaatacaacggcgaaatggccaaggtgaaggccatggtcgacgtcggcaaggtcagctgggacgtggtcgaggtggagagccccgaactgctccgcggctgcgacgaggggctgttcgaacgcctcgacccggcgcgtttcggcgaccccgcgcagttcgtccccggcactttcagcgagtgcggggtggccacctacgtctggtcgatggtgatggcctacgactcgacgaagctggccagggcgccgcagtcctgggcggatttctggaacgtccgcgagttccccggcaagcgtggcctgcgcaagggcgccaagtacaccctggaagtggcgttgctggccgacggggtgaaggcggaggacctctacaaggtacttgccaccccggagggggtcagccgcgccttcgccaagctcgaccagctcaagccgaacatccagtggtgggaggccggcgcccagccgccgcaatggctggcggccggcgacgtggtgatgagcgcggcctacaacgggcgcatcgccgctgcgcagaaggagggggtgaaactggccatcgtctggcccggcagtctctacgatccggagtactgggcggtggtgaagggcacgccgaacaaggcgctggcggagaaattcatcgccttcgccagccagccgcagacgcagaaggtgttctccgagcagatcccctacgggccggtacacaagggcaccctggcgttgctgccgaagacggtgcaggaggcgctgccgaccgcgccggccaacctcgaaggcgcgcgggcggtggatgccgagttttgggtggaccacggcgaggagctggaacagcgtttcaatgcctgggcggcgcgctga

SEQ ID NO: 7498 - DNA, 741 bp, Pseudomonas aeruginosa
atgttccagtactccgcccgccccgacctgctgaaagaccgcgtgatcctggtcaccggcgccggccgcggcatcggcgccgccgccgccaagaccttcgccgcccacggcgccaccgtgctgctgctgggcaagaccgaggagtacctgaacgaggtctacgacgccatcgaggccgccggccatccgcaggccgccgtgatcccgttcaacctggagaccgcccagccgcaccagttcgaggaactggcggcaaccctggagaacgagttcggccacatcgacggcctgctgcacaacgcttcgatcctcggtccgcgctcaccgatgcagcagatttccggggagaacttcatgcgcgtgatgcaggtgaacgtcaatgccatgttcatgctgaccaccgccatgctgccgctgatgaagctctccagcgacgcctcaatcatctttacctcgagcagcgtgggccggaagggccgcgcctactggggcgcctattcggtatcgaagttcgccaccgagggcctgatgcagacccttgccgacgaactcgacggtaccagcgcgatccgcgccaacagcgtcaaccccggcgccacccgcaccagtatgcgcgccctcgcctaccctggggaaaacccgctgaacaaccccaccggcgaggagatcatgccggtctacctgtacctcatggggccggacagcgccggcgtcaacggccaggccttcgacgcccagtga

SEQ ID NO: 7499 - DNA, 486 bp, Pseudomonas aeruginosa
atgggcagatccagcagtccgcgcgtaggatgggcaggcccgcttcctgcccattttccgccaggaaaagagaggaattcctttccgagatttccacagaggtcatggatgaaaaaaagccccctgctgatactgagcgtactcctcgccgcgtgcggccccgacaagctgatttccgacctgccgtcgccgaacgggcaataccacgtcgaggttcggaaatgcccggagaaaggttcgatcacctggggcgaagaaatacaggtctccctcctcgaaaccgggaaatcggaaaagtgccatgcagtcgtgcggtcgctggcgcaattcgacctgcgcgcatccgcggaccaattgcaactggagtggctgtccgatacggaactcagggcctggcaccctagcttcgagcccgggaaccaaccgaacggctcgcgcctgaagcacgatgcgccggtgaagatggtctttgcgccgaagcgctga

SEQ ID NO: 7500 - DNA, 1113 bp, Pseudomonas aeruginosa
atgaagcacttcaagctgcccgacctgggcgagggcctacaggaagcggaaatcgtcgaatggcacgtcaaggccggcgacagcgtgcgcgccgaccagcgcctggtctcggtggaaaccgccaaggcgctggtggacatccccgcgccctacgatggggtggtgggcaagctgttcggcgccgagggcgacatcctccacgtcggcgaaccgctggtgggcttcgagggcgaggaggcggacgccggtaccgtggtggggcgcctggagggcggcggtagcgccctggaggaccgtttcttcatcggcgccgcaccgtccacccgcgagcacctggcaccgcgcgcgaccccggcggtgcgccagttcgcccgccagcagggcgtcgagctggccggcctgagcggctccggcccggatggcctgatcacccgcgccgacgtcgaggccgccgcccagggcacccgcgaacgcttcggcggcgagcgcttgcgcggggtacggcggagcatggcgctgaacatggcgcgctcgcatgccgaggtggtgccggtgacgatctacggcgacgccgacctgcatcgctggaagaccgcacgcgacccgttgatccgcctggcccaggcgctggccgaggcctgtcgcgccgagccgaccctcaacgcctggttcgatggcgcctcgttgtcgctgaaactgcatgagcggctcgacctggggatcgccgtggacaccccggacggcctgttcgtgccggtgctgcgcgacgtcggtgcgcgttcggcggaggacctgcgcgccggtatgcggcgcctgcgcgaagacgtccaggcacgctcgatcccaccggcggaaatgctcggcgcgaccctgaccctatccaacttcggcaccctgttcggccgctacgccaaccccgtggtggtgccgccgcaggtggccatcctcggcgccggcggcatccgcgacgaagtagtggcctggcgcggcgagatggcgatccacccgatcctgccgctctcgctgagcttcgatcaccgcgccgccaccggtggcgaggcggcgcgtttcctcaaggtactggtgaacgccctggagcagcccgacggctga

SEQ ID NO: 7501 - DNA, 393 bp, Pseudomonas aeruginosa
atgaaatttcgtcttctcctgtggatgcttggtcgcctgatggccaaggccagccgcgacaatcccgctttccagaagcagctcgagggcaaggacctggtgttccagttgcataccctcgacggcaaggtggcgcgccactacctggtcagggacctgcgcgtcagcagcaagcgcggtacccatccgcaaccggctttttccctggggttcaaggacggagcctacggtttcgccgcgatgacttcgaagaacccgcagctggccttcatgcagggcatccagaacaaggacatccagatacagggcaatccggcgctggtgatctggttccagggtctggtgaagtacctcaagccgaagaagaaggctccggagaagaaagccgcctga

SEQ ID NO: 7502 - DNA, 561 bp, Pseudomonas aeruginosa
atgcgttatcccgaagaccacaagcagaagacccgccggcgtatcgtcgaggaggctgcccggctgttccgccaggacggcgtcggcgccaccgggctgcaaccgctgatgaaggccctgggcctgacccatggcggcttctacgcgcacttcaagtccaaggacgacctggtggaaaccgcgttgcggcatgccgcggcgcaactcgacgaaatcaccgcgcccctggcggaggcggaacgaccgctggcgctgctgatagagcagtacctgtcgccgcgtcaccgcgataaccccggcgccggctgcccgttgccgaccctgtcggcggaactcggccagcgcggcacgccgagcccgaccaccgacagcatcgtgcgcaagcgcctggcgatgatcgaagcggccctggagggcgaggacgcaggcgagcgcgccgtgctgctgctcgcttcgctggtcggcgcgctgcaactgtcgcgcagcgtgcaggatgaggcgctgtcgcaacggatactggaagcgacgcgcaagaagctgctggagcagatggagcgctag

SEQ ID NO: 7503 - DNA, 1287 bp, Pseudomonas aeruginosa
ttgatccacgcagcgcggtcgctggccgggagccgggcggggccgctcctcgccctgctcctgctcggcctcgccacggcccgcgcggagccggtcgacggcctgccgctgcgggccgacggcgatggccgctggagcctggcggcgggccgctacgccggcaacttcgtcatcgaccggccgctgcacctacgctgcgaggccggcgccgaactggacggcggcggccacggcagtctgctgaccctgaccagccccgggatcaccgtcgagggctgccggctgcgcaactgggggcgcaacctgaccgaactcgacgccgcgatcttcgtcggcaaggccgccagcggcgccgtgatccgcggcaacgacctgcgcggcgcgggattcggcgtctggctcgacgccacggtgggcgcgcaggtgctcgacaaccgcatcgagggcgacgaaagcgtgcgctcccaggatcgcggcaacggtatccacctctatgcggtgaaggacgctctggtccgcggcaaccgggtcagccacacccgcgacggggtctacatcgacacttccaacgacagcagcatcgaagccaaccgcttcgaggagctgcgctacggcgtgcactacatgttcacccacaacagccgggtgaccgacaacctgacccggcgcacccgcaccggctacgcgctgatgcagagccgcaagctgaccgtgaccggcaaccgctccatcgacgacgagaactacggcatcctgatgaactacatcacctactcgaccctggccggcaaccgcgtcgagggcgtgcgcagcggcagcaccggcgacgcgatgatttccggcgccgagggcaaggcgctgttcatctacaactcgctgttcaaccgcatcgaaggcaacagcttcgccgacagcgccctgggcatccacctcaccgccggctcggaggacaatcgcatcgccggcaacgccttcataggcaaccgccagcaggtcaagtacgtcgccagccgcgagcaggagtggtccgccgacggccgcggcaactactggagcgactacctgggctgggaccgcgacgacgacggtctcggcgacgtcgcctacgagcccaacgacaacgtcgaccggctgatctggctgtacccgcaggtacgcctgctgttgaacagcccgagcatcgagctgctgcgctgggtccagcgcgccttcccggtggtgcgctcgcccggcgtgcgcgacagccatccgctgatgcggatgcccgccgcggagccgaggccgtga

SEQ ID NO: 7504 - DNA, 1374 bp, Pseudomonas aeruginosa
atgaaaatcatcatcctcggtgccggccaggtcggcggcacactggccgagcacctggccagcgaagccaacgacatcaccgtggtcgacaccgacggcgaccgcctgcgcgacctcggcgaccgcctcgacatccgcaccgtgcaaggcaaggcctcgttccccacggtgctgcgccaggccggcgccgacgacgccgacatgctggtggcggtgaccaatagcgacgagaccaacatggtcgcctgccaggtcgcctacaccctgttcaacaccccgaccaagatcgcccgcgtccgcgagccggcctacctgacccgtaccgggctgttcgacaacgaggcgatcccggtggacgtgctgatcagcccggagcaggtggtcaccaactacatcaagcgcctgatcgaacaccccggcgcgctgcaagtcatcgacttcgccgagggcaaggcgcagttggtcgggatcaaggcctactacggcggccctctggtagggcaggagctgcgccagctgcgcgagcacatgccgaacgtggatacccgcgtcgccgcgatctaccgccgcaaccggccgatcattccccagggcgacacggtgatcgaggccgacgacgaagtcttcttcatcgccgccaaggcccatatccgcgcggtaatgggcgagatgcgcaggctcgacgacagctacaagcggatcatcatcgccggcggcggcaatgtcggcgagcgcctggccgaggccatcgagagccgctaccaggtaaagatcatcgagcgcagcccgctgcgctgccggcacctctcggataccctggacagcaccatcgtgctcaacggcagcgcttccgaccgcgacctgctgctggaggaaaacatcggcgagaccgacgtgttcctcgccctgaccaacgacgacgaggccaacatcatgtcctcgctgctggccaagcggctcggcgcgagcaaagtgatgaccctgatcaacaacccggcctatgtcgacctggtgcaaggcggcgagatcgacatcgccatcagcccgcaactggcgaccatcggcaccctgctggcccacgttcgccgcggcgacatcgagagcgtacactcgctgcgccgcggcgcagccgaagcgatcgaagtggtagcccatggcgacgccaagtcgagcaaggtgatcggtcgctcgatcaacgagatcaagctgccgccgggcaccaccatcggcgcgctggtgcgcgacgaggaagtgctgatcgcccatggcgacacccgcatcgagagcggcgaccacgtgctgctgttcctggtcgacaagaaatacatccgagacgtcgagcgactgttccaggccggcctgacgttcttctga

SEQ ID NO: 7505 - DNA, 5430 bp, Pseudomonas aeruginosa
atgagcctcggcgaactgctggaaacctgccgcagccggcgcatcgaactctggagcgaggcgggccgcctgcgctatcgcgccccccagggtgccctcgacgccggcctcgccgagcgcctgcgggccgagcgcgaggccctgctggaacacctggaaggcggccctggctggcgcgccgaacccgacatggcccaccagcgcttcccgctgaccccggtgcaggccgcctacgtgctgggccgccaggcggccttcgactacggcggtaacgcctgccagctgtacgccgagtacgactggccggccgacaccgatccggcgcgcctggaggcggcctggaacgccatggtcgagcgccacccgatgctgcgcgcggtgatcgaggacaacgcctggcagcgcgtgctgcccgaggtgccctggcagcggctgaccgtgcatgcctgcgcggggctcgacgaggccgctttccaggcgcacctggagcgggtccgcgaacgcctcgaccacgcctgcgcggcgctcgaccagtggccggtcctgcgccccgagctgagtatcggccgggatgcctgcgtactgcactgctcggtggatttcaccctggtcgactacgccagcctgcaattgctgcttggcgaatggcgccgccgctatctcgatccgcaatggacggcggaaccgctggaggcgaccttccgcgactatgtcggcgtcgagcagcgccgacgccagtcgccagcctggcagcgcgaccgcgactggtggctggcgcgtctcgacgcgctaccggggcgtcccgacctgccgctgcgggtgcagccggacacccggtccacgcgcttccggcacttccacgcgcgcctcgacgaggccgcctggcaggcgctcggcgcgcgcgccggcgaacacggcctgagcgctgccggcgtggccttggcggccttcgccgagaccatcggtcgctggagccaggcaccggcgttctgtctcaacctgacggtactcaaccggccgccgctgcatccgcagctggcgcaggtgctcggtgacttcaccgcgctcagcctgctggcagtggacagccgccacggcgacagtttcgtcgagcgtgcccgacgcatcggcgagcagatgttcgacgacctcgaccacccgaccttcagcggcgtcgacctgctgcgcgaactggcgcgccggcgtggtcgcggcgccgatctgatgccggtggtgttcaccagtggcatcggcagcgtgcagcgcctgctcggcgatggcgaggcgccgcgcgcgccacgctacatgatcagccagaccccgcaggtctggctggactgccaggtcaccgaccagttcggcggcctggagatcggctgggacgtacgcctcgggttgttccccgagggccaggcggaagccatgttcgacgacttcgtcgggctgctccggcgcctggcgcagagcccgcgcgcctggaccgacggcgatgccacggaacccgtcgaggcgccgccgcaggcgttgcccggtagtgcccggagcatcgccgccggtttcgccgagcgtgccctgctgacccccgacgccacggcgatccacgatgccgccggcagctacagctaccgccaggtcgcccagcacgccagcgccctgcgccgcgtcctggaagcgcacggcgcgggccgtggccggcgggtcgcggtgatgctgccgaaaagcgccgcgcaattggtcgcggtgatcggcatcctccaggccggcgccgcctatgtgccggtggacatccgccagcctccgctgcggcgccaggcgatcctcgccagcgccgaagtggtcgcgctggtctgcctggaaagcgatgtcccggacgtcggctgcgcctgcgtggccatcgaccggctggccgccgacagcgcctggccgccaccgcccgcggcggaggtggcggcggacgacctcgcctacgtgatctacacctccggctccaccggcacgccaaagggcgtgatgctcagccatgcggcggtgagcaacacgctgctcgacatcaaccagcgctacggcgtcgacgccaacgaccgcgtcctcggcctcgccgagctgagcttcgacctctcggtctacgacttcttcggcgccaccgcggcgggggcccaggtggtcctcccggacccggcgcgcggcagcgatccatcgcactgggcggaactgctggaacgccacgccatcaccctgtggaactcggtgccggcccaaggccagatgctcatcgattacctggagagcgagccgcaacgtcacctgccgggaccgcgctgcgtgctctggtccggtgactggattccggtcagcctgccgacccgctggtggcggcgctggccggacagcgcgctgttcagcctgggcggcgccaccgaggcggcgatctggtcgatcgagcagccgatccgcccgcagcacaccgagctggccagcatcccttatggccgtgccctgcgcgggcagagcgtggaagtcctggatgcccgcgggcggcgctgcccgccgggcgtgcgcggcgagatccatatcggcggggtgggcctggcgctcggctacgccggcgatccgcagcgcaccgccgaacgcttcgtccgtcaccccgatggccgtcgcctgtatcgcaccggcgacctcggccgctacctggccgacggcagcatcgagttcctcggccgcgaggacgaccaggtgaagattcgcggccaccgcatcgaactggccgaactggacgccgcgctgtgcgctcatccgcaggtcaacctggcggccaccgtggtgctcggcgagacccacgagcgcagcctggccagcttcgtcaccctgcatgcgccggtggaggctggcgaggatccgcgtacggcgctcgacgcggtgcgccagcgggcggcccaggccttgcgccgcgactggggcagcgaggagggcatcgccgcggcggtggccgcactcgaccgtgcctgcctcgcctcgttggccgcctggctggccggcagcggtctgttcgccagtgcgacgccgctggacttagccaccctgtgccagcgcctgggtatcgccgaggcgcgccagcgcctgctgcgccactggttgcgccaactggaggagggcggctacctgcgcgccgagggcgagggctggctgggctgcgccgagcgtcccgcgcagagtccggaggacgcctggacggcgttcgccggctgcgcgccggcggcgctctggccggccgagctggtcgcctacctgcgtgacagcgcgcaatccctcggcgagcaactggccgggcggatcagcccggcggcgctgatgttcccgcagggctcggcgcgcatcgccgaggccatgtacagccagggcctgcatgcccaggcgctgcacgaggccatggccgaggccatcgccgccatcgtcgagcgccagccgcaacggcgctggcgcctgctggagcttggcgccggcaccgccgccgccagccgcacggtgatcgcccggttggcgccgctggtgcagcgaggggcggaggtggactacctgttcaccgacgtttccagctacttcctcgccgccgcccgcgagcgcttcgccgaccagccgtgggtacgcttcggccgcttcgacatgaacggcgatcttctcgaccagggcgtggcgccgcactcggtggatatcctgctcagctccggggccttgaacaacgcgctggacaccccggcgctgctggccggcctgcgcgagttgctgagcgccgacgcctggctggtgatccaggaactgacgcgcgagcacaacgagatcagcgtcagccagagcctgatgatggaaaacccgcgcgacctccgcgacgagcgccgccaactgttcgtccacaccgggcaatggctggagtggctggcggcacagggtggcgacctggcttgtggggtggtgccgccgggcagcgctctcgacctgcttggctacgatgtcctgctggctcgctgcaagaccgaccgcgcccgcctggagccggccgagctgctggccttcgtcgaagcgcgggtgccgcgctacatgctcccggcgcagttgcgcgtgctcgaacgcctgccggtcaccggcaacggcaagatcgaccgcaaggccctgaccggctttgcccgccagccccaggcggaccttcggcatggcgtcgcgcaggcaccggccgacgaactggagaatgcgctgctggcactctggcgggaggtgctggacaacccgtcgctgggcgtcgagcaagacttcttcggggccggcggcgactcgctgttgatcgcccagttgatcgcccgtttgcgcgaacgactggaaagcgcccgtcggcatccgttcgatcgcctgctacgctgggcgctcagccagccgacgccgcgcggcctggccgaacgcctgcgcagcgcgccggaagagggccgtgggccagccctggccgcggcgcgcggcgtcgccccggcgccggccggcatgtcgcgcgcaccgctcgccgagggcgcggtggcgctcgacccgctggtgcgcctggtgcccggcgagggcgtgccgcgggtgctggtccacgaaggcctcggcacgctactgccgtaccgcccgctgcttcgcgccctgggtgaggggcggccgttgctggggctggccgtgcatgacagcgacgcctacctggcgatccccgccgagcatctcaacgcctgcctcggccgccgctacgccgaggcgctccatcgcgccgggctacgcgaggtcgacctgctcggctactgctccggcgggctggtcgccctggagaccgccaagtccctggtccagcgcggggtgcgcgtgcgccaactggatatcgtctccagctaccggattccctaccgggtggacgacgagcgcctgctgttgttcagcttcgccgcgaccctcggcctggataccgcggcgctcggcttccccgcgccggaacgtctcggccaggcggtgcaggcggcgctcgcgcagacaccggagcgcctggtcgccgaggcgctggcggggctgccgggcctggccgatctcgtcgccctgcgcggccgcgtgctacaggcggccagcggtagcgccgacgccgtcagcgtcgaacgcgacaccctctaccggctgttctgtcactcggtgcgtgccagccaggccgaggcgccggagccctacgtcggcgcgctgcggctgttcgtgccggacgccggcaacccattggtgccgcgctacgccgaggctctggagacccaatggcgggccgccgcgcttggcgcgtgcggcatccacgaggtgcccggcgggcacttcgactgcctgggcgaagccctggcgcaatccttgtcgaaacccatgccagaggaggcgagccgatga

SEQ ID NO: 7506 - DNA, 1014 bp, Pseudomonas aeruginosa
atgccggaacgtacaaccttgtccagctgggtccagggcatcgtcctcgccctggagctggaaggcctagacggacgccagctgttcgccgagctgggcctcgactaccaggccttgcaggaccccgacgcgcgcttcccgcaggacgccatgagccgtctgtggcagcgtgcggtggcgctcagcggcaacccggcgatcgccctgaacatcgcccgggtccggcgcccggctttccacgtcgtcggctatgcgctgatgtcgagccgcaacctggcggaaggcttcgcgcgcctggagcgctaccagcggatcatcgcggaagcgtccgacctgactttccgccgcacgccgcagggctatcgaatcggcgtcacggtgcatggcgatcgcctgccggcgccaccgcagagtgccgaatgctcgctggcctacctggtggacatggtccgctggatcaccggccggtcgctggacccgctggcggtggaactgcccggcgcgccccgcgagccgctggcaccctatgtcgagctgttccgcgcgccgctgcgctttcacgccgaggagttcgcgctggtgttttcccgcgtcgacctcgagacgccgctaccctcggccaacgaggcgctggcccagttgcacgatcgcttcgccggcgaatacctggcgcgtttcagtaccagccgcattacccatctgacccggcagaccttgtgccggctgctgccgcagggagaacccaagcgcgaacgggtggcccaggcgctgcacctgtcgcagcgcaccttgcaacggcgcctccaggaagaaggcaccagctaccagcaactgctcgacgacacgcgccgggatatggccgaacagtatctccagcagcccggcctgaccttgctggaagtcgcctacctgctgggtttcgccgatccgagcaatttcttccgggcattccgccgctggttcggctgcacgcccaacgaataccgggcgcgccgccaggagcgcccgggctag

SEQ ID NO: 7507 - DNA, 477 bp, Pseudomonas aeruginosa
atgcccagtcgcctgtcactgatcgccgccctgctgttgcccctggccgtccaggccgaacccgctgatacccgcgccctgctcgccgacagcctggccgacagccaggcccaggtggaggcagccgagcaagccatgcgccgatccgaaaacaaggcggtgcagctctatgccaagcgcgtactcaccgaacagcaggagttcgaccaccagttacgcgccctggccggggaaaaggccttggcgctgccctcgccgcgccagaccgaacggcaggccgccgctcccggcggcttcgacgagcgcggtttcctcgacgcgcagattcgccagcaggaccgtctggttgcacgcttcgagggaatcgcccgggactccgccgatcctgacctgcgccgcttcgccgacgaatggctggcgcgcttctaccaccaccgcgaactggccgaccagttgcgtagcggccgcgccgactga

SEQ ID NO: 7508 - DNA, 1707 bp, Pseudomonas aeruginosa
atgaaaccttcgcaatggacgcttcgctgggtgacgctctgtggctgcgggatgctggctgcttccgccgccgccgtggagttgccagggactgtacagccatcccagctcgatgaacgcttcaagccccgcagcgagccgcaagccaagcccgaggcgccgctggtggtgcccaagcaggtcgcgccgcaaggcagcgaacagatccgcttcaaactgcgcgagatacgcatcgaaggcaacacccgctatgacaaggcggtgctcgagtcctattaccagcatatgctcggcgagcaggtgtccctggccgaactggtcgacctggccaaccgcctcaccgccaagtaccgccaggacggcttcctgttgacccaggtagtggtgccggagcagagcatcgagggcggcaaggtacgcctgcaggtgatcgagggttacctcgaacacgtgcagatcaagggaaccgtcgatgggccgcgggtgcgagtggaggaactgctcgcgccgctgaccgaaaaacgtccgctggatgccgataccctggagcgcggcctgctgctggtcggcgacctgccgggggtcaacgtgcagagcgtgctcagcccgggtcaggcgctgggctcgtcgaacctcgacgtggccttgcaacagcagcgatacgaaggcttcgtcagcctcgacaaccgcggctcgcactacaccgacccgaccaccctggccttcggcgccaccgagttctcccgcctgggcttctacgagcagatcgacgtgctcggcgcgatctcgccgttcagcgatgccacccgctacatccagttgcgcggcacgttgccgctgggtggcatgttcgccggcgataccctgcagatcatgggttcctattcgaaggtcaacccggacatcccggactcggtattccccttcgacagcgtcagcaagagcaccgaaggcagcatttcctacaaccatcccttcatccgctcgcgctcgcagaacctgagcggcggcctggcgttgcagtggaaggataccgagacccgcctgcgcgacttcgccagcgacgcctcgaaccccggtcgtgaccatgtgcgggtgttccagcaacgcctgacctatgactgggtcgaccgctggatgggcatcaacctggcggaggtgcgcaacaacatcggcctggacatgtggggcgcgaccaagaaggacgatgaacgtcgttcccgcgaagtggccgacggacgtttcgtctatctcaacggcaacatcgggcgtctgcaagggctcggcggaccctggtcggtgtatggcgaattgcaatggcagtacagcttcgacccgttgctgccgagcgagcgcttcggcgtcggcggcagcgggatcggtcgcggcttcgccccgggcaacatcaccggtgaccgtggcttcgccctgaagctcgaaccgcgctatggccaggcggtgggctatagctggctgcgcagctaccaggcctacgctttctacgactggggcaagacctacaacctcgacgtggacgatgacgagcagcagaagctcggctcgatcggtgccggggtgcgcttcaacctcaccgaccagttgtcgttcaacccggagattgcccgccaggtcatcggcgagccagccgaccagcgcgatgggaagcgcgagacgcgggtcctgttcaacgtggtggcgcgcttctga

SEQ ID NO: 7509 - DNA, 609 bp, Pseudomonas aeruginosa
atgcgctactggtatctgcgccttgcggtattcctgggggcgttggcggtgccggcctggtggttgtaccaagcctggatctttgccctcggacctgacccgggcaagaccctggtcgatcgactggggctgggcgccttggtattgctgctactcaccctggcgatgacgccactgcagaagctgagcggctggccgggctggatcgccgtgcgccgccagttggggttgtggtgcttcacctatgtgctgctgcacctgagcgcttactacgtgttcatcctggggttggactgggggcagttgggcatcgagttgagcaagcgtccctacatcatcgtgggaatgcttggattcgtctgcctgttcctgttggcgatcacttccaaccgcttcgccatgcgcaagctcggtagccgctggaagaagctgcatcgcctggtctacctgatccttgggctcggcttgttgcacatgctctgggtggtgcgggcagacctggaggagtggaccctgtacgctgtggttggtgcgtcgctcatgctgctgcggctaccctcgatcgctcgccgcctgcccaggcttcgaactcgtcacggtgtttcgtaa

SEQ ID NO: 7510 - DNA, 888 bp, Pseudomonas aeruginosa
atgcgtgtcgatctgcattgccacagtaccgcctccgatggcgtgctcgcgcccgccgccctggtgcagcgggcccacgagaaaggcgtcgggctgctggcgctgaccgaccacgacaccctggaaggcctgccggaagcccaccaggcggccgctcgactcggtatcgaactggtcaacggtgtcgagctgtcctgcacctggggcggtgccaccattcatgtgctgggctacggtttcgacctcgacgccgctcccctgcgccaggcgaccgaagccctgcaccggggccgctgggcgcgcgccgaggaaatcgaccggcggcttgcggccaagggtatgcccggtgcgctggagggcgcgcgggcgatccagcaggccttgggcgacagcggcaacgcgccggcgcggccgcatttcgccgagttcctggtccagggcggctgggtcaaggatcgcgccgacgcgttccgcaagtggctgggggccggcaagctgggagacgtcaagcagcactggccgaccctggaggaagtggtcggctgcctgcgcgaggcgcgcgcctggatcagcctggcgcacccgtatcattatgatttcacccggaccaagcgccggcgcctggtcgccgactttctccaggccggcggacacgccatcgaggtggtcaatggcgtgcagccggccgaacaggtcggtaccctgtcgatcctggcccgcgagttcggcctgatggtcaccgccggcagcgatttccacgcgccgggcgactggtccgaactgggcatgtaccgtgcggttccagaggaccttccggccatgtggccgcgtttcgccaggcattttcgcgataccgaacgtcattccgaagccaagggggccgaatga

SEQ ID NO: 7511 - DNA, 1215 bp, Pseudomonas aeruginosa
gtggcgcaacgagaattttccgcgaccagcggcggtgtgctgctggcgtcggtggtggcgatcatgctcgggcccaccggcatcctgctgaacaccttcagtctgttcatcgcaccgatgagcgccgagtacgcctgggaccgcgccgaggtgtcgttgctggtgacgctgttcggactggcggtcgccatcaccagcccgctcaagggctggctgatcgaccgttggggcgcgcggcggacaatgctcgggctgaccgccgccctgtcgctgccgctgctcggcctggcggcggtgaatgccgtctggcaactctacgcgctgttcctgctgatcggcctgctggcgccaggcaacctgccttacggacgtatcctcggactctggttccgccaacgcctgggcgtggcctacggcctgctaggcctgggcttcggggtgggcgggccgctgggcctgctggtcggccaccagagcctcgaagcgtggggctggcgcggcgctttcctggtctacggcgtgctcgaactgggcctggcgctgccgctgctggcctggctgttccgcgagccagcgccggatgctggcgtggccgccggcacggccgtagcggaaaccgcgctgagcggatcgacggcgccccaggcctggcgcagcgccagtttctggctggtgctgggcaaccaggtactggcggtgttcgtgatgtccgggatcatgacccatggcgtgccgatgctggtggagcgcggtttgtcccggggcgaggcgggcaccgcgctgtcggcgttgtgggtcggcatgatgctgtcgcagccgctgatgggctggcttctcgaccgcgtggcgacgcctcgggtggcgttgcccttcgccctggcggcggtgctcggcatggcctggttcctggtgggcgacacaccgagcggtctatggctggcggtgttcctggtcggcctgggtggaggaggggaaagcggcaccaccaagtacctgttgatgcgctacttcggcctgcgcagcttcggtgtgatctacggttcgatccagccgttcaccttcgccctgtcgatcagtctcggcgcttacctgctgggctggctgtacgaccgcgccgaaggctacgggacggccgaatgggtgctgctcgcggctttttccctggctgcgtgcagcctgttcgcctttcgcccctatccgcagaaattgccctga

SEQ ID NO: 7512 - DNA, 579 bp, Pseudomonas aeruginosa
atgcgcgtcaccactcacgctaccctggccgcggccctgctgctcagcgccgcctccgcgttcgccttcaatctcggggatgccgccaaggcggtcgccggggcgtcccagggcgactccgcccaggtagccaccaccccgcagaccagcggtctgctcggcgcactcaccggccagctcggggtcagccaggagcaggcggtcggcggtaccggcgccctgctcggcctggccaagaaccagttggccggcaacgattattcgcaactggttaagaccatccccggcctcgacaagctggccggcaacaacgccctggccggtctcggcgggctcggcaacgtgctcggcaagagcggcggcgacagcaagggcctcggttcgctgctcggcaatgcggacagcatgggcgacgtgaacaaggccttcggcaccctgggcatggatagcgggatgaccgagaagttcgcccaggtgctggtcgactacttcggcaagcagggcgccaacagcgagctgctgggcagcctgagcaatctctggggagtgagcaaggcgggcggctcgtcgctgctctga

SEQ ID NO: 7513 - DNA, 729 bp, Pseudomonas aeruginosa
atgcgcgtgacccgttttctggctgctgccgccctcggcctgatgagtaccctggccctggcagacaatgccgatcagaacatccgcaagaccctgcaggccctgcaaccggacctgcccatcgactccatcgccagcagcccgctgcaggggctctaccaggtgcagctgaagggcggccgggtgctctacgccagcgccgacggccagttcgtcatgcagggctacctctaccaggtgaaggacggcaagccggtcaacctgaccgagaaggccgagagccaggcgatcgccaaggcgatcaacggcgtgcccgccagcgagatggtggtgtatccggccaagggccaggccaaggcgcacatcacggtgttcaccgataccacctgcccgtactgccagaagctgcatgccgaggtgccggacctgaccgagcaggggatcgaggtgcgctacatggcgttcccgcggcaggggccgcagtcggcgggcgacaagcaactgcaggcggtctggtgtgcgaaggagccgaccaaggcgatggacgccatgatgaacggcaaggagatcaagtcttccgagtgcaagaacccggtcgacaagcagttccagatgggccagatggtcggggtgcagggaacgccggcgatcgtccttgccaacggccagttgctccccggctaccagccggccaagcagttggccaagctggcgctggaggccaaatag

SEQ ID NO: 7514 - DNA, 1395 bp, Pseudomonas aeruginosa
atggctgtctacaactacgacgtggtgattttgggcacgggtccggcgggcgaaggggcggcgatgaacgcctccaagtacggacgcaagctggcggtagtcgacagccgtcgcgtggtcggaggcaactgcacgcacctcggcaccattccttccaaggccctgcgccactcggtgaagcagatcatcgagttcaacaccaacccgatgttccgccagatcggcgagccgcgctggttctccttccccgacgtgctgaagagcgccgaccgggtgatctccaagcaggtcgcttcgcgtaccggctactacgcgcgcaatcgcatcgacatgttcaccggcaccgccagcttcgtcgacgaacgcaccgtcgaagtggtgacgccgagcggcgcggtggagcgcctggtcgccgaccagttcgtgatcgccaccggctcgcgcccgtatcgtccttcggacatcaatttcaaccacccgcgggtctacgacagcgacaccatcctgtccctgagccacaccccgcgccggctgatcatctacggagccggggtgatcggctgcgaatacgcgtcgatcttcagcggcctgggcgtgctggtggacctgatcgatacgcgcgaccagttgctcagcttcctcgatgacgagatttccgatgcgctgagctaccacctgcgcaacaacaacgtgctgatccgccacaacgaggagtacgagcgcgtcgaggggctggacaacggtgtcatcctgcacctgaagtcgggcaagaagatcaaggcggacgcgctgctctggtgcaacggccggaccggcaacaccgacaagctcggcctggagaacgtcggcatcaaggtcaacagccgtggccagatcgaggtggacgagaactaccgcacttcggtgagcaacatcttcgccgctggcgacgtgatcggctggccgagcctggccagcgctgcctacgaccagggccgctcggccgccggcaacatcgtcgagagcgacagctggcgcttcgtcaacgatgtgccgaccggcatctacaccattccggagatcagctcgatcggcaagaacgaaagcgaactgaccgcggcgaagattccctacgaagtgggcaaggcgttcttcaagggcatggcccgggcgcagatttccaacgagccggtgggcatgctgaagatcctgttccatcgcgagaccctggagatcctcggcgtgcactgcttcggcgaccaggcttcggaaatcgtccacatcggccaggcgatcatgaaccagccgggcgagctgaataccctgaagtacttcgtcaacaccaccttcaactacccgaccatggcggaagcctatcgggtagcggcgttcgacggcctcaaccggcttttttga

SEQ ID NO: 7515 - DNA, 2055 bp, Pseudomonas aeruginosa
atgagcgccaaggatttcctggtcgaactgggcaccgaagagctgccgccaaaagccctcaacagcctcggcgaagccttcctcagcggtatcgagaagggcctcaaggctgccggtctgagctatgccgctgcgcgtttctatgcggcgccgcgccgtctcgccgtgctggtcgagcaactcgccgtgcagcagcccgaccgtaccgtcaacctagacggtccgccgctacaggccgccttcgacgccagcggtaacccgacccaggccgccctgggcttcgccaagaagtgcggcgtggatctgcagcagatcgacaagagcggtccgaagctgcgcttcatccagaccatcgccggccaaccggccgccggcctgctgccgggcatcgtcgaggcctcgttgaacgaactgccgattcccaagcggatgcgctgggcagctcgccgcgaggagttcgtgcgtccgacccaatggctggtgatgctgttcggcgacgatgtggtcgagtgcgagatcctcgcccagaaagccgggcgcgaatcccgtggccaccgcttccacaatccggacaatgtgcgtatttccagcccggcagcgtatctggaagacctgcgcggcgctcatgtgctggccgatttcgccgagcgccgcgagctgatcgccaagcgcgtggccgaactggccgccgagcaacagggcagcgccatcgtgccgccgagcctgctcgacgaagtgactgcactggtcgagtggccggtgccgctggtctgctccttcgaggagcgcttcctcgaggtcccgcaggaagccctgatcaccaccatgcaggacaaccagaaatacttctgcctgctggacgccaacggcaagctgctgcctcgcttcatcaccgtcgccaacgtcgagagcaaggcgccggagaacatcgtcagcggtaacgagaaggtggttcgcccgcgcctcaccgacgccgagttcttcttcaagcaggacaagaagcagccgctcgaaagcttcaatgagcgcctgcgcaacgtagtgttccaggcccagctcggcaccgtgttcgagaaggcccagcgcgtctccggcctggccgcctacatcgccgaacgtataggcggcaatgcgcagaacgcctcgcgcgccggcatcctgtccaagtgtgacctggcgaccgagatggtcggcgagttccccgaaatgcagggcatcgccggctactactacgccacccacggcggcgaagcggaagacgtcgccctggccctcaacgagcagtacatgccgcgcggcgccggcgccgagctaccctcgaccctgaccggcgccgccgtggcggtggccgacaagctcgataccctggtcggtatcttcggcatcggcatgcttcccaccggcagcaaggacccctacgcgctgcgccgcgctgcgctgggcgtgctgcgcatcctcatcgagaagcagctcgacctggacctggtagccgcggtcaacgccgccgtcgagcaatacggcgacaaggtcaaggccgccggcctggccgagcaggtgctggacttcgtgttcgaccgcctgcgcgcgcgctacgaggacgaaggcgtggacgtggccgtgtaccagtcggtgcgcgcgctcaagccaagctcgccgctggacttcgaccagcgcgtacaggccgtccaggccttccgccagttgcctgaagccgaggccctggccgcggcgaacaaacgggtgtcgaatattctcgccaagtccgaggacgaggttccgccgaacgtggatgccagcctgctggtggaagccgccgagaaggccctgggcagcgccgtggcgaacgccgaaagcgaagtcgcgccgctggcagcggcacgcgactatcgcgccgcgctggcccgcctggcggccttgcgcgagccggtggatacgttcttcgccgatgtgatggtcaatgtcgacgacgcggcggtgcgcgccaaccgctatgcgctgctggccaagctgcgcgggtcgttcctcggggtggcggacatctcgctgctcggctga

SEQ ID NO: 7516 - DNA, 1113 bp, Pseudomonas aeruginosa
atgttcgaactggattcgacgctggcgcagcacatcgtcgatcgggcgatggcgatcctgccgcacaacatcaatgtgatggatgcccagggcatgatcatcggcagcggcgatccatcgcgcctgcatacccgccacgaaggggcgcaactggtgctggccaaccggcgggtggtggaaatcgacgagcaggccgccgcctgcctgcgcggggtgcggccaggggtgaacctgccgttgctgcacgccgagcggctggtcggcgtgctcggcatcaccggcgcgccggaggtggtccggccctatgccgagctggtgcggatggcagcggaaatgctcatggaacagcgccagatgcaggacgagcgacactggcaacgccagcgtcacgaagcctggctgcgccagttgctcgatcccggccacggcctcggggcgctggcggccgatgccgaacacctggggctggccatgcactggccgcgccaggcggtcttcctggaactgcccgagcatgccgatccgctgccttgccaggctcgcctgctggcggcactcggcggccgggcggagcactggagcgcggcgctgggcgagcgcctggtgttctggtgccggccggtagcccacgcagatacgctcgagcactggctggagcgcgccgacgcgcgcggctggggcgtggcgcgcctgtgtgccggcgacccggcgcacgacctggccgagctgcgcgcctcggcctgcgccgcacgcgacctgctggactatgcgcgcagccggttgcccggtcggcgggtcgtgaccctggacggacaccgcctcgccagcctgctgttcagccagcgcgacagttggcaggtgcggcagctgctggcgcccttgcagcggttgctcgaccacgatccgcaaggttcgctggccgctaccctggagtcctggtgcgcccatgacgggcacgcccaggcctgtgcccaggcgctggggatccatcgcaacagcctgcgctaccgactggagcgcatcgcttcgatcagcgggctcgatctcgctcgcctggagcaccgccagcaattgttgctggggctgcaattgctcgttccgcgccgcgggtaa

SEQ ID NO: 7517 - DNA, 1785 bp, Pseudomonas aeruginosa
atgtccgtgttcgccaccgccgcccaggaccgcctgctggacctcggcgacctgctccgcgagctggtcgcccagggccgggtcgggcaggagcaggccgaacagtgcctggcgatccgccgcagcgcggtgcgcaaccagcagcatccgctggagttcctcgccgcgcagcaggtcgaggatctcaagcgccccggacgcaagctcgacctggagaccctcacccagtggctggccgagtacgccggccagccctacctgcgcatcgacccgctgaagatcgacgtcgccgcggtgactccgctgatgtcctacgccttcgcccagcgccatggcatcctcgccgtcgcgctgagtccggaggaagtcaccatcgccagcgcccagcccttcgtacagggctgggaaagcaacctggtgcatgtgctcaagcgaccgatcaagcgggtggtggcgaacccggcggacatccagcgctacaccgtcgagttcttccgcctggcccgctcggtcagcggcgccacctcgccggaccagaagatcagcggcgtcggcaacttcgagcagttgctcaacctcggcgccgccgaccaggagccggacgccaacgacgcgcacatcgtcaccatcgtcgactggctgttccagtacgccttccagcagcgcgccagcgacatccacatcgagccgcgccgcgagcagggcaccgtgcgcttccgtatcgacggcgtgctgcacaacgtctaccagttcccgccgcaggtgaccatggcggtggtcagccgcctgaagtcgctgggacggatgaacgtggcggagaaacgcaagccgcaggacggccgggtcaagaccaagaccccggacggcgccgaggtggagctgcgcctgtcgaccctgcccaccgccttcggcgagaagatggtgatgcgcatcttcgaccccgaggtgctgctcaagagcttcgaccagctcggcttctccgccgacgacctgcgccgctggcagagcatgaccagccagcccaacggcatcatcctggtcaccggccccaccggctcgggcaagaccaccacgctctacaccacgctcaagcaactggccaccgatgaggtgaacgtctgcaccatcgaggacccgatcgagatgatcgagccctcgttcaaccagatgcaggtccagcacaacatcgacctgaccttcgccagcggcgtacgcgccctgctgcggcaggacccggacatcatcatggtcggagagatccgcgacctggagaccgccgagatggcgatccaggcggcgctcaccgggcacctggtgctctccaccctgcacaccaacgactcccccacggcgatcacccgcctgctcgaactgggcgtaccctactacctgatccgcgccacggtgctaggggtcatggcccaacgcctggtgcgcacgctctgcccgcactgcaaggcgccgatgcaactggcggacagcgactggcacgaactgacccgcccctggagcgccccgccgcccagcggcgcgcaccaggccgtgggttgcctggagtgccgcgacaccggctatcgcgggcgcgccggcgtctatgaaatcatgctgctcagcgatagcctgaaagaactgatcaccgccgacaccgacctagtcgccctgcgccgccaggcgtacaaggaaggcacccgcagcctgcgcctgtccggcgcgcagaaggtcgccgcaggtatcagtacgctggaggaagtactgcgggtgaccccgcagagcgaacagaagtag

SEQ ID NO: 7518 - DNA, 867 bp, Pseudomonas aeruginosa
atggacatcctccagagttcctccgccgcgcccctcgcgccgcgggaagcggccaacgcccccgcgcagcaggctggcggcagctttcagggcgagcgcgtccactacgtttccgtttcgcagtcgctggccgatgccgcggaagagctgaccttcgccttttccgagcgcgccgagaaatccctggccaagcgccgcctgagcgacgcccatgcgcgcctgagcgaagtccaggccatgctgcaggagtactggaagcgcattccggacctggaaagccagcagaagctcgaggcgctgatcgcccacctgggcagcggccaactgagcagcctggcgcagctcagcgcttacctggagggcttctccagcgagatcagccagcgcttcctggcgctgtcgcgggcgcgcgacgtcctggccgggcggccggaggcgcgggcgatgctggcgctggtcgaccaggcgttgctgcggatggccgacgagcagggcctggagatcgaactcggcctgcgcatcgagccgctggccgccgaggcttccgccgccggtgtcggcgatatccaggcgctgcgcgatacctaccgtgacgcggtacttgactaccggggcctgtcggcggcctggcaggacatccaggcgcgcttcgccgcgacgccgctggagcgggtcgtggccttcctgcagaaagccctgagcgccgacctggacagtcagtcgagccggctcgatccggtgaagctggagcgggtcatgagcgacatgcacaagctgcgcgtgctcggcggcctggcggagcaggtgggggcgctctggcaggtgctggtgacaggggagcggggccatggcatacgggccttctga

SEQ ID NO: 7519 - DNA, 1485 bp, Pseudomonas aeruginosa
atgcccaagtcatccgccgccgaacagtccggcgagagttcgacccagaccctgtccctgctcgacgagatcatcgccaagggccgcatggcccacgacgacagccagcaggactatgcccgcgacatgctcgcggaattcgccacccaggtcctcgacgagggcatggccgtcgacaaggacaccgtggcgatgatcaacgaccgcatcagccagatcgatgcgctgatcagcgaccagctcaaccagatcatccaccaccccgagttgcagaagctggaagcctcctggcgcggcctgcaccaactggtgagcaacaccgagaccagcgcgcggctcaagctgcgcctgctgaacgtcggcaagaacgaactgcagaacgacctggagaaggcggtcgagttcgaccagagcgcactgttcaagaagatctacgaagaggaatacggcaccttcggcggacaccccttcagcctgctgatcggcgacttcaccttcggtcgccatccgcaggacatcggcctgctggagaagctgtcgaacgtcgccgcggctgcccacgcgccgttcatcgccgccgccagcccacgcctgttcgacatgaacagcttcaccgaactggccgtgccacgcgacctgaccaagatcttcgagagcctggagctgatcaagtggcgcgccttccgcgagagcgaggactcgcgctacgtgtcgctggtgctgccgaacttcctcttgcgcctgccctacggcccggagacgcgaccggtggaaggcatgaactatgtcgaggacgtcaacggcaccgaccactccaagtacctctggggcaacgccgcctgggtcctggcgcagcgcatcaccgaggccttcgccaagtacggctggtgcgcggcgatccgcggcgcggaaggcggcggcgcggtcgagggcctaccggcgcacacgttccgcaccagctccggcgacctgtcgctgaagtgcccgaccgaggtggcgatcaccgaccgccgcgagaaggaactcaacgatctcggcttcatttccctgtgccacaagaagaacagcgacgtggcggtgttcttcggcggccagaccaccaacaaggccaggctctacaacaccaacgaggccaacgccaacgcgcgcctgtcggcgatgctgccgtacgtgctggcggcatcgcgcttcgcccactacctgaaggtgatcatgcgcgacaaggtcggcagcttcatgacccgcgacaacgtgcagacctacctgaacaactggatcgccgactacgtgctgatcaacgacaacgcaccgcaggaaatcaaggcgcagtacccgctgcgcgaggcgcgggtggatgtcagcgaggtggccggcaaaccgggagcctaccgcgccacggtgttcctccggccgcacttccagctcgaggaactcagcgcgtcgatccgcctggtcgccaacctgccgccgccggtagcggcgtga

SEQ ID NO: 7520 - DNA, 945 bp, Pseudomonas aeruginosa
atgcaacgcatccgcatcatcgattcgcataccggcggcgagcccacccgcctggtcatcggcggttttcccgatctcggccagggcgacatggctgagcgccggcgcctgctcggcgagcgccacgacgcctggcgcgccgcctgcatcctcgagccgcgcggcagcgacgtactggtcggcgccctgctctgcgcaccggtcgatcccgaagcctgtgccggagtgatcttcttcaacaacagtggctacctcggcatgtgcggccacggcaccatcggcctggtcgcctcgctggcacacctagggcggatcggtcccggcgtgcaccgcatcgagacaccggtcggcgaggtcgaggcgaccctccacgaggacggctcggtcagcgtgcgcaacgtgccggcctaccgctaccgtcgccaggtcagcgtcgaagtgcccggcatcggccgggtcagcggcgacatcgcctggggcggcaactggttcttcctggtcgccggacacggccagcgcctcgccggcgacaacctcgacgccctcaccgcctacaccgtcgccgtccagcaggcgctggacgaccaggacatccgcggcgaggacggcggcgccatcgatcacatcgaactgttcgccgacgacccccacgccgacagccgcaacttcgtgctctgccccggcaaggcctacgaccgctcgccctgcggcaccggcaccagcgccaagctggcctgcctggccgccgacggcaagctgctgcccggccagccctggcgccaggcgagcgtgatcggcagccagttcgaggggcgttacgaatggctcgacggccagcccggcgggcccatcgtgccgaccatccgcggccgcgcccacgtcagcgcggaagccaccctgctgctggcggacgacgatccgttcgcctggggcatccgccggtga

SEQ ID NO: 7521 - DNA, 624 bp, Pseudomonas aeruginosa
gtgacctgcaccatgttgcccgagatcgaccaattccttgcctgttccactcccgccgcctgggtcgaggcggccctggagcgccaggacgtcatgctgctggaccacaaggcctgcgagatgaaggccgcggcgacggcgatgcaactgatcggcaagtactccggccgcctggacctggtgaacaagatgagccgcctggcgcgcgaggagctgcgccacttcgagcaggtgctggcgatcctgaagaaacgcggtatccgggtggtcaatgtcagcgcctcccgctacgcctcggcgctgcgcgacctggtgcgcaagcaggagccgcagcggctgaccgatacgctggtggtcggcgccttcatcgaggcgcgttcctgcgagcgcttcgccgccctggtgccgcacctggacgcggagctggcgaaattctacggcggtttgctgaagtccgagtcgcggcatttccaggactacctgaagctggcctaccagtacggcgacgaggccgacgtggagcggacgatcgaggtggtgcgggccaaggaggccgagctgatcagcagtccggacaacgaattccgcttccacagcggcctcccggtggacctggtggcctga

SEQ ID NO: 7522 - DNA, 1116 bp, Pseudomonas aeruginosa
gtgcagatcggtgtccccctcgagacccatgccggtgagacgcgggtttccgccaccccggaaaccgtcaagaagctgatcggccaaggccaccaggtgatcgtccagagcggcgccggcgtcagcgccagccagccggacagtgcctatgaagccgccggcgcgacgatcggcagcgccgccgaggccttcggcgccgacctggtgctgaaggtggtcgcgcccagcgccgccgagctggcccagatgaaaagcggcgccgtgctggtcggcatgctcaaccccttcgacaacgagaacatcgcccgcatggccgagcgcggcatcaccgccttcgccctcgaggccgcgccgcgtacctcgcgggcgcagagcctggacgtgctctcctcgcaggccaacatcgccggctacaaggcggtgatgctcgccgccaaccactacccgcgcttcatgccgatgctgatgaccgccgccggcaccgtgaaggccgcccgcgtgctgatcctcggcgccggcgtcgccggcctgcaggcgatcgccacggccaagcgcctgggcgcggtgatcgaggcttccgacgtgcgtccggcggtgaaggagcagatcgagtcgctcggcgccaagttcgtcgacgtgccctacgagaccgacgaagagcgcgagtgcgccgaaggcgtcggcggctacgcgcggccgatgccggcctcgtggatggagcgccaggccaaggccgtgcacgagcgcgccaagcagtcggacatcgtcatcaccaccgcgctgatccccggccgcaaggcgccgacgctgctgcacgaggcgaccgtggcggagatgaagccgggctcggtggtcatcgacctggccgccgcccagggcggcaactgcccgctgaccgaggccgaccaggtcgtggtccggcacggcgtgaccatcgtcggccacagcaacctggccgcgctggtaccggcggacgcctcggcgctatacgcgcgcaacatcctcgatttcctcaagctcaccctgaacgccgaaggcttcagcgtgaacctcgaggacgacatcgtcgccgcctgcctgatgtgccgcgacggccaggcggtgcgcaagaacggc

SEQ ID NO: 7523 - DNA, 1635 bp, Pseudomonas aeruginosa
atgacggtttctcgacgcggattcatggcgggcctggcccttaccggggcggcggcgctgccggtggcttactacacacatcgtcatctgacccgcgaagaggagccgcagacgcctgacgaggcttcgctcgacctggcggctaccgatggcatacgactgggcgaccgcctgcgcggtctatgggacctgcgcctggtaggcggtgatgccgaactgcccgggctgcctcgggagggcttgcaactggtgctggacgtggcacccaaggggcgcggcctgattggctacctggatactcctgaacgtctcctcgcggcggagccgccgcgcttccgtgtgcttggcgacttgctcggagccagttctgcaagcatccgctggcgtttggtggaccaggcgagcggttccgtggcgccgactcacgattgctcggcggtgttcgacgaggtctgggcagactatgcgaacgcgggcgacggaaccctgagcggacgcatacagcgcctggagcgttcgccgctgtcgccgaacgaggattttcgcttcgttgcggtaaagcgtcacttccccctggcccatgagcgcatcgtgctcaacgagaaacttctcggttggctggtgtcgccgcagcaccgactgttccaccagctatggcacgcttcgcgggacaaatggcatcggctttcggaaaaacaacgcaatgcgttgcgcggagtcggttggcagcccggcccgctggaccgcgaacgcgatgcgcgagggccgcgcaaggatcgcaatgcctcgggtatcgacttctttttcatgcaccggcacatgctgcacaccgcgcgttccatgcaggacctgccgtcctgggagcgtctgccgcgacctgtggtgccgctggagtacgatcgtcccggcttcatccgttacttcgacaatccggacgggttttccgtgcctccggcctgggtggcagtggatgacgacgagtacagcgagtggctgcatggcctgaaaagcgccgaggcctaccatgccaatttcctggtctgggaatcgcagtaccaggacccggcgtacctggcgaagctgaccctcggccagttcggttcggagctggaactgggcatgcatgactggctgcacatgcgctgggcctcggtgacgagggacccctccaacggcgccccggtcatgaccgaccgttttccggccgatttcgccccgcgctggttccgcccggagaacgacttcctcggcgacccgttttcctcccatgtgaatccggtgttctggtcgttccacggctggatcgacgaccgcatcgaggactggtatcgcgcccacgagcgtttccatcctggcgaagtgcagcgccgcgaagtggagggcatccaatggttcgcgcccggtcgatgggtcgaggtcggcgatccctggctgggcccggcgacccatggatgcgggctctcggatgtccaggcgagcagcaactcggtggagctggacgtggaaaccatgaagctggctttgcgcatcatcttcagcgaagaagatcaactgagcggctggctcaagcgtgcgccgcggcggccctggtacgcgcgcaacctgaagctggcgcgcgaccagctcaggcgctga

SEQ ID NO: 7524 - DNA, 921 bp, Pseudomonas aeruginosa
gtggcgtcctataccttgcggcaactcaagtatttcgtgaccaccgtggaatgcggcagcgtggccgaggcctcgcgcaagctgtacatcgcccagccgtcgatctccacggcggtgaagggtctggaggaaagcttcggcgtgcagctgttcatccgccaccacgcccagggcgtgtcgctgacccccgccggcgcgcgcttctaccgcaaggcccaggaactgctgcggatggcccacgagttcgagcagaacgccctggccgacaacgacgtgatcgccgggcagatcgacatcggctgcttcgagacggtcgccccgctctacctgccaggcctgatcgccggctttcgccaggcctatccgggggtggagatccgcatacgcgacggagagcagcaggaactggtgcaaggcctcacctccgggcgcttcgacctggccttcctctacgagcacgacctcgactcgaccatcgagaccgagccgctgatgccgccgcaacgaccccacgcgctgctccccgaagggcaccgcttcgccgggcaggcgcaagtgtcgctgcgcgacctgtgcctggaaccgatgatcctgctcgacgtgcagcccagccgcacctatttcgtcagcctgttcgaggaactcggcctgacgccgaacatcgccttcagctcgccgtccatcgagatggtgcgcggcatggtcggccagggcttcggcttctccctgctggtcacccgcccgcattcggaatgcacctacgacggcaagaaggtggtcatggtcgacctcgccgagccggtgtccacctccgggctcgccgccgcctggctgaaacgcgcgcaactgaccaagccggcacgattgttcgtcgactactgccgggagcaactgggcaagcttgccgagcgccggcactga

SEQ ID NO: 7525 - DNA, 939 bp, Pseudomonas aeruginosa
atgctgaacaaacgccgcctgccgtcgatgaccgccctgcaatgcttcgaagcggtagcccggcacctgagcttcacccgcgccgccgaagagttgagcctgacccagagcgccatgagcaagcaggtcgcgcaactcgaggagcaactgcagcacgccctgttccgccgggtgcgcaagcgcttgcaactgaccccggccggcgagctgtacctggccgaggtacgacgcatcctgcaacaggtagagctgtccacccgcttcctgctttcctacggcggcgagaccgaagtgctgcgagtggcgaccccgccgaccttcggcgcgcgctggctgatcccgcaactgaacggctggcgccaccgccacccgaacatccacctcgacctgcgccaggaactggaaccggacgacctgcgccagggccattgcgacctggcgttcttcttcggccccggcaccctgccgggcgccgagtgcatacgcctgttcggcgaacaactggtggcggtctgcgcgccatccctgctgccggccggcggactggacgaaccgacccaactggcggggctggtgctgctgcagaacgccagccgcgcggaggcctggcacgactggttcgccagcctggagcgaaattgccagggttgctaccacggtccacgcttcgacaccttctacatgtgcatccgcgccgcccaggccggttgcggggtagccctgctaccgcgcttcctggtcgaggaggaactcgccgaaggcaagctggcgatcgcctggccgcacgccctgcccagccaggaggcctactacctggcctatcccgagcatgccgcggaagtccccaaggtgcgccatttcatcgagtggatggtagagcgcctggagcaggagcaaccctcagcgggcccccgccagacgcgccacggcccggtttga

SEQ ID NO: 7526 - DNA, 396 bp, Pseudomonas aeruginosa
atgatgttcgaacgcagccccgacgatccccttcccctggtctacgcctgctccggctgctccaacgtggcgcaactggccaacgatctcgcgctgcgcctggatcgcgcccggctggcggagatgtcctgcatcgccggagtcggcggcgacgtcccgctgctggtccgccgggcccgctccgggcgaccgatcctggccctcgacggttgcccgctgcattgcgtgaaaggctgcctggcgcgccacgaggtagtcccgaccctgcacctgaccctcagcgaacacggcctgaagaagcgctacggcgaggactgcgaggcgcaggacgccgagcgcctgttcgtcgagctggagcgtctgctgacgccgggcggcaagcgccgctgcgaatga

SEQ ID NO: 7527 - DNA, 1479 bp, Pseudomonas aeruginosa
atgagactggccgaactgcaagccgccgggcgccagccgcaactgccattgcgggtgaccctggcggatggcgccggcgctgccgaactgcgcctggacagtctgctgcgggtgctgcccgggcagcgctacgtcggtgccggcgaatggcgtgggcgcaaggtgctggccaagctgctggtgggcggcaaggccgcacggcatttccagcgcgaactggaaggggcgcgtctgctcgcggcccaggggctgaccaccccggcgctgctggccgacgggctgcagcagggcgagggcggctggttgctgttcgactacctcgacgcggcgcagagcctcggtgacgcctggcgtgcggtggaggcccaggcgccgctgggcgatgcccagcaagcggtgctcggcgaagccctggcagccattggcgagctgcatgcaaagggcctctggcaggacgacctgcacctggacaacctgttgcgccacgccggccgcctgtatctcatcgacggtggcggcgtgcgtgcggaaactcccggccagccgctgtcgcgacagaaagtgctggaaaacctcggggtgttcttcgcccagttgccggcgctcctcgatcctttcctggaggagttgctggtgcattacctgctggccaacggcgagcatgcgctgccgctggaagccttgcagaaggaaatcgccaaggttcgccgctggcgggtgcgcgacctgctgagaaaggtcggtcgcgactgtagcctgttcagcgtcgtgcgcggtccgttccgcctgttcgccgcccgccgcagcgaggccgagacgatggcgcccctgctggcggacgcggaccgcctgatcgccgccggccacgtctacaaggacggcggcgcggccaccgtcgcccgggtcgaagcgaacggccgcacgctgatcatcaagcgctacaacatcaagggctgggtccattggctgaagcgcttctggcggccgagccgggcctgggcctcctggcgcgaaggcaaccgcctggaattcctcggcatcgccaccgcccgtccgctggcgatgctggagcggcgctggtgctggctgcgcgggcgcgcctacctgattaccgattatctcggcggtcaggatataatcgctcgttttaagccttgcctggacatgcccgatggcgccgtttcgccaccggaagccgagttggcggcactggatcggctgttttcgacgttgatccgcgaacgcatcagccacggcgacctgaagggacacaacctgttctggcaggcccatgaacaaggcggcgaatgggcgctgatcgacctggacgcgatgcgcaagcatcacagccaggcgtcctttgcccgcgcctacgcccgcgaccgcgcgcgcttcctgcgcaactggccgcaggacagcggcctctaccggctgctggagcaacggattccccgcctcggcgacgccgccggggcttga

SEQ ID NO: 7528 - DNA, 375 bp, Salmonella typhimurium
atggcaacagttaaccagctggtacgcaaaccacgtgctcgcaaagttgcgaaaagcaacgtgcctgcgctggaagcatgcccgcaaaaacgtggcgtatgtactcgtgtatatactaccactcctaaaaaaccgaactccgcactgcgtaaagtttgccgtgttcgtctgactaacggttttgaagtgacttcctacatcggtggtgaaggtcacaacctgcaggagcactccgtgatcctgatccgtggcggtcgtgttaaagacctcccgggtgttcgttaccacaccgttcgtggcgcgcttgactgctccggcgttaaagaccgtaagcaagctcgttctaagtacggcgtgaagcgtcctaaggcttaa

SEQ ID NO: 7529 - DNA, 450 bp, Salmonella typhimurium
atggcggaaattggtatttttgtcgggaccatgtatggcaactcactgctggtggcggaagaagcggaagcgatcctcgccagacagggccacagcgcgaccgtgtttgaagatcctgaactgtccgactggcagcaatatcaggataaggttgcgctggtcgttacctcgacgaccgggcagggcgatctaccggatagcattgcgccgctctttcacggcattaaagatacagtcggttttcaaccaaacctgcgttacggggtgattgcgttaggtgatagcagctaccccaatttctgtaatggcggcaaacagtttgatgccctgttgcaagagcaaagcgcgcagcgggtgggggagatgttattcattgacgccagcgaacatccggagccggagagccagtccaatccctgggttgaaaactggggaactttactttcctga

SEQ ID NO: 7530 - DNA, 1425 bp, Salmonella typhimurium
atgctggccgtcagcgaagagggaatggtcgaagagatgatcctcgcgctactggcttccccacaactggtcattttctttgaaaagtttccgcgtttaaaaaacgccgtgaccgccgatctcccgcgctggcgggaagcgctacgcagccgtcttaaagacgcacgcgttccgccggaactcacggaagaggtcatgtgttatcagcaaagccaacttctctctaccccacagttcatcgtgcaactgccgcaaatactggcgttgcttcaccgcctgcattcaccgtatgccgcgcaggcgaagcagttgacggagagcaacagtacctttacccctgcgctacacacgctttttttgcaacgctggcggttaagtctggtcgtgcaggccaccacgttaaaccaacaactactggaagaagagcgcgagcagttgctgagtgacgttcaggaacggatgacgctgagcgggcaactggaaccgacgctggcggaaaatgataatgccgcaggccgcctgtgggatatgagcgcgggccagcttaaacgtggtgattatcaactgatcgtaaaatacggcgaatttctcgccgcccagccggagctaatgcaactggcggaacaactgggacgttcgcgggaagccaaatcggtaccgaaaaaagacgcgccgatggaaacctttcgtacactggtacgcgaacccgcaacggtgccggagcaggttgacggtattcagcaaggcgatgatattctgcgcctgttgccgccagagctggcgacgctcggcatcaccgagctggaatatgaattttaccgccggttagtggaaaaacagctcctcacctatcgcctgcatggcgaagcgtggcgtgagaaagtgaccgaacggccggtagtacaccaggatgtcgacgagcagccgcgcggaccgtttattgtctgcgtcgatacttcaggctcgatgggaggatttaacgagcagtgcgcaaaagcgttctgcctggcgttgatgcgcgttgcgctggcggataaccgccgctgctttattatgctgttttccactgacgttgtgcgctatgaactctccggcccggaaggtatcgagcaggccatccgctttttaagtcaacgttttcgcggcggcacggatatcgccagctgttttcgcgccattattgaaagaatgcagggacgggaatggtttgatgccgatgcggtggtcatttcggattttatcgcccagcgcttgccggatgacgtggtgagcaaagtgggagagttgcagcgtcttcaccagcatcgattccatgcggtggcgatgtcggcgcacggcaaacccggcatcatgcgcattttcgatcatatctggcgctttgacaccgggatgcgaagccgcctgctgagacgctggcggcgctaa

SEQ ID NO: 7531 - DNA, 369 bp, Salmonella typhimurium
atggccaataataccactggattcaccagaattatcaaagcggcaggatattcctggaaaggatttcgcgccgcatggactcacgaagcggcgtttcgccaggaaagcctcgcggtattgctgggcgtcatcatcgcctgctggctggatgtggatgcgattacccgtgtgttattgataggttccgttttacttatcatgattgttgaaatcctcaacagcgctattgaagcggtcgtggaccgcatcggttctgaataccatgagctttccggccgtgcgaaagatatgggatcggctgcggtgctactgtctattttcgttgccctgatgacctggggcatcctgttatggtcacattttcgataa

SEQ ID NO: 7532 - DNA, 801 bp, Salmonella typhimurium
atgtatcaggttgttgcgtctgatttagatggcacgctgctctcccccgaccatacgttgtccccttatgccaaagagactctgaagctgttgaccgcacgcggcatccattttgtctttgccactggtcgtcatcatgtcgatgtagggcaaatccgcgataatcttgaaatcaagtcttacatgatcacctccaacggcgcgcgagtgcacgataccgacgggaatttggtttttacgcataatctggacagcgacattgccagcgacctgttcggggtggtgaatgcgaacccggacatcgtgactaacgtttatcgcgacgacgaatggtttatgaatcgtcatcgccccgatgaaatgcgttttttcaaagaggcggtatttaactactcgctgtttgagcctgcgctgctggagccggagggcgtcagcaaagtgtttttcaccagcgacactcatgaaaagttgttgccgctggagcaggcgattaacgcgcgctggggcgatcgggtaaacgtgagcttctctacgctaacctgtctggaagtgatggcgggcggagtgtcgaaaggtcatgcgctggaagcggtcgctcaggcgatggggtacagtctgaaagagtgtatcgcctttggcgacggaatgaacgacgctgaaatgctcacgatggcgggcaaaggctgcatcatgggcaatgcgcaccagcgtctgaaagacctgtatcccgaacttgaggtgatcggcatcaacgcggataacgccgtgccgcattacctgcgcgatcttttcttacgctga

SEQ ID NO: 7533 - DNA, 990 bp, Salmonella typhimurium
atggcttcacaacttaccgatgctttcgcgcgtaagttttactacttgcgtttgtcgattaccgatgtgtgtaactttcgttgcacctactgtctgccggatggctacaaacctggcggcgtcactaacaacggtttccttaccgtcgatgaaattcgtcgcgttacgcgcgcttttgccagtcttggcacggagaaggtgcgtcttaccggcggcgagccttcattacgccgcgattttaccgacatcattgccgccgtgggtgaaaatgatgctattcgccagatcgcggtgaccactaacggttatcgactggcgcgcgatgccgcgaactggcgcgaagcggggctgacgggcgtcaatgttagcgtggatagtctggatgcgcgtcagttccatgcgattaccggtcaggacaaattccgccaggtgatggcgggcatcgatgccgcctttgacgccggtttcgaaaaggtgaaagtcaacaccgtgctgatgcgcgacgtgaatcaccatcagttggataccttccttgcctggattcagcctcgccccattcagctacgcttcattgaacttatggagacgggcgaggggagcgatctcttccgcaaacatcatatttcgggtcaggtattacgcgacgagctgattaagcgcggttggatccaccagctccgccagcgcagcgatggcccggcgcaggttttttgtcatcccgattacgccggtgagatcggcctcattatgccgtatgaaaaagatttctgcgccacctgtaaccgcctgcgtgtttcgtccgtcggtaagctgcatttatgtctgtttggcgacggcggcgtgagtttacgcgacctgttacaggatgacgcgcagcaatacgcgcttgaggaacgtatttccgacgcgttgcgggagaaaaagcagacccactttcttcaccagagcaatactggtattacgcaaaatttatcttacattggcggttaa

SEQ ID NO: 7534 - DNA, 513 bp, Salmonella typhimurium
atgagtcaggtcagcgctgaatttatcccgacccgcatcgctattcttactgtttccagccgacgcggcgaagaagacgacacctccggtcattatctgcgtgattcggcgcaggaggccgggcatgaagtggtggcgaaagccatcgttaaagagaaccgttacgcgattcgcgcccaggtttccgcctggatcgccagtgatgaggtgcaggtcgtattgataactggtgggaccggtttgaccgaaggcgatcaggcgccggaagcgctgttgccgctgttcgatcgtgaagtggaaggatttggcgaagtgtttcgcatgctctcgtttgaagagatcggcaccgcaactctgcagtcgcgcgcggtagctggcgtggcgaataacaccttgattttcgccatgccgggctccacaaaagcgtgcagaaccgcatgggagaatatcattgcgccgcagctggatgcccgtacacgcccatgtaattttcaccctcatttaaagaaataa

SEQ ID NO: 7535 - DNA, 192 bp, Salmonella typhimurium
atgttcgtagaactggtttatgacaagcgtaatgttgaaggactcgaaggggccagcgagatcattctggccgaactgacgaagcaggtgcaccagattttccctgatgccgaagtgagggtgaagccgatgcaggcaaactgcttgaatagtgataccaacaaaagcgatcgcgaaaatttgaacagatag

SEQ ID NO: 7536 - DNA, 2190 bp, Salmonella typhimurium
atgagttttgtatccacaaataataaatccggtatgggagggctgacgacaaccacgccgccgataaccggagaaagtggcggtgtcaccgcagattcagtcgccggaagcgtggcagatgcggcggaatccgccgtggaacaggctgcgggatcgctatttggcgcattgccggagccatcaggactggtgaaagccgcggtagcagcggcgcaggctgccgccgccgcaggtatggcgcaggatgcggtatcggccatcgtctctgctgttgcaggcgggccgggggcgcataatgtgacggtcagcggcagcgccgtaccgccgggcgcattactgttcgccagcctggacggcggcgaaacattaagtgaactgttcagctatgtggtacagctaaaaacgcccgacaccctgaatctgggctatgtctccccggcggccaacctgccgctcaaaccgatggtgggcaaagatctgtgcgtcaacatcgaactggatggtggcggtaaacgacatatcagcgggctggtcacggcggcgcgggtggtgggccatgaagggcgttcggttacctatgagctgcgtatggagccgtgggtaaaactgctgacccataccagcgactacaaagcattccagaataaaaccgtggtggatattctggatgaggttctggcggaatatccctacccggtggaaaagcggctggtggaaagctacccggtacgcacctggcaggtgcagtacggtgaaactgattttgattttcttcagcgactgatgcaggagtggggcatctactggtggtttgagcacagcgaggacagccacacgctggtgctggcggatgccatcagcgcccacaaagcatgtccggactcgccgctggtcgagtggcaccaggaagggctgaagctggacaaggagtttatccacactatcacggcaaacgagagcctgcggactggacagtgggtgctggatgatttcgattttacgaagccacgttcattgctggcaaacaccgtggcaaacccgcgtgaaaccggtcatgccacctacgagcattatgagtggccgggagactacttcgacaagagtgaaggcgagatgctgacgcgcattcgtatggaagcgcagcgcagccccggcagtcgggtgctggggggagggaatatccgcacactcatgaccggttataccttcacgctggaaaactatcccaccgccgaagtcaatcaggaatatctgctgatgcagaccttgctgtttgtgcaggacaacgcgcagcacagcgggcaggaccagcactttaccttttccacccgttttgaactgcaccccacccgcgaggtgttccgcccgcagcggacggtgagcaaaccccacaccaaagggccgcagagcgccatcgtcaccggcccggcgggccaggaaatctggacggatcagtacgggcgggtaaaggtacagtttggttgggatcgctacggcaaaatggatgaaaacagctcctgctggatacgcgtcagctacccgtgggcgggcaaaggcttcgggatgatccagatcccgcgtatcggccaggaagtgctggtggatttcaaaaacggcgatccggatctgccgatcatcgtggggcgtacctacaaccaggacaccatgccgccgtggggactgccgggaatggcgtcgcagagcgggatcttcagccactcgctgtatggcgggccaacgaacggcaacatgctgcgttttgacgacaaaacgggcgcggaggaagtgaagttccacgcggaaaaagatctcaacaccacggtgaagaataatgaaacgcatacggttatggtggatcgcactaaaaccattattaaaaatgaaaccaacagtattggtgaggacagaaacaccacggtaacgaagaatgacggcctttccgtaaaactggcgcagacgatcaatatcggcaccacttatcgtttagatgttggcgatcaattcacgcttcgctgcggcaatgcggcgcttgttttacataaggacggctccattgagttttgtggcaagcaactgatgttacataccagcgatgtcatgcaactgattggtaaaggtattgatatgaacccggatggcggcacagccgtaaccgccgatgatattgccccccttctcacctctgagtga

SEQ ID NO: 7537 - DNA, 1146 bp, Salmonella typhimurium
atgattaaaaaaatcatatttactgttactcctatattttcaattcctcctcgtggtgcggctgcggtagaaacctggatttaccaggttgcaaaacgactatcaataccgaatgctattgcttgtataaagaatgctggctatcctgaatataataaaataaacgataactgtgatattcattacatcgggtttagtaaagtttataagcgtctttttcagaaatggactcgtctcgacccactaccctattcccagcgcatccttaatattagagataaagtgactacccaggaagatagcgtcattgttattcataatagtatgaaactgtatcggcagatcagagagcgcaatccgaatgcaaaactggttatgcacatgcataatgcatttgaaccagaacttcctgataatgatgcaaaaattatcgtgcccagtcagtttcttaaagcgttttatgaagaaagattgcccgccgctgctgttagtattgtgcctaatggtttttgtgctgagacttataaaagaaacccacaagataatcttcgtcagcaattaaatattgcggaagatgccaccgttctcttgtatgccgggagaatttcgcctgataaaggcatcctgttgcttttgcaggcgttcaaacaattacgtaccttaagaagtaatattaaacttgtcgttgttggcgacccttatgcaagccgcaagggtgaaaaagcagagtatcaaaagaaagtactggacgccgcaaaagagattggaacggattgtattatggctggggggcaatctcctgaccagatgcataacttctatcatatagccgatctggttattgtgccatctcaggttgaagaagcattttgcatggtggctgtagaagcgatggcagcaggaaaagcggttcttgccagcaaaaaaggggggattagcgaatttgtgttagatggcataacgggctatcacctcgcagaacctatgtcgagcgacagtataattaatgatattaaccgtgcgcttgctgataaggaacgccaccagattgccgaaaaagcaaaatccctggtgttttcaaaatacagttgggaaaatgtagcgcagcgtttcgaggaacaaatgaaaaactggtttgataagtga

SEQ ID NO: 7538 - DNA, 810 bp, Salmonella typhimurium
atgggcagcgttaacttcataactcacgccgatgttctgcaacttattgcgaaaagaacggctgaagattgtattatttttctttctggtcctacgtccagaaagacgccgctgtccttgttacgaatgaaagatgtcattgcagtcaatggttctgttcaatatttgctaaacaataacgtcaagccatttttgtaccttctgacggatattcgcttcctccatcgtcggcgcgaagatttttataactttagccgtaacagtcagtttactatcgtcaatcttgatgtgtacgaacaggcttcagtggatgatcaaaaatatattgaagaaaactgtttaattattcgctccttttatcgccgagaaaaagggggctttttaaagaaaattaaatttaatatcctcaagcgggttcataaagcattacttatttcagttcctctttcgaaaagagggcgactggctggattttgcaaggatatcagcatcgggtattgctcttgccatactattgcttataccgctattcaggttgcctattccctcaagtatggccgtattatatgttctgggcttgacttaacagggagttgcccacgtttctatgacgaatctaccagccctatgccatctgagcttagtaaagatctgtttaaaatactgccattttttacttttatgagaaaaaatgtgagtgatttaaatatctttaatttatcagatgatactgcaattcattacgatattattccatatattacagcctcggagcttgaggatgaaatatattacgataaaattgtctag

SEQ ID NO: 7539 - DNA, 960 bp, Salmonella typhimurium
atggctgcaaccaagcctgcttttaacccgccgggtaaaaaaggcgacatgattttcagcgcgctggtaaaactggctgcgctgattgtgctattgatgttgggcggtattatcgtctcattgatcatctcctcctggccaagtattcagaaatttggtttctcatttctttggactaaggaatgggacgcgccaaacgatatctacggcgctctggtgcccatttatggcacgctggtgacctcctttatcgcactgctgatcgccgttccggtcagtttcggcattgccctgtttttaaccgagctggcgccaggctggctaaagcgtccgctcggcatcgccattgaactgctggcggcaattcccagtatcgtgtacggcatgtgggggctgtttatcttcgcgccgctgtttgcgacgtacttccaggagccggtcggcaatattctttccaacattccgtttgtcggcgcgctgttctccggcccggcctttggtatcggcattctggcggcgggcgtcatcctcgccatcatgatcatcccctacattgcggcggttatgcgcgacgtcttcgagcaaacaccggtaatgatgaaagagtccgcttacggtatcggctgtactacctgggaagttatctggcgcatcgtgctaccgttcaccaaaaatggcgtgatcggcggcattatgctggggctgggccgtgctctgggtgaaacgatggcggtcacttttatcatcggcaacacttaccagctcgacagcgcgtcgctgtatatgccgggcaacagcatcacttccgcgctggcgaacgaattcgctgaggcggaatcgggcctgcacgtggcagcgttgatggagctggggctgatcctgtttgtgatcacctttatcgtcctggcggcgtctaagttcatgattatgcgtctggcgaagaacgagggagcacgttaa

SEQ ID NO: 7540 - DNA, 741 bp, Salmonella typhimurium
atgaaaaaaaaacttattgtcatgctgttagccagcctctccgttcacgccgcttccgtttccgccagaacattacattttggcacctccgccacctatgcgccctatgagtttgtcgatgccgataataaaattgttggtttcgatattgatgtcgccaacgcggtctgcaaagagatgcaagcggagtgctcattcactaaccagagctttgatagtctgatccccagcctacgcttcaaaaagtttgatgcggtgatcgccggtatggatatgacgcccaaacgtgagcagcaggtctcctttagccaaccctattacgaaggtctatcggcggtagtcgtcacgcgtaaaggggcttatcacacttttgccgatctgaaaggcaaaaaagtcggtctggaaaacggtacaacgcatcagcgctatttgcaggataaacaacaagctatcacgcctgtcgcctatgacagctatctaaacgcctttaccgatctgaaaaacaaccgtcttgagggcgtgtttggcgatgtcgccgcgattggtaagtggctaaaaaacaatccggattacgccatcatggatgaacgcgccagcgatcctgactactacggaaaagggttaggcattgcggtacgcaaagacaacgacgcgctattgcaagaaattaatgccgcgctcgacaaggtgaaagcgtcgccggaatatgcgcagatgcaggagaaatggtttacgcagtaa

SEQ ID NO: 7541 - DNA, 2058 bp, Salmonella typhimurium
gtgctgctttctctacttaacagtgctcgtttacgacctgaattactgattctggtactaatggtgatgatcatttctatgttcgtcattccattacctacctatctggttgatttcctgatcgcactgaatatcgtactggcgatattggtgtttatggggtcgttctacattgacagaatcctcagtttttcaacgtttcctgcggtactgttaattaccacgctctttcgtctggcattatcgatcagtaccagtcgtcttatcttgattgaagccgatgccggtgaaattatcgccacgttcgggcaattcgttattggcgatagcctggcggtgggttttgttgtcttctctattgtcaccgtggtccagtttatcgttattaccaaaggttcagaacgtgtcgcggaagtcgcggcccgattttctctggatggtatgcccggtaaacagatgagtattgatgccgatttgaaggccggtattattgatgcggatgccgcgcgcgaacggcgaagcgtactggaaagggaaagccagctttacggttcctttgacggtgcgatgaagtttatcaaaggtgacgctattgccggcatcattattatctttgtgaactttattggcggtatttcggtggggatgactcgccatggtatggatttgtcctccgccctgtctacttataccatgctgaccattggtgatggtcttgtcgcccagatccccgcattgttgattgcgattagtgccggttttatcgtgacccgcgtaaatggcgatagcgataatatggggcggaatatcatgacgcagctgttgaacaacccatttgtattggttgttacggctattttgaccatttcaatgggaactctgccgggattcccactgccggtttttgttattttatcggtggttttaagcgtactcttctattttaaattccgtgaagcaaaacgtagcgccgccaaacctaaaaccagcaaaggcgagcagccgctcagtattgaggaaaaagaagggtcgtcgttaggactgattggcgatctcgataaagtctctacagagaccgtaccgttgatattacttgtgccgaagagccggcgtgaagatctggaaaaagctcaacttgcggagcgtctacgtagtcagttctttattgattatggcgtgcgcctgccggaagtattgttacgcgatggcgagggcctggacgataacagcatcgtattgttgattaatgagatccgtgttgaacaatttacggtctattttgatttgatgcgagtggtaaattattccgatgaagtcgtgtcctttggtattaatccaacaatccatcagcaaggtagcagtcagtatttctgggtaacgcatgaagagggggagaaactccgggagcttggctatgtgttgcggaacgcgcttgatgagctttaccactgtctggcggtgacgctggcgcgcaacgtcaatgaatatttcggtattcaggaaacaaaacatatgctggaccaactggaagcgaaatttcctgatttacttaaagaagtgctcagacatgccacggtacaacgtatatctgaagttttgcagcgtttgttaagcgaacgtgtttccgtgcgtaatatgaagttaattatggaagcgctcgcattgtgggcgccaagagaaaaagatgtcattaaccttgtggagcatattcgtggagcaatggcgcgttatatttgtcataaattcgccaatggcggcgaattacgagcagtaatggtatctgctgaagttgaggatgttattcgcaaagggatccgtcagacctctggcagtaccttcctcagccttgacccggaagcctccgctaatttgatggatctcattacacttaagttggatgatttattgattgcacataaagatcttgtcctccttacgtctgtcgatgtccgtcgatttattaagaaaatgattgaaggtcgttttccggatctggaggttttatctttcggtgagatagcagatagcaagtcagtgaatgttataaaaacaatataa

SEQ ID NO: 7542 - DNA, 609 bp, Salmonella typhimurium
atgaaactcatcggtagctacaccagcccttttgtgcgcaaaatctctgttctgctgctcgaaaagggtattaccttcgaatttattaatgaactaccttacgaggcggataacggcgtggcgcaatacaaccctctgggtaaggtgccagcgctggtgacggagaaaggggagtactggttcgattcgccgatcatcgcggaatatattgaactgctggatatcgcgccagcgatgctcccgcgtgacccgatggcagcgcttaaagttcgccagcttgaagcgttggctgacggcattatggatgcagcgttggtgtctgtacgcgaacaggcgcgcccgacggcgcaacaatcggaaacggaactgctgcgccagcgggaaaaaatcaaccgcagcctggatatgctcgaaagttatctgagcgacgggacgctaaaaacggatacggtcaatctggcgactatcgcgattgcctgtgcggtaggctatctcaacttccgccgggtcgcgcctggctggtgtgttagccgcccccacctggtcaaactggtcgaaacgctttttcaacgcgaaagttttgcccgcaccgaagcgccaaaggcttga

SEQ ID NO: 7543 - DNA, 315 bp, Salmonella typhimurium
atgaaaagtaagttgctgccttgcgcgctgttgcttgcaaccagttttgcatgggccgcccccgcgacaacgggcattgatcaatatgagttaaaaagctttatcgccgacttcacccacttcaagcccggcgataccgttccgcaaatgtaccgcaccgatgagtataatattaaacagtggaaattacgtaatctgcccgcgccagatgccggtactcactggacctatatgggcggcgcgtatgtactgattaacgataccgatggaaaaatcatcaaagcctatgatggcgagattttttatcatcgataa

SEQ ID NO: 7544 - DNA, 1566 bp, Salmonella typhimurium
atgtttttgcataacattaaaatacgttcaaaattatttatggcctttggcttattcattgttctcatggtggtgagttccgctctgtctttgtttagccttgatcgggctaatacgggtatgcagaacattattaccaatgattatcccaccacggtgaaagccaatctgttaatcgataattttaatgatttcatcatcgcgcagcagctcatgttactggatgaagaggggcgctggagccagagttcgcagaaagagctggatgaaataagccagcgtattacggcgttactggatgagctttccagcaatcgtcacgatgcggcttcgcagaaaatcattaccgagatccgtgaagcgcgccagcaatacctggagtccagattccgtattttgcaagatattcaaagccataatcgtcaggcggccattcaggagatgatgaccagaacggtgcaagtgcaaaaggtctataaggacaaagttcaggaacttatcgccgttcaggatgcgcagatgcacaacgcgggcgtgcaggtcgaaggagattttaaaactaaccggacgctgttaattaccctggcgctgataagcatcgctgccggatgcgtaatgggatggtatatcgtacgttccattacccgaccgcttgatgaagcggtacgctttgccgaggcgattgccgatggcgatctgactcgccatatcaccaccgactataaagatgaaacaggcgtactactgcaagcattaatggcgatgaaaacgcgtctgctggatatcgtacaggaagtgcaaaacggttcggagagtatctccacggcggcggcgcaaattgtcgccggtaaccaggatttggccgcgcgtacggaagaacaggccagctcggttgaagaaacggcggcgtcgatggaacagattaccgccacggttaaaaacacagctgaccataccagtgaagcgaccaaactctctgccggcgccgccagcgtagtgaaaaacaatggggagatgatgaatcaagtgacgcagaaaatgcgcgtcattaacgatacggcaaatcgtatgtcggatatcatcaatatcattgattccattgcctttcagaccaatattctggcgctgaacgcggcggttgaagcggcgcgtgcgggcgaacatggacgtggttttgccgttgtcgccggagaggttcgccagttggcgcaaaagagcgcctcgtcagccagtgaaatccgtaatttgattgaagattcaaccagtcagactcaggaagggatgcacctggtggagaaagccagcgccctgattaatggcatggtggataacgtcgaagagatggatgtgatattacgcgagattgggcaggccagccgtgagcaaactgacggtatttcgcagattaacagcgcgattggcctgattgacgccgccacgcaacaaaactcctgccttgtggaagagtctgttgccgccgcggcgtcgctgaacgaacaggcgttacatttaaaagagctggttaacgtgttccgcgtccgcgaagaggacacgcagcccgcttaa

SEQ ID NO: 7545 - DNA, 1353 bp, Salmonella typhimurium
gtgtttatcggatttgattacggtacggcaaactgctcggtcgccattatgcgcgacgggcatccacagttgctgacaatggagaataacagcgcattactgccgtctatgctgtgcgcgccgacgcgcgaagcggtgagcgagtggctgtatcgccatcatgatgtgccggcaacggacgaagaaacccaggcgctgctacgccgcgcgatacgctacaaccgcgaggaagatattgaggttggcgcgcaaagcgtacagtttggtctggcgtcgctggcgcactatattgacgatccccaggaggtctggtttgtcaaatcgccgaaatcctttttaggcgccagcggcctgaaaccgcagcaggtcgcgctgtttgaagatttagtctgcgccatgatggtacatattcgtcatacggcgcacagccaattgccggaggccattacccaggcagtgatcggtcgcccgatcaactttcagggactgggcggcgatgacgcgaaccgccaggcgcagggtattctggagcgggcggcaaaacgcgccggttttcaggaggtggtattccagtacgaaccggttgcggcgggcctggactacgaggctacgctgcgggaagagaagcgtgtgctggtcgtggatattggcggcggcaccaccgactgctccatgctgctgatggggccgcagtggcgtcagcgcgccgatcgtgaaaacagcctgttggggcacagcggttgccgcgtgggcggaaacgatctggatatcgcgctggcctttaaaaatctgatgcctttgctgggcatgggcggcgaaaccgaaaaaggtatcgccctgccggtgctgccgtggtggaacgccgtcgcgattaacgacgtcccggcgcaaagcgatttttacagtagcgcgaatggtcgtctgttgaacgatttggttcgcaacgcgcgtgaagcagacaaggtcgcgttgctgctcaaggtctggcgtcagcggcttagctaccgcctggtacgctgcgcggaagagagcaaaatcgccctttccggccaggcggatgttacggcgaggctgccatttatcagcgacgacctggcggtcgctatcagccagcaaggactggaagcggcgctggatcaaccgctgacgcgcattctggaacaggtgcaactggcgctggacagcgcgcaggaaaaaccggatgtcatctatctgaccggcggcagcgcccgttcgccattgattaaaaaagcgctttccgaacagttaccgggcatacccgtcgctggcggcgatgatttcggctccgtcaccgcaggactggcgcgctgggcggaggtcgttttccgctaa

SEQ ID NO: 7546 - DNA, 5862 bp, Salmonella typhimurium
atgaaccctatgcaaaagaaaaaacttatttctatcgctatcgctttaacgctacaaagttattacattccggccatcgccgcagaaaataacgatgatgaaaaagaatgtcccagtaatatctcctccctgcctaaagaaaaacgcgcaaaactctcaccgacctgccttgctacacctgaaaatgataatcactggggctgggttgctggcggcgttgctgcattggtcgcaggtgtggctattggcgttgaaaataacggtggcggagattctaatcattcttataccccccctaagcccgataatggcggcgacgtcaccccgcccgacgatggcggcaacgtcaccccgcccgacgatggcggcaacgtcaccccgcccgacgatggcggcgatgacaatgtgaccccgcccgacgatagtggcgatgacgatgtggccccgcctgacgatagcggcgatgacgatgtaaccccgcccgacgatagcggcgatgatgatgtgaccccgcccgacgatagcggcgatggcgatgtgaccccgcccgacgatagcggcgatgacgatgtaaccccgcccgacgatagcggcgatgacgatgtgaccccgcctgacgatagcggcgatgacgatgtaaccccgcccgacgatagcggcgatgacgatgtgaccccgcccgatgatagcggcgatgacgatgtaaccccgcccgatgatagcggcgatgacgacgacacgcccccagatgactctgttattaccttcagcaacggcgtcaccatcgataaaggcaaagacaccctgaccttcgacagcttcaaactggataacggcagcgttcttgagggtgccgtgtggaattattcagaacaggacaaccagtggcagctcaccaccgcggacggtaaaacgctgaacgtcaccggctgggacgtgaccgacgccaatgccgccgtgattgaaggcacccaggaaaacggtctctactggaagtacgacagccggggctatctgattattgccgacgataacaccaccgttatcagcggcgatgaccaggcgcataattccgatcgcggcatggatatcagcggccaggatcgcaccggcgtgattatttccggcgatagaaccgtcaacacgctcaccggggactccagtgtgaccgacggtgccaccggcatggttatctccggtgacggcaccaccaacaccatttcgggccactccacggtggacaacgccaccggcgcgctgatttccggcaacggcaccaccaccaatttcgccggtgacattgccgtgagcggcggcggcaccgccatcatcatcgacggcgacaacgccacgattaagaataccggtacctctgacatcagcggcgcaggctccaccggcaccgtcattgacggcaataacgcccgcgtcaacaatgacggtgatatgaccatcaccgacggcggcaccggcggccacattaccggcgacaacgtggttatcgataacgccgggagcactaccgtcagcggcgcagacgccacggcgctgtatatcgaaggcgacaacgcgctcgttatcaacgaaggtaatcaaactatctctggcggcgccgtcggtacgcgcattgacggcgacgacgcccataccaccaataccggtgatatcgcggtggatggcgcgggctctgccgccgtgattatcaacggcgacaacggcagcctgacccaggcgggcgatctgctggtcaccgacggcgcgatgggcatcatcacctatggcaccggaaatgaagcaaaaaataccggcaacgccaccgtacgtgatgcggactcggtgggttttgtggttgcaggcgaaaaaaacaccttcaaaaacaaaggggatattgacgtcagccttaacggcaccggcgcgctggtgagcggcgatatgtcgcaggttacgctggatggcgatattaacgttgtctcagtccaggacagcgaaggcgtgtttagctcagcgacaggggtgagcgtgagcggcgacagcaacgccgttgatatcaccggcaacgtaaatatcagcgccgactacgggcaggatgatctggctgccggggctcccccgttaaccggcgttgtcgtcggcggtaacggcaataccgttacccttaatggcgcgctgaatattgatgacaacgatctgtccgccaccggcggacaatacctggacgttgttggcctgagcgtaacaggtgatgataacgacgttgagattgacggcggtattaatatcacccacagcgaggatccacttgatggaacctctgcagacattaccggcatcagcgtcagcggtaacagtaccgttacgctaaacggtcattctaccattgataccaacacggtagtgggggggcacgttgtactggcgcgggtcaacaacggcggctccctgattctgggtgatgactcagttgttgacgttaatgtcagttatatacccacaggctattacacctacaacgcgttgctgatggctgatggcgaaggcacatcaattgaaaataaaggcgatattacaagccatggcgtgtattccgtcattcgcgcagataacggctcggaagtcagcaacagcggagatattctggtctacgcgaccagtagcaacagtagtgaggatcgtgcagccatcacaagggctagtggcgagggatcggctgttcataacaaagccggcggcgatatcaccctcatttctgatcagacgccgcagggcagtggcggtattgaagtatacccattgaaatggtacacccacaccttttacgccatgatggcttcggattatggcgatgtcgttaacgatgagggcgccacgatccatttgcagggggcaggtgtatatggcgttaccgccagccgaggtaaagcactaaacgaaggcaatatctatctggatggccttgtcccgacgctggacgatgaaaataacatcaccagcaccagctactggcagccatcatcgctctatctcaccagctcaggaatggtggcgggttccaccgatgccgatggcgacgccaccgccatcaacaccggcaacattaccgtcaacaacgccgggttcggcatgatggcgcttaatggcggcaccgccattaaccagggcgtgatcaccctgaccgccgatgacggcgtgaccggtcaggcagacgagctggtcgggatggcggcgctcaacggcggcgtcgtcatcaacgacaccagcggcgtgattaacatcgacgccgattacggccaggcgtttctgagcgacagttccagctacatcatcaataacggctctatcaaccttaacggcagcccgatggatgatactgattcacacatgggcggcacgccaacggacaaaatctggattcagtctctgcccggcagcggcgacagcgacaccaggacctccgacacaggtttcttcaccgccggtacgctggccaactacggtactgaaaccctgaacggcgatgtggacgttaacgggggctggctgtacaacgaagcgggcgcctcgctcaccgtcaacggcaccgtgacgattaacggcggggctaacgcgctggctaactacgggacgctggacgcggacgctatttccacctggcacagcctctttaatgaagcggacggcagcatcaccaccgatctgttaacccttaatggcgacgtcactttttacaataacggcgatttcaccggctccatagcgggcaccagctaccagcaggaaatcgtcaatactggcgatatgacggtggcggaagatggcaaatcgctggtcagcggcagcttctatttctataacgaagaggacgctacgcttaccaacagcggcagcgcggtggaaggcggcgagaacaccatcatcaatctgacgcgcgccaacgattcgctgacccaggtgaacagcggcaccatcaccgccactaacggttacagcgccatcaccacggtcaacggcagcaatgaccccaaatggatctggaacaccgcaaccggcgtgattaacggtattaacccggatgcgccgctaatcaatttgggccgcggctataacttcggcaaccagggcactatcaacgtgcagggcgataacgccgtggcgattagcggcggcaccagcagttatgtcattaacctggtcaatagcggcaccatcaacgtcggtaccgagcagggcaaggaggacggcaccaacggcaccgggcttatcggcatcaagggcaacggtaatgccaccaccataaacaacaccgcagacggcgtgatcaacgtttacgcggatgactcgtatgcgtttggcggcaagaccaaagccatcatcaacaacggcgaaatcaacctgctgtgcgacagcggctgcgacatctacgcgccgggtactacgggcacgcagaacgaccataacgggacagcggacatcgtcatcccggatgcgactaccgccccgaccgagggcagcatcccgacgccgccagcggatcccaacgcgccgcagcagctctccaactatattgttggcaccaacgccgacggtagctccggtacgctgaaagccaataacctggtgattggcgacaacgtgaaggtggataccggctttaccagcggtacggcggataccaccgtggtggtggataacgccttcaccggcagcaatatccagggcgcggacaacatcacttccaccagcgtggtgtggaacgcccagggtagccaggatgccgacggcaacgttgacgtcaccatgaccaaaaacgcctatgccgatgtggcgaccgacagctcggtaagcgacgtggcgcaggcgctggacgccggttacaccaacaacgagctgtacaccagccttaatgtggggactaccgccgagctgaacagcgcactcaagcaggtgagcggtgctcaagccaccacggtattccgtgaagcgcgtgtactcagcaaccgctttaccatgctggccgacgccgcgccgcaaattaaagatggtctggcgttcaacgtggtggcgaaaggcgacccacgtgcggagctgggcaacgacacccagtacgacatgctggcattacgccagacgttggatctcaccgccagccagaatctgacgctggagtacggtattgcgcgtctggatggcgacggttcgaaaactgcgggcgataacggcctgacaggcggctacagccagttctttggcctgaagcacagcatggcgtttgatgaaggtctggcgtggaacaacagcctacgctatgacgtgcataacctcgacagcagccgttctgttgcctatggcgatgtcaacaaaattgccgattccgacatgcgtcagcagtaccttgagtttcgcagtgaaggggcgaaaactttcaccatgatgggcgatgcgctgaaagtcacgccgtatgccggggtgaaattccgtcacaccatggaagatggctacaaagagcgcagcgccggagattttaacctgtcgatgaactctggcaacgaaacggcggtagactctattgtcggcctgaagctggattacgccgggaaagacggctggagcgccaccgctaccctggaaggtggcccgaacctgagctacagcaagagccagcgtacagcgtcattacagggtgcggcgggtcaatcgttcggcgtggatgacggtcaaaaaggcggcggcgttaatggtctggcaaccatcggcgtgaaatacagcagcaatgataccgcgctacatctggatgcctaccagtggaaggaagacggtatcagcgataaaggctttatgcttaacgttaagaaaacatttcgttaa

SEQ ID NO: 7547 - DNA, 1119 bp, Salmonella typhimurium
atgactggagataatactctcatcacttctcacggcattaaccgtcgtgatttcatgaagctttgtgcagcactggccgctactatggggctcagtagcaaagccgccgcagaaatggcagaatcggtatccaatccacagcgtccgcccgttatctggattggcgctcaggagtgtaccggttgtaccgaatcactgcttcgtgctacacacccaaccgttgaaaacctcgttctggagaccatctctctggaataccacgaggtgctttccgccgcattcggtcaccaggtcgaagaaaacaaacataacgctctggagaagtataaagggcaatatgttctggtggtggatggttctatcccactaaaagataacggtatctactgcatggttgccggcgagccgatcgtggatcacatccgcaaagccgctgatggcgcagccgcgattatcgctatcggttcctgctcggcatggggcggcgttgctgcggctggcgtaaacccaaccggcgctgtcagtctgcaggaagtcttaccgggcaaaacggttatcaatattccaggttgtccgccaaacccgcataacttcctggcgaccgtcgcgcatatcatcacttacggcacgccgccgaagctggatgcgaaaaatcgtccaacctttgcctatggccgtctgattcatgagcattgcgaacgtcgtccacacttcgacgcaggccgttttgccaaagaatttggcgacgaaggccaccgtcagggctggtgtctctaccatcttggctgtaaagggccggaaacctggggcaactgttctacgttacagttctgtgacgttggcggcgtctggccagtggcgatcggtcatccttgctatggctgtaacgaagaaggtatcggcttccataagggcattcaccagcttgctcatgtcgaaaaccaaactccgcgttcagagaaacctgacgtcaatatgaaagaaggcggcaatatctctgcgggcgctgtcggtctgcttggcggcgtagtcggtctggttgccggcgtcagcgtgatggcggtacgtgaactggggcgtcagcaaaagaaagataacgctgactcacggggagaataa

SEQ ID NO: 7548 - DNA, 1119 bp, Salmonella typhimurium
atgattcctggctcaacctccggtatttcattttccagaatattgtcccggcagacatctcatcaggatgcgacccagcatactgatgcgcaacaggcggaaatacaacaggccgcagaggattcgtctccaggggcggaagtacaaaaatttgtccagtcgacggacgaaatgtcagcggcgctggcgcaatttcgtaaccgtcgcgattatgaaaaaaaatccagtaatttatctaacagttttgaacgcgtgctggaggatgaggctttaccgaaggcgaagcaaatcttaaagctaattagcgtacatggcggcgcgttagaagattttttacgtcaggcgcgtagcttatttcctgaccccagtgatttagtccttgtgttacgcgaattgcttcgtcgtaaagacctggaagagatcgtgcggaaaaagctggagtcgttacttaagcacgttgaagagcaaaccgatccgaagaccctcaaggcagggattaattgtgcgttgaaggcccggctttttgggaaaacattatcgttaaaaccaggcttattgcgcgccagctatcggcaatttatccagagtgaatcacatgaagtggagatttactctgactggatagccagttatggctatcaacgtcgactggtggtactggattttattgagggttcgctattaaccgatattgacgcgaatgacgccagctgttcgcgcctggagtttggccagcttttacgacgcctgacgcaacttaaaatgttgcgctccgctgacctactgtttgtgagtacattgttgtcgtattcgtttaccaaagcgtttaatgcggaggagtcgtcgtggttactactgatgctttcgctattgcaacagccacatgaagtggattcgctgttagccgatattataggtttgaatgcgttattgcttagtcataaagaacatgcatcctttttgcagatattttatcaagtatgtaaagccataccctcttcactcttttatgaagaatattggcaggaagaattgttaatggcgttacgtagtatgaccgatattgcctacaagcatgaaatggcagaacagcgtcgtactattgaaaagctgtcttaa

SEQ ID NO: 7549 - DNA, 2349 bp, Salmonella typhimurium
atgaagatatcatcaggcgcaattaatttttctactattcctaaccaggttaaaaaattaattacctctattcgtgaacatacgaaaaacgggctcacctcaaaaataaccagtgttaaaaacacgcatacatctttaaatgaaaaatttaaaacaggaaaggactcaccgattgagttcgcgttaccacaaaaaataaaagacttctttcagccgaaagataaaaacaccttaaacaaaacattgattactgttaaaaatattaaagatacaaataatgcaggcaagaaaaatatttcagcagaagatgtctcaaaaatgaatgcagcattcatgcgtaagcatattgcaaatcaaacatgtgattataattacagaatgacaggtgcggccccgctccccggtggagtctctgtatcagccaataacaggcccacggtttctgaaggtagaacaccaccagtatccccctccctctcacttcaggctacctcttccccgtcatcacctgccgactgggctaagaaactcacggatgcagttttacgacagaaagccggagaaacccttacggccgcagatcgcgatttttcaaacgcagatttccgtaatattacattcagcaaaatattgccccccagcttcatggagcgagacggcgatattattaaggggttcaacttttcaaattcaaaatttacttattctgatatatctcatttacattttgacgaatgccgattcacttattcgacactgagtgatgtagtctgcagtaatacgaaatttagtaattcagacatgaatgaagtgtttttacagtattcaattactacacaacaacagccctcgtttattgatacaacattaaaaaatacgcttatacgtcacaaagccaacctctctggcgttattttaaatgaaccggataattcatcacctccgtcagtgtcagggggcggaaattttattcgtctaggtgatatctggctgcaaatgccactcctttggactgagaacgctgtggatggatttttaaatcatgagcacaataatggtaaaagtattctgatgaccattgacagcctgcccgataaatacagtcaggaaaaagtccaggcaatggaagacctggttaagtcattgcggggtggccgcttaacagaggcatgtatccggccagttgaaagttcgctggtaagcgtactggcccaccccccctatacgcaaagtgcgcttatcagcgagtggctcgggcctgttcaggaacgtttttttgcccaccagtgccagacctataatgacgttcccctgccggctcctgacacatattatcagcagcgcatactgcctgtgttgctggattcgtttgacaggaacagcgccgccatgaccactcacagcggactctttaatcaggtgattttacactgtatgacaggcgtggactgcactgatggcacccgccagaaagctgcagcgctttatgaacagtatcttgctcacccggcggtgtctccccacatccataatgggctcttcggcaattatgatggcagcccggactggacaacccgcgctgcagataatttcctgctgctttcctcccaagattcagacacggcgatgatgctctccactgacacgctgttaacaatgctaaaccctactcctgacactgcatgggacaacttttacctgctgcgagccggagagaacgtttccaccgcgcaaatctctccggtagagttattccgtcatgactttccggtgtttctcgccgcatttaatcagcaggccacgcagcgacgctttggggagctgattgatatcatcctcagcactgaagagcacggggagctgaaccagcagtttcttgccgccacgaaccagaaacattccaccgtgaagttgattgatgatgcctcagtgtcgcgtctggccaccatttttgaccccttgcttcctgaaggcaaactcagcccggcacactaccagcacatcctcagtgcttatcacctgacggacgccaccccacagaagcaggcggaaaccctgttctgtctcagtaccgcattcgcacgctattcctccagcgccattttcggcactgagcatgactctccgccggccctgagaggctatgcggaggcgctgatgcagaaagcctgggagctgtctccggcgatattcccatccagcgaacagtttaccgagtggtccgaccgttttcacggcctccatggcgcctttacctgtaccagcgttgtggcggatagtatgcaacgtcatgccagaaaatatttcccgagtgttctgtcatccatcctgccactggcctgggcgtag

SEQ ID NO: 7550 - DNA, 333 bp, Salmonella typhimurium
atggaaactatcgctaaacatcgccatgctcgttcttctgctcagaaggttcgccttgttgctgacctgattcgcggtaagaaagtgtcgcaggctctggatattctgacctacaccaacaagaaagcggctgtactggtcaagaaagttctggaatctgccattgctaacgctgaacacaacgatggcgctgacattgacgatctgaaagttacgaaaattttcgtagacgaaggcccgagcatgaagcgcattatgccgcgtgcaaaaggtcgtgcagatcgcatcctgaagcgcaccagccacatcactgtggttgtgtccgatcgctga

SEQ ID NO: 7551 - DNA, 279 bp, Salmonella typhimurium
atgccacgttctctcaagaaaggtccttttattgacctgcacttgctgaagaaggtagagaaagcggtggaaagcggagacaagaagcccctgcgcacttggtcccgtcgttcaacgatctttcctaacatgatcggtttgaccatcgctgtccataatggtcgtcagcacgttccggtatttgtttccgacgaaatggtcggtcacaaactgggtgaattcgcaccgactcgtacttatcgcggccacgctgctgataaaaaagcgaagaagaaataa

SEQ ID NO: 7552 - DNA, 993 bp, Salmonella typhimurium
gtgtctcatattattaagatttttccatcaaatattgaattttccggtagagaggatgaatcaatcctcgatgctgcgctatcggctggtatccatcttgaacatagctgcaaagcgggtgattgtggtatctgtgagtccgatttgttggcgggagaagttgttgactccaaaggtaatatttttggacagggtgataaaatactaacctgctgctgtaaacctaaaaccgcccttgagctaaatgcgcatttttttcctgaactagctggacagacaaaaaaaattgtcccatgcaaggtaaatagtgctgtactggtttcaggcgatgttatgactttgaagttacgcacaccaccaacagcaaaaattggcttccttccagggcagtatatcaatttacattataaaggtgtaactcgcagttattctatcgctaatagtgatgagtcgaatggtattgagttgcatgtaaggaatgttcccaatggtcagatgagttcgctcatttttggggagttacaagaaaatactcttatgcgcattgaagggccttgcggaacattttttattcgtgaaagtgacagacctataatcttccttgcaggcggtactggattcgctccagttaaatcaatggttgagcatctcattcagggaaaatgtcgtcgtgagatctacatttactggggaatgcaatatagtaaagatttttactctgcattaccgcagcagtggagtgaacagcacgacaacgttcattatatccctgttgtttctggtgatgacgccgaatgggggggaagaaagggatttgtccatcatgccgtgatggatgattttgattctctagagttcttcgatatatatgcatgtggttcacctgtgatgatcgatgccagtaaaaaggactttatgatgaaaaatctctctgtagaacatttctattctgatgcatttaccgcatctaataatattgaggataatttatga

SEQ ID NO: 7553 - DNA, 2847 bp, Salmonella typhimurium
ttgaaataccttgcttcctttcgaactacgctgaaagtctcgcgctacttattcagagcgttagcgttactcatttggctcttaatcgcctttgtttcggtgttttacatcgtcaatgccctgcaccagcgggagtctgaaattcgtcaggagttcaaccttagctccgatcaggcgcagcgttttatccagcgcacgtcggatgtgatgaaagagctcaaatatatcgccgagaaccgtttaacggcggaaaacggcgtcatgtcgtcgcgtgcgcgtgatgacaaaatggtggtgccggactttgaaccgctatttgccgactcagactgtgcggcgatgggctccgcctggcgcggatcgctggagtcgctggcctggtttatgcgttactggcgcgacaacttttcagcggcgtatgatcttaaccgcgttttcctgattggcagcgataacctctgtatggcgaatttcggcctgcgtgaaatgcccgtggagcgcgatgatgcgttaaaagcgttacatgagcggattatgaaataccgcaacgcgccgcaggaagaaagtgggaataaccttttctggataagccagggcgcgcgtcagggcgtgggctacttttatgcgctgacgccggtgtatctggccaaccgtctgcaggcgctgctgggcgtcgagcagtccatccgtatggaaaattttttcacgcccggcagtttgccgatgggcgtcactattattgatgagaacggccattcgctgatttcgttgaccggtcctgacggcattattaaagcggagccgcgctggatgcaggagcgttcctggtttggttatacgccaggttttcgcgaactggtactcaaaaaaagcctgccgccatcctcgctcagtattgtctattctgtgcctgtagatttagtcctggagcgtattcgtattcttatcctgaacgctatcctgctgaacgtgctggtgggcgcagggctgtttacgcttgcgcggatgtatgagcggcgaatttttattccggcggagagcgatgctcagcgtctggaagagcatgaacagttcaaccgtaaaatcgtcgcctccgcgccggtggggatctgtattctgcgcactattgatggtgtcaatattctgagtaacgaactggcgcacacctacctgaacatgctcacgcatgaagacagacagcgcctgacgcaaattatttgcggccagcaggtcaactttgttgatgtattgaccagcaataataccaatttgcaaattagcttcgtccattcccgctatcgcaatgaaaacgtcgcgatttgcgtgttggtagatgtgagtacgcgcgtcaaaatggaagagtcgctgcaagagatggcgcaggcggcggagcaggcaagccagtctaaatccatgttccttgcgacggtcagccatgaattgcgcacaccgctgtacggtatcatcggcaatctcgatctgctgcaaaccaaagagctgccaaaaggcgtggaacgtctggtcacggcgatgaataactcctccagtctgttgctgaaaattatcagcgacattctcgacttctcgaaaattgagtcggaacagctaaagattgagccgcgcgaattttcaccgcgagaggtgatgaaccatatcaccgccaattatctgccgttggtggtgcgtaagcagctcggtctgtattgttttattgagcctgacgtgccggtatcgctgaacggcgacccgatgcgtttacagcaggttatttcaaacctgttgagcaacgccattaagtttaccgatattggctgcatcgtgctgcatgtgcgctgtgatggggattatctcagcattcgcgtgcgggataccggcgtcggtattccggcaaaagaggtggttcgcctgttcgatcccttcttccaggtgggaaccggcgtacagcgtaactttcaggggaccggtctggggctggcgatttgcgaaaaattgatcagcatgatggacggcgatatttccgtcgattcggagcctggcatgggaagccagtttacgctgcgcatcccgctttatggcgcgcaataccctgtgaaaaagagcgtggaaggactcgccggaacctgctgttggctggcggtgcgcaatacttctttgtgccagtttattgagaccagtctggcgcgtagcggcgttcatacgcagcgttatgaagggcaagaacccgccgcggacgatattttgattgtcgatgacgcgctggagcatacctggcaggggagggcggcggtcgtcttttgccgccgtcatatcgggattccgttggaaagagcgccgggcgagtgggtgcatagtgtggcgtcggtgcatgagttgcccgcgctgttggcgcgtatctatagtattgagctggatagtgaagcgctttccagcgcattgccgacgacggataaaactgcagattcaaatgacgacatgatgattctggtcgttgacgatcatccgatcaatcgccgcttgctggccgatcaattgggatcgctggggtatcagtgtaagacagccaatgatggcgtagacgctctgaatgtgctgagtaaaaatgctatcgatattgttctgagcgatgtgaacatgccgaacatggacggctatcgcctgacgcagcgtatccgtcagcttgggctgacgctgcctgtcgtcggcgtgacggcgaacgcgctggcggaagagaaacaacgttgcctggagtccggtatggacagctgtttgtcgaagcctgtgacgctggatgtgttgaaacagacgctggcggtgtatgccgagcgggtacgtaaaacgcgggcataa

SEQ ID NO: 7554 - DNA, 2637 bp, Salmonella typhimurium
atgagcgaccttgcgagagaaattacaccggtcaacattgaggaggagctgaagagctcctatctggattatgcgatgtcggtcattgttggccgtgcgctgccggatgtccgagatggcctgaagccggtacaccgtcgcgtactttacgccatgaacgtattgggcaatgactggaacaaagcctataaaaaatctgcccgtgtcgttggtgacgtaatcggtaaataccatccccacggcgattccgcagtgtatgacaccatcgttcgtatggcgcagccattctcgctgcgttacatgctggtggatggtcagggtaacttcggttctattgacggcgactccgcggcggcaatgcgttatacggagatccgtctggcgaaaatcgcccacgaactgatggccgatctcgaaaaagagacggtggatttcgtggataactatgacggtacggaaaaaattccggacgtcatgccgaccaaaattccgaatctgctggtgaacggttcttccggtatcgcagtaggtatggcgacgaatatcccgccgcacaacctgacggaagtgattaacggctgcctggcgtatatcgacaacgaagacatcagcattgaagggctgatggaacatattccggggccggacttcccgaccgccgcgatcatcaacggtcgtcgtggtatcgaagaagcctaccgcaccggtcgtggcaaagtgtacattcgcgcccgcgcggaagttgaagctgacgccaaaacgggccgtgaaaccatcatcgtccatgaaattccctatcaggtgaacaaagcgcgcctgatcgagaaaatcgccgagctggtgaaagataaacgcgtggaaggcatcagcgcgctgcgtgacgaatccgacaaagacgggatgcgcatcgtgattgaagtgaaacgcgatgcggtgggcgaggtggtgcttaataatctctactcccagacccagctacaggtttccttcggtattaacatggtggcgctgcatcacggccagccgaagatcatgaacctgaaagatatcatttcagcgttcgtgcgccaccgccgtgaagtggtgacgcgtcggactatttttgaactgcgtaaagcccgtgaccgtgcgcatatccttgaagctctggcgattgcgctggccaacatcgacccgattatcgaactgattcgccgcgcgccaacgccggcggaagcaaaagcggcgctgatttcgcgtccgtgggatctgggcaacgttgctgcgatgctggagcgcgctggtgatgacgccgcgcgtccggaatggctggagccagaatttggcgtgcgtgacggtcagtactacctgactgaacagcaggcgcaggcgattctggatctgcgtttgcagaaactgaccggcctggagcatgaaaaactgctcgacgaatacaaagagctgctggagcagattgctgaattgctgcacattctgggcagcgccgatcgcctgatggaagtgatccgcgaagagatggagttaattcgcgatcagttcggcgatgagcgtcgtaccgaaatcaccgccaacagcgccgatattaatatcgaagatctgattagccaggaagatgttgtcgtgacgctgtctcaccagggttacgtcaaatatcaaccgctgacagattacgaagcgcaacgtcgtggtgggaaaggtaaatctgccgcgcgtattaaagaagaagactttatcgaccgcctgctggtggctaacacccatgacaccatcctctgcttctccagccggggccgtctgtactggatgaaggtctatcagctgccggaagccagccgcggcgcgcgcggtcgtccgatcgtcaacctgctgccgctggaagccaacgaacgtatcaccgcgattctgccggttcgtgagtatgaagaaggcgtcaacgtctttatggcgaccgccagcggtaccgtgaagaaaacggcgctgaccgaattcagccgtccgcgttccgccggtattatcgcggtgaacctcaacgacggcgacgagctgattggcgttgacctgacttctggttctgacgaagtcatgctgttctcggccgcgggtaaagtggtgcgcttcaaagaagacgccgtccgtgcgatggggcgtaccgcgaccggtgtgcgcggtattaagctggcgggagacgataaagtcgtctctctgatcatcccacgcggcgaaggcgctattctgaccgtaacgcaaaacggctacgggaagcgtaccgcagcggacgagtacccgaccaagtctcgtgcgacgcagggcgttatctctatcaaagtgaccgagcgcaacggttccgttgtcggtgcggtacaggtagacgattgcgaccagatcatgatgatcacggatgccggtactctggtgcgtacccgtgtgtccgagatcagcgtagtgggacgtaatacccagggcgttatccttatccgcacggcggaagatgaaaacgtggtgggtctgcaacgcgttgctgaaccggtagatgacgaagaactcgacgctatcgacggcagcgtggcggaaggggatgaggatatcgccccggaagcggaaagcgatgacgacgttgcggatgacgctgacgagtaa

SEQ ID NO: 7555 - DNA, 948 bp, Salmonella typhimurium
atgacagtgctttttcaccagctgaagataatcatgatcgttagaccacaacagcactggattcgcctgatatttgtctggcatggttccgtgttatctaaaatcttttcacgactactccttaactttcttctttctatcgccgttattatcatgctgccctggtacacaatgctgggtattaagtttacccttgcgccgtttagcatactgggcgtcgctatcgccatttttcttgggtttcgcaataatgcctgttatgcgcgttacgtcgaagcccgacatttgtgggggcagttgatgatcgcttcacgctcaatactgcgagaggtgaaaacaaccttgcctgatgaacgcggtatcgaggattttgttcggttacaaatcgcttttgcccactgtttgcgtatgacattgcgtcgacagcctcaaacgcaagttctgggaaactatcttgaccaggaggcgttacagaaagttgtcgcttcccattcccccgctaaccgtatcttattgctgatgggagagtggctggcgattcgccgccgcagcggaaagctttccgatattttatttcatagcctcaacaaccgcttaaatgatatgtcgtcagtattggccggctgtgagcgcatcgccaacacgccggtgccttttgcctatacgttaattttgcatcgtacggtttatcttttctgcattatgttgccatttgcactggtggttgatctgcactatatgacgccgtttatttcggtgctgatttcttatacgtttatcgcgctggatgcgttagcagaagagttggaagatccgttcggtactgaaaataatgatttaccgctggatgcgatatgcaatgcgatagaaatcgatttactgcaaatgaatgatgaaagggatattccggcaaaacggataccggataaacgctatcaactgacctga

SEQ ID NO: 7556 - DNA, 738 bp, Salmonella typhimurium
atgtctcagtctggctccgttcttcgtcgtaacggatttacgtttaaacagttttttgtcgcacacgatcggtgtgcgatgaaagtgggaactgacggtattttactcggggcgtgggcgccggtcgcggatgtaaagcgaattctggatatcggtactggaagcggtctgctggcgttaatgctggcgcagcggacggatgacaatgtgcctattgacgccgtggaactggatgccggggctgccatgcaagcgcaggaaaacgttgctcactctccctggccgcatcgaataacggtgcatactgacgatattcagcgttgggcgcctcgccagacggtacgctttgatcttattatcagcaacccgccttattacgaacccggtgtggaatgcgccacgccgcagcgggagcaggcgcgttacaccgctacgctggatcaccagacgttattggctattgcggcggattgtattaccgaagatggctttttttgcgtagtcttgccggaacaaataggtaacgcttttacgcagcaagcgctcaacatgggatggcatttgcggctacgtactgacgttgcggaaaacgaagcgcgcttgccgcaccgggttttgctcgcattctccccgcaagccggggagtgctttagcgacagattagtaattcgcgggtcagaccagcattattctgaaagttatacggcgctgacccaggcattttatctatttatgtga

SEQ ID NO: 7557 - DNA, 447 bp, Salmonella typhimurium
atggatcgaccataccgcatacaggaagggtgttttgtcctgcctgaaacatttacggatcgcagcgtcaatatttttatcctggagggcaatgaacgaacatcgcccagcctgaatatttcccgcgatacgctaaaacctgatgaagacctgcccgcctatattgaccgccagattgcactgatgaaaaaaaatctcggtcagcaccgggtattgtcgcgagcgcctgcacaggcaggaacgggcaatgatgcccttatgggggaacaaattgccgccacccataaatccgggaaaacggaagtgtaccagcgtcaggccgggtttattgcaacccctggcaaggtactggtcttcaccctgaccagtccccgtccttttgatgataaagcagacctactctggaacacctggctggcaggctttcagccggataaaaacgaataa

SEQ ID NO: 7558 - DNA, 2136 bp, Salmonella typhimurium
atgaaatcaatgaatattgccgccagcggtgaactcattccccgtctctccacccaccgaaacgtagtggcgctggacagtaccgactttaccgatgtggccgcagtcgtcattaccactgccgacagccgtagcggtattctggcgttgcttaaacgcaccggttttcacctgccggtgtttatgcttgcggatgaacccgtcagcgcgcctgtcggcgttacggcggtaatagtcgggaacgcgcaggaatggctggagctggaaaacgctgcctgtcgctacgaagcggaacttctgccgcccttttatggcaccctgacccagtatgtcgacatggggaatagtacttttgcttgcccggggcaccagcatggcgaattttttagaaaacatcccgcaggccgccatttttatgacttttttggtgaaaacctgtttcgtgcggatatgtgtaacgccgatgtgaaacttggcgatctgctaatacatgaaggttctgccaaacacgcgcagaaatttgcggcaaaagtgtttaatgcggataaaacctactttgtgctgaatgggacttcggcggcgaataaagtggtcaccaacgccctgctgacgcgcggcgatctggtgctgtttgatcgtaataatcacaaatccaaccaccacggcgccctgattcaggccggggcgacgccagtctatcttgaagcggcgcgtaacccgtttggttttatcggtggcattgatgcgcactgttttgatgaaacgtacctgcgcgaccagattcgtgacgtgatgccggaaagcgccgatgcgtcgcgtccgttccgcctggcgatcattcagctgggtacctatgacggcactatttacaacgcccgtcaggtggtggataaaatcgggcatctctgcgattacattctgtttgactccgcgtgggtaggctatgagcagtttatcaatatgatggcggatacctcgccgttgcggctggagcttaatgaaaacgaccctgggatctttgtgacccaatcggtacataagcaacaggcggggttctcacaaacctcgcagatccacaaaaaagataaccatattcgcggccaggcgcgtttttgcccgcacaaacgcctgaacaacgccttcatgttgcatgcttcaaccagtccgttctacccgctgtttgcggcgctggatgtcaatgccaaaatccacgaaggggagagcggtcgccgcctgtgggcggagtgcgttgcgctgggcattgacgcgcgtaaagccattctcgcccgttgcaaactgcttcagccctttatcccactggtggttgacggcaagccgtggcaggcatatccgacggagaccattgccagcaatcgtcgtttcttcagttttgaacccggggcgaaatggcatggctttgagggctatgcggatgaccagtattttgtcgacccctgtaaactgttactgaccacgccaggtattgatgccgatagtgggcgatacaccgaattcggcatcccggcgaccattctcgcccactatctgcgtgagaacggtattgtgcctgagaagtgcgatctcaactcgattctgttcttgctgacacccgccgagagcgaagagaagctggcgcgactggtcgcgatgctggcgcaatttgaacggcacattgaagacgatacgccgcttgcggatgtattgccgacggtttttcagaaatacccggtgcgctaccgcgattacaccctgcgtgagctatgtcaggagatgcacaacctgtacgttagctttgacgttaaggatctgcaaaaagcgatgttccgcaaagaaagcctgccgcatgtggcgatgaacccacaggatgccaacagcgcctttattcgcggcgatgtagagctggtgcgtatcagcgaggcgggcgggcgtattgctgccgagggggcattgccatacccgccgggcgtactgtgcgtggtgccgggggagatttggggcggcgcggcgcagcgttattttttggcgctggaagagggcatcaatctgttgcctggtttttcgccggaattgcagggggtatatagcgagaccgatgccgatggaattcaacgcttgtacggatatgttttaaagtaa

SEQ ID NO: 7559 - DNA, 1374 bp, Salmonella typhimurium
atggaaaaaacacgggccgatggcctgcccctcccgcagagatacggcgctatcctgacgattattatcggtatttcgatggcggttctggatggcgcaatcgctaatgtcgcgctgccaaccattgcgactgatttacatgcctcccctgccagctctatctggattgtcaatgcgtaccaaatcgccattgtcgtctcactgctttccctgtcttttttaggcgacatgtttggttatcaccggatctataaatgtggtttagtggtatttctgctttcatcattgttttgcgcgctttcagactcgctgcagatgctgacgctggcgcgcatcgcgcagggatttggcggcgcggcgctaatgagcgtaaacacggcgctgattcgtcttatctacccccagcgtcatctgggacgaggcatgggaattaactcttttatcgtcgccgtctcttccgccgcgggtccgacgatcgccgcggcgattttatccatctcatcatggaaatggctgtttctgattaatgtcccgttaggtatcatcgcgttaattctggccatccgctttttaccagcaaacatcgcccatgacactaagccgcgctttgacttaccgagcgcggtaatgaatgcgctcacatttggcctgctgattaccgcattgagcggatttgcccagggacagtcgctaacgttgattggcgcagagctgctcgttctggtcgtggtcgggtttttcttcgtgcgccgccagctttctttgcccgtccctttgttacccatcgacttgttacgcattccgcttttttcactctcgatcggcacgtcaatttgctcgttctgcgcgcaaatgttagccatggtctcgctacctttttatctgcaaaccgtgctgggccgtagcgaagtagaaaccggcctgttattgacgccctggccgctggcaacgatggtgatggcgccgctggcgggatacctgatagaacgtcttcatgccggtttgctgggggcgctgggaatggtgataatggcagccgggttgtttgcgctggtcatgttgcctgcctccccctccgatctgaatattatctggccaatgatcctttgtggcgcagggtttggcctgttccagtcgccgaataatcacaccattatcacttccgcgccgcgtgagcgcagcggtggcgccagcgggatgctgggcacggcgcgactgttaggccaaagtactggcgccgcgctggtagcgctgatgttgaaccagtttggcgatagcggtacgcatctttcgctgctcgcagcggcgatcctggcgattctcgcggcggtagtgagcggtttacgtattacgcaaccacgcgttcaggcgtaa

SEQ ID NO: 7560 - DNA, 984 bp, Salmonella typhimurium
gtgtataatgctacttatataaatgaaactcatccaatgctaataaggttgcagcttatgcaatatcggcatcacctcgaactaacatggctcgaagactgtctggctctaaaagaaacgttgaatttctcaaaagcgtctgcctcaagatatgtgactcaacccgcatttagtcgtcggatacaatctctcgaagaatgggtgggtacgcccctttttgaaagaagtaaacggggagtcacccttaccaaggccggagaagtatttacagaccagcttcccgaactgatccactccttgtacacattgaaaagtgatacccttgaggccgcaggtaataaacaacccagtcttgttttttcagcaacgcatgctttgtctttctcttttgtaccgcatttgttaaaacagagtgataaaattgcaaaatttggttcatttcgtcttttatctgactcattgaatgcgtgcgaaaaaatgatgcggcagggagattcacaatttttgctgtgtcaccatcacccacatatgcatctaaatttaaataaaaataactttatgagcattcgtcttgggtttgatacattaattccattcagtaaaccagactcagaaacgttaaaaccgttgtggaatataaataataagattcaattcccttacctttctttttcatcacaatcaggtctgggaagaataatagcaaatacagcgtctattaacagaattacccataatataaatgttgcctttgtggccgatctggcagcaacactattggcaatggtcagatctggcgatggtgttgcctggatacctcaaagccttgccaggcaagatatagaggctaaaactattgttactgcagcggaaaaagaaagtaatttatgggtacccatagaaataagactttatagaccagccaagagaatgcctccagatgccgaagagctatgggaaatttttgttgaagaacaaatataa

SEQ ID NO: 7561 - DNA, 369 bp, Salmonella typhimurium
atgaaaatcgctctgccactttcgctcaaccttccttccatgggtttacgcctcagtacggtgattgagcgttgccgcctggtaagccgtagcgaataccttatcagcgctggcatacgcaaaaacagcccgaacgggagtattcatcctaatagcctgactaaaaaatttgttgcggcacgaaaattgaccggaataaatttcagtgaaaacccaccgccgtttcacgagatccgcagcttatccggacgactgtataaagacgcttacggcgaagggtttgctcagaaactcctgggacatacttcagagaacaccacgaaactctatctcgatgaacgcgataataaagcttacgtgatgctctga

SEQ ID NO: 7562 - DNA, 1080 bp, Salmonella typhimurium
atgttcaagcgtcgttatgtagcgttacttccactttgcgtattgcttgctgcctgtagcagcacgccaaaatcttccgagactcaagcgacgacgggcacgccttccggcggctttctgcttgagccgcagcataacgtcatgcaaatgggcggcgacttcgccaacaaccctaatgcgcagcagttcattgataaaatggtcagtaaacacggtttcgaccgtcagcagttgcaagagatcctctcgcagtctaaaagactggattacgtcctgcgtctgatggacagacaagcgccgaccactcagccgcccgccggaccaaatggcgcctggttgcgctaccgcaaacaatttattacgccggataacgtgcaaaacggcgtcgcgttctggaatcagtatgaagacgcgctgaaccgcgcctggcaggtatacggcgtaccgccggagatcatcgtgggcatcatcggcgtggaaacccgctggggacgtatcatggggaaaacgcggattctggacgcgctggcgacgctgtcatttaactatccgcgccgggcggaatatttctccggcgagctggaaaccttcctgctcatggcgcgcgatgagcaagacgatccgctcaatctgaaaggttcctttgcgggcgcgatgggctacggccagtttatgccatcttcctataaagaatatgcggtcgatttcaatggtgatgggcacattaacttgtgggatccggtagatgccatcggcagcgtggcgaactatttcaaggcgcatggttgggtgaaaggcgatatggttgcggtgccggcgagtggtcaggcgcctgggttggcgaatggtttcaaaacaaaatacagcatctctcagcttgccgccgcaggcttaacgccgcagcaatcgttgggcaatcatcaggaagccagcctgctgcgtctggatatcggtacgggataccagtactggtacggcctgccgaacttctacacaattacccgatataaccacagcacgcattatgcgatggcggtttggcaactgggccaggcggtagcgctggcgcgggtgcgctaa

SEQ ID NO: 7563 - DNA, 1017 bp, Salmonella typhimurium
atgtttcagcagcaaaatgactgggaaacaagagaaaatgcgtttgccgcttttgctatggggccgctgaccgatttctggcgtcagcgggaagaggcggagtttatcggcgtgggtaacattccggtgcgctttgtccgttttcgaaatgattccaacgatcggacgatcgtcatttgtcctggccgcattgagagttatgtaaaatacgctgaactggcgtatgacctttttcatctcggttttgatatcttcatcatcgaccaccgtggtcaagggcgctccgggcggatgttatcggacccgcatcggggtcatgtcgatcattttaacgattatgttgaggacttagcggcgttctggcagcaggaaattgagccggggccgtggcgtaagcgttatatcctggcgcactcaatggggggcgcgatagccaccctgttcctgcaacgccatcgtgtgcggtgcgacgctattgcgctcaccgcgccgatgtttggtattgtgatacgcttgccttcctttatggtgcgccatattctcgactgggccgaagggcaccagcgtatccgtgaagattacgctattggtaccggtcagtggcgggcgttgccgtttgggatgaatgcgctgacccacagccgccagcgttatcagcgcaacttacgattttatgccgacgagccgcagctgcgcgttggcggccccacctggcattgggtacgcgaaggcattctggcgggtgagcaggtactggctggggcgagcgatgacacgacgcctacgctactgattcaggcggaagaagagcgggtagtggataaccgcacccacgatcgtttttgtgaaattcgcgccgcggcgggatacccttgtgaagggggaaaaccgctggttatcaaaggcgcgtaccatgagatcctttttgaaaaggacgccatgcgctcagtcgcgcttaacgccattgttgaatttttcaacaagcctaatttatccagcggaaatcgctttgcttag

SEQ ID NO: 7564 - DNA, 540 bp, Salmonella typhimurium
atggcgaaactgcatgattactacaaagacgaagtagttaacaaactcatgactgagtttaactacaattctgtcatgcaagtccctcgggtcgagaagatcaccctgaacatgggtgttggtgaagcgatcgctgacaagaaactgctggataacgcagcagcagacctgacagcaatctccggtcaaaaaccgttgatcaccaaagcacgcaaatctgttgcaggcttcaaaatccgtcagggctatccgatcggctgtaaagtaactctgcgtggcgaacgcatgtgggagttctttgagcgcctgatcactattgctgttcctcgtatccgtgacttccgtggcttgtccgctaagtcattcgacggtcgtggtaactacagcatgggtgtccgtgagcagatcatcttcccagaaatcgactacgataaagtcgaccgcgttcgtggtttggatattaccattaccactactgcgaaatctgacgaagaaggccgtgctctgctggctgcctttgacttcccgttccgcaagtaa

SEQ ID NO: 7565 - DNA, 870 bp, Salmonella typhimurium
atgagaccacgtcgcagtatgttgtttatccccggcgcaaatgcggccatgttgagcacctcgtttgtctacggtgcggacgcggtgatgttcgacttagaagacgccgtagcgttacgtgagaaagataccgcccgtcttttagtccatcacgcgcttcaacatccgttctatcaggatgttgaaaaagtggtgcgcattaatccactgaacacgccgtttggtctggccgatcttgaagccgtcgtgcgtggtggcgcggatatcgtgcgtctgccgaaaaccgacagcaaaaacgatgtgctggagctggaagcgcaggtcgaacggatcgaacgtgaatgtggacgcgaggtcggcagtaccaggctgatggcggcgatcgaatcagcgaaaggcgtggtcaatgccgtcgacatcgccacctccagcccgcgcatggtggcaattgcgctggcggcatttgattacgtgatggatatgggcaccagccggggcgatggcaccgagctgttctacgcccgctgcgcagtgctgcatgcggcgcgcgttgcgggtattgccgcctatgatgtcgtttggtcggatatcaataatgaagaaggcttcctgaaggaagtgcagttggcgaaagggcttggttttaacggtaagtccttagtgaacccacgtcagattgagctgttacatcaggcttattctccgacacgtaaagaagttgagcatgcgtatgaggtgattgccgccgctgaagaggctgagtctcgcggtctgggcgtcgtttcactcaacggcaaaatgattgacggcccgattatcgaccacgcgcgcaaagtggtggcgctgtcggcttccggtattcgtgattaa

SEQ ID NO: 7566 - DNA, 2145 bp, Salmonella typhimurium
gtgtcccgtattattatgctgatccctaccggaaccagcgtcggcctgaccagcgtcagcctcggcgtcatccgtgctatggaacgcaaaggcgttcgtctgagcgtctttaagcctatcgcccagcctcgcgctggcggcgatgcgcctgaccagaccaccactatcgttcgcgcgaactctaccctgccggcggctgaaccgctgaagatgagccacgttgaatctctgctctccagcaaccagaaagacgtgctgatggaagagatcatcgcgaactaccatgcgaataccaaagacgcggaagtggtgctggttgaaggtctggttccgacccgtaaacatcagttcgctcagtctctgaactatgaaatcgcgaaaacgctgaatgcggaaatcgtttttgtcatgtctcagggtaccgacacgccagaacagctgaacgagcgtatcgaactgacgcgcagcagcttcggcggcgcgaaaaacaccaacatcaccggtgttattatcaacaaactgaatgcgccggttgatgaacaaggccgtactcgcccggatctgtcggagatctttgacgactcttccaaagcgcaggtgatcaaaatcgatcctgctaaactgcaggaatccagcccgctgccggttctgggcgcggtgccgtggagcttcgacctgattgcgacccgcgctatcgatatggcgcgtcacctgaacgccaccatcattaacgaaggcgatatcaaaacccgccgcgttaaatccgtcactttctgcgcgcgtagtattccgcatatgctggaacatttccgcgcaggctcgttgttagtgacctccgctgaccgtccggacgtactggtcgcagcttgcctggccgcgatgaacggcgtagaaatcggcgccctgttgctgaccggcggctatgaaatggacgcgcgcatttctaaactgtgcgaacgcgcattcgccaccggtctgccggtctttatggtgaacaccaacacctggcagacttcgctgagcctgcaaagcttcaatctggaagtcccggttgatgaccatgagcgcatcgagaaagttcaggaatacgtcgcgaactacgttaacgctgagtggatcgagtcgctgaccgccacttccgagcgtagccgtcgtctctctccgccggcgttccgctaccaactgactgagctggcgcgtaaagccggtaaacgcgtagtgctgccggaaggcgacgaaccgcgtaccgtcaaagcggcggcaatctgcgctgaacgcggcatcgccacttgcgtactgctgggcaacccggatgaaatcaaccgcgtcgcggcatctcagggcgttgagctgggcgcaggtattgaaatcgtcgatccggaagtggtgcgtgaaagctatgtcgctcgcctggttgagctgcgtaagagcaaaggcatgaccgaaccggttgcccgcgaacagctggaagacaacgtggtgctcggcacgctgatgctggagcaagacgaagtcgacggcctggtttccggcgcggttcataccaccgccaacaccatccgtccgccgctgcagcttattaaaacggcgccgggtagctccctggtctcttctgtgttctttatgctactgccggaacaggtttacgtttacggcgactgcgcaatcaacccagacccgaccgcagagcagctggcagaaatcgcgattcagtctgcggattccgccattgccttcggcatcgaaccgcgtgtggcaatgctctcctactccaccggcacctctggcgcgggcagcgacgtagagaaagtacgtgaagcgacgcgtctggcgcaggaaaaacgtcctgacctgatgatcgacggtccgttgcagtacgacgccgcggtcatggctgacgtagcgaaatccaaagcgccgaactcgccggttgcgggtcgcgctaccgtgttcattttcccggatctgaacaccggtaacaccacctacaaagcggtacagcgttctgccgacctgatctccatcgggccgatgttgcagggtatgcgcaagccggtgaacgacctgtcccgtggcgcgctggttgacgatatcgtctacaccatcgccctgacggcgatccaggcttctcagcagcagcagtaa

SEQ ID NO: 7567 - DNA, 1521 bp, Salmonella typhimurium
atgtctgtcgttacagaatcaaaaacagccagaaaatgggcaatgcccgatacgctggtcatcatcttttttgtcgccattttaaccagtatcgccacctgggtcgtccccgttgggatgtttgatagccaggaagtgcagtatcaggtcgatggtcagacaaaaacccgcaaagtcgtcgacccgcactcttttcgcattgtgaccaacgaggccggggaagcgcagtatcatcgagtacaatttttcactaccggcgatgaaagaccagggctgatgaattttccgtttgaagggttaacatccggatcgaaattcggcactgccgtcggcatcattatgtttatgttggtgattggcggcgcattcggcatcgtgatgcgtaccggcaccgtggataacggcattctggcgcttattcgccacacgcggggcaacgaagtcctgtttattccggtgctatttgtcctcttttcgttagggggcgccgtatttggcatgggcgaagaggcggtcgcctttgcaattatcatagccccgctgatggtcaggctgggctatgacagcattaccaccgtcctggtgacctatatcgccacccaaattggctttgccagttcgtggatgaacccgttttgcgtagtcgtcgcccaggggattgccggcgtgccggtactttccggctccgggctgcgtattgtggtctggattgtcgccacgctgattgggctggtttttacgctggtctacgcctcacgcgtgaaaaagaatccgctgctgtcccgcgtccacgaatccgatcgctatttccgcgaacagcaggatgaagtcgtccagcgccctttcaccttcggtgactggctggtactgctggtcctgaccggcgtaatgatttgggtcgtctggggcgtgattgtccacgcctggtttattccggagatcgccagccagtttttcaccatgggcgtggtgatcggcctcattggcgttatcttccgcctcaacggtatgacggtcaacgtgatggcgtcctcattcaccgaaggggcgagaatgatgatcgcgcccgccttgctggtgggttttgccaaaggcattctgctgctggtcggcaacggcgaagccggggaacccagcgtgctcaatacgttgcttaacagtatcgcgcatggcatcagcgggcttaataatgctatcgccgcctggtttatgctgctcttccaggcggtatttaatttctttgtcacgtccggttcgggtcaggcggcgttaaccatgccattactggcgccgctcggcgatctggtcggtgttaaccgtcaggtgactgttctggccttccagtttggcgatggcttcagccatattatctatccgacatcagcctcgctgatggccacgctgggcgtgtgccgggtcgattttcgcaactggctgaaagtgggggcgtcgctgctgggactactgtttattatgtccagcgtggtcgtcattggcgcgcagatgatgggatatcattga

SEQ ID NO: 7568 - DNA, 957 bp, Salmonella typhimurium
ttgatgttatttttgttcaatctgaataatatggtcttttacacggaaagtgattggcgaggtgttatgaatcatatttttaaattagcatttatttttattatcaatattatatttttaataaatgcttcagcaacaacgatggacaaagataaatttgtggaagcgaatggtatcaaaattcattacgttgaagagggcgaggggcctccgctgctgttgattcacggtggtggtctgacggcgaaaagttggcagggattagcgaaagaggcatctcgatattttcgcgtcatcatgccggacagtcgtggacatggattaaccaataacccgcaaggaacgtttagctatgatctgatgacggaagatatggcggcttttgttaaagcgctgaagctggaaaaaccgctggtgatgggttacagcgatggcggcatggtcgttctgaagttaaccagccgatacccggatctagcgcgcgctgctatcgtcggcggcgcaacgcatcgctttgctacgacccattacatgcaggggatggaaattttttatggtaaaggaatgcctcaggggcaattgacggatcgcgatctggataaaatggcttcggatgcgcccgggatggttaaattttatcagaacatgcatcatccagagcaaaaagactactggcgcacgttcctcaaaggtgtctggccaatgtggacaacgcccacatcgctggcggaagaagaggtgaaaaaaatccacattcctgtgctattactggacggcgaccgggatgaatttttcaccgttgaagaagttaccgagctgtaccggctgctgcctcaggcggagatgaccctcattcccggtagcggtcacgccattttccagacgccaggaaaaacaccgctgttttacgcattagtgcttgagtttttacagcggcaaatccctaaggcctcttaa

SEQ ID NO: 7569 - DNA, 2658 bp, Salmonella typhimurium
atggctcactataaaaaatttcgtctgagcacgcttgcggccgtggtgggtattgttctggctgtcggtccggaaaatagctacgcggaagcgcccattcaatttaatacccgatttcttgatgttaaagatgatgccagcctggatctctcccgtttttcccgtaaaggctacattatgccggggagctatcatctccaggtgctggtcaatcagagtcaaattgtccaggataatgttattacgtattccgttgataataacgatcctgataacacctatccctgtttatcgcctgaactggtctcgctgctggggttaaaacctgaaatagcagataaaatgatctggataaatgccggtcagtgtctgcaaccagatcaactggaagggatggaaacccaaacggatttaagccagtcaacgctgacggtgattattccgcaggcgtatctggaatacagcgatgaagagtgggatccaccttcccgctgggatgaagggattcccggcgtattatttgactacaacgttaacagccagtggcgacatgctgaacatgatgacggcgatgaatatgacatcagcggcaacggcacggtgggtgccaacctcggcgcgtggcgtttgcgcgcggactggcaggctaactatcgtcacgaaaatgacagcgaagataaagacaactttggctccagttccgaacagaactgggactggaaccgctattacgcctggcgggcgatcccgcagctccgggcgcagctaacgctgggcgaaggatcgctggaatccgatattttcgacggctttaactatgttggcggcagccttatcaccgacgatcagatgttaccgcctaatctgcgcggctacgccccggatatatcaggcgtggcgcgcaccaacgccaaagtcaccgtgacccagcgcgggcgggtgatttatgagtcgcaggtcccggctgggccgtttcgcattcaggatattaatgaaacggtatccggcgatctacacgtcaaaattgaagaacaaagcggtcaggtgcaggaatatgacgtcagcaccgcctccattccgtttctgacccgtcccggccaggtgcgctacaagttggcagccgggcgaccgcaggactgggatcacaatatggaaggcggctttttcacctcagccgaagcctcctgggggatcgctaacggctggtcgctgtacggcggtgccatcggtgagcaggattatcaggcgctggcgttaggactggggcgcgatctggcgctgctgggcgcgttttccgtcgatgtcacccattcccgtgcgacgctgccagagggtagcgcctacggcgacggcaccattcagggtaactcgttccgtgccagctacgctaaagattttgatgatatagacagccgtctgacgtttgctggttatcgcttttccgaagaaaactacatgacgatggacgagtttatcgatacgcataatgacgataacgatcgtcagcgcaccggccacgataaagagatgtataccctgacgtacagccagaacttttcggcaataaacgtcaacgcctatatcaactacacccatcgcacctactggaatcaacctaaccaggacagctataacctgacgctgtcgcactatttcgatgtcggtgaggtgcgcgggatcagtctgtcggtgaacggttttcgcaacgaatatgacaatgagcgtgatgacggcgtgtacgtctcgctcagtattccgtggggcaacaaccgcacgctgagctacaacggctcctttagcgatgacaacaacagcaatcaggtcggctattacgagcgcattgacgatcgcaataactaccagatcaacgctggtcgcgcggataacggtgcgactctcgacggctactaccgttatcaagcgagctatgccgacattgacgtcagtgcgaactatcaggaaggcgactatacctccggcggactgaacatccagggcggcgcgacgctgactgctaaaggcggggcgttgcaccgcaccagcgtcaacggcggctcgcggctgctggtggatgtcggcgatgaagcgaacgtacccatctccggctacagcacgccggtatataccaacgcgtttggtaaagccgtcattgtcgacgtcaacgactactaccgcaaccaggtgaaaatcgacattacccagttgccggaagacgcggaagcaatcctctccatcgctcaggcgaccctgacggaaggggcgatcggttatcgccgcatggaggtgctcagcggtaaaaaagccatggccagtatccgcctgcgcgatggcggcacgccgcccttcggcgcagaggtttacaacagtcgccagcaacagttagggatcgtaggtgaagacggcagcgtttatctgatcggcattaaccccggcgagcggttgcaggtgacatgggaaggtaaaacgcagtgtgaagcgacgttgcccgatccgctgccgggcgatctgtttagcggcctgttgctgccgtgcatcggcgacgcttcatcacctgaggcaacgcagcccgaagagaaaccattactccagcttcatacgcagcggcggacgtcttcgacgcaacccgaagcgctctcttctcgttatccaacacattga

SEQ ID NO: 7570 - DNA, 1734 bp, Salmonella typhimurium
gtgaaacaacagagacaacttcgtcggcgcgaggctgatgagacggcggaactccccgccgatcttcctccattactacgacgtttatatgccagccggggcgttcgtagcgcccgcgaactggagcgcagcgtgaaaggaatgctgccctggcaacagcttagcggcatagataacgcggtggagatcctctacaacgcctttcgcgaaggtacccgcattattgttgttggcgattttgacgccgacggcgcgaccagtactgcgctaagcgtattgggaatgcgtgcgttgggatgtgacaacatcagttatctggtgcctaatcgctttgaagacggctacggtttaagcccggaagtggtcgatcaggcgaaggcgcgcggcgcgcagcttatcgtcaccgtagacaacggcatttcatcccacgccggcgtagcgcatgcaaagacgttggggattccggtgatcgtgaccgatcaccacctgccaggcgacacgttgccggatgccgaagcgattattaatcccaatctgcgcgactgcgaattcccgtctaagtcgctggcgggcgtcggcgtggcgttttacctgatgctggcgttgcgaacatttttgcgcgacaaaggatggttcgacgagcgcaacatcgcgccgccgaatctggcggagctgctggatttagtggcgttgggtacggtagcagacgttgtgccgctggacgctaacaaccgtattctgacctggcaagggctaagtcgtattcgtgccgggaaatgccgtccgggaattaaagcgttgctggagatatcgaatcgcgatccgcagcagcttgccgccagtgatttaggcttcgcgttggggcctcgcctgaatgccgccggcaggctggatgatatgtccgttggcgtggcgttactgttgtgcgataacctcggcgaagcgcgtgttctggccagcgagctggatgcgcttaaccagacgcgcaaagaaatagagcaggggatgcaggcggaagcgcttatcctgtgcgaaaagcttgagcgcagtagtgaaacgcttccgggcggtctggcgatgtatcatcctgaatggcatcagggcgtggtcggaattctggcgtcgcgcattaaagagcgttttcaccgcccggtgatcgcctttgcgcctgcgggcgacggcacgctaaaaggctcaggccgttcgattcaggggctgcatatgcgcgatgcgctggaaaggctggataccctttaccctgatctgatgatcaagttcggcggtcatgcgatggcggcgggattgtcgctggaagagcataaattcgagcagtttcagcaacggtttggcgagctggtgacggaatggctcgatcctgccctgttgcaaggcgaggtgatctccgatggtccattaagcgcggcggagatgtctatggaagtggcgcaactgttgcgggatgccggaccgtgggggcaaatgttcccggaaccgttattcgatggtcgtttccgtctgctacagcagcgtctggtgggcgagcgtcacctcaaggtgatggtggagcctgtcggcggcggcccgctgttggatggcatcgcatttaatattgatacgacctgttggccggataacggcgtgcgggaggtagaactggcttataaactggacattaacgagtttcgcggcaaccgtagtttacagattattatcgatgatatttggccgctatga

SEQ ID NO: 7571 - DNA, 1575 bp, Salmonella typhimurium
atgcaggagttttacgccagggtctggaatacaaaagaaatgaatttattgaaatcgctggctgccgtcagctcgatgactatgttttcacgcgtgttgggctttgcccgtgatgcgattgtcgccagaatttttggcgcagggatggcgaccgacgccttttttgtggcgtttaaactccctaatttactacgccggatctttgccgaaggcgctttttctcaggcctttgtgcctatcctggcggaatataagagcaagcagggtgaagaagcgacgcggatctttgtcgcttacgtttccggcctgttgacgctggcattggccgtcgtgacggtggccggtatgctggccgccccgtgggtgattatggtaaccgcgccgggttttgccgatactgcggataaattcgcgctgacgacgcaactgctgcggattacatttccctatattctgctgatctcgctggcttcactggttggcgccattctcaacacctggaatcgcttctctattcccgcttttgcgccgacatttcttaatatcagcatgatcggttttgcattattcgccgcgccatactttaatccgccggtgctggcgttagcctgggcagtcaccgttggcggcgtgctgcaactggtgtatcaacttccgtatttgaaaaagatcggtatgctggtgctgccgcgcattaactttcgcgacaccggggcgatgcgggtggtcaaacagatggggccggcgattttgggcgtttccgtcagtcagatctcccttatcatcaataccattttcgcctcgtttctggcctccggctcggtctcatggatgtactatgccgatcggttgatggagttcccgtccggcgtgctgggcgtggcgttggggaccatcttgttgccgtcattgtcgaaaagctttgccagcggcaatcatgatgagtactgccgcctgatggactgggggctgcgtttgtgctttttactggcgttgccgagcgcggtagcgttaggcattctggcgaagccgctgacggtctcgctgtttcagtacggtaaattcaccgcctttgatgcggcgatgacgcagcgggcgttaatcgcctattcggtggggctgattggcttgatcgtcgtaaaagtgctggctccgggcttctattctcgccaggatattaaaacgccggtgaaaatcgccatagtgacgttaatcatgacgcagttaatgaacctggcgtttattggaccgctgaaacacgccgggctgtcgctctctattggtttggcggcatgtctcaatgcgtcgctgctgtactggcaactgcgcaaacagaatatctttacgccacaaccgggctggatgtggttcctgatgcgtctgatcatttccgtactggtgatggccgccgtattgttcggcgtgttgcatattatgccggagtggtcgcaagggtcgatgctatggcgtttgctgcgtttgatggcggtagtgatcgcgggtatcgcggcctatttcgccgcgcttgccgtgctgggctttaaagtgaaagagtttgttcgccggacggcgtaa

SEQ ID NO: 7572 - DNA, 1185 bp, Staphylococcus aureus
atggcaaaagaaaaattcgatcgttctaaagaacatgccaatatcggtactatcggtcacgttgaccatggtaaaacaacattaacagcagcaatcgctactgtattagcaaaaaatggtgactcagttgcacaatcatatgacatgattgacaacgctccagaagaaaaagaacgtggtatcacaatcaatacttctcacattgagtaccaaactgacaaacgtcactacgctcacgttgactgcccaggacacgctgactacgttaaaaacatgatcactggtgctgctcaaatggacggcggtatcttagtagtatctgctgctgacggtccaatgccacaaactcgtgaacacattcttttatcacgtaacgttggtgtaccagcattagtagtattcttaaacaaagttgacatggttgacgatgaagaattattagaattagtagaaatggaagttcgtgacttattaagcgaatatgacttcccaggtgacgatgtacctgtaatcgctggttcagcattaaaagctttagaaggcgatgctcaatacgaagaaaaaatcttagaattaatggaagctgtagatacttacattccaactccagaacgtgattctgacaaaccattcatgatgccagttgaggacgtattctcaatcactggtcgtggtactgttgctacaggccgtgttgaacgtggtcaaatcaaagttggtgaagaagttgaaatcatcggtttacatgacacatctaaaacaactgttacaggtgttgaaatgttccgtaaattattagactacgctgaagctggtgacaacattggtgcattattacgtggtgttgctcgtgaagacgtacaacgtggtcaagtattagctgctcctggttcaattacaccacatactgaatttaaagcagaagtatacgtattatcaaaagacgaaggtggacgtcacactccattcttctcaaactatcgtccacaattctatttccgtactactgacgtaactggtgttgttcacttaccagaaggtactgaaatggtaatgcctggtgataacgttgaaatgacagtagaattaatcgctccaatcgcgattgaagacggtactcgtttctcaatccgcgaaggtggacgtactgtaggatcaggcgttgttactgaaatcattaaataa

SEQ ID NO: 7573 - DNA, 1959 bp, Staphylococcus aureus
atgagagtaacagagttattaacaaaagatacgatagcaatggatttaatggcaaatgacaaaaatggtgttattgatgagttagtaaatcaattagacaaagcaggtaaattaagtgatgtcgcgtcatttaaggaagcgattcacaatcgagaatcacaaagtacaactggtatcggcgaaggtattgctattccacatgcgaaagtagccgcagttaagtctccagctatcgcattcggtaaatctaaagaaggtgtagattaccaaagtttagatatgcaaccagctcatttattctttatgattgcagcgccagaaggtggcgcccaaacacatctagatgctttagctaagttgtctggtattttaatggatgaaaatgtacgcgagaaattattacatgcttcatcacctgaagaagtactagcgattatagatgaggctgatgatgaagtgacaaaagaagaagaggcagaagctgaagcacaacaagttgcaactgcagaacaatcatctaaacaatctaacgagccatatgtgttagcagtaactgcttgtccaacaggtattgcacatacgtacatggcacgtgacgcattgaaaaaacaagcggataagatgggtattaaaattaaagtagaaacgaacggttcaagcggcattaaaaaccatttaactgaacaagatattgaaaatgcaacaggtatcattgttgctgctgatgttcatgttgagacggatcgcttcgatggtaaaaatgtcgtagaagtaccagtagcagatggtattaaacgcccagaagaattaattaataaagcattagatacaagtcgtaaaccttttgttgcccgtgatggtcaaagaaaaggtaactcaaatgacagtcaagaaaaattaagcccaggtaaagcattctataaacacttaatgaacggtgtttctaacatgttgccacttgtaatatctggtggtattttaatggcaattgtatttttatttggagcaaattcatttaatccaaaaagctcagagtacaatgcgtttgcagagcagctttggaacattggtagtaaaagtgcattcgcgctaatcattccaattttatctggattcattgcacgtagtattgcggataaacctggtttcgcttcaggtcttgtaggtggtatgttagcaatttcaggtggttcaggatttattggtggtattattgcaggtttcttagcaggttacttaacacaaggtgttaaagccatgacacgtaagttaccacaagcattagagggattaaagccaacattaatttatccactattaacagtgacagctacaggcttattgatgatttatgtctttaatccaccagcatcttggttaaatcatttgttattagatggattaaacaatttatcaggttctaatattgtattattaggtttagttattggcgctatgatggcgattgatatgggcggtccattcaacaaagcggcatatgtttttgcaacaggtgcgttgattgaaggtaatgcagcaccaattacagctgcaatgattggtggtatgattccaccgttagcaattgcgacagcgatgttaattttcagacgtaaatttacaaaagaacaacgtggttcaattatccctaactatgtgatgggtatgtcctttattacagaaggtgcgattccatttgcagctgccgatccattacgtgttattccttcaatgatgattggttcaggtataggtggcgcaattgctttaggcttaggttctcgaattactgcgccacatggtggtattattgtaattgttggtactgatggtgcacacttacttcaaactcttattgcacttctagttggtacattagtttcagcattaatttatggacttattaaaccaaagttaactgaaacagaaatcgaagcttcaaaatcaatggacgagtag

SEQ ID NO: 7574 - DNA, 588 bp, Staphylococcus aureus
atgaaagagattgttattgcatcgaataatcaagggaaaataaatgactttaaagtaatatttccagattaccacgtaataggtatttcagaactaataccagattttgatgtggaagaaacaggatcaacatttgaagaaaatgctatattaaaatcagaagctgctgcaaaagcattgaataaaactgtcatagctgatgacagtggactagaagtttttgcattaaatggtgagccaggtatatactctgcacgttatgctggtgaaaataaaagcgatgaagcaaatattgaaaaattattaaataagcttggtaatacaactgatcgtcgtgcgcaatttgtttgtgtcataagtatgagtggccctgatatggaaacaaaagtatttaaaggtactgtttcaggtgaaattgcagatggaaaatatggcgaaaatggtttcggatatgatccgatattttatgtaccgaaattagataaaaccatggctcaactttcaaaagaacaaaaagggcaaattagtcatagacgaaatgcgattaatttacttcaagcttttcttgaaggtgaaaaaaatgtctaa

SEQ ID NO: 7575 - DNA, 801 bp, Staphylococcus aureus
atgaataaaccaataggtgtaatagactctggtgtcggaggtttgacagtagctaaagaaattatgcgtcagttgccaaatgagacgatttattacttaggtgatattggacgatgtccatatgggccaagaccaggagaacaagtaaaacaatatacagttgaaatcgctcgtaaattaatggaatttgatataaaaatgctcgtgattgcttgtaatacagcaactgctgtagctttagaatatttacaaaagaccttatcaatcccagtgattggtgtaattgaaccaggtgctagaacagcaataatgactactagaaatcaaaatgtattagtactaggaactgaaggcacaattaaatctgaagcatatcgtacgcatattaaacgtatcaatccacatgtagaggtacatggcgttgcctgtccaggttttgtgccacttgtagaacaaatgagatatagtgatccaacaattacaagcattgtcattcatcaaacactgaaacgttggcgtaatagtgagtctgatactgtcattttaggatgtacccactatccattgctctataaacctatctatgattattttggtggtaaaaagacagtgatttcgtctggattagaaacggctcgtgaagttagtgcattgctaacatttagtaatgaacatgcaagttatactgaacatccagatcatcgattttttgcaacaggtgatcctactcacattactaacattatcaaagagtggttaaatttatctgtcaatgtggaacgtatatcagtgaatgactag

SEQ ID NO: 7576 - DNA, 834 bp, Staphylococcus aureus
atggctattaaaaagtataagccaataacaaatggtcgtcgtaatatgacttcgttagatttcgcagaaatcacgaaaactacacctgaaaagtcattattaaaaccgctaccgaaaaaagcgggacgtaacaaccaaggtaaattgactgtaagacaccatggtggtggacacaaacgtcaataccgtgttatcgattttaaacgtaacaaagatggtatcaatgcaaaagttgattctattcaatatgatccaaaccgctcagcaaacatcgctttagttgtatatgcagacggtgaaaaacgatatatcattgctcctaaaggattagaagtaggtcaaatcgttgaaagtggtgctgaagctgacatcaaagttggtaacgcattaccattacaaaacattccagttggtacagtagtacacaacatcgagcttaaacctggtaaaggtggacaaatcgctcgttcagctggtgcaagtgctcaagtacttggtaaagaaggtaaatacgtattaatcagattaagatctggtgaagttcgtatgatcttatctacttgccgtgctacaatcggtcaagttggtaacctacaacacgaattagttaacgttggtaaagccggacgttcaagatggaaaggtatccgtccaacagttcgtggttctgtaatgaaccctaacgatcacccacacggtggtggtgaaggtcgtgctcctatcggtagaccatctccaatgtcaccatggggtaaacctacgcttggtaagaaaactcgtcgtggtaaaaaatcatcagacaaacttatcgttcgtggacgtaagaaaaaataa

SEQ ID NO: 7577 - DNA, 2007 bp, Staphylococcus aureus
atggtcattaacttaaatgacaaacagacaaaaacatctaaagaagggttaatttccgtatcacatcctcttgcggctaaaattggtaaggatgtattagatcaaggtggcaacgccatggatgccgtgattgcaattcaactggcattgaatgtggtagaaccatttgcatcaggtattggtggtggcgggtacttgctatattatgagcaaagtactggcagtataactgcgtttgatgcacgtgagacagcacctgaacatgtagacaaacaattttatctagatgattcaggcgaatataaatcattttttgatatgactacacatggtaaaactgtcgctgtgccagcaattccaaagctgtttgattatattcacaagcgttatgctaaattgtcattggaagatttaattaatcctgcaattgaactagccattgaaggtcatgcagccaattgggctactgaaaaatattcgcgccagcaacacgcacgattgacaaagtatcatgaaacggcacaagtatttacgcatgaaaatcaatattggcgtgaaggtgattggattgtacaacccgaattaggtaagacatttcaaatattaagagaacaagggtttaatgcattttataaaggtgacattgcgaaacaattagtcaatgttgttaaagcatgtggtgggacaatcattttagaggatctagccaattatgacattcagattaaagcgccaatcagtgcgacatttaaagactatgacatttattcaatgggaccatctagttctggcggtatcacggtcattcaaatattgaagttattagaacatgtcgatttaccatctatgggtccaagatctgtcgattacttgcatcatttgatacaagcgatgcatttagcatatagtgatcgcgcgcaatacttggcggatgataattttcatgaggtgcctgtacagtcattaattgatgacgattatttaaaagcacgcagtacgctcattaatagcaataaagcaaatattgatatagagcatggtgttgtgtctgattgcattagtcatacagatgttgaagaaaatcataccgaaacaactcatttttgtgtgattgataaggaaggtaatattgcttcatttacgacatcaattggtatgatttatggttcaggtatcacgattccaggctacggtgtgttattgaatacgacaatggatggctttgatgtagtagatggtggtattaacgaaattgcaccatataaacgaccactaagtaacatggctccaacgattgtgatgcatcacgggaagccgatattaacagtaggtgcacctggtgccataagtatcattgctagtgttgcgcaaacattaatcaatgtattagtgtttggcatggatattcagcaggctatagatgaacctagaatttatagtagccatcctaatcgcattgaatgggagcctcaattttcacaatctacaatattagcattgattgcacgtggacatgcaatggaacataaaccagatgcctatattggagatgtacatgggttacaggttgacttgaatacacgtgacgcgtcgggaggtgctgatgatacgagggaaggcacagtgataggtggcgatgtattatcaattagaaaacaaccattacctagtccgaaaatatacgataatgacacccatcgagtatatttcaatgatatgcagttgccattatatgctgaacaagtgcggtggatgcatgacaaatattgggttgatgaaagtgttattagaatcattttccctgaagttagtgtgcatattgaagatttaagaagttatgaaatcgccggaaaaaattatatagatattgcctggttggcacggaagaaaggttatcaagttaccttaaaggatgacagtttatacttaactgatgaaacatatcattcagtgaaagcaaacacaaatgcatactatagatatgatcgagatagtatcacaagataa

SEQ ID NO: 7578 - DNA, 7446 bp, Staphylococcus aureus
atgaatttattcagacaacaaaaatttagtatcagaaaatttaatgtcggtattttttcagctttaattgccactgttacttttatatctactaacccgacaacagcgtctgcagcagagcaaaatcagcctgcacaaaatcaaccagcacaaccagctgatgccaatacacagcctaacgcaaatgctggtgctcaagctaatcctgcagcacagccagcaaaccaaggtggacaggctaatccagcaggaggagcagcacaaccagctggacaaggtaatcaagctgatccgaataacgctgcacaagcacaacctggaaatcaagcagcaccggcaaaccaagcaggtcaaggaaataaccaagcaacacctaataataatgcaacaccggcaaatcaaacacagccagcgaatgctccagcagcagcgcaaccagcagcacctgtagcagcaaacgcacaaactcaagatccaaatgctagcaatactggtgaaggcagtattaatacgacattaacatttgatgatcctgccatatcaacagatgagaatagacaggatccaactgtaactgttacagataaagtaaatggttattcattaattaacaacggtaagattggtttcgttaactcagaattaagacgaagcgatatgtttgataagaataaccctcaaaactatcaagctaaaggaaacgtggctgcattaggtcgtgtgaatgcaaatgattctacagatcatggtaactttaacggtattacaaaaactgtaaatgtaaaaccagattcagaattaattattaactttactactatgcaaacgaatagtaagcaaggtgcaacaaatttagttattaaagatgctaagaaaaatactgaattagcaactgtaaatgttgctaagactggtactgcacatttatttaaagtaccaactgatgctgatcgtttagatttacaatttattcctgacaatacagcagttgctgatgcttcaagaattacaacaaataaagatggttataaatactattcattcattgataatgtaggtctattctcaggatcacatttatatgtcaaaaatagagatttagcaccgaaagcaactaacaataaagaatatactattaatactgaaatcggtaacaatggtaattttggtgcttcattaaaagcagatcaatttaaatatgaagtaacattaccacaaggtgtaacttacgttaatgattcattaactacaacattccctaatggtaatgaagacagtacagtattgaaaaatatgactgttaattatgatcaaactgcaaataaagttacatttacaagccaaggtgtgacaacggcacgtggtacacacactaaagaagttttattcccagataaatctttaaaattatcatataaagttaatgttgcgaatatcgatacacctaaaaatattgattttaatgaaaaattaacatatcgtactgcttcagatgttgtaattaataatgcgcaaccagaagttacactaactgcagatccattttcagtagcggttgaaatgaacaaagatgcgttgcaacaacaagtaaactcacaagttgataatagtcattacacaacagcatcaattgcagaatacaataaacttaaacaacaagcagacactattttaaatgaagatgcgaatcacgttgaaactgcaaatcgtgcatctcaagcggatattgacggtttagtaactaaattacaagctgcattaattgataatcaagcagcaattgctgaattagatactaaagctcaagaaaaggttacagcagcacaacaaagtaaaaaagttacgcaagatgaagttgcagcgcttgtgactaaaattaacaatgataaaaataatgcaatcgcagaaattaataaacaaacaacatcacaaggtgtcacaactgaaaaagataatggtatcgcagtgttagaacaagatgtgattacaccaacagttaaacctcaagcgaaacaagatattatccaagcagttacaactcgtaaacaacaaattaaaaagtcaaatgcatcattacaagatgaaaaagatgtagcaaatgataaaattggtaaaattgaaacaaaggcaattaaagatattgatgcagcaacaacaaatgcacaagtagaagccattaaaacaaaagcaatcaatgatattaatcaaactacacctgctacaacagctaaagcagcagctcttgaagaatttgacgaagttgttcaagcacaaattgatcaagcacctttaaatcctgatacaacaaatgaagaagtagcggaagctattgaacgtattaatgcagctaaagtttctggtgttaaagcaattgaagcgacaacgactgcacaagatttagaacgcgttaaaaacgaagaaatattcaaaattgagaatattacggattcaactcaaactaaaatggatgcttataaagaagttagacaagcagctacagctagaaaagcgcaaaatgctacagtttcaaatgcaactgatgaagaagtagcagaggcaaatgcagcagtagatgcagctcaaacagaaggtttacatgacatccaagttgttaaatcacaacaagaagtggctgatactaaagcaaaagtattagataaaatcaatgcaattcaaacacaagcaaaagttaaacctgcagctgatacagaagtagaaaacgcatataatacacgtaaacaagaaatccaaaatagcaatgcttcaactacagaagaaaaagaagctgcatatacagaattagatgctaaaaagcaagaagcaagaacaaatcttgatgctgcaaatacaaacagtgatgtaacaacagctaaagacaatggtattgctgcaattaatcaagtgcaagctgccacaactaagaaatcggatgctaaagcggaaatcgctcaaaaagcaagtgaacgtaaaactgcaattgaagcaatgaatgattcgactactgaagaacaacaagctgcaaaagataaagttgatcaagcagtagttactgcaaacgctgatatagataatgctacagcaaatacagatgtagataatgcaaaaactactaatgaagctacaatagctgcaattacgccagatgcaaatgttaaaccagcagcaaaacaagcaattgcagataaagtacaagctcaagaaacagcaattgatgctaataacggttcaacaacagaagaaaaagaagctgctaaacaacaagttcaaactgaaaaaacggctgctgatgcagcaatagatgcagctcattcaaatgtggaagttgaagcggctaaaaatgcagaaattgctaaaattgaagcgattcagccagcaacaacaactaaagataatgcgaaacaagcaattgctacgaaagcgaatgaacgtaaaacagcaatcgctcaaacgcaagatattactgctgaagaaattgcagcggctaatgcggacgtagataatgctgtgacacaagcaaatagcaacattgaagctgctaatagtcaaaatgatgtagaccaagcgaaaacgacaggtgaaactagtattgatcaagtaacaccaacagttaataaaaaagcaactgcacgtaatgaaatcacagcaattttaaataacaaattgcaagagattcaagctacaccagatgcaacagatgaagaaaaacaagcagctgatgcagaagcaaatactgaaaatggtaaagcaaatcaagccatttcagcagcaactactaacgcacaagttgatgaagcgaaagctaatgcagaagcagcaattaatgcggtaacaccaaaagttgttaagaaacaagcggctaaagatgagattgatcaattacaagcaacgcaaacaaatgttatcaataatgatcagaacgctacaaatgaagaaaaagaagcagctattcaacaattagcaacagcagttacagacgcgaaaaataatattacagctgcaactgatgataatggtgtagatacagcgaaagacgctggaaagaattcaattcaaagcacacaaccagcaacagcagttaaatcgaatgcgaaaaatgaagttgatcaagctgtgacaactcaaaatcaagcaattgataatacaactggcgctacaactgaagagaaaaatgcagcaaaagatttagttttaaaagctaaagaaaaagcgtatcaagatatcttaaatgcacaaacaactaatgatgttacgcaaattaaagatcaagcagttgctgatattcaaggtattactgcagatacaacaattaaagatgttgcgaaagatgaattagcaacaaaagcaaacgaacaaaaagcgcttattgcacaaactgcagatgcgactactgaagaaaaagaacaagcaaatcaacaagtagacgcacaattaacacaaggtaatcaaaatattgaaaatgcacagtcaatcgatgatgtaaacactgcaaaagataatgcaattcaagcaattgacccaattcaagcatcaacagatgttaaaacgaatgcaagagcagaattgctaactgaaatgcaaaataaaataactgaaatacttaataataatgagactactaatgaagaaaaaggtaacgatattggaccagttagagcagcatatgaagaaggtttaaataatattaatgcagcaactactacaggtgatgtaactactgctaaagatacagcagtacaaaaagttcaacaacttcatgcaaatcctgttaagaaaccagcaggtaaaaaagaattagatcaagctgcagctgataagaaaacacaaatagaacaaacaccaaatgcatcacaacaagaaattaatgatgcaaaacaagaagttgatactgaattaaatcaagcgaaaacaaatgtcgatcaatcatcaacaaatgaatatgttgataatgcagttaaagaaggaaaagctaaaattaatgcagttaaaacatttagtgagtacaaaaaagatgctttagctaaaattgaagatgcatataatgctaaagtaaacgaagcggataactctaacgcatcgacttcaagtgaaattgctgaagcgaaacaaaaacttgctgaattaaaacaaactgcggatcaaaatgttaatcaagctacttctaaagatgacattgaagttcaaattcataatgacttagataatattaacgattacacaattccaacaggtaaaaaagaatcagctacaacagatttatatgcttatgcagatcagaagaaaaataatatttcagctgacactaatgcaacacaagatgaaaagcaacaagcaattaagcaagttgaccaaaatgttcaaactgcattagaaaacattaataatggtgtggataatggtgacgttgatgatgcattaacacaaggtaaagcagcaattgatactattcaagtagatgctactgttaaacctaaagcgaaccaagctattgaagctaaagcagaagatacgaaagaatcaattgatcatagtgaccagttaactgctgaagaaaaaactgaagcattagcaatgattaaacaaattacagatcaagctaaacaaggtattactgatgcaacaacaactgctgaagttgaaaaagcgaaagctcaaggacttgaggcatttgataacattcaaattgactcaacagaaaaacaaaaagctatcgaagaattagaaactgcactagaccagattgaagcaggtgtaaatgtcgacgctgatgctacaactgaagaaaaagaagcgtttacgaatgctttagaagacattttatcaaaagcaactgaagatatttctgatcaaactacaaatgcagaaatcgctactgtcaaaaatagtgcgcttgaacaacttaaagcacaacgtattaatccagtagttaagaaaaatgctttggaagcaattagagaagtggttaacaagcaaatagaaataattaaaaatgcagatgcagatgcatcggcgaaagaaattgcacgtacagatttaggtagatattttgacagatttgctgataaattagataaaacacaaacaaatacagaggttgctgaattacaaaatgtaacgatacctgcaattgaagcgattgtgcctcagaatgatccagatgctaatgatactaataatggtacagataataatgatgcaacagcaaattcaaatgctaatgcaacaccagaaaacactggacaacctaacgtatctgagacgacagataatggcaaagcagacgcttctccgacaacaccaaataatagtgatgcggcaacaggtgaaacaacagtaacatcagcaactgatgatgcaaaggataaaccgcaagctaataacaattctagtgcagatgcatcaacaaacagtccgacaatggataacgatgtaactagtaaaccagaagtagaatcaactaataacggcacaactgataaacctgtaacagaaacagataatgcaacgccagcagaaagcacaacaaataacaatagtacaactacagcaacaaacgagaatgcaccaacaggatcaacagcaacggctccaacaactgcgagcacagaagcagcatcatctgctgatagtaaagataatgcatctgtaaatgattcaaaacaaaatgctgaagtaaataatagtgctgaatctcaatcaactaatggcaaggttgcacaaccaaaatctgaaaataaagctaaggcagaaaaagatggtagagattcaacaaatcaaagtatggttgaatcaacaactgaaacattgccttcagcagacataacagaaccaaatgtaccttctaatacatcaaaagataaagaagaaagtacgacaaatcaaactgatgcaggacaacttaagtctgaaactaacgttgcatctaacgaagcagataaatcgccaagcaaagctgatactgaagtttcgaataaaccatcaacatctgcatcttctgaagcaaaagataaaatgacttcaactaatgttagccaaaaagatgatacggcaacagcagatactaatgatacgcaaaaatcagttggcccagttgcaaacaataaagctaaagatatgcaaactaatgatacgcaaaaatcagttggttcagctgcaaacaataaagctacgcaaaacgacggtgccaatgcatctccagcaacagtttcaaatggtagtcatagtatgcatcaagatatgcttaatgtaactaagcctgaagaaaacaaagcaaatgcaaaatcagaccaacaaggaaaagttaataagcctaaacaacaagctaaaactttaccagatactggtatgtcacataatgacgatttaccatatgctgaattagctctaggtgcaggtatggcattcttaattagaagattcactaagaaagaccaacaaactgaagaataa

SEQ ID NO: 7579 - DNA, 2058 bp, Staphylococcus aureus
gtggataatggtgacgttgatgatgcattaacacaaggtaaagcagcaattgatgctattcaagtagatgctactgttaaacctaaagcgaaccaagctattgaagttaaagcagaagatacgaaagaatctattgatcaaagtgaccagttaactgctgaagaaaaaactgaagcattagcaatgattaaacaaattacagatcaagctaaacaaggtattactgatgcaacaacaactgctgaagttgaaaaagcgaaagctcaaggacttgaagcatttgataacattcaaatcgactcaacagaaaaacaaaaagctatcgaagaattagaaactgcactagaccagattgaagcaggtgtaaatgtcgacgctgatgctacaactgaagaaaaagaagcgtttacgaatgctttagaagacattttatcaaaagcaactgaagatatttctgatcaaactacaaatgcagaaatcgctactgtcaaaaatagtgcgcttgaacaacttaaagcacaacgtattaatccagtagttaagaaaaatgctttggaagcaattagagaagtggttaacaagcaaatagaaataattaaaaatgcagatgcagatgcatcggcgaaagaaattgcacgtacagatttaggtagatattttgacagatttgctgataaattagataaaacacaaacaaatacagaggttgctgaattacaaaatgtaacgatacctgcaattgaagcgattgtgcctcagaatgatccagatgctaatgatactaataatggtacagataataatgatgcaacagcaaattcaaatgctaatgcaacaccagaaaacactggacaacctaacgtatctgagacgacagataatggcaaagcagacgcttctccgacaacaccaaataatagtgatgcggcaacaggtgaaacaacagtaacatcagcaactgatgatgcaaaggataaaccgcaagctaataacaattctagtgcagatgcatcaacaaacagtccgacaatggataacgatgtaactagtaaaccagaagtagaatcaactaataacggcacaactgataaacctgtaacagaaacagataatgcaacgccagcagaaagcacaacaaataacaatagtacaactacagcaacaaacgagaatgcaccaacaggatcaacaacgacggctccaacaactgcgagcacagaagcagcatcatctgctgatagtaaagataatgcatctgtaaatgattcaaaacaaaatgctgaagtaaataatagtgctgaatctcaatcaactaatggcaaggttgcacaaccaaaatctgaaaataaagctaaggcagaaaaagatggtagagattcaacaaatcaaagtatggttgaatcaacaactgaaacattgccttcagcagacataacagaaccaaatgtaccttctaatacatcaaaagataaagaggaaagtacgtcaaatcaaactgatgcaggacaacttaagtctgaaactaacgttgcatctaacgaagcagataaatcgccaagcaaagctgatactgaagtttcgaataaaccatcaacatctgcatcttctgaagcaaaagaaaaaatgacttcaactaatgttagccaaaaagatgatacggcaacagcagatactaatgatatgcaaacatcagttggctcagttgcaaacaataaagctaaagatatgcaaactaatgatacgcaaacatcagttggcccagttgcaaacaataaagctacgcaaaacgacggtgccaatgcatctccagcaacagtttctaatggtagtcatagtatgcatcaagatatgcttaatgtaactaagactgaagaaaacaaagcaaatgcaaaatcagaccaacaaggaaaagttaataagcctaaacaacaagctaaaactttaccagatactggtatgtcacataatgacgatttaccatatgctgaattagctctaggtgcaggtatggcattcttaattagaagattcactaagaaagaccaacaaactgaagaa

SEQ ID NO: 7580 - DNA, 423 bp, Staphylococcus aureus
gtggctaaaaaagtagataaagttgttaaattacaaattcctgcaggtaaagcgaatccagcaccaccagttggtccagcattaggtcaagcaggtgtgaacatcatgggattctgtaaagagttcaatgcacgtactcaagatcaagcaggtttaattattccggtagaaatcagtgtttatgaagatcgttcatttacatttattacaaaaactccaccggctccagtattacttaaaaaagcagctggtattgaaaaaggttcaggcgaaccaaacaaaactaaagttgctacagtaactaaagatcaagtacgcgaaattgctaacagcaaaatgcaagacttaaacgctgctgacgaagaagcagctatgcgtattatcgaaggtactgcacgtagtatgggtatcgttgtagaataa

SEQ ID NO: 7581 - DNA, 978 bp, Staphylococcus aureus
atgtctgtagataaatatggcaaggtttacttgataggtgcgggaccaggtaatccgaattatttgactaaaaaggctgagcgtttaatacgtgaagcggatgttatactatatgatcgattagtgaatccgttaattttacaatatgcgaatttgactactgaaattatcgatgttggtaaaaagccgtatgcaaaacacattcagcaagaaaaaataaatgaatgtatcgtggaagcagcacgtcgatataacaaggttgtgaggcttaaaggtggcgacccagcaatatttggacgagttcaagaagaagttgacacactaaacaactttaatattgcgtttgaaattgtacctggtgtgacatctgcgagtgctgcagttgctacgatgcaaacaggattaacgatgcgtgctgttgctaagagtgtgacattttctacaggtcactttaaagattcagaagaaaatgaagtagatgtcaacgctttagtaaatggtggtacgttggcgatatatatgggagttaaacgtttagggaaaattatcgcccagatacaacagtacacagatattgattatccgatagcgattgtctttcaagcatcgtgttttaacgagtttgttgttaaggggcgtttaagtaatattgttgggaaactggagcattacgcaattgaggcgaaaccaggtatatgtattataggcgaagtagtgggttatactgaaaatgtctcaacaacttctaatccgactcagcaattttatgtagtaagtggttctagacatgacgcccttatgctctgtgaacatttatatgacgaaggttatggctgtttgctaaacccaaatgatacatcgaatggcacatatcattcgtcgcaatatgattactatgatgcatttattaagcagcaagaaaatgtaacatatatttcaaccgatcgtgcagatgctaatacagtgttatgtcactaa

SEQ ID NO: 7582 - DNA, 315 bp, Staphylococcus aureus
atggaaacaaaagaaaaaattaaagtgacaactatagatgaattaacacccctaattggaaaaaaggttattgtcaaaggcaaagaggtaggattgtttttaactgaaagtggtacaattcacgcgattcacaatatttgtccgcataaacaaggaccattgtcagagggaacagtgagtggtgaatatgtattctgtccacttcatgatcaaaagattgatttaaatactgggattgtacaagaacctgatgaaggttgtgtagatgtttatgaggtagaagttacagacgggaacgtatatatatgtctgtag

SEQ ID NO: 7583 - DNA, 2706 bp, Staphylococcus aureus
atgacaacacagttaaatatcaattcagtcattgaaaatgcgaaacgtgttattacaccattatcaccgatttcgatttttgcagcacgtaacccctgggaaggattagaagcggatacgtttgaagatgtcgcaaaatggttacgtgacgttcgcgatgtggatattttcccaaataaagcattaatagaaagcgctgtggcacgtggtgaattagatgaaagtgtctttaatcaacttgttactgatatgttacttgaacatcactacaatatcccgcaacactacatcaatctttatattgataacattaaaacattaaaagacgtacctgcatcatatatgaatcattcaaatgttgatgttgttgctgatctactattagaaaaatcaaaacgtgatatggctgaatcatatcatcactatgatgtacgtccgatgagtgatgcaataatagatgaacaaggtgagccacttagcgaacaagtgaatcgtcaaatgattaaatggacgaaactttatatcgatcaatttctatcgagttggacaatgccgaagcgtgagcaaagtttttaccatgcatggttgcatttagcgcaacatgaccatagttttactaaagcacagcgccaagtgattaaaggcttacccaatgatcctgaaatgacgatagagtcagtattaacttatttttcaatagatcaggaagactaccaagcttatgttgaaggacatcttttggcgttaccgggttgggcaggtatgttgtattaccgttcacaacagcatcactttgaacaacatttgttaacggattatttggcaattcggttagttgtcgaacaattgctagttggtgatgagtttaagtcagtcactaaagattgtgaaagtagatcggaaaattggtttaagcaaactgttgcatcattgtgttactacagtgatatgcctagcgatgtattactacaacatgacgtcaatgaaattcaaacgtttattcattttgcagcaactatgaataaaaatgtatttaaaaatttatggctaattgcctgggaaatgacatacgaatctcagttaaaacaaaaaattaaagcaggtcatgaaagtgtggcgggcgcattagatgtaaaccaagtaaatgtctcagaaaatgataacgctaatcagccacattcagtattgttaaatgacacacaagcagttgatgaaaataatagcgagctaaatcaggtgggcacatcaacgaaagcgcaaattgcattttgtatagatgttcgttcagaaccatttcgtagacatatcgaagcagcagggccctttgaaacgattggtattgcaggtttctttggattacctattcaaaaagatgccgtagacgaacaattcaaacatgattcattacctgtcatggtaccgccggcatatcgcattaaagaatttgcagaccgctacgatatgaatgtttatcgacaacagcaacagacaatgtcatcgatgttttacacatttaaattgatgaaaaataatgttatgcctagtctgttattgcctgaattaagtgggccatttttaagcttgagtaccattgtcaattcgattatgcctagaaaaagtcgcgcgtctttacaaaaaataaaacaaaaatggttgaaaaagcctgaaacaaagttaacgattgatcgtgagtttgaccgaacatcagacttacctgttggatttactgagcaagagcaaattgatttcgcgttacaagcgttgaaattgatggatttaaccgaagcatttgcgccgttcgttgtgttagcaggtcatgctagtcattctcacaataatccacatcatgcatcacttgaatgtggggcttgtggtggcgcatcaagcggttttaatgctaagttattagcgatgatatgtaatcgtccaaatgtcagacaaggattaaaacaatcaggtgtgtatattccagagacaactgtttttgcggcagcagaacatcatacgtctactgatacgttggcatgggtatatgtgccagacacattatcagctttagctctagatgcatatgaatcattgaatgacgcgatgccgatgatttctgaacaagcgaatcgcgaacgtttggacaaactgccaacgattggtcgtgtgaatcatccagtggaagaagcacagcggtttgcaagtgattggagtgaggtacgtccagaatggggcttggctaaaaatgcatcatttataattggacgacgccaattaacaaaaggcattgatttagaagggcggacatttttacacaattatgattggcgtaaagataaagatggcaaattgttaaataccatcatttctggtccggcgcttgtggcacaatggattaatttacaatattatgcgtcgacagttgcgccgcatttttacggaagtgggaataaagcgacacaaaccgtcacgtcaggtgttggtgtcatgcaaggtaatgcgagtgatctgatgtatggcttatcatggcaatctgttatggctgctgatcggacgatgtatcattcgccaattcgtttacttgtcgttattcaggcacccgactatgttgtagctagactattcgcgaataatgagcatttcgctaggaaggtgtctaatcattggctgcgtttaatgagcgttaatgaggaagggcgttttaaaagttggatttaa

SEQ ID NO: 7584 - DNA, 1119 bp, Staphylococcus aureus
ttgtcaaataaagatatacgtgttgtcgttggtatgtcaggcggtgtagatagttctgtaacagcccacgtcttaaaagaacaaggttatgatgtcattggcatatttatgaaaaactgggatgacactgacgaaaatggcgtatgtactgcaactgaagattacaacgatgttattgaagtgtgtaatcaaattggcattccatattacgctgttaattttgaaaaagaatattgggataaagtctttacgtatttcttagatgaatacaaaaaaggtcgtactccaaatccagacgttatgtgtaataaagaaattaagtttaaagcctttttagatcatgcgatgaatttaggtgcagattatgtagcaacaggacattacgcacgcatacatcgtcatgaagatggtcatgttgaaatgttacgtggtgtagataataataaagatcaaacatacttcttgaatcaattatctcaacaacaactttcaaaagtgatgttcccaattggcgacatcgaaaagagtgaagtgcgtcgaattgctgaagaacaaggacttgttactgctaagaaaaaagattctacaggcatttgttttatcggcgaaaaaaactttaaaacatttttatcacaatatttacctgcacaaccgggtgatatgataacacttgatggtaagaaaatgggtaaacatagtggtttgatgtattacacaataggacaaagacatggattaggtataggtggagatggcgatccttggtttgttgtcggtaaaaacctaaaagataatgttttatatgtagaacaaggattccatcacgatgcattatacagtgattacttaattgcttcagactattcatttgtaaatccagaagataatgacttagatcaaggttttgaatgtacagctaaatttagatatcgccaaaaagatacgaaagtttttgtgaaacgtgaaaacgaccatgcactacgtgttacttttgctgagccagtaagagcaatcacacctggacaagcagttgttttttatcaaggtgatgtgtgtcttggtggtgcaacaattgacgatgtgttcaaaaatgaaggtcaattaaattttgttgtataa

SEQ ID NO: 7585 - DNA, 1935 bp, Staphylococcus aureus
atggtgactgcattgtcagatgtaaacaacacggataattatggtgctgggcaaatacaagtattagaaggtttagaagcagtacgtaaaagaccaggtatgtatataggatcgacttcagagagaggtttgcaccatttagtgtgggaaattgtcgataatagtatcgatgaagcattagctggttatgcaaataaaattgaagttgttattgaaaaagataactggattaaagtaacggataacggacgtggtatcccagttgatattcaagaaaaaatgggacgtccagctgtcgaagttattttaactgttttacatgctggtggtaaattcggcggtggcggatacaaagtatctggtggtttacatggtgttggttcatcagttgtaaacgcattgtcacaagacttagaagtatatgtacacagaaatgagactatatatcatcaagcatataaaaaaggtgtacctcaatttgacttaaaagaagttggcacaactgataagacaggtactgtcattcgttttaaagcagatggagaaatcttcacagagacaactgtatacaactatgaaacattacagcagcgtattagagagcttgctttcttaaacaaaggaattcaaatcacattaagagatgaacgtgatgaagaaaacgttagagaagactcctatcactatgagggcggtattaaatcgtacgttgagttattgaacgaaaataaagaacctattcatgatgagccaatttatattcatcaatctaaagatgatattgaagtagaaattgcgattcaatataactcaggatatgccacaaatcttttaacttacgcaaataacattcatacgtatgaaggtggtacgcatgaagacggattcaaacgtgcattaacgcgtgtcttaaatagttatggtttaagtagcaagattatgaaagaagaaaaagatagactttctggtgaagatacacgtgaaggtatgacagcaattatatctatcaaacatggtgatcctcaattcgaaggtcaaacgaagacaaaattaggtaattctgaagtgcgtcaagttgtagataaattattctcagagcactttgaacgatttttatatgaaaatccacaagtcgcacgtacagtggttgaaaaaggtattatggcggcacgtgcacgtgttgctgcgaaaaaagcgcgtgaagtaacacgtcgtaaatcagcgttagatgtagcaagtcttccaggtaaattagccgattgctctagtaaaagtcctgaagaatgtgagattttcttagtcgaaggggactctgccggggggtctacaaaatctggtcgtgactctagaacgcaggcgattttaccattacgaggtaagatattaaatgttgaaaaagcacgattagatagaattttgaataacaatgaaattcgtcaaatgatcacagcatttggtacaggaatcggtggcgactttgatctagcgaaagcaagatatcacaaaatcgtcattatgactgatgccgatgtggatggagcgcatattagaacattgttattaacattcttctatcgatttatgagaccgttaattgaagcaggctatgtgtatattgcacagccaccgttgtataaactgacacaaggtaaacaaaagtattatgtatacaatgatagggaacttgataaacttaaatctgaattgaatccaacaccaaaatggtctattgcacgatacaaaggtcttggagaaatgaatgcagatcaattatgggaaacaacaatgaaccctgagcaccgcgctcttttacaagtaaaacttgaagatgcgattgaagcggaccaaacatttgaaatgttaatgggtgacgttgtagaaaaccgtagacaatttatagaagataatgcagtttatgcaaacttagacttctaa

SEQ ID NO: 7586 - DNA, 2478 bp, Staphylococcus aureus
atgtcagaccctacactatttgattattcaatgatcaaaggtactgttgaagcgatattgtttcaaaacagtgataatttttatacagtgcttaaagtagatactattgaaacaaatgaagactttgatacaatgccaactgttgtagggtttcttccgaatattgttgaaggcgatgtctacacatttaaagggcaagttgttgatcatccacgttatggtaaacaattaaaagcagagacttttgaaaaagaaatgccacaaacgaaagaagcaattataagttatttatctagtgatttgtttaaaggtgtaggtaaaaagacagctcaaaatattgttaatacattaggtgacaatgcgataaatgatatattagatgaccattcagtgctagaaaaagtttcgggattatctaaaaagaaacagaaacaaattgcagaacaaatttcagcaaatcaagaatctgaaaaaataatgattcgtttacatgatttagggtttggtcctaaactttcaatggcaatttatcagttttatctcggcgatacactgactattttagatcgaaatccatatcaattgatttatgatattaaaggtattggttttaataaagcagatcaacttgctagaaatattggtatcgcttataacgataatgaacgattaaaagctgcgttgctctatacgttagaagaagaatgtattaaacagggacatacatatttgcctatcaatgttgttatagatttaacggttgatgtattaaattatcaagatgaagaggtcatcgaacctgaaaaattagacgaaatgttgcaatacttaaatgaggaaaaacgactaattattgacaatgaacaagttgcaattccaagtttgtattattctgaaatcaaaagtgttcaaaacttattcagaataaagacgcatacaaataaacttacggaaattgaacagtcagatttacaaatgcatattggtgaaatagaagatgcgaatcaagtgaactatgcagcttcacaaaaagaagctttgcaaacggctatcaattctaaggtgatgctattaaccggtggaccgggaacaggaaagacgacagtaattaaaggtattgtagaattatatgctgagattcatggcttatcattagattatgatgattatgtcaatgatgattatccagttgtattagcagcgccaacaggaagagcgtctaagagactacaagagtcaactggattagaagcaatgacgattcatcgtttaataggttggaatcaagacacaaagccagaggatatattagaaaatgaaataaacgcacgactcataatcattgatgagatgtctatggtagatacttggttgtttcaccaatttttaagtgcagttcctttagatgcacaattgatatttgtaggtgatgaggaccaattgccttctgtaggtcctggtcaagtatttaaagatttaattgaatcgaaagctataccacgagttaatctgactgaagtatatcgtcaacaagatggttcaagcattatagaattagcacatcgaatgaaattgggtcagaaaattgatattacacagcgttttcatgatagaagttttattaactgtcaggcaaaccaaataccaacagttgttgagaaggtagttactagtgctgttaataaagggtatactatggctgatattcaagtgcttgcaccaatgtataaaggaaatgccggtattaaacgtttaaatcaagttttacaagatattttaaaccctaaaaagaaagacacacgagaaattgagtttggtgatgtagtctttagaaaaggtgacaaagtattacaacttgttaataggccaaatgataacatattcaatggtgacataggagttattgttggtattttttgggcgaaagaaaatgcccttaataaagatgtacttgttgtggattttgaaggtaatgaaattacatttacgaaacaagatatgatggaattaacacatgcttattgtacatcaatccataaatcacaaggttcagaatttcctattgttatcatgcctattgttaaacagtattttagaatgttacaaagaccgatattatatactggtttaactagagcgaaaacgagtttagttctacttggtgatccagaagcatttgatattggattaaaaacaaatggtcaagcgcgtttaacacaattatgtacattgttgaaaaattattttaattcagaagatgaagaaatgctggaaaacacagcaactaatgatacaggagcttcacaaacgacaatagatgatcaagtagaagcgccaatgtcatcgaatgatagtggagaagttacgtctgattcaacaaaaacagatataaatgtattaacggaagctacaatgtttaaaattgacccaatgattaatatgggagaaatcacgccgtatgactttatagaacgttga

SEQ ID NO: 7587 - DNA, 1461 bp, Staphylococcus aureus
atgtctaataattttaaagatgactttgaaaaaaatcgtcaatcgatagacacaaattcacatcaagaccatacggaagatgttgaaaaagaccaatcagaattagaacatcaggatacaatagagaatacggagcaacagtttccgccaagaaatgcccaaagaagaaaaagacgccgtgatttagcaacgaatcataataaacaagttcacaatgaatcacaaacatctgaagacaatgttcaaaatgaggctggcacaatagatgatcgtcaagtcgaatcatcacacagtactgaaagtcaagaacctagccatcaagacagtacacctcaacatgaagaggaatattataataagaatgcttttgcaatggataaatcacatccagaaccaatcgaagacaatgataaacacgagactattaaagatgcagaaaataacactgagcattcaacagtttctgataagagtatagctgaacaatctcagcaacctaaaccatattttgcaacaggtgctaaccaagcaaatacatcaaaagataaacatgatgatgtaactgttaagcaagacaaagatgaatctaaagatcatcatagtggtaaaaaaggcgcagcaattggtgctggaacagcgggtgttgcaggtgcagctggtgcaatgggtgtttctaaagctaagaaacattcaaatgacgctcaaaacaaaagtaattctgacaagtcgaataactcgactgaggataaagcgtctcaagataagtctaaagatcatcataatggcaaaaaaggtgcagcgatcggtgctggaacagcaggtttggctggaggcgcagcaagtaaaagtgcttctgccgcttcaaaaccacatgcctctaataatgcaagccaaaaccatgatgaacatgacaatcatgacagagataaagaacgtaaaaaaggtggcatggccaaagtattgttaccattaattgcagctgtactaattatcggtgcattagcgatatttggaggcatggcattaaacaatcataataatggtacaaaagaaaataaaatcgcgaatacaaataaaaataatgctgatgaaagtaaagacaaagacacatctaaagacgcttctaaagataaatcaaaatctacagacagtgataaatcaaaagaggatcaagacaaagcgactaaagatgaatctgataatgatcaaaacaacgctaatcaagcgaacaatcaagcacaaaataatcaaaatcaacaacaagctaatcaaaatcaacaacagcaacaacaacgtcaaggtggtggccaaagacatacagtgaatggtcaagaaaacttataccgtatcgcaattcaatactacggttcaggttcaccggaaaatgttgaaaaaattagacgtgccaatggtttaagtggtaacaatattagaaacggtcaacaaatcgttattccataa

SEQ ID NO: 7588 - DNA, 939 bp, Staphylococcus aureus
atgaagcaatttgtaaacttaggtaaatctgatgttgaagtgtttccaatcgcacttgggacgaacgcagtaggtgggcataatttatatccgaacttagatgaagaacaaggaaaagatgttgttcgtcaagccattaatcatggtattaatttattagatacggcatatatttatgggccagaacgatcagaagaattggttggagaagttgttaaggaatatccgcgagagcaaattaaaattgctacgaaagggtctcatgaatttgatgaaaatcaagaagtacatcagaacaatcaaccggaatatttaaaacaacaagttgagaatagtttgaaacgtctacaaactgattatatcgatttatattatattcattttcctgatgacaacactccgaaagatcaagcagttgcagcattacaagagcttaaggaacaagggaagattaaagccattggtgtatcaaatttcacattagatcaacttaaagaagcaaataaagatggttacgttgatgttgtacagttagaatataatttattgcaccgcgaaaatgaggcagtattgcaatattgtgttgatcacctaatcacatttattccttatttcccattagcatccggtattttagctggaaaatatgatgagaacactaaatttagtgaccatcgtactacacgtcgtgattttatacctggtgtttttgaagagaatgtgcgtcgcgtaaaagctttggaaagcctagctgcagcacatcaaacttcaattgcgaacattgtattagcattttatttaacgagaccagctatcgatgtgattattcctggtgcaaaacgtgcagaacaagtcattgaaaatattaaagctgcagatatcgttttatcagatgatgagattcaatatatcgatgaattgtttccaattgaagactaa

SEQ ID NO: 7589 - DNA, 3624 bp, Staphylococcus aureus
ttgattgatgtaaataatttccattatatgaaaataggattggcttcacctgaaaaaatccgttcttggtcttttggtgaagttaaaaaacctgaaacaatcaactaccgtacattaaaacctgaaaaagatggtctattctgtgaaagaattttcggacctacaaaagactgggaatgtagttgtggtaaatacaaacgtgttcgctacaaaggcatggtctgtgacagatgtggagttgaagtaactaaatctaaagtacgtcgtgaaagaatgggtcacattgaacttgctgctccagtttctcacatttggtatttcaaaggtataccaagtcgtatgggattattacttgacatgtcaccaagagcattagaagaggttatttactttgcttcttatgttgttgtagatccaggtccaactggtttagaaaagaaaactttattatctgaagctgaattcagagattattatgataaatacccaggtcaattcgttgcaaaaatgggtgcagaaggtattaaagatttacttgaagagattgatcttgacgaagaacttaaattgttacgcgatgagttggaatcagctactggtcaaagacttactcgtgcaattaaacgtttagaagttgttgaatcattccgtaattcaggtaacaaaccttcatggatgattttagatgtacttccaatcatcccaccagaaattcgtccaatggttcaattagatggtggacgatttgcaacaagtgacttaaacgacttataccgtcgtgtaattaatcgaaataatcgtttgaaacgtttattagatttaggtgcacctggtatcatcgttcaaaacgaaaaacgtatgttacaagaagccgttgacgctttaattgataatggtcgtcgtggtcgtccagttactggcccaggtaaccgtccattaaaatctttatctcatatgttaaaaggtaaacaaggtcgtttccgtcaaaacttacttggtaaacgtgtcgactattcaggacgttcagttattgcagtaggtccaagcttgaaaatgtaccaatgtggtttaccaaaagaaatggcacttgaactatttaaaccattcgtaatgaaagaattagttcaacgtgaaattgcaactaacattaaaaatgcgaagagtaaaatcgaacgtatggatgatgaagtttgggacgtattggaagaagtaattagagaacatcctgtattacttaaccgtgcaccaacacttcatagacttggtattcaagcatttgaaccaactttagttgaaggtcgtgcgattcgtctacatccacttgtaacaacagcttataatgctgactttgacggtgaccaaatggcggttcacgttcctttatcaaaagaggcacaagctgaagcaagaatgttgatgttagcagcacaaaacatcttgaaccctaaagatggtaaacctgtagttacaccatcacaagatatggtacttggtaactattaccttactttagaaagaaaagatgcagtaaatacaggcgcaatctttaataatacaaatgaagtattaaaagcatatgcaaatggctttgtacatttacacactagaattggtgtacatgcaagttcgttcaataatccaacatttactgaagaacaaaacaaaaagattcttgctacgtcagtaggtaaaattatattcaatgaaatcattccagattcatttgcttatattaatgaacctacgcaagaaaacttagaaagaaagacaccaaacagatatttcatcgatcctacaactttaggtgaaggtggattaaaagaatactttgaaaatgaagaattaattgaacctttcaacaaaaaattcttaggtaatattattgcagaagtattcaacagatttagcatcactgatacatcaatgatgttagaccgtatgaaagacttaggattcaaattctcatctaaagctggtattacagtaggtgttgctgatatcgtagtattacctgataagcaacaaatacttgatgagcatgaaaaattagtcgacagaattacaaaacaattcaaccgtggtttaatcactgaagaagaaagatataatgcagttgttgaaatttggacagatgcaaaagatcaaattcaaggtgaattgatgcaatcacttgataaaactaacccaatcttcatgatgagtgattcaggtgcccgtggtaacgcatctaactttacacagttagcaggtatgcgtggattgatggccgcaccatctggtaagattatcgaattaccaatcacatcttcattccgtgaaggtttaacagtacttgaatacttcatctcaactcacggtgcacgtaaaggtcttgccgatacagcacttaaaacagctgactcaggatatcttactcgtcgtcttgttgacgtggcacaagatgttattgttcgtgaagaagactgtggtactgatagaggtttattagtttctgatattaaagaaggtacagaaatgattgaaccatttatcgaacgtattgaaggtcgttattctaaagaaacaattcgtcatcctgaaactgatgaaataatcattcgtcctgatgaattaattacacctgaaattgctaagaaaattacagatgctggtattgaacaaatgtatattcgctcagcatttacttgtaacgcacgacatggtgtttgtgaaaaatgttacggtaaaaaccttgctactggtgaaaaagttgaagttggtgaagcagttggtacaattgcagcccaatctatcggtgaaccaggtacacagcttacaatgcgtacattccatacaggtggggtagcaggtagcgatatcacacaaggtcttcctcgtattcaagagattttcgaagcacgtaaccctaaaggtcaagcggtaattacggaaatcgaaggtgtcgtagaagatattaaattagcaaaagatagacaacaagaaattgttgttaaaggtgctaatgaaacaagatcataccttgcttcaggtacttcaagaattattgtagaaatcggtcaaccagttcaacgtggtgaagtattaactgaaggttctattgaacctaagaattacttatctgttgctggattaaacgcgactgaaagctacttattaaaagaagtacaaaaagtttaccgtatgcaaggtgtagaaatcgacgataaacacgttgaggttatggttcgacaaatgttacgtaaagttagaattatcgaagcaggtgatacgaagttattaccaggttcattagttgatattcataacttcacagatgcaaatagagaagcatttaaacaccgtaagcgtcctgcaacagctaaaccagtattacttggtattactaaagcatcacttgaaacagaaagtttcttatctgcagcatcattccaagaaacaacaagagttcttacagatgcagcaattaaaggtaagcgtgatgacttattaggtcttaaagaaaacgtaattattggtaagttaattccagctggtactggtatgagacgttatagcgacgtaaaatacgaaaaaacagctaaaccagttgcagaagttgaatctcaaactgaagtaacggaataa

SEQ ID NO: 7590 - DNA, 693 bp, Staphylococcus aureus
atgaattattcgccaaaacaaggtgtaagaagtcatggtttaccgcacgacccatttaaaagtagtacagtacctcgtccaataggttggatttctactgtatcgaaagatgggaaagataatttagcgccttatagtcagtatcaaaacttaacttgggatccgcctatggttatgttcgcagcaaatcaatctgttcttggtgatcatgagcgtaaagatacagtaaaaaatgcagaagagacagggtggtttgtatggaacatggccacgtatgatttaagagaagctgttaatttatcgtcgaaggcactaccacctgaagaggatgaatttgaatatgcaggtgtgacgaaagaagcatgtatagaagcaccaggttatcgagtcaaagaatcgccagtacattttgaatgtgagtacgttcaaacgattcgtattccgacaggagacccagtatctaccgtagatattgttataggaagagttgcccaagttcatattgacgataaggttattcttgataatggtaaattggacattaagtcgattaaacctattgccagattaggatattacgattacacagtagtgaatgagatatttgaaatgaaagcacctgcagcttctaaagaagagttagcaggtttagaaggaagaaatttcgataatcaatcagatgaaaagagataa

SEQ ID NO: 7591 - DNA, 1578 bp, Staphylococcus aureus
ataacgacaccaacactaaaaaatccattaactggagaaattattagtaaaggtgaatcgaaagaagagatcacaaaagatccgattaatgaattaacagaatacggacctgaaacaatagcgccaggtcatcgagacgaatttgatccgaagttaccaacaggagagaaagaagaagttccaggtaaaccaggaattaagaatccagaaacaggagacgtagttagaccgccggtcgatagcgtaacaaaatatggacctgtaaaaggagactcgattgtagaaaaagaagaaattccattcaagaaagaacgtaaatttaatcctgatttagcaccagggacagaaaaagtaacaagagaaggacaaaaaggtgagaagacaataacgacgccaacactaaaaaatccattaactggagaaattattagtaaaggtgaatcgaaagaagaaatcacaaaagatccgattaatgaattaacagaatacggaccagaaacgataacaccaggtcatcgagacgaatttgatccgaagttaccaacaggagagaaagaggaagttccaggtaaaccaggaattaagaatccagaaacaggagatgtagttagaccaccggtcgatagcgtaacaaaatatggacctgtaaaaggagactcgattgtagaaaaagaagaaattccattcgagaaagaacgtaaatttaatcctgatttagcaccagggacagaaaaagtaacaagagaaggacaaaaaggtgagaagacaataacgacgccaacactaaaaaatccattaactggagaaattattagtaaaggtgaatcgaaagaagaaatcacaaaagatccagttaatgaattaacagaattcggtggcgagaaaataccgcaaggtcataaagatatctttgatccaaacttaccaacagatcaaacggaaaaagtaccaggtaaaccaggaatcaagaatccagacacaggaaaagtgatcgaagagccagtggatgatgtgattaaacacggaccaaaaacgggtacaccagaaacaaaaacagtagagataccgtttgaaacaaaacgtgagtttaatccaaaattacaacctggtgaagagcgagtgaaacaagaaggacaaccaggaagtaagacaatcacaacaccaatcacagtgaacccattaacaggtgaaaaagttggcgagggtcaaccaacagaagagatcacaaaacaaccagtagataagattgtagagttcggtggagagaaaccaaaagatccaaaaggacctgaaaacccagagaagccgagcagaccaactcatccaagtggcccagtaaatcctaacaatccaggattatcgaaagacagagcaaaaccaaatggcccagttcattcaatggataaaaatgataaagttaaaaaatctaaaattgctaaagaatcagtagctaatcaagagaaaaaacgagcagaattaccaaaaacaggtttagaaagcacgcaaaaaggtttgatctttagtagtataattggaattgctggattaatgttattggctcgtagaagaaagaattaa

SEQ ID NO: 7592 - DNA, 570 bp, Staphylococcus aureus
atgtcattaattaacaaagaaatcttaccatttacagcgcaagctttcgatccaaaaaaagatcaatttaaagaagttacacaagaagatttaaaaggttcttggagcgtagtatgcttctatcctgctgacttctcattcgtttgtccaactgaattagaagacttacaaaaccaatatgaagaattacaaaaattaggcgtaaatgtattctcagtatcaactgatactcacttcgtacacaaagcatggcatgaccattcagatgcaattagcaaaatcacttacactatgattggtgacccatcacaaacaatcactcgtaattttgatgtattagatgaagctactggtttagctcaacgtggtacattcattatcgacccagacggtgttgtacaagcatctgaaattaacgctgacggaattggccgtgacgctagtacattagctcacaaaatcaaagcagctcaatatgttcgtaaaaaccctggcgaagtatgcccagctaaatgggaagaaggcgctaaaacattgcaacctggtttagatttagtaggtaaaatctaa

SEQ ID NO: 7593 - DNA, 1554 bp, Staphylococcus aureus
atgaaatatatgattggtgtcgacattggaacgacgagtaccaagtcagtcttatatgatgaaaatggagcttttatcatgaaacatcaaatcggctatgatttacacacaccaaacgttgatgtctcagaagaaaacccagatgaattatttgatgcggtattaatgacaattaaatacataatgagggaatcgaaagttaatcaagatgatattaaatttgtgtcatttagtgcgcaaatgcatagcttgattgcgatggatcagcaacatcaaagattaacaaataatattacttgggcagataaccgcgctgcaaaatatgcaacagtaataaatgaagtgcatgatggcaatgcgatttatcagcgaacaggtacgcctattcatcctatgtcgcctttagtgaaaattttttggatgaaacatgaatggcaagatgtatttcaacgtactgctaagtttgcagatattaaaacatacattttctatcatttatttgatacatatatcattgattattcaatggcttccgcaacagggatgtttaatttagaaacattagattgggatgttggggcattagaattgcttggtatttccaaggaaatgttcccggaattagtgccaacaacgtacgtaatgaaaggcatgaaagaacgttatgcaacattaatggggcttaatgaagatacaccgtttgttattggtgcgagtgatggggtcctttctaatttgggtgtcaatagtgttggtaaaggagaagttgctgtcacaatcggtacatctggcgcgattcgtactgtgatagataaaccacgtactgattacaaaggtagaatattttgttatgtcttaacagaggaccactacgtcatcggaggtcctgtaaataatggtggtgtcgtattgagatggttgcgcgacgagttgctagcgagtgaagtcgaaactgcgaaacgtctcggtgttgatccttatgatgtcttaactcaaattgcaaagcgtgttaaaccaggtgcagatggtttaatattccatccctatttagctggagaacgtgcgccgctttggaacgcaaatgcaagaggttcattcttcggtttaactttatctcataaaaaagaacatatgattcgcgctgcattagaaggtgttctttacaatttgtataccgtctaccttgcactcattgaagtaatgaatgaaacgcctaatatgataaaagcaacaggtggttttgcgaaaagtgaagtatggcgtcaaatgatgtcagatatatttgacacagagttagtggttcctgaaagttatgaaagttcatgcttaggtgcctgcgtgcttggacttaaagctgtaggtgacattgaagatttttcaatcgtttcatcgatggtcggtgctacaaataatcatacgccgtttgaagaaaatgtcgctgtttaccaagagctcgtatccatttttatcaatttaagtcgttctttaacagagaattatgaacaaattgcagattttcaacgccaacatatggctgaaaataaaacacaataa

SEQ ID NO: 7594 - DNA, 2886 bp, Staphylococcus aureus
gtgaaaagcaatcttagatacggcataagaaaacacaaattgggagcggcctcagtattcttaggaacaatgatcgttgttggaatgggacaagaaaaagaagctgcagcatcggaacaaaacaatactacagtagaggaaagtgggagttcagctactgaaagtaaagcaagcgaaacacaaacaactacaaataacgttaatacaatagatgaaacacaatcatacagcgcgacatcaactgagcaaccatcaaaatcaactcaagtaacaacagaagaagcaccaacaactgtgcaagcaccaaaagtagaaaccgaaatgaaatcacaagaagatttaccatcagaaaaagttgctgataaggaaactacaggaactcaagttgacatagctcaaccaagtaacgtctcagaaattaaaccaagaatgaaaagatcagctgacgttacagcagtttcagagaaagaagtagcggaagaagctaaagcgacaggtacagatgtaacaaataaagtggaagttactgaaagctctttagaaggacataataaagattcgaatattgttaatccgcataatgctcaaagagtaactttaaaatacaaatggaaatttggagaaggaattaaggcaggagattattttgatttcacattaagtgataatgttgaaacacatggtatatcaacactgcgtaaagttccggagataaaaagttcaacagaagataaagttatggcaaatggtcaagttataaatgaacgtacaattcgctatacatttactgattatataaataacaaaaaagatttaactgctgaattaaacttaaacctattcattgacccaacaacagtgacaaagcaagggagtcaaaaagttgaagtaacactaggtcaaaataaagtctcaaaagaatttgatatcaaatatttagacggcgttaaagatagaatgggtgttactgttaatggtcgtattgatactttgaataaagaagagggtaaatttagccattttgcatatgtgaagcctaacaaccagtcgttaacttctgtcacagtaactggtcaagtaacatctggatataaacaaagtgctaataatccaacagtcaaagtatataaacacattggttcagatgaattagctgaaagtgtttatgcaaagcttgatgataccagtaaatttgaagatgtgactgaaaaagtaaatctatcttacacaagtaatggtgggtacacattgaaccttggcgatttagataattcgaaagactatgtaattaaatatgaaggtgaatatgatcaaaatgctaaggatctaaatttccgaacacatctttcaggatatcataaatactacccatactatccttattacccgtattatccagttcaattaacttggaacaacggtgttgcattttactctaataatgctaaaggcgatggtaaagataaaccaaatgatcctatcattgagaagagtgaaccaattgatttagacattaaatcagagccaccagtggagaagcatgaattgactggtacaatcgaagaaagtaacgattctaagccaattgattttgaatatcatacagctgttgaaggtgcagaaggtcatgcagaaggtattattgaaactgaagaagattctattcatgtggattttgaagaatctacacatgaaaattcaaaacatcacgctgatgttgttgaatatgaagaggatacaaacccaggtggtggccaagtaacaactgagtctaacttagttgaatttgacgaagagtctacaaaaggtattgtaactggcgcagtgagcgaccatacaacagttgaagatacgaaagaatatacaactgaaagtaatctgattgaattagtggatgaattacctgaagaacatggtcaagcacaagggccaatcgaggaaattactgaaaacaatcatcatatttctcattctggtttaggaactgaaaatggtcacggtaattatggcgtgattgatgaaatcgaagaaaatagccacgttgatattaagagtgaattaggttatgaaggtggccaaaatagcggtaatcagtcattcgaggaagacacagaagaagataaacctaaatatgaacaaggtggtaatatcgtagatatcgatttcgacagtgtacctcaaattcatggtcaaaataatggtaaccagtcattcgaggaagacacagaagaagacaagcctaagtatgaacaaggtggtaacatcattgatatcgacttcgacagtgtgccacaaattcatggattcaataagcataatgaaattattgaagaagatacaaacaaagataaacctaattatcaatttggtggacacaacagtgttgattttgaagaagatacacttccaaaagtaagtggtcaaaatgaaggtcaacaaacgattgaagaagatacaacgccgccaacaccgccaacaccagaggtaccaagtgagccggaaacaccaacaccaccaacaccagaagtaccgagtgagccaggcgaaccaacgccaccaaaaccggaagtaccaagtgagccggaaacaccagtaccaccaacaccagaggtaccatctgaacctggtaaaccagtaccacctgctaaagaagaacctaaaaaaccttctaaaccagtggaacaaggtaaggtagtaacacctgttattgaaatcaatgaaaaggttaaagcagtggcaccaactaaacaaaaacaatctaagaaatctgaactacctgaaacaggtggagaagaatcaacaaacaaaggtatgttgttcggcggattattcagcattctaggtttagtattattacgcagaaataaaaagaataacaaagcataa

SEQ ID NO: 7595 - DNA, 948 bp, Staphylococcus aureus
atggcagaacaacaaacaattatggaacgcttgtttcatacattagatgaaaaagctaaaacattaaataatgaaaatggccaaagttttattgaaaatcttgggctagcaatggaacaagtatataccaatgaaagaggattgttagaacaatcgacgttacaagatcgacgtaaagcattccaatttgcatatttaagtttaatgcaggaagaaaagatacaagcaaatcatcaaattacaccagattcaattggattgatactaggatttttagttgagcgttttatgaacaaccaagaagaattacatattgttgatattgcaagtggtgccggtcatttaagtgctactgtaaaagaagtgttacctgaaattgcggttatgcatcatttaattgaagttgatccagttttatcacgtgttagtgtacatttagcaaacttcttagaaattcctttcgatgtgtatcctcaagatgccatcatgccactaccattagaagaagcagatatcgttattggtgattttccagtaggctattatccaattgatgaaagaagtaaggagtttaagctaggttttgaagaaggacatagttattcacattatttattaatagaacaagcaataaatgcattaaaagatgctggatatgcctttctagtggtaccaagtaatatttttacaggtgaacatgtaaaacagcttgaaaaatatattgcaacagagacagagatgcaagcatttttaaatttaccaccaactttatttaaaaatgaaaaagcgcgaaaatctatattaattttacaaaagaaaaaatcgggtgaaacaaagccagttgaagtattattggcaaatattcctgatttcaaaaatccttcacaatttcaaggatttatgacagagttaaatcagtggatggacacaaatcgtcctaaaaaataa

SEQ ID NO: 7596 - DNA, 1314 bp, Staphylococcus aureus
atgacacactatcattttgtcggaattaaaggttctggcatgagttcattagcacaaatcatgcatgatttaggacatgaagttcaaggatcggatattgagaactacgtatttacagaagttgctcttagaaataaggggataaaaatattaccatttgatgctaataacataaaagaagatatggtagttatacaaggtaatgcattcgcgagtagccatgaagaaatagtacgtgcacatcaattgaaattagatgttgtaagttataatgattttttaggacagattattgatcaatatacttcagtagctgtaactggtgcacatggtaaaacttctacaacaggtttattatcacatgttatgaatggtgataaaaagacttcatttttaattggtgatggcacaggtatgggattgcctgaaagtgattatttcgcttttgaggcatgtgaatatagacgtcactttttaagttataaacctgattacgcaattatgacaaatattgatttcgatcatcctgattattttaaagatattaatgatgtttttgatgcattccaagaaatggcacataatgttaaaaaaggtattattgcttggggtgatgatgaacatctacgtaaaattgaagcagatgttccaatttattattatggatttaaagattcggatgacatttatgctcaaaatattcaaattacggataaaggtactgcttttgatgtgtatgtggatggtgagttttatgatcacttcctgtctccacaatatggtgaccatacagttttaaatgcattagctgtaattgcgattagttatttagagaagctagatgttacaaatattaaagaagcattagaaacgtttggtggtgttaaacgtcgtttcaatgaaactacaattgcaaatcaagttattgtagatgattatgcacaccatccaagagaaattagtgctacaattgaaacagcacgaaagaaatatccacataaagaagttgttgcagtatttcaaccacacactttctctagaacacaagcatttttaaatgaatttgcagaaagtttaagtaaagcagatcgtgtattcttatgtgaaatttttggatcaattagagaaaatactggcgcattaacgatacaagatttaattgataaaattgaaggtgcatcgttaattaatgaagattctattaatgtattagaacaatttgataatgctgttgttttatttatgggtgcaggtgatattcaaaaattacaaaatgcatatttagataaattaggcatgaaaaatgcgttttaa

SEQ ID NO: 7597 - DNA, 1704 bp, Staphylococcus aureus
atgaagcaatccaaagtttttataccaacgatgcgtgatgtgccatcagaagcagaagcacaaagtcatcgtttattattgaaatcgggtttgataaaacaaagtacaagtgggatttatagttatttaccgctagcaacacgtgtgttaaataatattactgcaattgtgcgacaagaaatggaacgtatcgattctgttgaaattttaatgccagcgttacaacaagctgaattatgggaagaatcaggacgttggggtgcatatggcccagaattaatgcgtttacaagatagacatggaagacaatttgcattaggtccaacacatgaagaattagttacatcaatagtaagaaatgaattgaaatcatacaaacaattaccgatgacattattccaaattcaatctaaattccgtgatgaaaagagaccacgttttggtttacttcgtgggcgtgaatttattatgaaagatgcgtattcattccatgctgacgaggcatcattagatcaaacgtatcaagatatgtatcaagcgtatagccgtatttttgagagagttggcattaatgctagaccagttgtagcagattcaggtgctataggcggtagccatacacatgaatttatggcattaagtgctatcggtgaggatacaatcgtttacagtaaagaaagtgactatgctgctaatatcgaaaaagcagaagtcgtttacgaaccaaatcataagcattctactgtgcaacctttagaaaaaattgaaacaccaaatgttaagactgcacaagaattggcagacttcttaggtagaccagtagatgaaatcgttaaaacgatgattttcaaagttgatggcgaatatattatggttttagtgcgtggccatcatgaaattaatgacattaaattaaaatcttatttcggcacagataatattgaattagcaacacaagacgaaattgttaatttagttggtgcaaatccgggttcactaggtcctgttattgataaagaaatcaaaatttatgcagataattttgtgcaagatttaaataatttagttgtcggtgctaacgaagatggctatcacttaattaatgtaaatgtaggtagagacttcaacgttgatgaatatggcgatttccgttttattttagaaggcgaaaagttaagtgatggttcaggcgttgcacattttgctgaaggtattgaagttggtcaagtattcaaattgggtactaagtattcagaatcaatgaatgctacattcttagataaccaaggaaaagctcaacctttaattatgggctgttacggtattggaatttctagaacgctaagtgcgattgttgaacaaaatcacgatgataatggaattgtttggcctaaatcagttactccatttgatttacatttaatttctattaatcctaagaaagatgatcaacgagagctagcagatgcactatatgctgaatttaatactaaatttgatgtgttgtacgatgatcgtcaggaacgtgcaggtgtcaaatttaatgatgccgatttaattggtttaccactgcgaattgttgttggtaaacgtgcatcggaaggtattgtagaagttaaagaacgtttaacaggtgatagcgaagaagttcacattgatgacttaatgactgtcattacaaataaatatgataacttaaaataa

SEQ ID NO: 7598 - DNA, 774 bp, Staphylococcus aureus
atgaaaacacataaaattttctggttaaacttagcagcaattattattatttcaattgtagtcagtggcggtatgtttttggcaatgaagtgggaacaaattcatttgaaagatggtcttaaaaaagtactaagtacgtatcctattaaaaacttagaaacgctttatgaaattgatggtcacgataatccccattatgaaaataatgatcaagacacatggtatatagaatcctcttattcagttgttggatcagatgagcttttaaaagaagaccgtatgttgttaaaggtagataagaacacacataaaataactggtgaatatgacacaactacaaacgatagaaaagatgctactgactcgacatacaaaagttatccagtaaaagtagttaataataaaatcgttttcacaaaagacgtaaaagatcccgcgctgaaacaaaaaatcgaaaacaatcaatttttgattcaaagtggtgatttaacaagcattttaaatagcaatgatttgaaagtcacacatgatcctaccactgattattataatttatctggtaagttgtcgaatgataatccaaacgttaaacaattaaaacgtagatataatattcccagtaatgcatcaacaaaggtggaattaaagggaatgagtgatttaaaaggcaataatcatcaagatcagaaactttatttttatttttcaagtcctggaaaaaaccaaattatatacaaagaaagccttacttataataaattaagtgaacattaa

SEQ ID NO: 7599 - DNA, 471 bp, Staphylococcus aureus
atgcctcgtaaaggatcagtacctaaaagagacgtattaccagatccaattcataactctaagttagtaactaaattaattaacaaaattatgttagatggtaaacgtggaacagcacaaagaattctttattcagcattcgacctagttgaacaacgcagtggtcgtgatgcattagaagtattcgaagaagcaatcaacaacattatgccagtattagaagttaaagctcgtcgtgtaggtggttctaactatcaagtaccagtagaagttcgtccagagcgtcgtactactttaggtttacgttggttagttaactatgcacgtcttcgtggtgaaaaaacgatggaagatcgtttagctaacgaaattttagatgcagcaaataatacaggtggtgccgttaagaaacgtgaggacactcacaaaatggctgaagcaaacaaagcatttgctcactaccgttggtaa

SEQ ID NO: 7600 - DNA, 1509 bp, Staphylococcus aureus
atggccataaaagctgaagaaatcagtgcattacttcgctcacaaattgaaaattatgagtcagaaatgtccgtaactgatgtaggtactgtattacaaattggtgatggtattgcattaattcacggattaaatgacgttatggctggtgagctagtagaattccataacggcgtacttggtttagcccaaaaccttgaagagtcaaacgtgggtgtggttattttaggaccatatacaggtattactgaaggtgacgaagttaaacgtactggtcgtatcatggaagtaccagtaggtgaagaactaatcggaagagttgttaatccattaggacaacctattgatggacaaggaccgattaacacaactaaaacacgtccagtagagaaaaaagctactggtgtaatggatcgtaaatcagtagatgagccattacaaacaggtatcaaagcaattgatgctttagtaccaattggtagaggtcaacgtgagttaatcattggtgaccgtcaaacaggtaaaacaacaattgcaattgacacaattttgaaccaaaaagatcaaggtacgatttgtatctatgttgctattggtcaaaaagattcaacagtaagagcaaatgttgaaaagttaagacaagcaggcgctttagactacactattgttgtagcagcatcagcttctgaaccttctccattattatatattgcaccatattcaggtgtaacaatgggtgaagaattcatgtttaacggtaaacatgttttaatcgtttatgatgatttaactaaacaagcagcagcttatcgtgagttatcattattattacgtagacctccaggtcgtgaagcatacccaggtgacgtattctacttacatagtagattattagaaagagcagcaaaattaaacgatgacttaggtggcggttcaattactgcattaccaattatcgaaacacaagctggtgatatttcagcttatgtaccaacaaacgttatttcaattacagatggacaaatcttcttacaatctgatttattcttctcaggtgtaagaccagcgattaatgccggacaatctgtatctcgtgttggtggatctgcacaaattaaagcaatgaagaaagttgctggtacgttacgtcttgacttagcgtcatacagagaacttgaatcatttgcacaattcggttcagaccttgatgaatttactgcaagtaaattagaacgtggtaaacgtaccgttgaagtcttaaaacaagatcaaaacaaaccattaccagtcgaacaccaagtgttgattatttatgcattaacaaaaggatatttagatgatattccagttgtagatatcacacgttttgaagacgagttaaaccactgggcagaatcaaatgctactgaactgttaaatgaaatcagagaaactggtggcttaccagatgctgagaagtttgacacagcaattaacgaattcaaaaaaagctttagcaaatctgaataa

SEQ ID NO: 7601 - DNA, 540 bp, Staphylococcus aureus
atggtaaaagtagctaacaagtatgctaaagcattatttgacgtgtcattagatacaaataatttagagactattaatgaagaattaacagttataaatgaagcagtaaaagataaaattgagcaattgaaaatggttgacagtaatccaactcaaacagcagaacaacgtcgtgagttgattaatggtgtatttactgacattaatccatacattaaaaatatgatgtacgtgttagcagataatagacatatctcattaatagctgacgtattcaaggcgttccaaagcttatataacggacactacaatcaagattttgcaacaattgagtcaacatatgaattgagtcaagaagagttagataagattgtcaaactagtaactcaacaaacgaagttatctaaagttattgtagatacaaaaattaatccagatttaattggtggatttagagttaaagtcggcacaactgtattagatggtagtgttagaaatgatcttgtccaattacaaagaaaatttagaagagttaattaa

SEQ ID NO: 7602 - DNA, 1458 bp, Staphylococcus aureus
atgagcattcgctacgaatcggttgagaatttattaactttaataaaagacaaaaaaatcaaaccatctgatgttgttaaagatatatatgatgcaattgaagagactgatccaacaattaagtcttttctagcgctggataaagaaaatgcaatcaaaaaagcgcaagaattggatgaattacaagcaaaagatcaaatggatggcaaattatttggtattccaatgggtataaaagataacattattacaaacggattagaaacaacatgtgcaagtaaaatgttagaaggttttgtgccaatttacgaatctactgtaatggaaaaactacataaagagaatgccgttttaatcggtaaattaaatatggatgagtttgcaatgggtggttcaacagaaacatcttatttcaaaaaaacagttaacccatttgaccataaagcagtaccaggtggttcatcaggtggatctgcagcagcagttgcagctggcttagtaccacttagcttaggttcagacacaggtggttcaattagacaaccggctgcatattgtggcgttgtcggtatgaaaccaacatacggtcgtgtatctcgatttggattagttgcttttgcatcttcattagaccaaattggtccattgactcgaaatgtaaaagataatgcaatcgtattagaagctatttctggtgcagatgttaatgactctacaagtgcaccagttgatgatgtagactttacatctgaaattggtaaagatattaaaggattaaaagttgcattacctaaagaatacttaggtgaaggtgtagctgatgacgtaaaagaagcagttcaaaacgctgtagaaactttaaaatctttaggtgctgtcgttgaggaagtatcattgccaaatactaaatttggtattccatcatattacgtgattgcatcatcagaagcttcgtcaaacctttctcgttttgacggaattcgttatggttatcattctaaagaagctcattcattagaagaattatataaaatgtcaagatctgaaggtttcggtaaagaagtaaaacgtcgtattttcttaggtacatttgcattaagttcaggttactacgatgcttactataaaaaatctcaaaaagttagaacattgattaaaaatgactttgataaagtattcgaaaattatgatgtagtagttggtccaacagcgcctacaactgcgtttaatttaggtgaagaaattgatgatccattaacaatgtatgccaatgatttattaacaacaccagtaaacttagctggattacctggtatttctgttccttgtggacaatcaaatggccgaccaatcggtttacagttcattggtaaaccattcgatgaaaaaacgttatatcgtgtcgcttatcaatatgaaacacaatacaatttacatgacgtttatgaaaaattataa

SEQ ID NO: 7603 - DNA, 1428 bp, Staphylococcus aureus
atgcattttgaaacagttataggacttgaagttcacgtagagttaaaaacggactcaaaaatgttttctccatcaccagcgcattttggagcagaacctaactcaaatacaaatgttatcgacttagcatatccaggtgtcttaccagttgttaataagcgtgcagtagactgggcaatgcgtgctgcaatggcactaaatatggaaatcgcaacagaatctaagtttgaccgtaagaactatttctatccagataatccaaaagcatatcaaatttctcaatttgatcaaccaattggtgaaaatggatatatcgatatcgaagtcgacggtgaaacaaaacgaatcggtattactcgtcttcacatggaagaagatgctggtaagtcaacacataaaggtgagtattcattagttgacttgaaccgtcaaggtacaccgctaattgaaatcgtatctgaaccagatattcgttcacctaaagaagcatatgcatatttagaaaaattacgttcaattattcaatacactggtgtatcagacgttaagatggaagagggatctttacgttgtgatgctaacatctctttgcgtccatatggtcaagaaaaatttggtactaaagccgaattgaaaaacttaaactcatttaactatgtacgtaaaggtttagaatatgaagaaaaacgccaagaagaagaattgttaaatggtggagaaatcggacaagaaacacgtcgatttgatgaatctacaggtaaaacaattttaatgcgtgttaaagaaggttctgatgattaccgttacttcccagagcctgacattgtacctttatatattgatgatgcttggaaagagcgtgttcgtcagacaattcctgaattaccagatgagcgtaaggctaagtatgtaaatgaattaggtttacctgcatacgatgcacacgtattaacattgactaaagaaatgtcagatttctttgaatcaacaattgaacacggtgcagatgttaaattaacatctaactggttaatgggtggcgtaaacgaatatttaaataaaaatcaagtagaattattagatactaaattaacaccagaaaatttagcaggtatgattaaacttatcgaagacggaacaatgagcagtaaaattgcgaagaaagtcttcccagagttagcagctaaaggtggtaatgctaaacagattatggaagataatggcttagttcaaatttctgatgaagcaacacttctaaaatttgtaaatgaagcattagacaataacgaacaatcagttgaagattacaaaaatggtaaaggcaaagctatgggcttcttagttggtcaaattatgaaagcgtctaaaggtcaagctaatccacaattagtaaatcaactattaaaacaagaattagataaaagataa

SEQ ID NO: 7604 - DNA, 3030 bp, Staphylococcus aureus
atgaaaaagaaaaattggatttatgcattaattgtcactttaattattataattgccatagttagtatgatattttttgttcaaacaaaatatggagatcaatcagaaaaaggatcccaaagtgtaagtaataaaaataataaaatacatatcgcaattgttaacgaggatcaaccaacgacatataatggtaaaaaagttgagctgggtcaagcatttattaaaaggttagcaaatgagaaaaactataaatttgaaacagtaacaagaaacgttgctgagtctggtttgaaaaatggtggataccaagtcatgattgttatcccagaaaacttttcaaaattggcaatgcaattagacgctaaaacaccatcgaaaatatcgctacagtataaaacagctgtaggacaaaaagaagaagtagctaaaaacacagaaaaagttgtaagtaatgtacttaacgactttaacaaaaacttagtcgaaatttatttaacaagcatcattgataatttacataatgcacaaaaaaatgttggcgctattatgacgcgtgaacatggtgtgaatagtaaattctcgaattacttattaaatccaattaacgacttcccggaattatttacagatacgcttgtaaattcaatttctgcaaacaaagacattacaaaatggttccaaacatacaataaatcattattgagtgcgaattcagatacgttcagggtgaacacagattataatgtttcgactttaattgaaaaacaaaattcattatttgacgagcacaatacagcgatggataaaatgttacaagattataaatcgcaaaaagatagtgtggaacttgataactatatcaatgcattaaaacagatggacagccaaattgatcaacaatcaagtatgcaagatacaggtaaagaagaatataaacaaactgttaaagaaaacttagataaattaagagaaatcattcaatcacaagagtcaccattttcaaaaggtatgattgaagactaccgtaagcaattaacagaatcactgcaagatgagcttgcaaataacaaagacttacaagatgcgctaaatagcattaaaatgaacaatgctcaattcgctgaaaacttagaaaaacaacttcatgatgatattgtcaaagaacctgatacagatacaacatttatctataacatgtctaaacaagactttatagctgcaggtttaaatgagggtgaagctaataaatacgaagcaattgtcaaagaagcaaaacgttataaaaacgaatataatttgaaaaaaccgttagcagaacacattaatttaacagattacgataaccaagttgcgcaagacacaagtagtttgattaatgatggtgtcaaagtgcaacgtactgaaacgattaaaagtaatgatattaatcaattaactgttgcaacagatcctcattttaactttgaaggcgacattaaaattaatggtaaaaaatatgacattaaggatcaaagtgttcaactcgatacatctaacaaggaatataaagttgaagtcaatggcgttgctaaattgaaaaaggatgctgagaaagatttcttaaaagataaaacaatgcatttacaattgttatttggacaagcaaatcgtcaagatgaaccaaatgataagaaagcaacgagtgttgtggatgtaacattgaatcataaccttgatggtcgcttatcgaaagatgcattaagccagcaattgagtgcattatctaggtttgatgcacattataaaatgtacacagatacaaaaggcagagaagataaaccattcgataacaaacgtttaattgatatgatggttgaccaagttatcaatgacatggaaagtttcaaagacgataaagtagctgtgttacatcaaattgattcaatggaagaaaactcagacaaactgattgatgacattttaaataacaaaaagaatacaacaaaaaataaagaagatatttctaagctgattgatcagttagaaaacgttaaaaagacttttgctgaagaaccacaagaaccaaaaattgacaaaggcaaaaatgatgaattcaacacaatgtcttctaacttagataaagaaattagcagaatttctgaaaagagcacgcaattgctatctgatacacaagaatcaaaaacaattgcagattcagttagtggacaattaaatcaattagataataatgtgaataaactacatgcgacaggtcgagcattaggcgtaagagcgaatgatttgaaccgtcaaatggctaaaaacgataaagataatgagttattcgctaaagagtttaaaaaagtattacaaaattctaaagatggcgacagacaaaaccaagcattaaaagcatttatgagtaatccggttcaaaagaaaaacttagaaaatgttttagctaataatggtaatacagaggtgatttcaccgacattattcgtattattgatgtatttactatcaatgattacagcatatattttctatagttatgaacgtgccaaaggtcaaatgaatttcattaaagatgattatagtagtaaaaaccatctttggaataatgtcattacgtcaggtgttattggtacaactggtttggtagaaggattaattgtcggtttaattgcaatgaataagttccatgtattagctggctatagagcgaaattcatcttaatggtgattttaactatgatggtctttgtacttattaatacgtatttactaagacaggtaaaatctatcggtatgttcttaatgattgctgcattgggtctatactttgtagctatgaataatttgaaagcggctggacaaggtgtgactaataaaatttcaccattgtcttatatcgataacatgttcttcaattatttaaatgcagagcatcctataggcttggcactagtaatattaacagtacttgtgattattggttttgtactgaacatgtttataaaacactttaagaaagagagattaatctaa

SEQ ID NO: 7605 - DNA, 2082 bp, Staphylococcus aureus
atggctagagaattttcattagaaaaaactcgtaatatcggtatcatggctcacattgatgctggtaaaacgactacgactgaacgtattctttattacactggccgtatccacaaaattggtgaaacacacgaaggtgcttcacaaatggactggatggagcaagaacaagaccgtggtattactatcacatctgctgcaacaacagcagcttgggaaggtcaccgtgtaaacattatcgatacacctggacacgtagacttcactgtagaagttgaacgttcattacgtgtacttgacggagcagttacagtacttgatgcacaatcaggtgttgaaccacaaactgaaacagtttggcgtcaggctacaacttatggtgttccacgtatcgtatttgtaaacaaaatggacaaattaggtgctaacttcgaatactctgtaagtacattacatgatcgtttacaagctaacgctgctccaatccaattaccaattggtgcggaagacgaattcgaagcaatcattgacttagttgaaatgaaatgtttcaaatatacaaatgatttaggtactgaaattgaagaaattgaaattcctgaagaccacttagatagagctgaagaagctcgtgctagcttaatcgaagcagttgcagaaactagcgacgaattaatggaaaaatatcttggtgacgaagaaatttcagtttctgaattaaaagaagctatccgccaagctactactaacgtagaattctacccagtactttgtggtacagctttcaaaaacaaaggtgttcaattaatgcttgacgctgtaattgattacttaccttcaccactagacgttaaaccaattattggtcaccgtgctagcaaccctgaagaagaagtaatcgcgaaagcagacgattcagctgaattcgctgcattagcgttcaaagttatgactgacccttatgttggtaaattaacattcttccgtgtgtattcaggtacaatgacatctggttcatacgttaagaactctactaaaggtaaacgtgaacgtgtaggtcgtttattacaaatgcacgctaactcacgtcaagaaatcgatactgtatactctggagatatcgcggctgcggtaggtcttaaagatacaggtactggtgatactttatgtggtgagaaaaatgacattatcttggaatcaatggaattcccagagccagttattcacttatcagtagagccaaaatctaaagctgaccaagataaaatgactcaagctttagttaaattacaagaagaagacccaacattccatgcacacactgacgaagaaactggacaagttatcatcggtggtatgggtgagcttcacttagacatcttagtagaccgtatgaagaaagaattcaacgttgaatgtaacgtaggtgctccaatggtttcatatcgtgaaacattcaaatcatctgcacaagttcaaggtaaattctctcgtcaatctggtggtcgtggtcaatacggtgatgttcacattgaattcacaccaaacgaaacaggcgcaggtttcgaattcgaaaacgctatcgttggtggtgtagttcctcgtgaatacattccatcagtagaagctggtcttaaagatgctatggaaaatggtgtcttagcaggttatcctttaattgatgttaaagctaaattatatgatggttcataccatgatgtcgattcatctgaaatggccttcaaaattgctgcatcattagcacttaaagaagctgctaaaaaatgtgatcctgtaatcttagaaccaatgatgaaagtaactattgaaatgcctgaagagtacatgggtgatatcatgggtgacgtaacatctcgtcgtggacgtgttgatggtatggaacctcgtggtaatgcacaagttgttaatgcttatgtaccactttcagaaatgttcggttatgcaacatcattacgttcaaacactcaaggtcgcggtacttacactatgtacttcgatcactatgctgaagttccaaaatcaatcgctgaagatattatcaagaaaaataaaggtgaataa

SEQ ID NO: 7606 - DNA, 1122 bp, Staphylococcus aureus
atggtatatagtgcaagtatggttccagcaactaaaggcacattgactggtggtatcgatgttccaggaacgtatttttacaaccgacaattagcatatgtcataatgagttttataattgtattttttattgcatttttaatgaatgttaaattactgagtaatattaaagtgcaaaaaggtatgattataactatcgtctcactattattactgacgttagtaataggtaaagatattaatggttctaaaagttggataaacttaggatttatgaatttacaggcatctgagttattaaaaattgcaatcatattatatatcccatttatgatcagtaaaaaaatgcctagagtattaagtaaaccaaaattaattttaagtcctattgtattagcattaggttgtacgtttttagttttcttacaaaaagacgtagggcaaacattactaatattaattattttagttgcgattattttttattcaggaattggggtaaacaaagtcctaagatttggtataccagcagtgctaggattcttagtagtatttgtcattgcattaatggctggttggttaccaagctatttaactgccagatttagtacgctaacagatccattccaattcgaatcaggaactggataccatatttccaattcattgcttgcgataggtaacggtggcgtatttggaaaaggattaggaaatagtgcaatgaaattgggctatttaccagaaccacatacagattttatttttgcaattatttgcgaagaattaggtttaatcggaggattgctagttattactttagagttctttattgtatatcgtgccttccagtttgcaaataaaacatcatcatatttttataaacttgtgtgtgttgggattgccacatactttggaagtcaaacgtttgtaaacattggcggtatttcggcaacaattccattaactggtgtgccattgccatttatcagctttggtggatcatcaatgattagtttaagtattgctatgggattacttctgattgtaggtaaacaaatcaaagtagaccagcaacgaaagaaacaacaacaaaaagttgatataagaagacaatttaattaa

SEQ ID NO: 7607 - DNA, 3552 bp, Staphylococcus aureus
ttggcaggtcaagttgtccaatatggaagacatcgtaaacgtagaaactacgcgagaatttcagaagtattagaattaccaaacttaatagaaattcaaactaaatcttacgagtggttcctaagagaaggtttaatcgaaatgtttagagacatttctccaattgaagattttactggtaatttgtcattagagtttgtggattaccgtttaggagaaccaaaatatgatttagaagaatctaaaaaccgtgacgctacttatgctgcacctcttcgtgtaaaagtgcgtctaatcattaaagaaacaggagaagttaaagaacaagaagtctttatgggtgatttcccattaatgactgatacaggtacgttcgttatcaatggtgcagaacgtgtaatcgtatctcaattagttcgttcaccatccgtttatttcaatgaaaaaatcgacaaaaatggtcgtgaaaactatgatgcaacaattattccaaaccgtggtgcatggttagaatatgaaacagatgctaaagatgttgtatacgtacgtattgatagaacacgtaaactaccattaacagtattgttacgtgcattaggtttctcaagtgaccaagaaattgttgaccttttaggtgacaatgaatatttacgtaatactttagagaaagacggcactgaaaacactgaacaagcgttattagaaatctatgaacgtttacgtccaggtgaaccaccaactgttgaaaatgctaaaagtctattgtattcacgtttctttgatccaaaacgctatgacttagcaagcgtgggtcgttataaaacaaacaaaaaattacatttaaaacatcgtttatttaatcaaaaattagctgagccaattgtaaatactgaaactggtgaaattgtagttgaagaaggtacagtgcttgatcgtcgtaaaatcgacgaaatcatggatgtacttgaatcaaatgcaaacagcgaagtgtttgaattgcatggtagcgttatagacgagccagtagaaattcaatcaattaaagtatatgttcctaacgatgatgaaggtcgtacgacaactgtaattggtaatgctttccctgactcagaagttaaatgcattacaccagcagatatcattgcttcaatgagttacttctttaacttattaagcggtattggatatacagatgatattgaccatttaggtaaccgtcgtttacgttctgtaggtgaattactacaaaaccaattccgtatcggtttatcaagaatggaaagagttgtacgtgaaagaatgtcaattcaagatactgagtctatcacacctcaacaattaattaatattcgacctgttattgcatctattaaagaattctttggtagctctcaattatcacaattcatggaccaagcaaacccattagctgagttaacgtataaacgtcgtctatcagcattaggacctggtggtttaacacgtgaacgtgctcaaatggaagtacgtgacgttcactactctcactatggccgtatgtgtccaattgaaacacctgagggaccaaacattggattgattaactcattatcaagttatgcacgtgtaaatgaattcggctttattgaaacaccatatcgtaaagttgatttagatacacatgctatcactgatcaaattgactatttaacagctgacgaagaagatagctatgttgtagcacaagcaaactctaaattagatgaaaatggtcgtttcatggatgatgaagttgtatgtcgtttccgtggtaacaatacagttatggctaaagaaaaaatggattatatggatgtatcgccgaagcaagttgtttcagcagcgacagcatgtattccattcttagaaaacgatgactcaaaccgtgcattgatgggtgcgaacatgcaacgtcaagcagtgcctttgatgaatccagaagcaccatttgttggaacaggtatggaacacgttgcagcacgtgattctggtgcagctattacagctaagcacagaggtcgtgttgaacatgttgaatctaatgaaattcttgtacgtcgtctagttgaagagaacggcgttgagcatgaaggtgaattagatcgctatccattagctaaatttaaacgttcaaactcaggtacatgttacaaccaacgtccaatcgttgcagttggagatgttgttgagtataacgagattttagcagatggaccatctatggaattaggagaaatggcattaggtagaaacgtagtagttggtttcatgacttgggacggttacaactatgaggatgccgttatcatgagtgaaagacttgtgaaagatgacgtgtatacttctattcatattgaagagtatgaatcagaagcacgtgatactaagttaggacctgaagaaatcacaagagatattcctaatgtttctgaaagtgcacttaagaacttagacgatcgtggtatcgtttatattggtgcagaagtaaaagatggagatattttagttggtaaagtaacgcctaaaggtgtaactgagttaactgccgaagaaagattgttacatgcaatctttggtgaaaaagcacgtgaagttagagatacttcattacgtgtacctcacggcgctggcggtatcgttcttgatgtaaaagtattcaatcgtgaagaaggcgacgatacattatcacctggtgtaaaccaattagtacgtgtatatatcgttcaaaaacgtaaaattcatgttggtgataagatgtgtggtcgacatggtaacaaaggtgtcatttctaagattgttcctgaagaagatatgccttacttaccagatggacgtccgatcgatatcatgttaaatcctcttggtgtaccatctcgtatgaacatcggacaagtattagagctacacttaggtatggctgctaaaaatcttggtattcacgttgcatcaccagtatttgacggtgcaaacgatgacgatgtatggtcaacaattgaagaagctggtatggctcgtgatggtaaaactgtactttatgatggacgtacaggtgaaccattcgataaccgtatttcagtaggtgtaatgtacatgttgaaacttgcgcacatggttgatgataaattacatgcgcgttcaacaggaccatattcacttgttacacaacaaccacttggcggtaaagcgcaattcggtggacaacgtttcggtgagatggaggtatgggcacttgaagcatatggtgctgcatacacattacaagaaatcttaacttacaaatccgatgatacagtaggacgtgtgaaaacatacgaggctattgttaaaggtgaaaacatctctagaccaagtgttccagaatcattccgagtattgatgaaagaattacaaagtttaggtttagatgtaaaagttatggatgagcaagataatgaaatcgaaatgacagacgttgatgacgatgatgttgtagaacgcaaagtagatttacaacaaaatgatgctcctgaaacacaaaaagaagttactgattaa

SEQ ID NO: 7608 - DNA, 957 bp, Staphylococcus aureus
atgttaactaaagaatttgcacaacgcgtagaactaagtgagaagcaagtccgtaaaattgttcaacatttagaagaacgtggttaccaactaagcaagactgaatatcgtggtcgtgaagcaactgatttcaaagaagaagatatcgagcttttcaaagacattgccgacaaagtaaaacaaacaaatagttatgatctagcgtttgatgaattagaaaaagaaaaagacttcctgcaagtcattgtcaaaaacgatgacaaaaacttacctactaatcaaaatgtcgctcaactagtagaagatttacgcctagaaatccagaaaatgcgcgaagaacgtcacctacttggtcaaatgatgaatcaagtacatcagcaacaacaagaattaaaagaacttcaaaatcaacttacatctaaaatcgattcaaatagcgaatccttaaaagccatccaaacatcacaagaggctatccaagaagcacaagcatctcaagctaaagtattggctgaatcaacaaataaagttgaaaagaatgctgttactgaagataaagctgacagtaaagattcgaaggttgctggagtgaatacatcaacagacgctaagacggatactaaagcagaaaatgcaggcgatggcactgctactaaagtagataaagaggatcaaatttctgcaactgaagcaattgaaaaagccagcgttgagcagtctaaaaatgaaaatgcagctgagacttcaaataaagaagctacagtagatgcagacgcgcaacatgatgctgaacaacaagtagcagaagcccatgcagaagcttctaaacaagctacttcgaacgattcattggaagcgaaagcagaaaatgacagcacagcttcacagtcagaaatgtcagaaccaaaacctcaagaagagaaaaaaggtttcttcgcacgtttattcaacctgtaa

SEQ ID NO: 7609 - DNA, 1311 bp, Staphylococcus aureus
atgactaaacctatagtagctattgtaggtaggcctaatgtaggtaaatctacaatttttaatagaatagttggagaacgtgtttcgattgtggaagacacgccaggtgtaacacgagatcgtatttattcttcaggtgaatggttaacacatgatttcaatattattgatacaggtggtattgaaattggtgatgcaccattccaaacacaaattagagcgcaggcagaaatcgccatagatgaagcggatgttattatttttatggttaacgtgcgtgaaggattgacacaaagcgatgaaatggtcgctcaaattttatacaaatctaaaaaaccggtcgtattagcggttaacaaagtagataatatggaaatgcgtacagacgtgtatgatttctattcattaggatttggtgaaccgtatccgatatcagggtcacatggtttaggtcttggtgacttgttagatgcagttgtttctcattttggtgaagaggaagaagatccttatgatgaagatacaattcgactatccattattggacgaccaaacgtaggtaaatcaagtttagtaaatgctattttaggtgaagatcgcgttatcgtttctaatgttgcagggacaacgagagacgctattgatacagagtatagttatgatggacaagattatgttttaatcgatactgctggtatgcgtaaaaaaggaaaagtatatgaatcaactgagaaatattcagtactaagagctttaaaagcgattgaacgttcaaatgttgttttagtggtcattgatgcagaacaaggcatcattgaacaagataaacgtgttgcaggatatgcacatgaacaaggtaaagcagtcgtgattgtcgtaaataaatgggatactgtggaaaaagatagtaaaacgatgaagaaatttgaagatgaagtacgtaaagaattccaatttttagattatgcacaaattgcttttgtgtctgctaaagaacgcacaagattacgtacattattcccttacattaatgaagcaagtgaaaaccataaaaaacgtgttcaaagttcaactttaaatgaagttgttactgatgcaatttccatgaaccctacaccaacagacaaaggtagacgtttgaatgtcttttatgcaacacaagttgctatagaaccaccgacatttgttgtatttgttaatgatgtagaattaatgcatttttcttataaacgctatttagagaatcaaatccgtgccgcttttggttttgaaggtacaccaattcatattatagctcgaaagagaaattaa

SEQ ID NO: 7610 - DNA, 783 bp, Staphylococcus aureus
atgaagtctataaaaaggattggattgtgcataagtctgttgattttaatcatttttgcaacatcttgtggtagtaataagattactggagactcaaaagaagaacaaatcaaaaagagttttgcgaaatctttagacaagtatcctactgaaaatctagaagagttttatgataaagaaggatatagagatggagaatttgaaaaagatgataaagggacttggctaattagatctgaaatgaaaatccaattaaaaggagaaaatctggaatctaggggagcagttatagaaattaacagaaatactagaacggctaaagggaattatattgttagagaagttgttgaagatagcgatggaatgacacacaatcatacaaaaaggtatcctgtgaaaatggaaaataataaaatgattccattaaaatcaattgatgatgaaaaagtaaaaaaagaaattgaagaatttaaattctttgtacaatacgggaatttcaaagaattggaaaactataaagaggacgaagtgtcatataacccagaagtaccaatatactctgcacaatatcaattgaaaaacagtgattataatgtagagcaattacgtaagcgatataatatcccgacgcaaaaagcgcccaaattattattgaaaggctcaggtaatttaaaaggttcatcagtcggatataaaaatattgaatttacctttgttgaaaataaggaagaaaatatttacttcacagatagtgtctactttaatccaagcgaggataaataa

SEQ ID NO: 7611 - DNA, 3474 bp, Staphylococcus aureus
atgacattacatgcttatttaggtagagcgggaacaggtaagtctacgaaaatgttgaccgaaataaaacaaaaaatgaaagcagatccgcttggagatccaatcattttaattgcgccaactcaaagtacatttcaattagaacaagcctttgtcaatgatccggaattaaatggtagtttaagaacagaagtgttgcattttgaacgattaagtcatcgtattttccaagaagttggtagttatagcgaacaaaagttatctaaagctgcaacggaaatgatgatttataacattgttcaagaacaacaaaagtatttaaaactttatcaatcacaagcaaaatattatgggtttagtgaaaaattaacagaacaaattcaagattttaaaaaatatgcagtaacgcctgaacatttagaacactttattgctgataaaaatatgcaaactcgaactaaaaataagttagaggatattgctttaatataccgtgagttcgaacaacgcattcaaaacgagtttattactggtgaggattcattacaatattttattgattgtatgccgaaatcagagtggctaaaacgtgctgatatatatattgatggttttcacaacttttcaacgattgagtatttaataatcaaaggattaattaaatatgcgaagagtgtcacaattatattgacgacagatggtaaccacgatcaatttagtttatttagaaaaccatcggaagtgttacgacatattgaagaaatagcaaatgaactcaatatttctattgaacgtcaatatttcaaccaattatatcgcttcaataatcaagatttaaagcatcttgaacaagaatttgatgtacttcaaatcaatcgagtggcatgtcaaggtcatatcaatattttagaatctgcgactatgagagaggaaataaatgaaattgcgcgacgtatcatcgttgatattcgtgataagcaattacgatatcaagatattgcaattttatatcgtgacgagtcttatgcttatttatttgattccatattaccgctttataatattccttataacattgatacaaagcgttcgatgacacatcatccggtcatggaaatgattcgttcattgattgaagttattcaatctaattggcaagtgaatccaatgctacgcttattgaagactgatgtgttaacggcatcatatctaaaaagtgcatacttagttgatttacttgaaaattttgtacttgaacgtggtatatacggtaaacgttggttagatgatgagctatttaatgtcgaacattttagcaaaatggggcgtaaagcgcataaactgaccgaagatgaacgtaacacatttgaacaagtcgttaagttaaagaaagatgtcattgataaaattttacattttgaaaagcaaatgtcacaagcggaaactgtaaaagactttgcaactgctttttatgaaagtatggaatatttcgaactgccaaatcaattgatgacagagcgagatgaacttgatttaaatggtaatcatgaaaaggcggaggaaattgatcaaatatggaatggcttaattcaaatccttgacgacttagttctagtatttggagatgaaccaatgtcgatggaacgtttcttagaagtatttgatattggtttagaacaattagaatttgtcatgattccacaaacattagatcaagttagtattggtacgatggatttggctaaagtcgacaataagcaacatgtttacttagttggaatgaacgacggcaccatgccacaaccagtaactgcatcaagtttaattactgatgaagaaaagaaatattttgaacaacaagcaaatgtagagttgagtcctacatcagatattttacagatggatgaagcatttgtttgctatgttgctatgactagagctaagggagatgttacattttcttacagtctaatgggatcaagtggtgatgataaggagatcagcccatttttaaatcaaattcaatcattgttcaaccaattggaaattactaacattcctcaataccatgaagttaacccattgtcactaatgcaacatgctaagcaaaccaaaattacattatttgaagcattgcgtgcttggttagatgatgaaattgtggctgatagttggttagatgcttatcaagtaattagagatagcgatcatttaaatcaaggtttagattatttaatgtcagcattaacgtttgacaatgaaactgtaaaattaggtgaaacgttgtctaaagatttatatggtaaggaaatcaatgccagtgtatctcgttttgaaggttatcaacaatgcccatttaaacactatgcttcacatggtctgaaactaaatgaacgaacgaaatatgaacttcaaaactttgatttaggtgatattttccattccgttttaaaatatatatctgaacgtattaatggcgattttaaacaattagacctgaaaaaaataagacaattaacgaatgaagcattggaagaaattttacctaaagttcagtttaatttattaaattcttcagcttactatcgttatttatcaagacgcattggcgctattgtagaaacaacactaagcgcattaaaatatcaaggcacgtattcaaagtttatgccaaaacattttgagacaagttttagaaggaaaccaagaacaaatgacgaattaattgcacaaacattaacgacaactcaaggtattccaattaatattagagggcaaattgaccgtatcgatacgtatacaaagaatgatacaagttttgttaatatcattgactataaatcctctgaaggtagtgcgacacttgatttaacgaaagtatattatggtatgcaaatgcaaatgatgacatacatggatatcgttttacaaaataaacaacgccttggattaacagatattgtgaaaccaggtggattattatacttccatgtacatgaacctagaattaaatttaaatcatggtctgatattgatgaagataaactagaacaagatttaattaaaaagtttaagctgagtggtttagtgaatgcagaccaaactgttattgatgcattggatattcgtttagaacctaaattcacttcagatattgtaccagttggtttgaataaagatggctctttgagtaaacgaggcagccaagtggcagatgaagcaacaatttataaattcattcagcataacaaagagaattttatagaaacagcttcaaatattatggatggacatactgaagttgcaccattaaagtacaaacaaaaattgccatgtgctttttgtagttatcaatcggtatgtcatgtagatggcatgattgatagtaagcgatatcgaactgtagatgaaacaataaatccaattgaagcaattcaaaatattaacattaatgatgaatttgggggtgagtaa

SEQ ID NO: 7612 - DNA, 3654 bp, Staphylococcus aureus
atgacaattccagagaaaccacaaggcgtgatttggactgacgcgcaatggcaaagtatttacgcaactggacaagatgtacttgttgcagccgcggcaggttcaggtaaaacagctgtactagttgagcgtattatccaaaagattttacgtgatggcattgatgtcgatcgacttttagtcgtaacgtttacaaacttaagcgcacgtgaaatgaagcatcgtgtagaccaacgtattcaagaggcatcgattgctgatcctgcaaatgcacacttgaaaaaccaacgcatcaaaattcatcaagcacaaatatctacacttcatagtttttgcttgaaattaattcaacagcattatgatgtattaaatattgacccgaactttagaacaagcagtgaagctgaaaatattttattattagaacaaacgatagatgaggtcatagaacaacattacgatatccttgatcctgcttttattgaattaacagaacaattgtcttcagatagaagtgatgatcagtttcgaatgattattaaacaattgtatttctttagcgttgcaaatccaaatcctacaaattggttggatcaattggtgacaccatacgaagaagaagcacaacaagcgcaacttattcaactactaacagacttatctaaagtatttatcacagctgcctatgatgctttaaataaggcgtatgatttgtttagtatgatggatggcgtcgataaacatttagctgttatagaagatgaacgacgtttaatggggcgtgttttagaaggtggttttattgatataccttatttaactgatcacgaatttggcgcgcgtttgcctaatgtaacagcgaaaattaaagaagcaaatgaaatgatggtcgatgccttagaagatgctaaacttcagtataaaaaatataaatcattaattgataaagtgaaaaatgattacttttcaagagaagctgatgatttgaaagctgatatgcaacaattggcgccacgagtaaagtaccttgcgcgtattgtgaaagatgttatgtcagaattcaatcgaaaaaagcgtagcaaaaatattctggatttttctgattatgaacattttgcattacaaattttaactaatgaggatggttcgccttcagaaattgccgaatcataccgtcaacactttcaagaaatattggtcgatgagtatcaagatacgaaccgggttcaagagaaaatactatcttgcatcaaaacgggtgatgaacataatggtaatttatttatggttggagatgttaagcaatccatttataaatttagacaagctgatccaagtttatttattgaaaagtatcaacgctttactatagatggagatggcactggacgtcgaattgatttgtcgcaaaacttccgttctcgaaaagaagtactgtcaacgactaactatatattcaaacatatgatggatgaacaagtcggtgaagtaaaatatgatgaagcggcacagttgtattatggtgcaccatatgatgaatcggaccatccagtaaacttaaaagtgcttgttgaagcggatcaagaacatagtgatttaactggtagtgaacaagaagcgcattttatagtagaacaagttaaagatatcttagaacatcaaaaagtttatgatatgaaaacaggaagctatagaagtgcgacatacaaagatatcgttattctagaacgcagctttggacaagctcgcaatttacaacaagcctttaaaaatgaagatattccattccatgtgaatagtcgtgaaggttactttgaacaaacagaagtccgcttagtattatcatttttaagagcgatagataatccattacaagatatttatttagttgggttaatgcgctccgttatatatcagttcaaagaagacgaattagctcaaattagaatattgagtccaaatgatgactacttctatcaatcgattgtaaattacattaatgacgaagcagcagatgctattttagttgataaattaaaaatgtttttatcagatattcaaagttaccaacaatatagtaaagatcatccggtgtatcagttaattgataaattttataatgatcattatgttattcaatactttagtggacttattggtggacgtggacgacgtgcaaacctttatggtttatttaataaagctatcgagtttgagaattcaagttttagaggtttatatcaatttattcgttttatcgatgaattgattgaaagaggcaaagattttggtgaggaaaatgtagttggtccaaacgataatgttgttagaatgatgacaattcatagtagtaaaggtctagagtttccatttgtcatttattctggattgtcaaaagattttaataaacgtgatttgaaacaaccagttattttaaatcagcaatttggtctcggaatggattattttgatgtggataaagaaatggcatttccatctttagcttcggttgcatataaagctgttgccgaaaaagaacttgtgtcagaagaaatgcgattagtctatgtagcattaacaagagcgaaagaacaactttatttaattggtagagtgaaaaatgataaatcgttactagaactagagcaattgtctatttctggtgagcacattgctgtcaatgaacgattaacttcaccaaatccgttccatcttatttatagtattttatctaaacatcaatctgcgtcaattccagatgatttaaaatttgaaaaagatatagcacaagttgaagatagtagtcgtccgaatgtaaatatttcaattatatactttgaagatgtgtctacagaaaccattttagataataatgaatatcgttcggttaatcaattagaaactatgcaaaatggtaatgaggatgttaaagcacaaattaaacaccaacttgattatcaatatccatatgtaaatgatactaaaaagccatcaaaacaatctgtttctgaattgaaaaggcaatatgaaacagaagaaagtggcacaagttacgaacgagtaagacaatatcgtatcggtttttcaacgtatgaacgacctaaatttctaagtgaacaaggtaaacgaaaagcgaatgaaattggtacgttaatgcatacagtgatgcaacatttaccattcaaaaaagaacgcatatctgaagttgagttacatcagtatatcgatggattaatcgataaacatattatcgaagcagatgcgaaaaaagatatccgtatggatgaaataatgacatttatcaatagtgagttatattcgattattgctgaagcagagcaagtttatcgtgaattaccgtttgtagttaaccaagcattagttgaccaattgccacaaggagacgaagacgtctcaattattcaaggtatgattgacttaatctttgttaaagatggtgtgcattattttgtagactataaaaccgatgcatttaatcgtcgccgtgggatgacagatgaagaaattggtacacaattaaaaaataaatataagatacagatgaaatattatcaaaatacgcttcaaacgatacttaataaagaagttaaaggttatttatacttcttcaaatttggtacattgcaactgtag

SEQ ID NO: 7613 - DNA, 4317 bp, Staphylococcus aureus
ttggcaatgacagagcaacaaaaatttaaagtgcttgctgatcaaattaaaatttcaaatcaattagatgctgaaattttaaattcaggtgaactgacacgtatagatgtttctaacaaaaacagaacatgggaatttcatattacattaccacaattcttagctcatgaagattatttattatttataaatgcaatagagcaagagtttaaagatatcgccaacgttacatgtcgttttacggtaacaaatggcacgaatcaagatgaacatgcaattaaatactttgggcactgtattgaccaaacagctttatctccaaaagttaaaggtcaattgaaacagaaaaagcttattatgtctggaaaagtattaaaagtaatggtatcaaatgacattgaacgtaatcattttgataaggcatgtaatggaagtcttatcaaagcgtttagaaattgtggttttgatatcgataaaatcatattcgaaacaaatgataatgatcaagaacaaaacttagcttctttagaagcacatattcaagaagaagacgaacaaagtgcacgattggcaacagagaaacttgaaaaaatgaaagctgaaaaagcgaaacaacaagataacaacgaaagtgctgtcgataagtgtcaaattggtaagccgattcaaattgaaaatattaaaccaattgaatctattattgaggaagagtttaaagttgcaatagagggtgtcatttttgatataaacttaaaagaacttaaaagtggtcgtcatatcgtagaaattaaagtgactgactatacggactcattagttttaaaaatgtttactcgtaaaaacaaagatgatttagaacattttaaagcgctaagtgtaggtaaatgggttagggctcaaggtcgtattgaagaagatacatttattagagatttagttatgatgatgtctgatattgaagagattaaaaaagcgacaaaaaaagataaggctgaagaaaagcgtgtagaattccacttgcatactgcaatgagccaaatggatggtatacccaatattggtgcgtatgttaaacaggcagcagactggggacatccagccattgcggttacagaccataatgttgtgcaagcatttccagatgctcacgcagcagcggaaaaacatggcattaaaatgatatacggtatggaaggtatgttagttgatgatggtgttccgattgcatacaaaccacaagatgtcgtattaaaagatgctacttatgttgtgttcgacgttgagacaactggtttatcaaatcagtatgataaaatcatcgagcttgcagctgtgaaagttcataacggtgaaatcatcgataagtttgaaaggtttagtaatccgcatgaacgattatcggaaacgattatcaatttgacgcatattactgatgatatgttagtagatgcccctgagattgaagaagtacttacagagtttaaagaatgggttggcgatgcgatattcgtagcgcataatgcttcgtttgatatgggctttatcgatacgggatatgaacgtcttgggtttggaccatcaacgaatggtgttatcgatactttagaattatctcgtacgattaatactgaatatggtaaacatggtttgaatttcttagctaaaaaatatggcgtagaattaacgcaacatcaccgtgccatttatgatacagaagcaacagcttacattttcataaaaatggttcaacaaatgaaagaattaggtgtattaaatcataacgaaatcaacaaaaaactcagtaatgaagatgcatataaacgtgcaagacctagccatgtcacattaattgtacaaaaccaacaaggtcttaaaaatctatttaaaattgtaagtgcatcattggtgaagtatttctaccgtacacctcgaattccacgttcattgttagatgaatatcgtgagggattattggtaggtacagcgtgtgatgaaggtgaattatttacggcagttatgcagaaggaccagagccaagttgaaaaaattgccaaatattatgattttattgaaattcaaccaccggcactttatcaagatttaattgatagagagcttattagagatactgaaacattacatgaaatttatcaacgtttaatacatgcaggtgacacagcgggtatacctgttattgcgacaggaaatgcacactatttgtttgaacatgatggtatcgcacgtaaaattttaatagcatcacaacccggcaatccacttaatcgctcaactttaccggaagcacattttagaactacagatgaaatgttaaacgagtttcattttttaggtgaagaaaaagcgcatgaaattgttgtgaaaaatacaaacgaattagcagatcgaattgaacgtgttgttcctattaaagatgaattatacacaccgcgtatggaaggtgctaacgaagaaattagagaactaagttatacaaatgcgcgtaaactgtatggtgaagacctgcctcaaatcgtaattgatcgattagaaaaagaattaaaaagtattatcggtaatggatttgcggtaatttacttaatttcgcaacgtttagttaaaaaatcattagatgatggatacttagttggttcccgtggttcagtaggttctagttttgtagcgacaatgactgagattactgaagtaaacccgttaccgccacactatatttgtccgaactgtaaaacgagtgaatttttcaatgatggttcagtaggatcaggattcgatttacctgataagacgtgtgaaacttgtggagcgccacttattaaagaaggacaagatattccgtttgaaacatttttaggatttaagggagataaagttcctgatatcgacttaaactttagtggtgaatatcaaccgaatgcccataactacacaaaagtattatttggtgaggataaagtattccgtgcaggtacaattggtaccgttgctgaaaagactgcttttggttatgttaaaggttatttgaatgatcaaggcatccacaaaagaggcgctgaaatagatcgactcgttaaaggatgtacaggtgttaaacgtacaactggacagcatccaggaggtattattgtagtacctgattacatggatatttatgattttacgccgatacaatatcctgccgatgatcaaaattcagcatggatgacgacacattttgatttccattctattcatgataatgtattaaaacttgatatacttggacacgatgatccaacaatgattcgtatgcttcaagatttatcgggcattgatccaaaaacgatacctgtagatgacaaagaagtcatgcaaatatttagtacacctgaaagtttaggtgttactgaagatgaaattttatgtaaaacaggtacgtttggggttccagaattcggtacagggttcgtgcgtcaaatgttagaagatacaaagccaacaacattttctgaattagttcaaatctcaggattatctcatggtacagatgtgtggttaggcaatgctcaagaattaattaaaaccggtatatgtgatttatcaagtgtaattggttgtcgtgatgatatcatggtttatttaatgtatgctggtttagaaccatcaatggcttttaaaataatggagtcagtacgtaaaggtaaaggtttaactgaagaaatgattgaaacgatgaaagaaaatgaagtgccggattggtatttagattcatgtcttaaaattaagtacatgttccctaaagcccatgcagcagcatacgttttaatggcagtacgtatcgcatatttcaaagtacatcatccactttattactatgcatcttactttacaattcgtgcgtcagattttgatttaatcacgatgattaaagataaaacaagcattcgaaatactgtaaaagacatgtattctcgctatatggatctaggtaaaaaagaaaaagacgtattaacagtcttggaaattatgaatgaaatggcgcatcgaggttatcgaatgcaaccgattagtttagaaaagagtcaggcgttcgaatttatcattgaaggcgatacacttattccgccgttcatatcagtgcctgggcttggcgaaaacgttgcgaaacgaattgttgaagctcgtgacgatggcccatttttatcaaaagaagatttaaacaaaaaagctggattatctcagaaaattattgagtatttagatgagttaggctcattaccgaatttaccagataaagctcaactttcgatatttgatatgtaa

SEQ ID NO: 7614 - DNA, 1662 bp, Staphylococcus aureus
atgaatattattgatcaagtgaaacaaacattagtagaagaaattgcagcaagtattaacaaagcaggattagcagatgagattcctgatattaaaattgaagttcctaaagatacaaaaaatggagattatgctactaatattgcgatggtactgactaagattgcaaagcgtaatcctcgtgaaattgctcaagcgattgttgataacttagatactgaaaaagcacatgtaaaacaaattgacattgctggtccaggattcattaatttttacttagataatcagtatttaacagcaattattcctgaagcaattgaaaaaggtgatcaatttggacatgtaaatgaatcaaaaggtcaaaatgtattgcttgagtatgtttcagctaaccctacaggagatttacatattggtcatgctagaaatgcagcagttggtgatgctttagctaatattttaactgcagctggctataatgtaacacgtgaatattatattaatgatgctggtaatcaaattactaacttagcgcgttcgattgaaacacatttctttgaagctttaggtgacaatagttattcaatgccagaagatggctataatggaaaagatattattgaaataggtaaagatttagcagagaaacaccctgaaattaaagattattctgaagaagcacgtttgaaagaatttagaaaattaggcgtagaatacgaaatggctaaattgaaaaatgatttagcagagttcaatacgcattttgataattggtttagtgaaacatctttatatgaaaaaggcgaaattcttgaagttttagcaaaaatgaaagaattaggttatacgtatgaagctgatggcgctacatggttacgtacaactgattttaaagacgacaaagacagagtattaattaaaaatgacggtacatatacgtatttcttaccagatattgcgtaccacttcgataaagttaaacgtggtaatgacattttaatcgatttatttggtgctgatcatcatggttatattaatcgtttgaaagcatctcttgaaacgtttggtgtagatagtaatcgtttagaaattcaaatcatgcaaatggttcgtttaatggaaaatggtaaagaagtgaagatgagtaaacgtactggtaatgcgattacattaagagaaattatggacgaagttggcgttgacgctgcacgttatttcttaactatgcgtagtcctgatagtcactttgattttgatatggaattagcgaaagagcaatctcaagacaatccagtttactatgctcaatatgcacatgcgcgtatttgttcaattttaaaacaagcgaaagagcaaggtattgaagtgactgctgcgaatgattttacaacgattacaaatgaaaaagcgattgaattgttgaaaaaagtagctgatttcgaacctacaattgaaagtgctgctgagcatagatcagcacatagaattactaactatattcaagacttggctgctcatttccataaattctataatgctgaaaaagtgttaacagatgatattgaaaaaacaaaagcacatgttgctatgattgaagcggtcagaattacattgaaaaatgcattggcaatggtcggtgtaagcgcacctgaatcaatgtaa

SEQ ID NO: 7615 - DNA, 2955 bp, Staphylococcus aureus
atgcaagaacatttggtggttacacttgatggaaaagattatcttgtagaaccaggtacgaatttacttgaatttattaaatcacaagatacttttgtaccttcaatttgttataacgagtcgatgggaccaattcaaacatgtgatacatgtactgttgagattgacggtaaaattgaacgttcatgtagtacggtgattgatcgtccaatgactgtaaatactgtgaacaatgatgtgaaagatgctcaaaaagaagcgcttgatcgaattttagaaaagcatatgctgtattgtacagtatgtgattataataatggtgattgtgaaattcataatacgatggatgcatgggggcttcagcatcaaacgtatgaatataaagagaagccatatgaaaaggattatggcccattttatcgttatgatccaaatcaatgtatcttatgtgggcgttgtgtagaagcatgtcaagatatcgaagtgaatgaaactattagaattgattgggatcgtgaacatccacgtgttatttgggataatgatgtaccaattaatgaatcgtcatgtgtatcttgtggtcaatgcgcaactgtatgtccatgtaatgccatgatggaagtgaatatggaaggtaatgcgggttatatgactgatacggaacctggttcattagcagcaatgattgatttaactaaaaaagcagaacctggttatggtccactatttgcaatctcagattcagaagcagaaatgcgtaaagagcgtattaagaaaactaaaacagtgtgtacttattgtggtgtgggttgttcatttgaagtttggactaaagatagagaaattttaaaagtacaaccatcacatgattctccagcaaataaaattgtgacttgtgttaaaggtaagttttcatggggacatattaattcagatcaacgcttaactaaaccactagtaaggaaaaatggtgagttccatgaagtagaatgggatgaagctttaaatgtcattgcagataattttacatctattaaagaaaagtatggcccagatgcactatcattcatttcttcttctaaagcgacgaatgaagaatcgtatttaatgcaaaaattagcaagacaagttattggcacaaataacgttgataactgttcaagatattgccaagcacctgcaacaaaaggcttatttagaacggttggacacggcggtgactcaggtagtattgaagatttagaaaaagcggcaatgtctgtattgataggtaccaatacagccgaagctcatccagttatcgcatcacgcatgaaacgtgctcaaaaattatttggacaaaaaatacatgtatttgatattagaaaacatgaaatggcagaacgtgcggatcgtttttatcaacctaaaccaggtacggatttagcgtggttaagtgcagtgactaagtatattattgatcatgatttacacgataaagcatttattgatgagtgggtagatgattttgatgaatattacaaatcattagaaacatttacaatggcttttgctgaagaagcaacaggtattcctgaatcagaattgattaaatttgctgaagaatgtgctaaagctgaatctgttgtaatttgttgggcaatgggtattacacaacaagacattggtagtgactcaagtacagcgatttcaaacttattattagtaacaggtaattatcgtcgtcctggtactggtgcgtatccattacgtggacataataatgttcaaggatgtagtgatatgggaagtatgcctgataagattactggttatcaaagtattgaagcggatgatattcgcgctaaatttgaaaaagaatatggcgttaaattgaatccaaaagctggtaaagataatcatgaaatggtagaaggtatacatgacggagaagtacactcattgtacttatatggtgaagatacgggtattgtggattcaaatattaattttgtacaagctgcgtttgaaaaattagatttcatggtagtccaagatgaatttttaacattcacagcaacatacgcagatgttgtattgccagcaagtccttcacttgaaaaagacggtacttttacaaataccgaacgtcgtattcaacgtttataccaagcattagaacctcttggtgattcaaaacctgactggaaaattttccaagcaattgctaatagattaggatttgattggaattacaagcatcctagtgaaattatggatgaagtagcacgcttaacacctctatatgctggggtaagttatgatcgtttagaaggattcaatagtttacaatggccagtacaacctgatggtactgatgagcctattctatacttagaaggattcaattttgataatggtaaagcaaaattattcccattatcatttgataattactttaagcaagatgaaatttatgatattcatgtaaacaatggtcgattgttagagcacttccatgaaggtaatatgacttatcaaacaccaatgattaaatacaaagtgccacgtgcatttgttgaaatttctccagagcttgctgaagatagaggcattcatgaaggtgcagaagttaagctgatttctgaaacaggagaagcggtattacaagttcacgtgacagatcgtgttaaaggtaaagaaatctatattccattaaataatgatgcgatggaaaatggagatctaggtgcaattaacttattaactaatagtgatgttgatcaatacacggatacaccatcttataaacgtactagctgtcgtttggaggtaattacgaaacgtggtaagtcaccgttgaaccctaataatttccgtgtcaataaaaaacgtcatccgcagtacagtgttcaagtacagaaaaaatgggaacgttcagattatgttttcccgggaaatcaggtggataaataa

SEQ ID NO: 7616 - DNA, 2004 bp, Staphylococcus aureus
atggctgatttatcgtctcgtgtgaacgagttacatgatttattaaatcaatacagttatgaatactatgtagaggataatccatctgtaccagatagtgaatatgacaaattacttcatgaactgattaaaatagaagaggagcatcctgagtataagactgtagattctccaacagttagagttggcggtgaagcccaagcctctttcaaaaaagtcaaccatgacacgccaatgttaagtttagggaatgcatttaatgaggatgatttgagaaaattcgaccaacgcatacgtgaacaaattggcaacgttgaatatatgtgcgaattaaaaattgatggcttagcagtatcattgaaatatgttgatggatacttcgttcaaggtttaacacgtggtgatggaacaacaggtgaagatattaccgaaaatttaaaaacaattcatgcgatacctttgaaaatgaaagaaccattaaatgtagaagttcgtggtgaagcatatatgccgagacgttcatttttacgattaaatgaagaaaaagaaaaaaatgatgagcagttatttgcaaatccaagaaacgctgctgcgggatcattaagacagttagattctaaattaacggcaaaacgaaagctaagcgtatttatatatagtgtcaatgatttcactgatttcaatgcgcgttcgcaaagtgaagcattagatgagttagataaattaggttttacaacgaataaaaatagagcgcgtgtaaataatatcgatggtgttttagagtatattgaaaaatggacaagccaaagagagtcattaccttatgatattgatgggattgttattaaggttaatgatttagatcaacaggatgagatgggattcacacaaaaatctcctagatgggccattgcttataaatttccagctgaggaagtagtaactaaattattagatattgaattaagtattggacgaacaggtgtagtcacacctactgctattttagaaccagtaaaagtagctggtacaactgtatcaagagcatctttgcacaatgaggatttaattcatgacagagatattcgaattggtgatagtgttgtagtgaaaaaagcaggtgacatcatacctgaagttgtacgtagtattccagaacgtagacctgaggatgctgtcacatatcatatgccaacccattgtccaagttgtggacatgaattagtacgtattgaaggcgaagtagcacttcgttgcattaatccaaaatgccaagcacaacttgttgaaggattaattcactttgtatcaagacaagccatgaatattgatggtttaggcactaaaattattcaacagctttatcaaagcgaattaattaaagatgttgctgatattttctatttaacagaagaagatttattacctttagatagaatggggcagaaaaaagttgataatttattagctgccattcaacaagctaaggacaactctttagaaaatttattatttggtctaggtattaggcatttaggtgttaaagcgagccaagtgttagcagaaaaatatgaaacgatagatcgattactaacggtaactgaagcggaattagtagaaattcatgatataggtgataaagtagcacaatctgtagttacttatttagaaaatgaagatattcgtgctttaattcaaaaattaaaagataaacatgttaatatgatttataaaggtatcaaaacatcagatattgaaggacatcctgaatttagtggtaaaacgatagtactgactggtaagctacatcaaatgacacgcaatgaagcatctaaatggcttgcatcacaaggtgctaaagttacaagtagcgttactaaaaatacagatgtcgttattgctggtgaagatgcaggttcaaaattaacaaaagcacaaagtttaggtattgaaatttggacagagcaacaatttgtagataagcaaaatgaattaaatagttag

SEQ ID NO: 7617 - DNA, 888 bp, Staphylococcus aureus
atgagtaaaattattggatcagacagagtcaaaagaggtatggctgaaatgcaaaaaggcggcgttattatggatgtcgttaatgctgagcaagcaagaattgcagaagaagcaggcgcggtagcagttatggcattagaacgagtaccttctgatattagagctgctggtggcgttgcacgtatggcaaaccctaaaattgtagaagaagtaatgaatgctgtttctattccagtcatggctaaagcacgtattggtcatatcactgaagcaagagtattagaggcgatgggtgttgactatattgatgaatcagaagtgttaacaccagcagatgaggaatatcacttaagaaaagatcaatttacagtaccatttgtatgtggatgtcgtaatttaggtgaagctgcgcgtagaattggtgaaggtgctgctatgttacgtactaaaggtgaaccaggtacaggtaatattgttgaagctgtaagacatatgagacaagttaattcagaagttagtcgattgactgtaatgaatgatgatgagattatgacttttgcgaaagatatcggtgcgccttatgaaattttaaaacaaattaaagacaatggtcgtttaccggtagttaactttgcagctggtggcgttgcgactcctcaagatgctgctttaatgatggaattaggtgctgacggtgtattcgttggatcaggtatttttaaatcagaagatccagaaaaatttgctaaagcaattgttcaagcaacaacacattaccaagactatgaactaattggaagattagcaagtgaacttggcactgctatgaaaggtttagatatcaatcaattatcattagaagaacgtatgcaagagcgtggttggtaa

SEQ ID NO: 7618 - DNA, 1968 bp, Staphylococcus aureus
atgaatcggcagtccactaagaaagctttactaataccatttgtcatcatgatcatcacagcaattgttttaatgggtgtatggtttatctttaatagtcttatagcattaattgcatctatcgttcttgtcgtgatgattattgttagcatcattttattcagacaagctttaatgaaaatggatagttatgtagatggtttgagtgctcaaatttcaacaacaaataataaagcaatcaaacatttaccaattggtatcattgttttagatgaaaatgatcacatcgaatgggttaaccaatttatgacaaatcatatggaagcaaatgtcatttctgaatctgtaaatgaagtatttccaaacattttaaagcaattagatagagtgaaatccgttgaaatagaatataatcagtatcatttccaagtacgttattctgagaatgatcattgcctctatttctttgatataactgaacaagtacaaacaaatgaactatatgaaaattctaaaccaatcattgcgacattatttttagataactacgatgagattactcaaaatatgaatgatacgcagcgttcggaaatcaattcaatggtaacgcgtgttattagtcgatgggcaactgagtataatatattctttaaaaggtatagttccgatcaattcgtagcctatttaaatcaaaaaatattagctgacttagaagaatctaaatttgatatcttgagtcaattacgtgaaaaaagtgttggttatcgtgcccaattaacattaagtattggtgttggtgaaggtactgaaaatttaatcgatttaggtgaattatcacaatcaggcctagacttagcattagggcgcggtggcgaccaagttgcaattaaaagtattaatggtaatgtgcgtttctatggcggtaagactgacccgatggagaaacgtactcgtgtaagagcacgagtgatctcacatgcgttaaaagatatccttgcagagggtgacaaagtcattatcatgggacataaacgtcctgacttagatgcaattggtgcagcaatcggtgtgtctagatttgcaatgatgaataatttagaagcatacatcgtattaaatgagactgacattgatccaacattacgacgcgtgatgaacgaaattgataaaaagtcagagttaagagagcgatttataacatcagatgatgcttgggatatgatgacatctaagacaaccgtagtgattgttgatacgcataaaccggaactggttttagatgaaaatgtcttaaataaagcaaaccgtaaagttgttatcgatcatcatagacgtggtgaaagcttcatctctaatccattgttgatatatatggaaccatacgcaagttcaacagctgaattggtaacagagttactggaatatcaaccaacagaacaacgtttaacacgtcttgaatcaacagtgatgtatgcaggtattattgtagatacaagaaactttacattacgaacaggatcaagaacattcgatgcagcgagttatttacgtgcacatggtgcagatacgattttaacgcaacatttcttaaaagatgatgtggatacttacattaatcgatctgaattaattcgaactgtaaaagttgaagataatggcatagccattgcgcatggttcagacgataaaatttatcatccagtaacagttgcacaagcagcagatgaactgttaagtttagaaggtattgaagcatcatatgttgttgcgagacgtgaagataatctgattggtatatctgcgcgttcactcggttcagtaaatgttcagttaacaatggaagcacttggtggcggtggacatttaaccaatgctgcaacacaacttaaaggtgtgacagtcgaagaggcgatagcacaattacaacaagcaattacagaacaattaagtaggagtgaagatgcatga

SEQ ID NO: 7619 - DNA, 1455 bp, Staphylococcus aureus
atgagcgatcgtataagagtaagatatgcaccaagtccaactggttatcttcatattggtaatgcaagaacagcattattcaattacttgtatgctaaacattacaacggagattttgtgattcgaattgaagatactgataaaaaacgtaatttagaagatggagaaacatcacaatttgataatcttaaatggttaggattagattgggatgagtctgtagataaagacaatggctacggaccatatcgtcaatctgaacgtcaacatatctaccaaccattaatagatcagttactagcagaagataaagcatataaatgctatatgacagaagaagaattagaagctgaacgtgaagcgcaaatcgctcgtggtgaaatgcctcgctatggtggtcaacatgcgcatttgactgaagaacaacgtcaacaatttgaagcagaaggacgccaaccatcaattcgtttccgagtacctcaaaaccaaacgtattcatttgatgatatggtaaaaggaaatatttcatttgattcaaatggtattggtgactgggttatcgtaaaaaaagatggcattccaacgtacaattttgcagtagctatagatgatcattacatgcaaatttcagatgtaattcgtggtgatgatcatatttcaaacacgcctaaacaaattatgatttatgaagcatttggctgggagccacctcgttttggtcatatgtcattaattgttaatgaagaacgtaaaaagttaagtaaacgtgatgggcaaattttacaatttattgagcaatatcgtgacttaggttatttacctgaagcgttatttaattttattgcgttattaggttggtctcctgaaggtgaagaagaaatcttttctaaagaagaatttatcaaaatctttgatgaaaagcgtttgtcaaaatcaccagcatttttcgataagcaaaaattagcatgggttaataaccaatatatgaaacaaaaagatactgaaacagtattccaattagcattacctcatttaattaaagcaaatttgattcctgaggtgccgtcagaagaggatttatcttggggacgcaaattaattgcgctttatcaaaaagaaatgagttatgccggtgaaattgtacctttatcagaaatgttctttaaagaaatgccagctcttggtgaagaagaacaacaagtgattaatggagagcaagtaccagagttaatgacgcacttattcagtaaattagaagcacttgaaccatttgaagcggctgaaattaaaaagacaattaaagaagttcaaaaagaaacaggaataaaaggcaagcaattatttatgcctattcgtgttgctgtaacaggccaaatgcatggtcctgaattaccaaatacaattgaagtacttggtaaagaaaaagtgctaaaccgtttaaaacaatataagtaa

SEQ ID NO: 7620 - DNA, 2403 bp, Staphylococcus aureus
atgttgatatcaaatgaatggttgaaagaatatgtaacaatcgatgattctgtaagtgatttggcagaacgtattacgcgcacaggtattgaagtggatgatttaattgactacacaaaagatatcaaaaatttagttgtcggtttcgttaagtcaaaagagaaacatcctgatgccgataaattaaatgtttgccaagttgatatcggagaagacgaacctgtacaaatcgtatgtggtgcaccgaacgttgatgcaggacaatatgtcattgttgctaaagtaggtggcagattgcctggtggtattaaaattaagcgtgccaaattacgcggtgaacgttcagaaggtatgatttgttcgttacaagaaattggtatttcaagtaactatataccgaaaagttttgaatcaggcatttatgtttttagtgaatcccaagttccaggaacagatgccttacaagctttatatttagatgatcaagtaatggaatttgatttaacgccgaatcgtgcagatgctttaagtatgataggtactgcttatgaagttgcagcattatataatacaaaaatgactaagccagagacaacatcaaatgagcttgagttatctgcaaatgatgaattgactgtgacaattgaaaatgaagataaagtaccatattatagtgcacgtgttgttcacgacgtgacaattgaaccttcgccaatttggatgcaagcacgcttaataaaagcgggtatacgtcctattaataatgttgttgacatttcaaattatgtgttattagaatacggtcaaccattgcacatgtttgatcaagatgcgattggttcacaacaaattgttgttcgtcaagctaatgaaggcgaaaaaatgacaacattagatgatacagaacgtgaattattaacgagcgatattgtcattactaatggacaaactccaattgcattagctggtgttatgggtggcgatttttcagaagttaaagaacaaacatcaaatatagtgattgaaggtgctatttttgatccagtttcaattcgtcatacatcaagacgtttaaatttacgcagtgaatcatctagtcgttttgaaaaaggaatagctactgaatttgtagatgaagcagtcgaccgtgcatgttatttattacaaacttatgcaaacggaaaagtgctaaaagatagagtgtcttcaggagaacttggtgcatttattacaccaatcgacatcactgctgataaaattaatcgcactattggatttgatttgtcacaaaatgatattgttactatttttaatcaactagggtttgatacagaaataaatgatgatgttattacagtgctagtaccatcacgtcgtaaagatattacaattaaagaagatttaattgaagaagttgcacgtatatatggatacgacgatattccatcaacgttacctgtcttcgataaagttactagtggtcagctaactgatcgccaatataaaactagaatggttaaagaagtgttagaaggtgctggattagatcaagctattacgtattcgttagtttctaaagaggatgctactgcattttcgatgcaacagcgtcaaacaattgatttattgatgccaatgagtgaagcgcatgcgtcattacgtcaaagtttattaccacatttaatcgaagcagcatcatataatgtggcacgcaaaaataaagatgtaaaattatttgaaatcggcaatgtcttctttgctaatggagaaggtgaactaccagatcaagttgaatatttaagtggtattttaactggagattatgtagtcaatcaatggcaaggtaagaaagaaacggttgatttctatttagcaaaaggtgtcgtggatcgagtatctgaaaagttaaaccttgaatttagttatcgtcgtgctgatattgatggattacatccaggtcgtactgctgaaatcttattagagaataaagttgttggttttattggtgaattacatccaacattagcagctgataatgatttaaaacgtacgtatgtttttgagttgaattttgatgcattaatggctgtgtcggtaggttacattaattaccagccaattccgagattcccaggcatgtctcgtgacattgcattagaagtagatcaaaatattccagcagctgatttattatcaacgattcatgcacacggtggcaatatattaaaagatacacttgtctttgatgtatatcagggcgaacatttagaaaaaggtaaaaaatcaattgcaatacgtttaaattatttagacacagaagaaacattgacagatgagcgcgtttcaaaagtgcaagcggaaattgaagcagcattaattgaacaaggtgctgttattagataa

SEQ ID NO: 7621 - DNA, 1293 bp, Staphylococcus aureus
atgtttgtcgatcaagtcaaaatatctcttaaagccggtgatggtggtaatggtattaccgcatatagaagagaaaaatatgtaccatttggtggaccagctggcggtgacggtggtaaaggtgcttcagtcgtatttgaagtggatgaaggtttaagaacgttattagattttagatatcaacgtcattttaaagcaagcaaaggtgaaaatggccaaagtagtaatatgcatggtaaaaatgcggaagatttagtattaaaagttccacctggtacaattattaaaaatgttgaaacagacgaagtgttagcagatcttgttgaagatggtcaaagagctgtagtagcgaagggcggtcgaggtggccgaggtaattcacgttttgcaacacctagaaaccctgcacctgacttcagtgaaaaaggtgaaccaggtgaggaattagatgtatctttagaattgaaattattagctgatgtaggattagtaggtttccctagtgtgggtaaatcgactttattatctatcgtttcaaaagctaagcctaaaattggggcatatcattttacaacgattaaaccaaatctaggtgttgtttcaacgcctgatcaacgtagttttgttatggcagatttaccaggtttaattgaaggtgcatctgatggcgttggattaggacatcaatttttaagacatgtagagagaacaaaagttattgttcacatgattgatatgagcggttctgaaggtagagaacctattgaagattataaagtcattaatcaagaattagctgcgtacgagcaacgtttagaagatagacctcaaatcgtagtagctaacaagatggatttacctgaatcacaagataatttaaacttgtttaaagaagaaattggcgaagatgtgccagttattccagtttcaacaataacgcgtgataatattgatcaattattatatgcaatagcagataaattagaagaatataaagatgttgacttcacagttgaagaagaggagtcagttggcattaaccgagtattatataaacatacaccgtcacaagataaatttacaatttcaagagatgatgatggtgcttatgtggtaagtggtaatgctattgaaagaatgtttaaaatgactgactttaacagtgatccagcagtacgtcgatttgctcgtcaaatgcgttcgatgggtattgatgatgcacttagagaacgtggttgtaaaaatggtgatatcgttagaattcttggcggagaatttgaattcgttgaatag

SEQ ID NO: 7622 - DNA, 1266 bp, Staphylococcus aureus
atggaaaagatgcatatcactaatcaggaacatgacgcatttgttaaatctcacccaaatggagatttattacaattaacgaaatgggcagaaacaaagaaattaactggatggtacgcgcgaagaatcgctgtaggtcgtgacggtgaagttcagggtgttgcgcaattactttttaaaaaagtacctaaattaccgtatacgctatgttatatttcacgtggttttgttgttgattatagtaataaagaagcgttaaatgcattgttagacagtgcaaaagaaattgctaaagctgagaaagcgtatgcaattaaaatcgatcctgatgttgaagttgataaaggtacagatgctttgcaaaatttgaaagcgcttggttttaaacataaaggatttaaagaaggtttatcaaaagactacatccaaccacgtatgactatgattacaccaattgataaaaatgatgatgagttattaaatagttttgaacgccgaaatcgttcaaaagtgcgcttggctttaaagcgaggtacgacagtagaacgatctgatagagaaggtttaaaaacatttgctgaattaatgaaaatcactggggaacgcgatggcttcttaacgcgtgatattagttactttgaaaatatttatgatgcgttgcatgaagatggagatgctgaactatttttagtaaagttggacccaaaagaaaatatagcgaaagtaaatcaagaattgaatgaacttcatgccgaaatagctaaatggcagcagaagatggaaacatctgaaaagcaagctaaaaaagcgcaaaatatgattaatgatgcgcaaaataaaattgctaaaaatgaagatttaaaacgagacctagaagctttagaaaaggaacatcctgaaggtatttatctttctggtgcactattaatgtttgctggctcaaaatcatattacttatatggtgcgtcttctaatgaatttagagattttttaccaaatcaccatatgcagtatacgatgatgaagtatgcacgtgaacatggtgcaacaacttacgatttcggtggtacagataatgatccagataaagactctgaacattatggcttatgggcatttaaaaaagtgtggggaacatacttaagtgaaaagattggtgaatttgattatatattgaatcagccattgtaccaattaattgagcaagttaaaccgcgtttaacaaaagctaaaattaaaatatctcgtaaattaaaacgaaaatag

SEQ ID NO: 7623 - DNA, 582 bp, Staphylococcus aureus
ttggctaaaacgttatatttaatgcgccacggacaaactttgtttaattttaagggactaattcagggatttggagattcgccgctaacagaacttggaattgctcaagctcaaaaggcacgtagttattatgaaactaaggggataaacttcgatttatatgcatcatcaacgcaagaacgcgcaagtgacacacttgaaaatgttgcacctaaccaatcgtatcaacgttttaagggactgaaggaatggcattttggaatatttgaaggtgagtcagtctatctatttgataatctatacaagcctgaggacttattcggagatcgaattgttcctttcaaaggagaggcaaggcaacaagttgaagaacgcattgtgaaaactttacatgacattatgtctcaaacaaagaataatgcattagtcgtgagtcatggaacaataatgggagtatttttaagatattgccttaaactagatgaagcattaaagcataatatcggtaattgtaatatcctgaaatttgaatatgacaatggaacatttaaatttgttgagttaattgatccaaatttataa

SEQ ID NO: 7624 - DNA, 501 bp, Staphylococcus aureus
atgtctgctatcattgaagctaaaaaacaactagttgatgaaattgctgaggtactatcaaattcagtttcaacagtaatcgttgactatcgtggattaacagtagctgaagttactgacttacgttcacaattacgtgaagctggtgttgagtataaagtatacaaaaacactatggtacgtcgtgcagctgaaaaagctggtatcgaaggcttagatgaattcttaacaggtcctactgctattgcaacttcaagtgaagatgctgtagctgcagcgaaagtaatttctggatttgctaaagatcatgaagcattagaaattaaatcaggtgttatggaaggcaatgttattacagcagaagaagttaaaactgttggttcattaccttcacacgatggtcttgtatctatgcttttatcagtattacaagctcctgtacgcaacttcgcttatgcggttaaagctattggagaacaaaaagaagaaaacgctgaataa

SEQ ID NO: 7625 - DNA, 780 bp, Staphylococcus aureus
atgatgcaacaactatctctgaaacatagattaaacaatggtgattcagtttatggcatttttaattctataccggacccattgatgatcgaggttatcgcagcaagcgggtatgactttgttgtgattgatacagaacacgtggcgattaatgatgagacactagcgcatttaattcgtgcagctgaagcagcgcatattataccaattgtacgtgtcactgcagtgatagatagagatatcattaaagtgttagatatgggtgcgagaggtattattgtgccacacgttaaagatcgtgagacagttgagcatattgtgaaattaagtcgttattacccgcaaggattaagaagtttgaatggtggtcgcatggcaagatttggacgtacaccattacttgatgcaatggagatggctaatgagcatattatggtgattgccatgatagaagatgttgaaggggttatggccattgacgatatagctcaagtcgaaggtttagacatgatagtcgaaggtgccgcagatttatcgcagtcacttggcataccatggcaaacgcgtgatgatcaagtaacatcacatgttcaacatatttttgaggttgtgaatgcacatggtaaacatttttgtgcattaccacgtgaagatgaagatattgcaaaatggcaggcacaaggtgtacaaacatttattttaggtgatgatcgcggaaaaatatatcgccatttaagtgcatctctagcgacgtctaaacagaaaggggatgatggctaa

SEQ ID NO: 7626 - DNA, 909 bp, Staphylococcus aureus
atgcaaaaaaatatattaaaaagtggtattgcattatctgaattaggtctaggttgcatgagtttaggtacagatttaaaaaaagccgaacaaattatagattgtgctgttgaaaatggtatcacttattttgatacagcagacatgtacgataaaggtataaatgaatcagttgttggtaaggcacttcttaaatatcaacaacgcgatgatattttcattggtacaaaagtaggcaatcgtttaacaaaagatggcagtacaacatgggatccgagtaaatcctatattaaagaggcagttaaaggttcactaaagcgtttaggtatcgatcatatcgatttatatcaacttcatggcggaaccattgatgacccattagacgaaacaataagcgcatttgatgaattgaaacaagaaggaattatacgtgcttacggtatttcttctattcgcccaaatgtaattgattattatttaaaacatagtcaaatcgaaacgataatgtctcaattcaatttgattgataatcgtccagaatcattattagatgcaattcacaacaatgatgttaaagtattggcaagaggacctgtgtctaaaggattattaacttcaaacagtgttaatgtgctcgacaataaatttaaagatggtatttttgattattctcatgatgaattgggtgaaacaatagcctctattaaagaaattgaaagtaatttatctgcattgacatttagttatttaacatcacatgacgtgcttggttccatcattgtaggtgcaagtagcgtcgaccaattaaaagaaaatattgaaaactatcatactaaagttggtttagatcagattaaaacagcaagagctcgtgtaaaggatttggaatataccaatcatttagtgtag

SEQ ID NO: 7627 - DNA, 20142 bp, Staphylococcus aureus
atgggtaacttacaaacggctatcaacgataagtcaggaacattagcgagccaaaacttcttggatgctgatgagcaaaaacgtaatgcttacaatcaagctatatcagctgccgaaaccattttaaataaacaaactggaccgaatacagcgaaaacagcggttgaacaagcacttaataatgttaatagtgcgaaacatgcattaaatggtacgcaaaacttaaataatgcgaaacaagcagcgattacagcaattaatggcgcatctgatttaaatcaaaaacaaaaagatgcattaaaagcacaagctaatggtgctcaacgcgtatctaatgcaaatgatgtacaacgtaatgcgactgaactgaacacggcaatgggtcaattacaacatgccatcgcagataagacgaatacgttagcaagcagtaaatatgtcaacgccgatagcactaaacaaaatgcttacacaactaaagttaccaatgctgaacatattattagcggtacgccaacggttgttacaacaccttcagaagtaacagctgcagctaatcaagtaaacagcgcgaaacaagaattaaatggtgacgaaagattacgtgttgcaaaacaaaacgccaatactgctattgatgcattaacgcaattaaatactcctcaaaaagctaaattaaaagaacaagtgggacaagccaatagattagaagacgtacaatctgttcaaacaaatggacaatcattgaacaatgcaatgaaaggcttaagagatagtattgctaacgaaacaacagtcaaagcaagtcaaaactatacagacgcaagtccgaataaccaatcaacatataatagcgctgtgtcaaatgcgaaaggtatcattaatcaaactaacaatccaactatggatactagtgcgattacccaagctacaacacaagtgaataatgctaaaaatggtttaaacggtgctgaaaacttaagaaatgcacaaaacactgctaagcaaaacttaaatacgttatcacacttaacaaataaccaaaaatctgcaatctcatcacaaattgatcgtgcaggtcatgtgagtgaggtaacagctgctaaaaatgcagcaactgagttaaacgcgcaaatgggcaacttggaacaagctatccatgatcaaaacacagttaaacaaggtgttaacttcactgatgcagataaagctaaacgtgatgcttatacaaatgcggtaagcagagcagaaacaattctgaataaaacgcaaggtgcaaatacgtctaaacaagatgttgaagcggctattcaaaatgttacaagtgctaaaaatgcattgaatggtgatcaaaacgttacaaatgcgaagaatgcagctaaaaatgcattaaataacttaacgtcaattaataatgcacaaaaacgtgacttaacaactaaaattgatcaagcaacaacagtagctggtgttgaagcggtatctaatacaggtacacaattgaatacagcgatggctaacttgcaaaatggtattaatgataaagcgaatactttagcgagcgaaaactatcatgatgctgattcagataagaaaactgcttatactcaagccgttacgaacgcagaaaatattttaaataaaaatagtggatcaaatttagataaagctgccgttgaaaacgcgttgtcacaagtgacaaatgcgaaaggtgccctaaatggtaaccataatttagagcaagctaaatcaaatgcaaacactactataaacggccttcaacatttaacaacagcacaaaaagataaattgaaacaacaagtgcaacaagcacaaaatgttgcaggtgtagatactgttaaatcaagtgccaacacattaaatggtgctatgggtacgttaagaaatagcatacaagataacacagctacgaaaaatggccaaaactatcttgatgctacagaacgtaacaaaacaaactataacaatgctgttgatagtgctaatggtgtcattaatgcaacaagcaatccaaatatggatgctaatgcaattaaccaaatcgctacacaagtgacatcaacgaaaaatgcattagatggtacacataatttaacgcaagcgaaacaaacagcaacaaatgccatcgatggtgctactaacttaaataaagcgcaaaaagatgcgttaaaagcacaagttacaagtgcgcaacgtgttgcaaatgtaacaagtatccaacaaactgcaaatgaacttaatacagctatgggtcaattacaacatggtattgatgatgaaaatgcaacaaaacaaactcaaaaatatcgtgacgctgaacaaagtaagaaaactgcttatgatcaagctgtagctgctgcgaaagcaattttaaataaacaaacaggttccaattcagataaagcagcagttgaccgtgcattacaacaagtaacaagtacgaaagatgcattgaatggggatgctaaactggcagaagcgaaagcggcagctagacaaaacttaggtactttaaaccatattacgaatgcacaacgtactgcgttagaaggtcaaatcaatcaagcgacgactgttgatggcgttaatactgtaaaaacaaatgccaatacattagacggcgctatgaatagcttacaaggtgcaatcaatgataaagatgcgacattaagaaatcaaaattatcttgatgcagatgaatcaaaacgaaatgcatatacgcaagctgtcacagcggctgaaggcattttaaataaacaaacaggtggtaacacatctaaagcagacgttgataatgcattaaatgcagttacaagagcgaaagcggctttaaatggtgctgaaaacttaagaaatgcgaaaacttcagcaacaaatacgattaatggtttacctaacttaacacaattacaaaaagacaacttgaagcatcaagttgaacaagcgcaaaatgtagttggtgtaaatggtgttaaagataaaggtaatacattaaatactgccatgggtgcattacgtacaagtatccaaaatgataatacgacgaaaacaagtcaaaattatcttgatgcatctgatagcaacaaaaataattacaatactgctgtaaataatgcaaatggtgttattaatgcaacgaacaatccaaatatggatgctaatgcgattaatgacatggcaaatcaagtcaatacaacaaaagcagcgttaaatggtgcacaaaacttagctcaagctaaaacaaatgcgacgaacacaattaacaacgcgcaagacttaaaccaaaaacaaaaagatgcattaaaaacacaagttaacaatgcacaacgtgtatctgatgcaaataacgttcaacatacagctactgaattgaacggtgcgatgacagcacttaaagcagctattgcggataaagaaagaacaaaagcaagcggtaattatgtcaatgctgatcaagaaaaacgtcaagcgtatgattcaaaagtgactaacgctgaaaatatcattaatggtacaccaaatgcgacattaacagtcaatgacgtaaatagtgcggcatcacaagtcaatgcggctaaaacagcattaaatggtgataacaacttacgtgtagcgaaagagcatgctaacaatacaattgacggcttagcacaattgaataatgtacaaaaagcaaaattaaaagaacaagttcaaagtgcaactacattagatggtgttcaaactgttaaaaatagttctcaaacgttgaatacagcgatgaaaggcttaagagatagtattgcgaatgaagcaacgattaaagcaggtcaaaactacactgacgcaagtccaaataatcgtaacgagtacgacagcgcagttactgcagcaaaagcaatcattaatcaaacatcgaacccaacgatggaaccaaatactattacgcaagcaacatcacaagtgacaactaaagaacatgcattaaatggtgcgcaaaacttagctcaagctaagacaacagcgaaaaacaacttgaataacttaacatcaattaacaatgcacaaaaagatgcgttaacgcgtaacattgatggtgcaactacagtagctggtgtaaatcaagaaactgcaaaagcaacagaattaaataacgcaatgcacagtttacaaaatggtatcaatgatgagacacaaacaaaacaaactcagaaatacctagatgctgagccaagtaagaaatcagcttatgatcaagcagtaaatgcagcaaaagcaattttaacaaaagctagtggtcaaaatgtagacaaagcagcagttgaacaagcattacaaaatgtgaacagtacgaagacggcgttgaacggtgatgcgaaattaaatgaagctaaagctgctgcgaaacaaacgttaggtacattaacacacattaataatgcacaacgtaatgcgttagataatgaaattacacaagcaacaaatgttgaaggtgttaatacagttaaagccaaagcgcaacaattagatggtgctatgggtcaattagaaacatcaattcgtgataaagacacgacgttacaaagtcaaaattatcaagatgctgatgatgctaaacgaacggcttattctcaagcagtaaatgcagcagcaactattttaaataaaacagctggaggaaatacacctaaagcagatgtcgaaagagcaatgcaagctgttacacaagccaatactgcattaaacggtattcaaaacttagaacgtgcgaaacaggctgcgaacacagcgattacaaatgcttcggacttaaatacaaaacaaaaagaagcattgaaagcacaagtaacaagtgcaggacgcgtatctgcagcaaatggtgttgaacatactgcgactgaattaaatactgcgatgacagctttaaaacgtgccattgctgataaagctgacacaaaagctagtggtaattatgtcaatgctgatgcgaataaacgccaagcatatgatgaaaaagtgacagctgcagaacatatcgttagtggtacaccaacaccaacgttaacaccatcagatgttacaaatgcagcaacgcaagtaacgaatgcgaagacgcagttaaacggtaatcataatttagaagtagcgaaacaaaatgctaacacagcaattgatggtttaacttctttaaatggtccgcaaaaagcaaaacttaaagaacaagtgggtcaagcgacgacgttgccaaatgttcaaactgttcgtgataatgcacaaacattaaacactgcaatgaaaggtctacgagatagcattgcgaatgaagcaacgattaaagcaggtcaaaactacacagatgcaagtcaaaacaaacaaaatgactacaacaatgcagtcactgcagcaaaagcaatcattggtcaaacaactagtccatcaatgattgcgcaagaaattaatcaagcgaaagaccaagtgacagctaaacaacaagcgttaaacggtcaagaaaacttaagaactgcgcaaacaaatgcgaagcaacatttgaatggcttaagtgacttaactaatgcacaaaaagatgcagcgaaacgccaaatcgaaggtgcaacgcatgttaatgaagtaacacaagcgcaaaataatgcggacgcattaaatacagctatgacgaacttgaaaaatggtattcaagatcaaaatacgattaagcaaggtgttaacttcactgatgcagatgaagcgaaacgtaatgcatatacaaatgcagtgacgcaagctgaacaaattttaaataaagcacaaggtccaaatactgcaaaagacggtgtcgaaactgcgttacaaaatgtacaacgtgctaaaaacgaattgaacggtaatcaaaatgttgcgaacgctaagacaactgcgaaaaatgcattgaataaccttacatcaattaataatgcacaaaaagcagcattgaaatcacaaattgaaggtgcgacaacagttgcaggtgtaaatcaagtgtctacaatggcatctgaattaaatactgcaatgagcaacttacaacgtggtattaatgacgaagcagctacaaaagcagctcagaaatatactgaagcagatagagataaacaaactgcatacaatgatgctgtaacagcagctaaaacgttattagataaaacagctggttcaaatgacaataaagtagccgttgaacaagcattacaacgtgtgaatactgctaaaacagcattaaatggtgacgcgcgattaaatgaagcgaagaacacagctaaacaacaattagcgacaatgtcacatttaactaatgctcaaaaagcaaacttaacagaacaaattgaacgtggtacaactgttgctggtgttcaaggcatccaagcaaatgctggtactttaaatcaagcaatgaatcaattaagacaaagtattgcttctaaagatgcgactaaatcaagcgaagattatcaagacgcgaatgcagatttacaaaatgcatacaatgatgcggtaactaatgctgaaggtattattagtgcaacgaataaccctgaaatgaatcctgatacaattaaccaaaaagcgagccaagtgaacagtgcgaagtctgcattgaacggtgatgaaaaattagcagcagtaaaacaaactgcgaaatcagatatcggtcgtttgacagacttgaacaatgcacaacgaactgcggcaaatgctgaagtggatcaagcaccaaatcttgcagctgtcacagcggctaaaaataaagcaacatcgttaaacacagcgatgggtaatttgaaacatgcacttgctgaaaaggataatacgaaacgtagtgtcaattacacagatgcggatcaaccaaaacaacaagcgtatgatactgcagttacacaagcagaagcaattactaatgcaaatggcagtaacgcgaatgaaacacaagttcaagcagcgcttaaccaattgaatcaagctaaaaacgacttgaatggtgataataaagttgctcaagcgaaagaaacagcaaaacgtgcattagcttcatatagtaacttgaataacgcgcaatcaactgcagcaactagtcaaattgacaatgcaacgacagtagcagacgtaactgctgcacaaaatactgctaatgaattaaatacagcaatgggtcaacttcaaaatggtattaatgaccaaaacactgttaaacaacaagtgaactttacagatgctgaccaaggtaagaaagatgcttacacaaatgctgttacgaatgctcaaggtattttagataaagcaaacggtcaaaatatgacaaaagcacaagttgaagctgcattaaatcaagtaacgactgctaagaatgctttaaacggtgatgcaaatgtaagacaagcaaaatcagatgcgaaagcaaacttaggtacattaacacacttaaataatgcacaaaaacaagatttaacatcacaaatcgaaggtgcaacaacagtcaacggtgtaaatagtgttaaaacgaaagcacaagacttagatggtgcaatgcaacgattagagtcagcaatcgcaaataaagatcaaactaaagcgagcgaaaactacattgacgcagatccaactaagaaaacagcatttgataatgccatcacacaagctgaatcttacttaaataaagatcatggtacgaataaagataagcaagctgttgaacaagcaattcaaagtgtaacgtctactgaaaatgctttgaacggtgacgcgaacttacaatgcgctaaaactgaagctacacaagctatcgataacttgacacaattgaatacaccgcaaaaaacagcattgaaacaacaagtgaatgctgcacaacgcgtatcaggtgtaactgatctgaaaaatagtgctacatcacttaataatgcgatggatcaattaaaacaagcaattggtgatcatgacacaattgtagctggtggtaattacactaacgcaagtcctgataaacaaggtgcttacactgatgcatataatgctgcgaagaatatcgtaaatggttcacctaatgtgattacaaatgcagcagatgttactgcggcaacacaacgtgtcaataatgctgaaacaagtttaaatggtgatacaaacttagcaactgcgaagcaacaagctaaagatgcattacgtcaaatgacacatttatctgatgcacaaaaacaaagtattactggtcaaattgatagcgcgacacaagtaactggtgtacaaagtgtgaaagacaatgcaacaaatcttgacaatgcaatgaatcaacttcgaaatagtattgcgaataaagatgaagtaaaagcgagtcaaccatatgttgatgcagatacagataaacaaaatgcatacaatacagcagttacaagtgctgaaaatatcattaatgcaacgagtcagccaacacttgatccatctgcagtaacacaagcagctaatcaagtgaacactaacaaaactgcgcttaatggtgcgcaaaacttagcaaataaaaagcaagaaacaactgctaacatcaaccgattaagtcatttaaacaatgctcaaaagcaagatttaaatacacaagtgacaaatgcaccaaatattagcacagtaaatcaagtgaaaactaaagctgaacaattagatcaagcaatggaacgtttaatcaacggaatccaagacaaagatcaagtgaaacaaagtgttaactttacagatgcagatccagaaaaacaaacagcatacaacaatgcggtaactgctgctgaaaatattattaatcaagcaaatggtacaaatgcgaaccaatcacaagttgaagcagcactttcaactgtaacaactactaaacaagcgttgaatggtgatagaaaagtaacagatgctaaaaacaatgcaaaccaaacattatctacgttagataacttaaacaatgcacaaaaaggtgctgttactggaaacatcaatcaagcgcacactgtagctgaagtaacgcaagccattcaaaccgctcaggaactgaatacagcgatgggtaacttgaaaaatagcttgaatgataaagacactacacttggcagtcaaaactttgcagatgcagatccagagaagaaaaatgcatacaatgaagcggttcgtaatgctgaaaatattttaaataaatctacaggtacgaacgtgcctaaagatcaagttgaagcagctatgaatcaagtgaatactacaaaagcagcgcttaatggtactcaaaaccttgaaaaagcgaaacaacacgcaaatacagcaattgacggtttaagccatttaacaaatgcacaaaaagaggcattaaaacaattggtacaacaatcgactactgttgcagaagcacaaggtaatgaacaaaaagcaaacaatgttgatgcagcaatggacaaattacgtcaaagtattgcagataatgcgacaacaaaacaaaaccaaaattatactgatgcaagtccgaataaaaaggatgcgtacaataatgctgtcacaactgcacaaggtattattgatcaaactacaaacccttcattagatccgactgttatcaatcaagctgctggacaagtaagcacgtctaaaaatgctttaaatggtaatgaaaacttagaggcagcgaagcaacaagcaacgcaatctttaggttcattagacaacttaaataatgcgcaaaaacaagctgttactaatcaaattaatggcgcgcatactgttgatgaagcaaatcaaattaagcaaaatgcgcaaaacttaaatactgcgatgggtaacttgaaacaagcgatagctgataaagatgctacgaaagcaacagttaacttcactgatgcagatcaagcaaaacaacaagcatataacactgcagttacaaatgctgaaaatatcatttcaaaagctaatggtggtaatgcaacacaaactgaagttgaacaagcaatccaacaagtaaatgcagcaaaacaagcattaaatggtaatgccaacgttcaacatgcaaaagacgaagcaacagcattaattaataactctaatgatcttaaccaagcacagaaagatgcattaaaacaacaagtacaaaatgcaactactgtagctggtgtaaacaatgttaaacaaacggcgcaagagttaaacaatgcgatgacacaattaaaacaaggcattgcagataaagaacaaacaaaagctgatggtaactttgtcaatgcagattctgacaagcaaaatgcatataatcaagcagtagcgaaagctgaagcattaattagtggtacgcctgatgttgtcgttacacctagcgaaattactgcagcgttaaataaagttacgcaagctaaaaatgatttaaatggtaatacaaacttagcaacggcgaaacaaaatgttcaacatgctattgatcaattgccaaacttaaaccaagcgcaacgtgatgaatacagcaaacaaatcacgcaagcaacacttgtaccaaacgtcaatgctattcaacaagcggcaacaacgcttaatgacgcgatgacacaattgaaacaaggtattgcgaataaagcacaaattaaaggtagcgagaactatcacgatgctgatactgacaagcaaacagcatatgataatgcagtaacaaaagcagaagaattgttaaaacaaacaacaaatccaacaatggatccaaatacaattcaacaagcattaactaaagtgaatgacacaaatcaagcacttaacggtaatcaaaaattagctgatgccaaacaagatgctaagacaacacttggtacactagatcatttaaatgatgctcaaaaacaagcgctaacaactcaagttgaacaagcaccagatattgcaacagttaataatgttaagcaaaatgctcaaaatctgaataatgctatgactaacttaaacaatgcattacaagataaaactgagacattaaatagcattaactttactgatgcagatcaagctaagaaagatgattatactaatgcggtttcacatgcagaaggtattttatctaaagcaaatggcagcaatgcaagtcaaactgaagtggaacaagcgatgcaacgtgtgaacgaagcgaaacaagcattgaatggtaatgacaatgtacaacgtgcaaaagatgcagcgaaacaagtaattacaaatgcaaatgatttaaatcaagcgcaaaaagatgcattaaaacaacaagtcgatgctgcgcaaactgttgcaaatgtaaacacgattaagcaaacagcacaagatttaaatcaagcaatgacacaattgaaacaaggtattgcagataaagaccaaactaaagcaaatggtaactttgtcaatgctgatactgataagcaaaatgcatataacaatgcggtagcgcatgctgaacaaatcattagtggtacaccaaatgcaaacgtggatccacaacaagtggctcaagcgttacaacaagtgaatcaagctaagggtgatttaaacggtaaccacaacttacaagttgctaaagacaatgcaaatacagccattgatcagttaccaaacttaaatcaaccacaaaaaacagcattaaaagaccaagtgtcgcatgcagaacttgttacaggtgttaatgctattaagcaaaatgctgatgcgttaaataatgcaatgggtacgttgaaacaacaaattcaagcgaatagtcaagtaccacaatcagttgactttacacaagcggatcaagacaaacaacaagcttataacaatgcagctaaccaagcgcaacaaatcgcaaatggcacaccaacacctgtattggcgcctgatacagtaacaaaagcagttacaactatgaatcaagcgaaagatgcattaaacggtgatgaaaaattagcgcaagcgaaacaagatgctttagcaaatcttgatacgttacgtgacttaaatcaaccacaacgtgatgcattacgaaaccaaatcaatcaagcacaagctttagctacagttgaacaaactaaacaaaatgcacaaaatgtgaatacagcaatgggtaacttgaaacaaggtattgcaaataaagatactgtgaaagcaagtgagaactaccacgatgctgatgtcgataagcaaacagcatatacaaatgcagtgtctcaagcggaaggtattatcaatcaaacgacaaatccaacgcttaacccagatgacattactcgtgcattaactcaagtgactgatgctaaaaatagcttaaacggtgaagctaaattagccactgaaaagcaaaatgctaaagatgccgtaagtggaatgacgcatttaaacgatgctcaaaaacaagcattaaaaggtcaaatcgatcaatcgcctgaaattgctacagtgaaccaagttaaacaaacagcaacgagcctagatcaagcaatggatcaattatcacaagctattaatgataaagatcaaatattagcggacggtaattacttaaatgcagatcctgacaaacaaaatgcgtataaacaggcagtagcaaaagctgaagcattattgaataaacaaagtggtactaatgaagtacaagcacaagttgaaagcatcactaatgaagtgaacgcagcgaaacaagcattaaatggtaatgacaatttggcaaatgcaaaacaacaagcaaaacaacaattggcgaacttaacacacttaaatgatgcacaaaaacaatcatttgaaagtcaaattacacaagcgccacttgttacagatgtcactacgattaatcaaaaagcacaaacgttagatcatgcgatggaattattaagaaatagtgttgcggataatcaaacgacattagcgtctgaagattatcatgatgcaactgcgcaaagacaaaatgactataacaaagctgtaacagctgctaataatatcattaatcaaactacatcgcctacgatgaatccagatgatgttaatggtgcaacgacacaagtgaataatacgaaagttgcattagatggtgatgaaaaccttgcagcagctaaacaacaagcaaacaacagacttgatcaattagatcatttgaataatgcgcaaaagcaacagttacaatcacaaattacgcaatcatctgatattgctgcagttaatggtcacaaacaaacagcagaatctttaaatactgcgatgggtaacttaattaatgcgattgcagatcatcaagccgttgaacaacgtggtaacttcatcaatgctgatactgataaacaaactgcttataatacagcggtaaatgaagcagcagcaatgattaacaaacaaactggtcaaaatgcgaaccaaacagaagtagaacaagctattactaaagttcaaacaacacttcaagcgttaaatggagatcataatttacaagttgctaaaacaaatgcgacgcaagcaattgatgttttaacaagcttaaatgatcctcaaaaaacagcattaaaagaccaagttacagctgcaactttagtaactgcagttcatcaaattgaacaaaatgcgaatacgcttaaccaagcaatgcatggtttaagacagagcattcaagataacgcagcaactaaagcaaatagcaaatatatcaacgaagatcaaccagagcaacaaaactatgatcaagctgttcaagccgcaaataatattatcaatgaacaaactgcaacattagataataatgcgattaatcaagtagcggcaactgtgaatacaacgaaagcagcattacatggtgatgtgaaattacaaaatgataaagatcatgctaaacaaacggttagccaattagcacatctaaacaatgcacaaaaacatatggaagatacgttaattgatagtgaaacaactagaacagcagttaagcaagatttgactgaagtacaagcattagatcaacttatggatgcattacaacaaagtattgctgacaaagatgcaacacgtgcgagcagtgcatatgtcaatgcagaaccgaataaaaaacaagcctatgatgaagcagttcaaaatgctgagtctatcattgcaggattaaataatccaactatcaataaaggtaatgtatcaagtgcgactcaagcagtaatatcatctaaaaatgcattagatggtgttgaacgattagctcaagataagcaaactgctggaaattctctaaatcatttagatcaattaacaccagctcaacaacaagcgctagaaaatcaaattaataatgcaacaacttgtgataaagtggctgaaatcattgcacaagcgcaagcattaaatgaagcgatgaaagcattaaaagaaagtattaaggatcaaccacaaactgaagcaagtagtaaatttattaacgaggatcaagcgcaaaaagatgcatatacgcaagcagtacaacacgcgaaagatttgattaacaaaacaactgatcctacattagctaaatcaatcattgatcaagcgacacaggcagtgactgatgctaaaaacaatttacatggtgatcaaaaactagctcaagataagcaacgtgcaacagaaacgttaaataacttgtctaacttgaatacaccacaacgtcaagcacttgaaaatcaaatcaataatgcagcaactcgtggtgaagtagcacaaaaattaactgaagcacaagcacttaaccaagcaatggaagctttacgtaatagcattcaagatcaacaacaaacagaatctggtagcaagtttattaatgaagataaaccgcaaaaagatgcttaccaagcagcagttcaaaatgcaaaagatttaattaaccaaacaggtaatccaacgcttgataaagcacaagttgaacaattgacacatgcttttaaacaagctaaagataacctacacggtgatcaaaaacttgcagacgataaacaacatgcggttactgatttaaatcaattaaatggtttgaataatccgcaacgtcaagcacttgaaagccaaataaacaacgcagcaactcgtggcgaagtagcgcaaaaattagctgaagcaaaagcgcttgatcaagcaatgcaagcattacgaaatagtattcaagatcaacaacaaacggaagcgggtagcaagtttatcaatgaagataaaccgcaaaaagatgcttaccaagcagcagttcaaaatgcaaaagatttaattaaccaaacaggtaatccaacactcgacaaatcacaagtagaacaattaacacaagcagtaacaactgcaaaagataatctacatggtgatcaaaaacttgctcgtgatcaacaacaagcagtaacaactgtaaatgcattgccaaacttaaatcatgcacaacaacaaacattaactgatgctataaatgcagcgcctacaagaacagaggttgcacaacatgttcaaactgctactgaacttgatcacgcgatggaaacattgaaaaataaagttgatcaagtgaatacagataaggctcaaccaaattacactgaagcgtcaactgataaaaaagaagcagtagatcaagcgttacaagctgcacaaagcattacagatccaactaatggttcaaatgcgaataaagacgctgtagaacaagcattaactaagcttcaagaaaaagtgaatgagttaaatggtaatgagagagtcgctgaagctaaaacacaagcgaaacaaactattgaccaattaacacatttaaatgctgatcaaattgcaactgctaaacaaaatattgatcaagcgacgaaacttcaaccaatcgctgaattagtagatcaagcaacgcaattgaaccaatcaatggatcaattacaacaagcagttaatgaacatgctaacgttgagcaaactatagattacacacaagcagattcagataagcaaaaggcttataaacaagcgattgctgatgctgaaaatgtattgaaacaaaatgcgaataagcaacaagtggatcaagcacttcaaaatattttaaatgcaaaacaagcattaaatggtgatgaacgtgtagcacttgctaaaacaaatggtaaacatgacatcgaccaattgaatgcattaaacaatgctcaacaagatggatttaaaggtcgcatcgatcaatcaaacgatttaaatcaaatccaacaaattgtagatgaggctaaggcacttaatcgtgcaatggatcaattgtcacaagaaatcactggcaatgaaggacgcacgaaaggtagcacgaactatgtcaatgcagatacacaagtcaaacaagtatatgatgaagcggttgataaagcgaaacaagcacttgataaatcgtctgggcaaaacttaactgcagaacaagttatcaaattaaatgatgcagtcactgcagctaagaaagcattaaatggtgaagaaagacttaataatcgtaaagctgaagcattacaaagattggatcaattaacacatctaaacaatgctcaaagacaattagcaatccaacaaattaataatgctgaaacgctaaataaagcatctcgagcaattaatagagcaactaaattagataatgcaatgggtgcagtacaacaatatattgacgaacagcaccttggtgttatcagcagcacaaattacatcaatgcagatgacaatttgaaagcaaattatgataatgcaattgcgaatgcagcacatgagttagataaagtgcaaggtaatgcaattgcaaaagctgaagcagagcaattgaaacaaaatattatcgatgctcaaaatgcattaaatggagaccaaaaccttgcaaatgccaaagataaagcaaatgcgtttgttaattcgttaaatggattaaatcaacagcaacaagatcttgcacataaagcaattaacaatgccgatactgtatcagatgtaacagatattgttaataatcaaattgacttaaatgatgcaatggaaacattgaaacatttagttgacaatgaaattccaaatgcagagcaaactgtcaattaccaaaacgctgacgataatgctaaaacaaacttcgatgatgccaaacgtctagcaaatacattgctaaatagtgataacacaaatgtgaatgatatcaatggcgcaatccaagcagtcaatgatgcaatccataatcttaatggtgatcaacgactacaagatgctaaagacaaggcaattcaatcaattaatcaagctttagctaataagctaaaagaaatcgaagcttcaaatgcgacggatcaagacaagcttattgcgaaaaataaagcagaagaattggcaaacagcatcatcaacaacattaataaagcaacaagtaatcaggctgtatctcaagttcaaacagcaggcaaccacgcgattgaacaagtgcatgctaatgaaataccaaaagcaaaaattgatgccaataaagacgttgataagcaagttcaagcattaattgacgaaattgatcgaaatccaaatctaacagataaggaaaaacaagcacttaaagatcgtattaatcaaatacttcaacaaggtcataacgacattaacaatgcgctgactaaagaagaaattgaacaagctaaagcacaacttgcgcaagcattacaagacatcaaagatttagtgaaagctaaagaagatgcgaaacaagatgttgataaacaagttcaagcattaattgacgaaatcgatcaaaatccaaatctaacagataaggaaaaacaagcacttaaagatcgtattaatcaaatacttcaacaaggtcataacggcattaacaatgcgatgactaaagaagaaattgaacaagccaaagcacaacttgcacaagcattaaaagaaattaaagatttagtgaaagctaaagaaaatgcgaaacaagatgttgataaacaagttcaagcattaattgacgaaatcgatcaaaatccaaatctaacagataaggaaaaacaagcgcttaaagatcgaatcaatcaaatactgcaacaaggtcataacgacattaacaatgcgatgactaaagaagaaattgaacaagccaaagcacaacttgcacaagcattacaagacatcaaagatttagtgaaagctaaagaagatgcgaaaaatgcaataaaagccttagctaatgcgaagcgtgatcaaatcaattcaaatccagatttaacacctgagcaaaaagcaaaagcgctcaaagaaattgacgaagctgaaaaacgagcactacaaaacgttgagaatgctcaaactatagatcaattaaatcgaggattaaacttaggtttagatgacattagaaatacacatgtatgggaggttgatgaacaacctgctgtaaatgaaatttttgaagcaacacctgagcaaatcctagttaatggtgaactcattgtacatcgtgatgacatcattacagaacaagatattcttgcacacataaacttaattgatcagctttcagcagaagttattgatacaccatcaactgcaacgatttctgatagcttaacagcaaaagttgaagttacattgcttgatggatcaaaagtgattgttaatgttcctgtaaaagttgtagaaaaagaattgtcagtagtcaaacaacaggcaattgaatcaatcgaaaatgcggcacaacaaaagattgatgaaatcaataatagtgtgacattaacactggaacaaaaagaagctgcaattgcagaagttaataagcttaaacaacaagcaattgatcatgttaacaatgcacctgatgttcattcagttgaagaaattcaacaacaagaacaagcgtatattgaacaatttaatccagaacaatttacgattgaacaagcaaaatcaaatgcaattaaatcgattgaagatgcaattcaacatatgattgatgaaatcaaagctcgtactgatctaacagataaagagaagcaagaagctattgctaagttaaatcaattaaaagaacaagcaattcaagcgattcaacgtgcgcaaagcatcagtgaaataactgagcaattggaacaatttaaagctcaaatgaaagcagctaatccaacagcaaaagaactagctaaacgcaagcaagaagctattagtagaattaaagacttttcaaatgaaaaaataaatagtattcgaaatagtgaaattggcacagctgatgaaaaacaagcagcaatgaatcaaattaacgaaattgtgcttgaaacaattagagatattaataatgcgcatacattacagcaagttgaggctgcattgaacaatggtattgctcgaatttcagcagtacaaattgtaatatctgatcgtgctaaacaatcgtcaagtactggaaatgaatctaatagccatttaacaattggttatggaactgcaaatcatccatttaacagttcgactattggacataaaaagaaacttgatgaagatgatgacattgatccacttcatatgcgtcactttagtaataatttcggtaatgttattaaaaacgctattggtgtggtgggtatctctggcttactagctagtttctggttcttcattgccaaacgtcgtcgtaaagaagatgaagaggaagaattagaaataagagataataataaagattcaataaaagagactttagacgatacaaaacatttaccacttttatttgcgaaacgtcgcagaaaagaagatgaagaagatgttactgttgaagaaaaagattcgctaaataatggcgagtcactcgataaagttaaacatacgccgttcttcttaccaaaacgtcgtcgtaaagaagatgaagaagatgtggaagttacaaatgaaaacacagatgaaaaagtgttgaaagataacgaacattcaccactcttattcgcaaaacgacgcaaagataaagaggaagatgttgaaacaacaactagtattgaatctaaagatgaggacgttcctttattattggctaaaaagaaaaatcaaaaagataaccaatccaaagacaaaaagtcagcatcaaaaaatacttctaaaaaggtagcagctaaaaagaagaaaaagaaatctaagaaaaataaaaaataa

SEQ ID NO: 7628 - DNA, 1131 bp, Staphylococcus aureus
caaaagtttagtattcgtaaatatacagttggtacattttcaactgtcattgcgacattggtatttttaggattcaatacatcacaagcacatgctgctgaaacaaatcaaccagcaagcgtggttaaacagaaacaacaaagtaataatgaacagactgagaatcgagaatctcaagtacaaaattctcaaaattcacaaaatggtcaatcattatctgctactcatgaaaatgagcaaccaaatattagtcaagctaatttagtagatcaaaaagtagcgcaatcatctactactaatgatgaacaaccagcatctcaaaatgtaaatacaaagaaagattcggcaacggctgcgacaacacaaccagataaagaacaaagtaagcataaacaaaacgaaagtcaatctgctaataaaaatggaaacgacaatagagcggctcatgtagaaaatcatgaagcaaatgtagtaacagcttcagattcatctgataatggtaacgtacaacatgaccgaaatgaattacaagcgttttttgatgcaaattatcatgattatcgctttattgaccgtgaaaatgcagattctggcacatttaactatgtaaaaggcatttttgataagattaatacgttattaggcagtaatgatccaataaacaataaagacttgcaacttgcatacaaagaattggaacaagctgttgctttaattcgtacaatgcctcaacgtcaacagactagccgacgttcaaatagaattcaaacgcgttcggttgagtcaagagctgcagagcctagatcagtatcagactatcaaaatgcaaattcatcatattatgttgaaaatgctaatgatggttcgggctatcctgttggtacatatatcaatgcttctagtaaaggggcgccatataatttaccaactacaccatggaatacattgaaggcctctgactcaaaggaaattgctcttatgacagcgaaacaaactggagacgggtaccaatgggttattaagtttaataaaggacatgctccacatcaaaatatgatcttttggtttgcattaccagcagaccaagtgccagtaggaagaactgactttgtaacagttaattcagatgga

SEQ ID NO: 7629 - DNA, 372 bp, Staphylococcus aureus
attagtgatataatgggttggacggcacaaggattagacacactccgaatcaatgaagaaaataatgaattaggtattgaccaattagtagacattattaaaaaacataatgtgggtacagtcgtaataggactacctaaaaacatgaataattcaataggatttcgaggcgaagcttcgttaacatataaagaaaaattattagaagcttatccttctattgagattgtgatgtgggatgaaagattaagcacaatggctgctgaacgatcattattagaagcagatgtttcaagacaaaaaagaaaacaagtgattgataaaatggcagcggtatttattttacaaggctatttagattcactacattaa

SEQ ID NO: 7630 - DNA, 309 bp, Staphylococcus aureus
atgactgaacataatcatgattcacaactagaaattaataacgaagaagaattattaactttattcgatgaagagggaaatgaagttttataccgaaaagttttagaattttatcatcctgaattcaaaaaagagtatgttatcttagctgaagaaggtgctcaatcagatgaagacgatatgattgagcttgtaccaatgatcaatgaaccagatgagtcaggtgacggtggtaagttagtaccaatcgaaactgatgaagaatgggacatgattgaagaagttgtaaatactgaaatggaagaataa

SEQ ID NO: 7631 - DNA, 1689 bp, Staphylococcus aureus
ttggttaaaagtaagatatatatagataaaatctattgggaacgtgttcagttattcgttgaaggacatagtgaaaacctagatttagaagatagtaattttgtattaagaaatttaactgagacacgtacaatgaaggcgaatgatgtcaaaatagatgggaatcaattcgtttgtcgtttcaatgtagctatcttagataatggttattacttacctgaagataagtacttattagtgaatgagcaagaacttgattatattgcacagttaaacccagatgtgattaatgatgcatatcaaaatctaaagccagaacaagaagaagaatacaacgaattagaaacacaaaatggtaaaatcaatttcttattgcagacttacctaaaagaatttagaaaaggcggcatttcgaagaaaacggtttatactgttacacctgaaatttctagcgatgttaatgaatttgtccttgatgttgttgtaacgactccggaagttaaaagtatttatatcgttcgtaaatataaagaattacgtaagtatttccgcaaacaatcatttaatacaagacaatttatttttaaagcgatatttaatacgacgaaatttttccacttgaaaaaagggaatacggtgttgttcacatcagactctagaccaacgatgtctggaaactttgaatacatctataacgaaatgttacgtcaaaatttagataaaaagtatgatattcacactgtttttaaagcgaatattacagatagacgtggcatcatcgacaagtttagattgccatatttacttgggaaggcagactacatctttgttgatgactttcacccattgatttatacagtgcgttttagacgttctcaagaagttattcaagtatggcatgccgttggtgcctttaaaacagttggctttagtcgtactggtaaaaagggtggaccatttattgattcattaaatcatcgtagctatacaaaagcttatgtatcatctgaaaccgatattccattctacgctgaagcatttggtattaaagagaaaaatgtagtgcctacaggtgttccacgtactgatgtactatttgatgaagcttatgcgacacagatcaaacaagagatggaagatgaattaccaattattaaaggtaagaaagtcattcttttcgcaccaacatttagaggtagtggtcatggtacagcacattacccatttttcaaaattgatttcgaacgtttagcaagatattgcgaaaaaaataacgcggttgtattatttaaaatgcatccatttgtgaaaaatagacttaatattgcagacaaacataaacaatattttgttgacgtttctgactttagagaagttaatgatatactgttcataacagatttattaattagtgactattcatctttaatatatgaatatgcagtatttaaaaagccaatgattttctatgcatttgatttagaagattatattacgacgcgtgatttttatgaaccatatgaatcatttgttccaggtaaaattgtgcaatcatttgacgcattaatggacgccttggacaatgaagattatgaaggagaaaaagtcattccattcttagataaacattttaaatatcaagatggccgatcaagtgagcgtttagtcagaaatttatttggtagctaa

SEQ ID NO: 7632 - DNA, 1722 bp, Staphylococcus aureus
atgatgaaattttcagtaatagttccaacatacaattcagaaaagtatataacagaattacttaatagccttgcgaaacaagattttccgaaaactgaatttgaagtggttgtagttgatgactgttcaacagatcaaacgttacaaatagttgaaaagtatcgcaataaattgaacttgaaagtaagtcaactcgaaacaaattctggtggtccaggtaaacctagaaatgtggcgttaaaacaagcagaaggtgaatttgtattatttgtggactccgatgactatataaacaaagagactttaaaggatgcagcagcatttattgatgaacatcactcagatgtcttattgattaaaatgaaaggtgttaatggtcgtggtgtaccacaatctatgtttaaagaaacagcacctgaagttactttgttaaattcaagaattatctatactttaagcccgactaaaatctatagaacagcattactaaaagataatgacatttattttccagaagaattaaagagtgcagaagatcaattatttacaatgaaagcatatttgaatgcaaatcgaatcagtgtgttaagtgataaagcgtattattatgctacaaagcgtgaaggtgaacatatgagtagtgcgtatgtttcacctgaagacttttacgaagtcatgagattgattgctgtagaaatattaaatgcagatttagaagaagctcataaagatcaaatcttagcagaatttttaaatcgtcattttagtttttctcgtacgaatggcttctcacttaaagttaaacttgaagagcaaccacaatggattaatgctctaggagactttatacaagcagttccagaacgtgtagatgcattggtgatgagtaaattacgaccattgttgcactacgcgagagcgaaagatatagacaactatagaactgtagaagaaagttaccgtcaaggtcaatactaccgttttgatattgtagatggtaaattaaacattcaattcaatgaaggcgaaccatactttgaaggcattgatatcgctaagccaaaagtgaaaatgacagcatttaaatttgataatcataaaattgttacagagctaacgttaaatgaatttatgattggcgaaggacattatgatgtcagacttaaattacattcacgaaacaagaagcacacaatgtatgtacctttaagtgtcaatgcgaataaacaatatcgttttaacattatgttagaagatattaaagcgtatttacctaaagaaaaaatttgggatgttttcttagaagtccaaataggtacggaagtatttgaagtgcgtgttggtaatcaacgtaataaatatgcatatactgcagaaacaagtgcattaattcatttaaataatgatttttatagattaacaccgtatttcacaaaagactttaataacatttcgttatactttacagctattacattaacggattcaatctcaatgaagttaaaaggtaaaaacaaaatcattttaactggtctggatcgtggttatgtatttgaagaaggtatggctagtgtcgtgctaaaagacgacatgattatgggaatgttaagccaaacgtcagaaaacgaagtggaaatcttacttagtaaagatattaagaagcgagacttcaaaaatattgttaagttaaacactgcacatatgacttactcgctaaaataa

SEQ ID NO: 7633 - DNA, 498 bp, Staphylococcus aureus
atggattatgcgccacatacagctgaaaatgtcgttcaaaacgctaataaattaatagatgtttttagaaaaaacaatggctttatcgcttttgttcgcgtgaatttctatgatggtaaagatgtattgcaaccaaatgcaatgatctcattaccaccaaaagaaggcgacgactacagtcgtttccatcatttattagacaagagagatgacgattttgtcatagacaaacgacattttagtgcatttgtaggaacagatttggacttacaattgcgacgtcgaggaattgatacgattgttcttggtggtgtcgcaacgcatattggcgtagatacgacagcgcgagatgcctatcaattaaactacaatcagttttttgttacagatatgatgagtgcacaaaacgaaacgctacatcaatttccaatagataatgtattcccattaatgggacaaacaataactacaaacgactttctaaatatattgaactaa

SEQ ID NO: 7634 - DNA, 1029 bp, Staphylococcus aureus
atgttcgatgacaaaattttattaattactgggggcacaggatcattcggtaatgctgttatgaaacggtttttagattctaatattaaagaaattcgtattttttcacgcgatgagaaaaaacaagatgacattcgaaaaaaatataataattcaaaattaaagttctacattggtgatgtgcgtgatagtcaaagtgtagaaacagcaatgcgagatgttgattacgtattccatgcagcagctttaaaacaagtgccgtcatgtgaattctttccagttgaggcagtgaagacaaatattattggtacagaaaatgtcttacaaagtgctattcatcaaaatgttaaaaaagtcatatgtttatctacagataaggcagcgtatcctattaatgctatgggtatttcaaaagcaatgatggaaaaagtattcgtagccaaatcaagaaatattcgtagtgaacaaacgcttatttgtggtacaagatacggtaatgtgatggcttcaagaggatcagtaatacctttgtttatcgacaaaatcaaagctggagaacctttaacgattacagatcctgatatgacaagatttttaatgagcttagaagatgcggtagaactagttgttcatgcatttaagcatgcagagacaggagatattatggttcaaaaagcaccaagctcaacggtaggggatcttgcgaccgcattattagaattgtttgaagctgataatgcaattgaaatcattggtacgcgacatggagagaaaaaagcagaaacattgttgacgagagaagaatacgcacaatgtgaagatatgggtgattattttagagtgccggcagactccagagatttaaattatagtaattatgttgaaaccggtaacgaaaagattacgcaatcttatgaatataactccgataatacacatattttaacggtggaagagataaaagaaaaacttttaacactagaatatgttagaaacgaattgaatgattataaagcttcaatgagatag

SEQ ID NO: 7635 - DNA, 1401 bp, Staphylococcus aureus
atggatagaatgtatgagcaaaatcaaatgccacataacaatgaagctgaacagtctgtcttaggttcaattattatagatccagaattgattaatactactcaggaagttttgcttcctgagtcgttttataggggtgcccatcaacatattttccgtgcaatgatgcacttaaatgaagataataaagaaattgatgttgtaacattgatggatcaattatcgacggaaggtacgttgaatgaagcgggtggcccgcaatatcttgcagagttatctacaaatgtaccaacgacgcgaaatgttcagtattatactgatatcgtttctaagcatgcattaaaacgtagattgattcaaactgcagatagtattgccaatgatggatataatgatgaacttgaactagatgcgattttaagtgatgcagaacgtcgaattttagagctatcatcttctcgtgaaagcgatggctttaaagacattcgagacgtcttaggacaagtgtatgaaacagctgaagagcttgatcaaaatagtggtcaaacaccaggtatacctacaggatatcgagatttagaccaaatgacagcagggttcaaccgaaatgatttaattatccttgcagcgcgtccatctgtaggtaagactgcgttcgcacttaatattgcacaaaaagttgcaacgcatgaagatatgtatacagttggtattttctcactagagatgggtgctgatcagttagccacacgtatgatttgtagttctggtaatgttgactcaaaccgcttaagaacgggtactatgactgaggaagattggagtcgttttactatagcggtaggtaaattatcacgtacgaagatttttattgatgatacaccgggtattcgaattaatgatttacgttctaaatgtcgtcgattaaagcaagaacatggcttagacatgattgtgattgactacttacagttgattcaaggtagtggttcacgtgcgtccgataacagacaacaggaagtttctgaaatctctcgtacattaaaagcattagcccgtgaattagaatgtccagttatcgcattaagtcagttatctcgtggtgttgaacaacgacaagataaacgtccaatgatgagtgatattcgtgaatctggttcgattgagcaagatgccgatatcgttgcattcttataccgtgatgattactataaccgtggcggcgatgaagatgatgacgatgatggtggtttcgagccacaaacgaatgatgaaaacggtgaaattgaaattatcattgctaagcaacgtaacggtccaacaggcacagttaagttacactttatgaaacaatataataaatttaccgatatcgattatgcacatgcagatatgatgtaa

SEQ ID NO: 7636 - DNA, 2415 bp, Staphylococcus aureus
ttgaattacaaccacaatcaaattgaaaagaaatggcaagactattgggacgaaaataaaacatttaaaacaaatgataacttaggtcaaaagaaattttatgctttagacatgtttccatatccatcaggtgctggtttacatgttggacatcctgagggctatacagcaacagatatcatttcaagatataaaaggatgcaaggttataatgtattacatccgatggggtgggatgcattcggattaccagcagagcaatatgctttagacactggcaacgacccacgtgaatttacaaagaaaaatatccaaacttttaaacgacaaattaaagaattagggttcagttatgattgggatcgtgaagttaatacaacagatccagaatactataaatggacacagtggattttcatacagttatataacaaaggtttagcatacgttgatgaagttgcagttaactggtgtccagcattaggcactgttttatctaacgaagaagtgattgatggtgtctctgaacgtggtggacatccagtttatcgtaagccgatgaaacaatgggtacttaaaatcacagaatatgcagatcaattattagcagatttagatgatttagattggcctgagtctttaaaagatatgcagcgcaattggattggacgttctgaaggggccaaagtttcatttgatgtagataatacggaaggaaaagtagaagtatttacgactagaccagacactatctatggtgcatcattcttagtcttaagtcctgaacatgcattagttaattcaattacaactgatgaatataaagaaaaagtaaaagcttatcaaacagaagcttctaaaaagtcagatttagaacgtacagatttagcaaaagataaatcaggtgtgtttactggtgcatatgcaattaatcctttatctggtgaaaaagtacaaatttggattgctgattatgtattatcaacatatggtactggagcaattatggcagtaccagcgcatgatgacagagattatgaatttgctaaaaagtttgatttgccaatcattgaagtcatcgaaggtggaaatgttgaagaagcagcatacactggtgaaggtaaacatattaattctggtgaacttgatggtttagaaaatgaagcggcaattactaaagctattcaattattagagcaaaaaggtgctggcgaaaagaaagttaattacaaattaagagattggttattcagtcgtcagcgttattggggcgaaccaattcctgtcattcattgggaagatggaacaatgacaactgttcctgaagaagagctaccattgttgttacctgaaacagatgaaatcaagccatcagggactggtgagtctccactagctaatattgattcatttgtaaatgttgtagatgaaaaaacaggtatgaaaggacgtcgtgaaacaaatacaatgccacaatgggcaggtagttgttggtattatttacgttacatcgatcctaaaaatgaaaatatgttagcagatcctgaaaaattaaaacattggttacctgttgatttatatatcggtggagtagaacatgcggttcttcacttattatatgcaagattttggcataaagtcctttatgatttgggtatcgtacctactaaagaacctttccaaaaattatttaaccaaggtatgattttaggagaaggtaatgagaagatgagtaaatctaaaggaaatgtaatcaatcctgatgatatagtacagtctcatggtgcagatactttacgtctttacgaaatgtttatgggacctttagatgctgcaattgcatggagtgaaaaaggattagatgggtctcgtcgattcttagatcgcgtatggcgtttaatggtaaatgaagatggaacattgagttcaaaaattgtaactacaaataataaatctttagataaagtttataaccaaactgttaaaaaggtaacagaagactttgaaacattaggatttaatactgctattagtcaattaatggtatttattaatgagtgttataaagttgatgaagtttataaaccttacattgaaggcttcgttaaaatgttagcacctattgcaccacatatcggtgaagaattatggtcaaaattaggacatgaagagtctattacgtaccaaccttggccaacttatgacgaagcactacttgtagatgatgaagtagaaatcgttgttcaagtaaatggtaaattgagagctaaaattaaaattgctaaagatacatcaaaagaagaaatgcaagaaattgccttatctaatgacaatgttaaagcgagtattgaaggtaaagacatcatgaaagtcatcgctgttcctcaaaaattagtcaatattgtagctaaataa

SEQ ID NO: 7637 - DNA, 945 bp, Staphylococcus aureus
atgatagaaatcgaaaaacctagaattgagacaattgaaattagtgaagatgctaaattcggtaagttcgttgttgaaccactagaacgtggctacggtactacactaggaaactccttacgtcgtatcctactatcttcattaccaggtgcagccgttaagtatattgaaattgagggagttttacatgaattctcagcagtagacaatgtagttgaagatgtttctacaattattatgaacattaaacaattagcattgaaaatttactctgaagaagataaaactttagaaattgatgtacgtgatgaaggcgaagtaacagcaagcgacattacacatgatagtgatgttgaaattttaaacccagagcttaaaattgcaacagtatctaaaggtggtcacttaaaaattcgtctagttgctaacaagggtagaggttacgcattagcagaacaaaataatactagtgatttaccaattggtgtaatccctgttgattcattgtattcacctgttgaacgtgtgaactatactgttgaaaatacacgtgtaggtcaaagcagtgattttgataaattaacattggatgtttggactaatggttcaatcacaccacaagaatcagtttcattagcagcaaaaataatgactgaacacttgaatatcttcgttggtcttactgatgaagcgcaaaacgctgaaatcatgattgaaaaagaagaagatcaaaaagaaaaagtattagaaatgtctattgaagaattagacttatctgtacgttcatataactgcttaaaacgcgcaggaatcaattctgttcaagagttagctgacaaatctgaagctgacatgatgaaagtgcgtaatttaggtcgtaaatctttagaagaagttaaatacaaattagaagatttaggattaggattaagaaaagaagattga

SEQ ID NO: 7638 - DNA, 369 bp, Staphylococcus aureus
atgggttacagaaaattaggtcgtacttctgatcaacgtaaagctatgttacgtgacttagctacatcacttattattagtgaacgtattgaaactacagaagctcgtgcaaaagaagttcgcagtgttgttgagaaattaatcactttaggtaaaaaaggagatttagcttctcgtcgtaatgcagctaaaactttacgtaatgttgaaatcttaaacgaagatgaaactacacaaactgcacttcaaaaattatttggtgaaatcgcagagcgttacacagaacgtcaaggtggttacactcgtatccttaaacaaggccctcgtcgcggtgacggtgctgaatcagtaattatcgaattagtataa

SEQ ID NO: 7639 - DNA, 138 bp, Staphylococcus aureus
atggtaaaacgtacttatcaaccaaataaacgtaaacatagtaaagttcatggtttcagaaaacgcatgagcacaaaaaatggccgtaaagttttagcgcgccgtcgtcgtaaaggccgtaaagttttatctgcataa

SEQ ID NO: 7640 - DNA, 2670 bp, Staphylococcus aureus
atggctgaattacctcaatcaagaataaatgaacgaaatattaccagtgaaatgcgtgaatcatttttagattatgcgatgagtgttatcgttgctcgtgcattgccagatgttcgtgacggtttaaaaccagtacatcgtcgtatactatatggattaaatgaacaaggtatgacaccggataaatcatataaaaaatcagcacgtatcgttggtgacgtaatgggtaaatatcaccctcatggtgacttatctatttatgaagcaatggtacgtatggctcaagatttcagttatcgttatccgcttgttgatggccaaggtaactttggttcaatggatggagatggcgcagcagcaatgcgttatactgaagcgcgtatgactaaaatcacacttgaactgttacgtgatattaataaagatacaatagattttatcgataactatgatggtaatgaaagagagccgtcagtcttacctgctcgattccctaacttgttagccaatggagcatcaggtatagcggtaggtatggcaacgaatattccaccacataacttaacagaattaatcaatggtgtacttagcttaagtaagaaccctgatatttcaattgctgagttaatggaggatattgaaggtcctgatttcccaactgctggacttattttaggtaagagtggtattagacgtgcatatgaaacaggtcgtggttcaattcaaatgcgttctcgtgcagttattgaagaacgtggaggcggacgtcaacgtattgttgtcactgaaattcctttccaagtgaataaggctcgtatgattgaaaaaattgcagagctcgttcgtgacaagaaaattgacggtatcactgatttacgtgatgaaacaagtttacgtactggtgtgcgtgtcgttattgatgtgcgtaaggatgcaaatgctagtgtcattttaaataacttatacaaacaaacacctcttcaaacatcatttggtgtgaatatgattgcacttgtaaatggtagaccgaagcttattaatttaaaagaagcgttggtacattatttagagcatcaaaagacagttgttagaagacgtacgcaatacaacttacgtaaagctaaagatcgtgcccacattttagaaggattacgtatcgcacttgaccatatcgatgaaattatttcaacgattcgtgagtcagatacagataaagttgcaatgaaaagcttgcaacaacgcttcaaactttctgaaaaacaagctcaagctattttagacatgcgtttaagacgtctaacaggtttagagagagacaaaattgaagctgaatataatgagttattaaattatattagtgaattagaaacaatcttagctgatgaagaagtattactacaattagttagagatgaattaacagaaattcgagatcgtttcggtgatgatcgtcgtactgaaatccaattaggtggatttgaagatttagaagatgaagatctcattccagaagaacaaattgtaattacactaagccataataactacattaaacgtttgccggtatctacatatcgtgctcaaaaccgtggtggtcgtggtgttcaaggtatgaatacattggaagaagattttgtcagtcaattggtaactttaagtacacatgaccatgtattgttctttactaacaaaggtcgtgtatacaaacttaaaggttatgaagtgcctgagttatcaagacagtctaaaggtattcctgtagtgaatgctattgaacttgaaaatgatgaagtcattagtacaatgattgctgttaaagaccttgaaagtgaagacaacttcttagtgtttgcaactaaacgtggtgtcgttaaacgttcagcattaagtaacttctcaagaataaatagaaatggtaagattgcgatttcgttcagagaagatgatgagttaattgcagttcgcttaacaagtggtcaagaagatatcttgattggtacatcacatgcatcattaattcgattccctgaatcaacattacgtcctttaggccgtacagcaacgggtgtgaaaggtattacacttcgtgaaggtgacgaagttgtagggcttgatgtagctcatgcaaacagtgttgatgaagtattagtagttactgaaaatggttatggtaaacgtacgccagttaatgactatcgtttatcaaatcgtggtggtaaaggtattaaaacagctacgattactgagcgtaatggtaatgttgtatgtatcactacagtaactggtgaagaagatttaatgattgttactaatgcaggtgtcattattcgactagatgttgcagatatttctcaaaatggtcgtgcagcacaaggtgttcgcttaattcgcttaggtgatgatcaatttgtttcaacggttgctaaagtaaaagaagatgcagaagatgaaacgaatgaagatgagcaatctacttcaactgtatctgaagatggtactgaacaacaacgtgaagcggttgtaaatgatgaaacaccaggaaatgcaattcatactgaagtgattgattcagaagaaaatgatgaagatggacgtattgaagtaagacaagatttcatggatcgtgttgaagaagatatacaacaatcatcagatgaagatgaagaataa

SEQ ID NO: 7641 - DNA, 369 bp, Staphylococcus aureus
atgatccaacaagaaacacgcttgaaagtagcagacaactctggtgctcgtgaagttcttacaatcaaagtattaggtggatctggtcgtaaaacagcaaacatcggcgatgttatcgtatgtactgttaaaaatgcaacaccaggtggcgttgttaaaaaaggtgacgttgtcaaagctgtaatcgtacgtactaagtcaggtgttcgtcgtaatgacggttcatacatcaaatttgatgaaaatgcatgtgttatcatccgtgatgacaaaggcccacgtggtactcgtatcttcggacctgttgctcgtgaattacgtgaaggtaacttcatgaaaatcgtatcattagcaccagaagtactttaa

SEQ ID NO: 7642 - DNA, 1824 bp, Staphylococcus aureus
atggcacatttatctgtgaaattgcggcttttaatactagcattaatcgattcactgatagtgacattttcagtattcgtaagttattacattttagaaccgtatttcaaaacatattctgtcaaattattaatattggcagctatatcactattcatatcgcatcatatttcagcatttatttttaatatgtatcatcgagcgtgggaatatgccagtgtgagtgaattgattttaattgttaaagctgtgacgacatctatcgttattacgatggtggtcgtgacaattgttacaggcaatagaccgttttttagattgtatttaattacttggatgatgcacttgattttaataggtggctcaaggttattttggcgtatttatcggaaataccttggaggtaagtcatttaataagaagccaactttagttgttggtgctggtcaagcaggttcaatgctgattagacaaatgttgaaaagtgacgaaatgaaacttgaaccggtattagcagtcgatgatgacgaacataaacgcaatatcacaattactgagggtgtaaaagtccaaggtaaaattgcggatattccagaactagtgaggaaatataagattaaaaaaatcatcattgcaattccaactattggtcaagagcgtttgaaagaaattaataatatttgccatatggatggcgttgagttattgaaaatgccaaatatagaagacgtcatgtctggtgagttagaagtgaatcaactgaaaaaagttgaagtagaagatttactaggcagagatcctgttgaattagatatggatatgatatcaaatgaattgacgaataaaactattttagttacgggtgcaggtggttcaataggatcagaaatttgtagacaagtttgtaatttctatccagaacgtattattctacttggccatggtgaaaacagtatttatttaatcaatcgtgaattgcgaaatcgcttcggaaaaaatgttgatatcgttcctattatagcggatgtgcaaaatagagcgcgtatgtttgaaattatggaaacgtataaaccatacgcagtttatcatgcagcagcacacaagcacgtgccgttaatggaagacaaccctgaagaagcagtacataataatattttaggtacgaaaaatactgctgaagctgctaaaaatgcagaggtaaagaaattcgttatgatttctacggataaagccgttaatccgcctaatgtcatgggagcttcaaagcgaattgcagaaatgattattcaaagtttaaatgatgaaacgcatcgaacaaattttgttgcagtgagatttggtaatgtacttggatcgagaggatctgtgattccacttttcaaaagtcaaattgaagaaggtgggccagttactgtgacacatcctgaaatgacacgttactttatgacaattcctgaagcttctagactagttttgcaggcaggggcattagcagaaggtggcgaagtatttgtgctagatatgggagaaccagtgaaaattgtagatttggcacgtaatttaattaagctaagtggtaaaaaagaagacgacatacgcattacttatacagggattagacccggcgaaaaaatgtttgaagagcttatgaataaagatgaggttcatcctgaacaagtatttgaaaaaatttatcgtggcaaagtacaacatatgaaatgtaatgaagttgaagcgattattcaagacatcgtcaatgactttagtaaagaaaaaattattaactatgccaatggcaaaaagggagataattatgttcgatga

SEQ ID NO: 7643 - DNA, 3117 bp, Staphylococcus aureus
gtgaaaaacaatcttaggtacggcattagaaaacataaattgggagcagcatcagtattcttaggaacaatgatcgttgttgggatgggacaagataaagaagctgcagcatcagaacaaaagacaactacagtagaagaaaatgggaattcagctactgataataaaacaagtgaaacacaaacaactgctactaacgttaatcatatagaagaaactcaatcatataacgcaacagtaacagaacaaccgtcaaacgcaacacaagtaacaactgaagaagcaccaaaagcagtacaagcaccacaaactgcacaaccagcaaatgtagaaacagttaaagaagaagagaaacctcaagttaaggaaacgacacaacctcaagacaatagcggaaatcaaagacaagtagatttaacacctaaaaaggttacacaaaatcaagggacagaaacacaagttgaagtggcacagccaagaacggcatcagaaagtaagccacgtgtgacaagatcagcagatgtagcggaagctaaggaagctagtgacgtttcagaagttaaaggcacagatgttacaagtaaagttacagtagaaagtggttctattgaggcacctcaaggaaataaagtagagccacatgctggtcaacgtgtcgtattgaaatacaaattgaaattcgcagatggattaaaaagaggagattattttgattttacattatcaaataatgtaaatacttatggggtttcaacagctagaaaggtaccagagattaaaaatggctcagttgtaatggctacaggtgagatcttagggaatggtaacataagatatacatttactaacgaaattgaacacaaggtagaggtaacagctaatttagaaatcaacttatttattgaccctaaaactgtacaaagcaatggagaacaaaagattacttctaaattaaatggtgaagaaacagaaaaaacaataccagttgtttataatccaggtgttagcaatagttatacaaatgtaaatggatcaattgaaacatttaataaagaatctaataaatttacacatatagcttatattaagccaatgaatggaaaccagtcaaacactgtatcagtaacagggacgttgactgaaggtagtaatttagctggtggacaacctactgttaaagtatatgaatatctagggaaaaaagatgaattgccacaaagtgtttatgcaaatacatcagatactaacaaattcaaagatgtaacaaaggaaatgaatggaaaattgagtgtgcaagacaatggtagttactcattgaatttagataagttggataaaacgtatgtcattcattatacaggtgaatatttgcaagggtcagatcaggttaattttagaactgaattatatgggtatccagaacgagcatataaatcttactatgtttatgggggatatcgtttaacttgggataatggtttagttttatatagcaataaagctgacggcaatggtaaaaatggacaaattattcaagataatgattttgaatataaagaagatactgcaaaaggaactatgagcgggcagtacgatgccaagcaaattattgaaacagaagaaaatcaagacaatacaccgcttgacattgattaccacacagctatagatggtgagggtggttatgttgatgggtatattgaaacaatagaagaaacggattcatcagctattgatatcgattaccatactgctgtggatagtgaagtgggtcacgttggaggatacactgagtcctctgaggaatcaaatccaattgactttgaagaatcgacacatgaaaattcaaaacatcacgctgatgttgttgaatatgaagaggatacaaatccaggtggtggccaagtaacaactgagtctaacttagttgaatttgacgaagagtctacaaaaggtattgtaactggcgcagtgagcgaccatacaacaattgaagatacgaaagaatatacgactgaaagtaatctgattgaactagtagatgaactacctgaagaacatggtcaagcacaaggaccaatcgaggaaattactgaaaacaatcatcatatttctcattctggtttaggaactgaaaatggtcacggtaattatggcgtgattgaagaaatcgaagaaaatagccacgttgatattaagagtgaattaggttacgaaggtggccaaaatagcggtaaccagtcattcgaggaagacacagaagaagacaaacctaaatatgaacaaggtggcaatatcgtagatatcgatttcgacagtgtacctcaaattcatggtcaaaataaaggtgaccagtcattcgaagaagatacagagaaagacaagcctaaatatgaacatggcggtaatatcattgatatcgacttcgacagtgtgccacaaattcatggattcaataagcataatgaaattattgaagaagatacaaacaaagataaacctaattatcaattcggtggacacaatagtgttgactttgaagaagatacacttccaaaagtaagcggccaaaatgaaggtcaacaaacgattgaagaagatacaacgccgccaacgccaccgacaccagaagtaccgagtgagccggaaacaccaatgccaccgacaccagaagtaccgagtgagccggaaacaccaacgccaccaacaccagaggtaccaagtgagccggaaacaccaacaccaccgactccggaagtaccaagtgagccggaaacaccaacaccaccgacaccagaagtgccgagtgagccagaaacaccaacaccgccaacaccagaggtaccagctgaacctggtaaaccagtaccacccgcaaaagaagaacctaaaaagccttctaaaccagtggaacaaggtaaagtagtaacacctgttattgaaatcaatgaaaaggttaaagcagtggcaccaactaaaaaagcacaatctaagaaatctgaactacctgaaacaggtggagaagaatcaacaaacaaaggtatgttgttcggcggattattcagcattctaggtttagcattattacgcagaaataaaaagaataacaaagcataa

SEQ ID NO: 7644 - DNA, 984 bp, Staphylococcus aureus
atgagaggtctaaaaacttttagtatattgggattaatagttgccttacttttagttgcagcttgtggtaatacggataattcaagtaaaaaagaatcatcaactaaagatactatttcggtaaaagatgaaaatggtacagtaaaagtacctaaagatgcaaaacgtatcgttgtattagagtactcatttgcagatgcattagcagcattagacgttaaaccagttggtattgctgatgatggtaagaaaaaacgtatcattaaaccagttagagaaaaaattggggattatacttctgtaggtacacgtaaacagccaaacttagaggaaattagtaaattaaaaccggatttaattatcgctgatagcagtagacataaaggtattaataaagaattaaacaaaattgcaccaacattatcattaaagagttttgatggagactacaaacaaaatattaattcgttcaaaacaattgctaaagctttaaataaagaaaaagaaggcgaaaaacgtcttgctgagcatgataaattaatcaataagtataaagatgaaattaaatttgatagaaatcaaaaagtgcttccagcagtagttgctaaagctggtttattagcacatccaaactattcatatgttggacaatttttaaacgaactaggatttaaaaatgcattaagtgacgatgtaacaaaaggtttaagtaaatatttgaaaggaccttacttacaattagacactgaacatttagctgatttaaatccagagcgtatgatcattatgacagatcatgctaaaaaagattctgctgaattcaagaagttacaagaagatgcaacatggaaaaagttgaatgcagttaaaaataatcgcgtggatattgttgaccgtgatgtttgggcaagatctcgtggcttaatttcttctgaagaaatggctaaagaacttgttgaattatcaaaaaaagaacaaaagtaa

SEQ ID NO: 7645 - DNA, 1032 bp, Staphylococcus aureus
atggctataaaagaaataagtagccaatctgccatagatcataaaagaaaaagacgcacaacactcacgtatatagtgagtttgtgctttctttttatttgtatatatttaaatatggcgattggttcttcgaaaattaattttagcgatatcattcactatgttactggtcatacagatacgaaagcaacgtttttattgcataatgtacgtatgccaaggatgattgcagggttatttattggcggtgcattagcggtatctggtttgttaatgcaagcaatgacacgcaatccgctagcatcacctaaaatttttggtgtcagttctggtgcatcgtttttcattgtatttgtgacgattatcattccatcattagaatattatgcattatatttaggtgtgataggtgcatttataggtggtttaactgtttatacactttcaggtgctacgaaaggtatgacacccattaaattagcattggctggtatggccatccatttgttttttagtagtatgactgaaggtattattattttgaatgagaattcaaacgaacaagtgatgttttggcttgtcggttcattatccagtatgaagtgggatgaaattttaaccattttaccatggattattggtgctttaattgtaacgatttttattggacgtcaactaacgattatggaactaggcgatgacattgctaagggattgggtcaaaatataaataaagttagaattatcattgggctattagtcattattcttacaggtatgtcggtgtcagtggcaggaccaattggatttgttggcttaatcgtaccgcatatagtcaaacgctatgtgagtaagaattatttagtcatgattccattaacatttattataggtgcagatttgttactactatcagatgtattaagtcgtttaatcacttatccttacgaatcacctgtaggtattgtgacatcattcgtaggtgcactttacttcttatttataacgattaaaggggtgaaaagaatatga

SEQ ID NO: 7646 - DNA, 1938 bp, Staphylococcus aureus
atggaacaaattaatattcaatttccagatggtaataaaaaggcgtttgataaaggtactactactgaagatatagcacaatcaattagtcctggattacgtaaaaaagctgttgccggcaaatttaacgggcaacttgtagatttaactaaaccgcttgaaactgatggatcaattggaattgtgacaccaggtagtgaagaagcgttagaggtattacgtcattctactgcacatttaatggcacacgcgattaaaaggttatatggtaatgttaaatttggtgtaggtcctgtaatagaaggtggattctactatgacttcgacattgaccaaaacatctcatctgatgactttgaacaaattgaaaaaacaatgaaacaaatcgttaacgaaaatatgaaaatcgaacgaaaagtggtttcacgagatgaagcgaaagagttattcagcaatgatgaatacaaattagaattaatcgacgcgattcctgaagatgaaaatgtaacattatatagtcaaggtgattttactgatttatgtcgtggagttcacgttccatcaacagctaaaattaaagagtttaaactattatctacagcaggtgcatactggcgtggagatagtaacaacaaaatgttacaacgtatatacggtactgctttctttgataaaaaagaattaaaagcacatttacaaatgttagaagagcgtaaagaacgtgatcatcgtaaaattggtaaagagttagaattattcacaaatagccaattagttggtgctggtttgccattatggttacctaacggtgcaacaattagacgtgaaattgaacgttacattgttgataaagaggtgagcatgggttatgaccacgtttatacaccagtacttgctaatgttgatttatacaaaacatctggtcactgggatcactatcaagaagatatgttcccaccaatgcagttagatgaaactgaatctatggtattacgtccaatgaactgtccacatcatatgatgatttatgcgaataaaccacattcatatcgtgaattacctatccgtatcgctgagctaggaacgatgcatagatatgaagcaagtggtgctgtatcaggattacaacgtgttcgtggtatgactttaaatgattcacatatctttgttcgacctgatcaaattaaagaagaattcaaacgcgttgtaaacatgattattgatgtgtataaagactttggtttcgaggattatagctttagattaagttatagagaccctgaagataaagaaaagtactttgatgatgatgacatgtggaataaagctgaaaatatgcttaaagaggcagcggatgagcttggcttatcgtacgaagaagcgattggtgaagcggcattctatggtccgaaactagatgttcaagttaaaacagcgatgggtaaagaagagacattatcaacagcacaacttgatttcttattaccagaacgttttgatttaacttatattggtcaagatggtgaacatcatcgtccagttgttattcatcgtggtgttgtatcaacaatggaacgatttgtagcatttttaactgaagaaactaaaggtgcattcccaacttggttagcgccaaaacaagttcaaatcattccagttaacgttgatttacattatgattatgcgcgccaattgcaagatgaattgaaatctcaaggtgttcgtgtaagtattgatgaccgtaatgaaaaaatgggttataaaatcagagaagctcaaatgcaaaaaataccttatcaaatcgtagttggggataaggaagttgaaaataatcaagtgaatgtgcgtcaatatggatcgcaagaccaagaaacagttgaaaaagatgaatttatctggaatctagttgatgaaattcgtttgaaaaaacatagatag

SEQ ID NO: 7647 - DNA, 459 bp, Staphylococcus aureus
atgatggacaataaagattataaaaagttttatttaattagagaagatgtcttgcctgaatccgtggttaaaacattgaagattaaagatgccttaaaaagtgatccgacattgtccatttatgatgccgttaaacagtttgatctatctagaagtgctttttataaatatagagaaacgatatttccagtagacgataaaatgcttgaccatcgagaatttacattaattttatatgtaactgatattgtgggtatgttggcacgtgtactagatgttatatcaaagttagaactatctgtattaacgattcatcaaagtattccaatggaagaaaaagcaacaataacattatcactgaatgctaaatctaaagaaacttcagtagaagatgttattggtgctttgagaaatttagattatgtatcaaaagtagaattaattagtatgagtatgtaa

SEQ ID NO: 7648 - DNA, 3030 bp, Staphylococcus aureus
atgaaaccattacatttaaagttgaataatttcggcccctttttaaaagaagaaattgatttttctaaaattgataataatgaattgtttttaataagtggtaagactggatcgggtaaaacaatgatttttgatgcaatgacttatgccttgtttggtaaagcatcaactgaacaaagagaagaaaatgatttgagaagtcatttcgctgatggtaaacagccgatgtcagtaacatttgaatttcaattaaatcatcgaatttataaagtgcatagacaaggcccttatatcaaagaaggtaatacaacaaaaacgaacgctaaatttgatgtatttgagatggtggatggcaagtatgaaattagagaaagtaaagtaatttcaggtacccaattcattattgaattattaggagtaaatgcagatcaattccgacaattgtttattttgcctcaaggtgaattcaaacgctttttaatatcaaacagtcgtgaaaagcaagggatattaagaacactgtttgacagtgaaaaatttgaagctatacgagaaatattaaaagaagaactaaaaaaagaaaaagctcaaatcgagaatagatatcaacaaattgaccttttatggcaagaaattgaatcatttgatgatgacaaaataaaaggcttattagagcttgccactcagcagatagacaaattgattgaaaatataccacttttacaagctaggtcgaaagaaatactagcatttgtaaatgaaagtaaagaaactgctattaaagaatatgaaataatagaaaagaaaacactagaaaataatatattaaaagataatattaaccaactcaacaaaaataaaattgatttcgttcaattgaaagagcaacaacctgaaatagacgaaattgaagctaagttaaagttgttacaagatattaccaacctattgaattatattgaaaatagagaaaaaattgaaactaaaattgctaatagcaaaaaagatatttctaaaaccaataataaaatattgaatcttgattgtgataagcgaaacatagacaaagagaaaaaaatgttagaagaaaacggagatttaattgaaagtaaaacctcttttattgataaaactagagtattatttaacgatattaataagtatcaacaaagttatctcaatattgaatgcttgataactgagggtgaacaattaggtgatgaattaaataatctaattaaaggtttagaaaaggtcgaagattcaataggtaataacgaaagtgattacgagaaaattatcgaactaaataatgcgataactaacataaataatgaaattaatataattaaagaaaatgaaaaagctaaagctgaattagataaactattaggtagtaagcaagagttagagaatcaaattaatgaagaaacaactataatgaagaatctcgaaataaaattagatcactacgataaatcaaaattggacttaaatgataaagaaagctttataagtgaaattaaatctgctgtaaagattggagatcaatgtccgatatgtggtaatgaaattcaggatttagggcatcatattgattttgacagtattgctaaacgtcaaaatgaaattaaagaaattgaagcaaatatccacgcaataaaatcgaatattgctgtgcataattctgaaattaaatttgttaatgaaaaaatatcgaatattaatattaaaacgcaaagtgatttttcactcgaagtattgaataagcgtctgctagaaaatgaaaatgcattgaataatcaaagagatcttaataaatttatagaacaaatgaaagaagaaaaagataatctaacgttgcaaattcataataaacaattgcgtctaaataaaaatgaatctgagttgaaattatgtcgagatctcatcactgaatttgaaacactctcgaaatataataatatcactaattttgaggtggattataagaagtatgttcaagatgtgaatcagcatcaagaactctcaaaggagattgaagataagttaatgcaattgtctcaaagaaagttaattgagcaaaataatctaaatcactatgaaaatcaactagaaacttacaataatgacttagaattgaatgaacaatctattgaaatggaaatgtcgaggctgaatttaactgacgacaatgatataaatgaaataatagcctggaggggcgagcaagaggaattagagcagaaaagggatacttataaaaaacgttatcatgaatttgaaatggaaatagctaggttagaatcattaaccaaggataaagagttattggactctgataaattaaaagatgaatatgagcaaaaaaaagaaaagatgaatacactgatagatgaatactctgctgttcattatcaatgtcaaaataatattaataaaacacaatctatagtttcgcatattaattacttaaatcaagaattaaaggatcaacaagaaatttttcaattggctgaaattgtcagtggtaagaataacaaaaatcttacattggaaaactttgtcttaatttactatttagatcaaattattgcccaagcaaatctgagattagcaacaatgtcagataatcgataccaactaattaggcgagaagcggtttctcatggtcttagtggcctagaaattgatgtatttgatttgcattcaaataagtctagacatattagctcgttatcaggtggagaaactttccaatcgtcgcttgcattagctttagggttaagcgaaattgtacagcagcaatcaggaggtatttcactagaatcaatatttattgatgaaggattcggtacattagatcaagaaacgcttgaaacagcgttagacactttattaaatcttaaatcaactggtagaatggttgggattatttcacatgtgagcgaattgaaaaatagaatacctttagttttagaagtgaaatcagatcaatatcagagttcaacaagattcaaaagaaattaa

SEQ ID NO: 7649 - DNA, 1200 bp, Staphylococcus aureus
atgaaaccattacatttaaagttgaataatttcggcccctttttaaaagaagaaattgatttttctaaaattgataataatgaattgtttttaataagtggtaagactggatcgggtaaaacaatgatttttgatgcaatgacttatgccttgtttggtaaagcatcaactgaacaaagagaagaaaatgatttgagaagtcatttcgctgatggtaaacagccgatgtcagtaacatttgaatttcaattaaatcatcgaatttataaagtgcatagacaaggcccttatatcaaagaaggtaatacaacaaaaacgaacgctaaatttgatgtatttgagatggtggatggcaagtatgaaattagagaaagtaaagtaatttcaggtacccaattcattattgaattattaggagtaaatgcagatcaattccgacaattgtttattttgcctcaaggtgaattcaaacgctttttaatatcaaacagtcgtgaaaagcaagggatattaagaacactgtttgacagtgaaaaatttgaagctatacgagaaatattaaaagaagaagtaaaaaaagaaaaagctcaaatcgagaatagatatcaacaaattgaccttttatggcaagaaattgaatcatttgatgatgacaatataaaaggcttattagaggttgccactcaacagatagacaaattgattgaaaatataccacttttacaagctaggtcgaaagaaatactagcatctgtaaatgaaagtaaagaaactgctattaaagaatttgaaataatagaaaagaaaacattagaaaataatatattaaaagataatattaatcaactcaacaaaaataaaattgatttcgttcaattgaaagaacaacaacctgaaatagagggaattgaagctaagttaaagttgttacaagatattacaaacctattgaattatattgaaaatagagaaaaaattgaaactaaaattgctaatagcaaaaaagatatttctaaaaccaataataaaatattgaatcttgattgtgataagcgaaacatagacaaagagaaaaaaatgttagaagaaaatggtgatttaattgaaagtaaaatctcttttattgataaaactagggtattatttaacgatattaataagtatcaacaaagttatctcaatattgaacgcttgagaact

SEQ ID NO: 7650 - DNA, 1488 bp, Staphylococcus aureus
atgtcagaagaaatgaatgaccaaatgttggttcgacgtcaaaaattacaagaattatatgatcttggtatagacccgtttggttctaaatttgaccgttcaggtttatctagtgatttgaaagaagagtgggaccagtattctaaagaagaattggtagaaaaagaagcggatagtcatgtcgctatagctggacgattaatgactaagcgtggtaaaggtaaagcaggatttgcacacgttcaggacttagctggacaaattcaaatttacgttcgtaaagatcaagttggcgatgacgaatttgatttatggaaaaatgctgatttaggcgatatcgttggtgttgaaggtgtaatgttcaaaacaaatactggcgaattatcggttaaagcgaagaaattcacgctactaactaaatcattgcgaccattaccggataaattccacggtttacaggatattgaacagagatatcgtcaaagatatttagatttaattacgaacgaagatagcactcgtacatttattaatcgtagtaaaatcattcaagaaatgcgtaattatttaaataataaaggtttcttggaagtagaaacacctatgatgcaccaaattgctggtggcgcagctgctagaccatttgtaacacatcataatgcattagatgcaacgttatacatgcgtattgctattgagttgcatttaaaacgtttaattgtcggtggacttgaaaaagtatatgaaattggtagagtattccgtaatgaaggtgtatcaactagacataaccctgaattcacaatgattgaattatatgaagcatatgcagattatcatgacattatggatttaacagaatctatggtgagacatattgccaatgaagtattaggttctgcaaaagtacaatacaatggggaaacgattgatttagaatctgcttggactcgtttgcatattgttgatgctgtaaaagaagctactggtgtggatttttatgaagttaaaagtgatgaagaagctaaagctttagctaaagaacatggtattgaaattaaagatacaatgaaatatggtcatattttaaatgaattctttgagcaaaaagttgaagaaacacttattcagccaacgtttatctatggtcatccgactgaaatttcacctttagcgaagaaaaatcctgaagatcctagatttactgatcgtttcgaattgttcattgtaggtagagagcatgcaaatgcatttactgaattaaatgatcctattgatcaaaaaggtcgttttgaagcgcaacttgttgaaaaggcgcaaggtaatgatgaagcgcatgaaatggatgaagattacattgaagcgttagaatatggtatgcctccgacaggtggtcttggtatcggtattgacagattggttatgttattaactgattctccatcaatcagagacgtgttattattcccttatatgagacaaaaataa

SEQ ID NO: 7651 - DNA, 555 bp, Staphylococcus aureus
atgtcagaagaaatgaatgaccaaatgttggttcgacgtcaaaaattacaagaattatatgatcttggtatagacccgtttggttctaaatttgaccgttcaggtttatctagtgatttgaaagaagagtgggaccagtattctaaagaagaattggtagaaaaagaagcggatagtcatgtcgctatagctggacgattaatgactaagcgtggtaaaggtaaagcaggatttgcacacgttcaggacttagctggacaaattcaaatttacgttcgtaaagatcaagttggcgatgacgaatttgatttatggaaaaatgctgatttaggcgatatcgttggtgttgaaggtgtaatgttcaaaacaaatactggcgaattatcggttaaagcgaagaaattcacgctactaactaaatcattgcgaccattaccggataaattccacggtatacaggatattgaacagagatatcgtcaaagatatatagatctaattacgaatgaagatagcactcatgcatttattaaacgtagtgaatcattcaagggt

SEQ ID NO: 7652 - DNA, 597 bp, Staphylococcus aureus
atgaatttattttacaatcctaaatatgtaggagatgtcgcatttttacaaattgaaccagttgaaggtgaattaaactacaataaaaaaggtaatgttgttgaaattactaatgaaggtaatgttgtaggttataatatttttgaaatttcaaaagatataacaattgaagaaaaaggtcatattaaattaactgatgaacttgtaaatgtattccaaaagcgtatttcagaagctggttttgattataaattaaatgctgatctatcaccgaaatttgtagttggctacgttgaaactaaagacaaacatcctgatgcagataaattaagtgtactaaatgtaaacgttggaaatgacacattacaaattgtatgtggcgcgcctaacgttgaagctggacagaaagttgttgttgctaaagtaggtgcagtgatgcctagcggtatggtaattaaagatgctgaattacgtggtgttgcctcaagcggtatgatttgttcaatgaaagaattgaatttacctaatgcacctgaagaaaaaggtattatggtattaaatgacagctatgaaattggacaagcattttttgaataa

SEQ ID NO: 7653 - DNA, 3825 bp, Staphylococcus aureus
atgagctggtttgataaattattcggcgaagataatgattcaaatgatgacttgattcatagaaagaaaaaaagacgtcaagaatcacaaaatatagataacgatcatgactcattactgcctcaaaataatgatatttatagtcgtccgaggggaaaattccgttttcctatgagcgtagcttatgaaaatgaaaatgttgaacaatctgcagatactatttcagatgaaaaagaacaataccatcgagactatcgcaaacaaagccacgattctcgttcacaaaaacgacatcgccgtagaagaaatcaaacaactgaagaacaaaattatagtgaacaacgtgggaattctaaaatatcacagcaaagtataaaatataaagatcattcacattaccatacgaataagccaggtacatatgtttctgcaattaatggtattgagaaggaaacgcacaagtcaaaaacacataatatgtattctaataatacaaatcatcgtgctaaagattcaactccagattatcacaaagaaagtttcaagacttcagaggtaccgtcagctatttttggcacaatgaaacctaaaaagttagaaaatggtcgtatccctgtaagtaaaccttcagaaaaagttgagtcagataaacaaaaatatgataaatatgtagctaagacgcaaacgtctcaaaataaacaattagaacaagaaaaacaaaatgatagtgttgtcaaacaaggaactgcatctaaatcatctgatgaaaatgtatcatcaacaacaaaatcaatgcctaattattcaaaagttgataatactatcaaaattgaaaatatttatgcttcacaaattgttgaagaaattagacgtgaacgagaacgtaaagtgcttcaaaagcgtcgatttaaaaaagcgttgcaacaaaagcgtgaagaacataaaaacgaagagcaagatgcaatacaacgtgcaattgatgaaatgtatgctaaacaagcggaacgctatgttggtgatagttcattaaatgatgatagtgacttaacagataatagtacagatgctagtcagcttcatacaaatggcatagagaatgaaactgtatcaaatgatgaaaataaacaagcgtcaatacaaaatgaagacactaatgacactcatgtagatgaaagtccatacaattatgaggaagttagtttgaatcaagtatcgacaacaaaacaattgtcagatgatgaagttacggtttcgaatgtaacgtctcaacatcaatcagcactacaacataacgttgaagtaaatgataaagatgaactaaaaaatcaatccagattaattgctgattcagaagaagatggagcaacgaataaagaagaatattcaggaagtcaaatcgatgatgcagaattttatgaattaaatgatacagaagtagatgaggatactacttcaaatatcgaagataataccaatagaaacgcgtctgaaatgcatgtagacgctcctaaaacgcaagagcacgcagtaactgaatctcaagttaataatatcgataaaacggttgataatgaaattgaattagcaccgcgtcataaaaaagatgaccaaacaaacttaaatgtcaactcattgaaaacgaatgatgtgaatgatggtcatgttgtggaagattcaagcatgaatgaaatagaaaagcataacgcagaaattacagaaaatgtgcaaaacgaagcagctgaaagtgaacaaaatgtcgaagagaaaactattgaaaacgtaaatccaaagaaacagactgaaaaggtttcaactttaagtaaaagaccatttaatgttgtcatgacgccatctgataaaaagcgtatgatggatcgtaaaaagcattcaaaagtcaatgtgcctgaattaaagcctgtacaaagtaaacaagctgtgagtgaaagcaagcctgcgagtcaagccgcaccatcatcaagatctgattcacaagagtcaaacacaaatgcatataaaacaaataatatgacatcaaacaatgttgagaacaatcaacttattggtcatgcagaaacagaaaatgattatcaaaatgcacaacaatattcagagcagaaaccttctgctgattcaactcaaacggaaatatttgaagaaagccaagatgataatcaattggaaaatgagcaagttgatcaatcaacttcgtcttcagtttcagaagtaagcgacataactgaagaaagcgaagaaacaacacatccaaacaatactagtggacaacaagataatgatgatcaacaaaaagatttacagccttcattttcaaatcaaaatgaagatacagctaatgaaaatagacctcggacgaaccaacaagatgttgcaacaaatcaagctgtacaaacatctaagccgatgattcgtaaaggcccaaatattaaattgccaagtgtttcattactagaagaaccacaagttattgagtcggacgaggactggattacagataaaaagaaagaactgaatgacgcattattttactttaatgtacctgcagaagtacaagatgtaactgaaggtccaagtgttacaagatttgaattatcagttgaaaaaggtgttaaagtttcaagaattacggcattacaagatgacattaaaatggcattggcagcgaaagatattcgtatagaagcgcctattccaggaactagtcgtgttggtattgaagttccgaaccaaaatccaacgacagtcaacttacgttctattattgaatctccaagttttaaaaatgctgaatctaaattaacagttgcgatggggtatagaattaataatgaaccattacttatggatattgctaaaacgccacacgcactaattgcaggtgcaactggatcagggaaatcagtttgtatcaatagtattttgatgtctttactatataaaaatcaccctgaggaattaagattattacttatcgatccaaaaatggttgaattagctccttataatggtttgccacatttagttgcaccggtaattacagatgtcaaagcagctacacagagtttaaaatgggccgtagaagaaatggaacgacgttataagttatttgcacattaccatgtacgtaatataacagcatttaacaaaaaagcaccatatgatgaaagaatgccaaaaattgtcattgtaattgatgagttggctgatttaatgatgatggctccgcaagaagttgagcagtctattgctagaattgctcaaaaagcaagagcatgtggtattcatatgttagtagctacgcaaagaccatctgtcaatgtaattacaggtttaattaaagccaacataccaacaagaattgcatttatggtatcatcaagtgtagattcgagaacgatattagacagtggtggagcagaacgcttgttaggatatggcgatatgttatatcttggtagcggtatgaataaaccgattagagttcaaggtacatttgtttctgatgacgaaattgatgatgttgttgattttatcaaacaacaaagagaaccggactatctatttgaagaaaaagaattgttgaaaaaaacacaaacacaatcacaagatgaattatttgatgatgtttgtgcatttatggttaatgaaggacatatttcaacatcattaatccaaagacatttccaaattggctataatagagcagcaagaattatcgatcaattagagcaactcggttatgtttcgagtgctaatggttcaaaaccaagggatgtttatgttacggaagcagatttaaataaagaataa

SEQ ID NO: 7654 - DNA, 2631 bp, Staphylococcus aureus
atgaaaaagttaaaagcgagtgaaattagacaaaaatatctagatttctttgttgaaaaaggacatatggttgaaccttctgcaccattagtgccaattgatgatgatacattattatggattaattcaggtgtagcaacattaaagaaatattttgatggacgtgaaacacctaaaaagccaagaattgtaaactctcaaaaagctattcgtacaaatgatattgaaaatgttggtttcacagcgcgtcaccatacattctttgaaatgttaggtaacttctcaattggtgattattttaaacaagaagcgattgaatttgcttgggaatttttaacgagtgataaatggatgggtatggagccagataaattgtacgttacgattcatccggaagatatggaagcatataacatttggcataaagatattgggcttgaagaaagtcgtattattcgcattgaaggtaacttctgggatattggtgaagggccttcaggaccgaacactgagattttctatgatcgcggagaagcatatggacaagacgatccggcagaagaaatgtatccaggtggagaaaatgaacgctatcttgaagtatggaacttagtatttagtgaattcaatcataataaagatcatagttacacaccattacctaataaaaatattgataccggcatggggcttgagcgtatggcctcagtttctcaaaatgtacgtactaactatgaaacagatttatttatgcctataatgaatgaaatcgaaaaagtatcaggtaaacaatatttagtaaacaacgaacaagatgtggcatttaaagtaattgctgaccacattcgtacgattgcatttgcaatttctgatggtgcattacctgccaatgaaggtagaggatatgtattacgtcgattgttacgtcgtgccgttcgttttagtcaaacgttaggaatcaatgagccatttatgtacaaacttgttgatattgttgcagacattatggaaccatattatccaaatgttaaggaaaaagcagatttcattaagcgtgttataaagtctgaagaagaacgattccatgaaacattagaagatggtttagcgattttaaatgaattaattaaaaaagctaaagcgacaacaaatgaaattaatgggaaagatgcatttaaattgtatgatacgtacgggttcccaattgaattaactgaagaaatagcagtgcaagcaggattgaaagttgatatgacaacatttgagtcagaaatgcaacaacaacgtgatcgtgcacgtcaagcacgtcaaaattctcaatcaatgcaagttcaaagtgaagtattgaaaaatattacatctgcaagtacttttgttggttatgatactgcgacagctcaaacaacactaacacacttgatatataatggtgaagaagtttcacaagttgaagcgggtgaaacagtatacttcatgttaacggaaacaccattttatgcagtcagtggtggacaagttgcggatacaggtattgtttataatgacaattttgaaattgctgttagtgaagtaaccaaagcaccaaatggtcaaaacttgcataaaggagtagtacaatttggccaagtaaatgttggcgctacagtgtctgctgaagtgaaccaaaatgatcgacgtgacattcaaaagaaccatagtgcaacacatttattacatgcagcgttgaaatcagtactgggtgatcatgttaaccaagctggttcactagtagaagcagatcgtttacgttttgatttctctcattttggtccaatgactaatgatgaaattgatcaagttgaacgcttagtaaatgaagaaatttggaaaggtattgacgttaacattcaagaaatggatattgcttcagctaaagaaatgggcgcaatggcattattcggtgaaaaatatggtgatgttgtgcgtgtagtaaatatggcaccattttcaattgaattatgtggtggtattcatgtccgcaatacttctgaaattggcttattcaaaatagtaagtgagtcaggtacaggagctggtgtgcgtcgtattgaagcattaacaggtaaagcagctttcttatatttagaagatattcaagagaaatttaatacgatgaaatcacagatgaaagtgaaatctgatgatcaagtagtcgaaaagttaacacaattacaagatgaagaaaaagcattattaaaacaattagagcaacgtgacaaagaaatcacatcacttaaaatgggtaatattgaagatcaagttgaagaaatcaatggctataaagtattggttactgaagtggatgtaccaaatgcgaaagcaattcgctcgacaatggatgattttaaatctaaactacaagatacaattatcattcttgcaagtaatgttgatgataaagtatcgatggttgcaactgtccctaaatctttaacaaataacgttaaagccggtgatcttatcaaacaaatggcaccaatcgttggtggtaaaggtggcggtcgtccagatatggctcaaggtggcggtacacaacctgaaaatatctcaaaatcattaagctttattaaagattacattaaaaatctataa

SEQ ID NO: 7655 - DNA, 1698 bp, Staphylococcus aureus
atggcttatgatggattatttacaaagaaaatggttgagtctctacaatttttaacaacaggacgcgttcacaaaatcaatcaacctgataatgacacgatactaatggttgtacgtcaaaatagacaaaaccatcaattgttattgtcaatccatccaaacttttcaagattacaattgactactaaaaaatatgataatccatttaatccacccatgtttgcgcgtgtttttagaaaacacttagaaggtggtattatcgaatcgattaagcaaattggtaatgatcgtcgcattgaaatcgatataaagagtaaagatgaaattggcgatactatttaccgcactgtcatccttgagattatgggtaaacatagtaacttaattttagtagatgaaaatcgcaaaataattgaaggatttaaacacttaacaccaaatacgaatcactatcgtacagtaatgccaggatttaattatgaagcaccacctactcagcacaaaataaatccgtatgatattacaggtgcagaggtgttgaaatatatcgattttaacgcaggtaatattgctaaacaattattgaatcagtttgaaggatttagccctttaattacgaatgaaatcgttagtcgtcgtcaatttatgacttcatcaacattaccagaagcattcgacgaagtaatggcagaaaccaagttaccacctactcctatttttcataaaaatcatgaaacaggtaaagaggatttctattttataaagttaaatcaatttaatgatgatacagttacgtacgattcattaaatgatttacttgatcgtttttatgacgcgcgtggcgaacgtgaacgcgttaaacaacgtgcgaatgatttagttcgatttgttcaacagcagttgcacaaatatcaaaataaattagcgaagttgattgaagaatatgagcagtctaaaaataaagataccgaacagttatatggtgaattgatcactgctaatatatatcgaattaagcaaggcgataaagaagtgacagcattgaattattatacgaatgaagaagttgtcattcctttaaatcctacaaaatccccatcagcaaatgctcaatattattataaacaatataatcgtatgaaaacgagagaacgtgaattacaacatcaaattcaattgacgaaagataatatagattatttttcaacaatcgaacaacaattacatcatatttctgtccatgacattgatgaaattagagatgaattagcagaacaaggctttatgaaacagcgtaaaaatcaaactaagaaaaagaaagcgcagattcaattacaacattatgtatcaactgatggcgacgatatatatgttggcaagaataacaagcaaaatgattatttaacaaataaaaaagctaaaaaaactcacacatggttacacacaaaagatattcctggttcacatgtcgttatatttaatgatgcaccaagtgatacgacaatcaaggaagcggctatgttagcaggatacttttcaaaagctggtaattctggacaaatacctgttgattacacattaattaaaaatgtgcacaaaccatcaggtgcaaagcctgggtttgtaacatatgacaatcaaaaaactttgtatgctacacctgattatgaacttattcaaaaaatgaaacaattataa

SEQ ID NO: 7656 - DNA, 1350 bp, Staphylococcus aureus
atgcttaattatacagggttagaaaataaaaatgtattagtcgtcggtttggcaaaaagtggttatgaagcagctaaattattaagtaaattaggtgcgaatgtgactgtcaatgatgggaaagacttatcgcaagatgctcatgcaaaagatttagaatctatgggtatttctgttgtaagtggaagtcatccattaacattgcttgataataatccaataattgttaaaaatcctggaataccttatacagtatctattattgatgaagcagtgaaacgaggtttgaaaattttaacagaagttgagttaagttatctaatctctgaagcaccaatcatagctgtaacgggtacaaatggtaaaacgacagttacttctctaattggagatatgtttaaaaaaagtcgcttaactggaagattatccggcaatattggttatgttgcatctaaagtagcacaagaagtaaagcctacagattatttagttacagagttgtcgtcattccagttacttggaattgaaaagtataaaccacacattgctataattactaacatttattcggcgcatctagattaccatgaaaatttagaaaactatcaaaatgctaaaaagcaaatatataaaaatcaaacggaagaagattatttgatttgtaattatcatcaaagacaagtgatagagtcggaagaattaaaagctaagacattgtatttctcaactcaacaagaagttgatggtatttatattaaagatggttttatcgtttataaaggtgttcgtattattaacactgaagatctagtattgcctggtgaacataatttagaaaatatattagcagctgtgcttgcttgtattttagctggtgtacctattaaagcaattattgatagtttaactacattttcaggaatagagcatagattgcaatatgttggtactaatagaactaataaatattataatgattccaaagcaacaaacacgctagcaacacagtttgccttaaattcatttaatcaaccaatcatttggttatgtggtggtttggatcgagggaatgaatttgacgaactcattccttatatggaaaatgttcgcgcgatggttgtattcggacaaacgaaagctaagtttgctaaactaggtaatagtcaagggaaatcggtcattgaagcgaacaatgtcgaagacgctgttgataaagtacaagatattatagaaccaaatgatgttgtattattgtcacctgcttgtgcgagttgggatcaatatagtacttttgaagagcgtggagagaaatttattgaaagattccgtgcccatttaccatcttattaa

SEQ ID NO: 7657 - DNA, 1320 bp, Staphylococcus aureus
atggatgataaaacgaagaacgatcaacaagaatcaaatgaagataaagatgaattagaattatttacgaggaatacatctaagaaaagacggcaaagaaaaaggtcaaaggctacacatttttctaatcaaaataaagatgatacatctcaacaagctgattttgatgaagaaatttacttgataaataaagacttcaaaaaagaagaaagcaatgatgaaaataatggttctgcttctagtcatgcgaatgataataatatcgatgattctacagactctaatattgaaaatgaggattatagatataatcaagaaattgacgaccaaaatgaatcgaatggaattgcagtcggcaacgaacaacctcaatcagctcctaaagaacaaaatagcgactcgaatgatgaggaaacagtaacgaaaaaagaacgaaaaagtaaagtaacacaattaaagccattaacacttgaagaaaagcggaagttaagacgtaagcgacaaaaacgaatccaatacagtgttattacaatattagtattgttgattgctgttatattaatttacatgttttcaccacttagtaaaattgcgcatgtaaatataaatggaaataatcacgttagtacttcaaagataaacaaagttttaggtgttaaaaatgattcgaggatgtatacgtttagtaaaaaaaatgctattaatgatctcgaagaggatccattaatcaaaagtgttgagatacacaagcaattaccaaacacattaaacgtagatatcacagaaaatgaaattattgctttagtgaaatataaaggtaaatatttacctttattagaaaatggtaaattgcttaaaggttcaaatgatgtcaaaattaatgatgcacctgtcatggatggtttcaaaggtacaaaagaagatgatatgattaaggcgttatctgaaatgacacctgaagttagacgatatattgccgaagtgacatacgccccaagtaaaaacaaacaaagcagaattgaattgtttacgacagatggacttcaagtaatcggtgatatttcgacgatatctaagaaaatgaaatattatccgcagatgtcacaatcattatcaagggatagttcgggtaaactaaaaacaagaggctatattgatttatcagtcggtgcttcatttatcccataccgtggaaacacgtctagtcaatcagaaagcgataaaaatgtgactaaatcatctcaagaggaaaatcaagcaaaagaagaattacaaagcgttttaaacaaaattaacaaacaatcaagtaagaataattaa

SEQ ID NO: 7658 - DNA, 1989 bp, Staphylococcus aureus
atgtttaatgaaaaagatcaattagctgttgatacgctacgtgcactaagtatcgacacaatcgaaaaagcgaattctggtcatccaggattacctatgggagctgccccaatggcttacactttgtggacacgtcatctgaattttaatccacaatctaaagattacttcaatagagaccgtttcgtattatcggcagggcatggttcagcattattgtatagcttgttacatgtttctggtagtttagaattagaagaattaaagcaatttagacaatggggttctaaaacaccaggccatcctgaatacagacatactgatggtgtagaagttactactggaccacttggacaaggttttgctatgtcagtaggattagctttagcagaagatcacctagcagggaaatttaataaagaaggatataatgttgtagatcattacacatatgtattagcttctgacggtgatttaatggaaggtatatcgcatgaagcagcttcatttgctggacataataaattaagtaaattagttgttttatacgattcaaatgatatttcattagatggcgaattaaacaaagctttttctgaaaacacaaaagctcgttttgaagcatatggttggaattacttactagttaaagatggtaatgatttagaagaaattgataaagcgattactacagctaaatctcaagaaggaccaacgattattgaagttaaaacaacaatcggatttggttcaccgaataaagcaggaactaatggtgttcatggggcacctttaggtgaagttgaaagaaaattaacattcgaaaattacggtttagatcctgaaaaacgttttaatgtttcagaagaggtatacgaaattttccaaaatactatgttaaaacgtgctaatgaagatgaatctcaatggaattcattattagaaaaatatgcagaaacatatcctgaattagcagaagaatttaaattagcgattagtggtaaattgcctaaaaattataaggatgaattaccacgttttgaactgggtcataatggtgcatctcgtgctgattctggtactgttattcaagcaatcagtaaaactgtcccttcattctttggtggatcagcagaccttgctggttcaaacaaatccaatgtaaatgatgcaacagattatagttctgaaacacctgaaggtaaaaatgtgtggtttggtgtacgtgaatttgctatgggtgctgctgtaaatggtatggctgcacatggaggtttacatccatatggtgcaacattcttcgtatttagtgattatttaaaaccagcgttacgtttatcatcaattatgggattaaatgcaacgttcatcttcacacatgattcaattgcagtaggtgaagatggtcctactcatgaaccaattgaacaattagctggattaagagctattccaaatatgaatgttatccgtcctgctgatggtaatgaaacaagagtagcatgggaagttgccttagaatctgaatctacacctacttcattagtattgacacgtcaaaacttaccggttttagatgtaccagaagatgtagttgaagaaggcgttcgaaaaggtgcctatacagtttatggctctgaagagacaccagaattcctattattagcttcaggttcagaagttagtcttgcagttgaagctgctaaagatcttgaaaaacaaggtaaatcagtgcgtgttgtttcaatgcctaactggaatgcatttgaacaacaatctgaagaatataaagaatcagttattccatcaagcgtaacaaaacgtgttgcgattgaaatggcttcaccgcttggatggcataaatatgtaggtactgcaggtaaagttattgctattgacggctttggcgcaagtgcacctggcgatttagtagttgaaaaatatggatttactaaagaaaatatcttaaaccaagttatgagcttataa

SEQ ID NO: 7659 - DNA, 990 bp, Staphylococcus aureus
atggagacattattttcaggcatccaacctagtggaattcctactattggaaattatattggcgcactaaaacaatttgttgatgtgcaaaatgactatgattgttatttctgtatcgtagatcaacatgcaattacaatgccacaagatcgtttaaaattacgtaaacagaccagacaattagcagcgatttatttagcttctggtatagatccagacaaagcaacattgttcatacaatctgaagtccctgcacacgtacaagcaggatggatgttaactacgattgcttctgttggagaattagagcgtatgacgcaatacaaagataaagctcagaaagcagttgaaggtataccagctggtctattaacatatccacctttaatggcagctgatattgttctttacaatactaatatcgttccagttggagatgaccaaaagcagcatatcgaattgactcgtaaccttgtagatagatttaatagtcgctataatgatgtgcttgtgaaacctgaaattcgtatgcctaaagttggtggacgtgtcatgagtttacaagacccaacaagaaaaatgagtaagagtgatgataatgctaaaaacttcatttcattattggacgagccgaatgttgcagctaaaaaaattaaaagcgcagtaactgattcagatggtattattaaatttgatcgtgacaacaagccaggtataacaaatttaatttcaatatacgctggattaaccgacatgccaattaaagatattgaggcaaaatatgaaggggaaggttatggtaaatttaaaggtgaccttgctgaaatagttaaagcatttttagtagaattccaagaaaaatacgaaagtttctataactcagataaacttgatgatattttagatcaaggtagagataaagcacacaaagtttcatttaaaactgtcaaaaaaatggaaaaagcgatgggattaggacgtaagagataa

SEQ ID NO: 7660 - DNA, 435 bp, Staphylococcus aureus
atgttactaccaaaacgtgtaaaatatcgtcgtcaacatcgtcctaaaacaactggtcgttctaaaggcggtaactacgtaacatttggtgagtttggtttacaagctacaacaacgtcttggatcacatctcgtcaaatcgaatctgctcgtatagcaatgacacgttacatgaaacgtggcgggaaagtttggattaaaatcttcccacatacaccatatactaaaaaacctttagaagtacgtatgggtgctggtaaaggtgcggttgaaggctggatcgcagttgttaaaccaggtagaattttattcgaagttgctggcgtttctgaagaagttgcgcgtgaagcactacgtttagcaagtcacaaacttccagtaaaaactaagtttgtaaaacgtgaggaattgggtggtgaaacaaatgaaagctaa

SEQ ID NO: 7661 - DNA, 948 bp, Staphylococcus aureus
ttgaaacgttcgtctaaaagtaaaatgagcctaccgaaaaaaatatttttatgggtattcggtattttagtaatcttagcgattgtagctgttgtgtatgtagctgctaaaatttttattactggtaataagatacacaatccgttagatcgcaatcattcagaattaagagataaaaaagtgagtttaaacgatggtgatccattcacaatcgctttatttggtgtcgattcagatgctgatcgtaagaaaaagggtggcggagagcgtagtgatagtattatgattttatctatcaaccctaaaacgaagaaaactgaaatagtaagtataccgcgtgatacaagagcggaaattgttggccgtggtactactgaaaaaattgcacatgcctatgcatatggtggaccaaatatggctgttaaatcacttgaaaaattaatgaatgtgccaattgatcattatgcgacaatcgatatggatggtttgcataatatgatagatagcatcggcggtgttgatgtagtaagtaatgatacattcactgttgatggtgttcgttttacaaaaggacagcagacacatgtaaatggtgatcaagcattgaagtttattagaagtcgtaaagaagaaggtgctggtggtgactttggtcgacaacaacgtcagcaaattgtgcttgaagcgatggccaataagattgcaagcccatcatcgattacacattttaatagtctaatgaatgaaattcaaaataatgttaaaacagatttaacattaggtgatttgaatacgattagaagcaattataaagatgctaatgacacgattaataaacatcaattgagtggtcaaggcggcattcaaagtgacggattgtactacttcattcctagtgagcagtcaaaagctgaaagtactaagttattaaaagataatctagagtag

SEQ ID NO: 7662 - DNA, 1098 bp, Staphylococcus aureus
atggctttaacagcaggtatcgttggcttaccaaacgttggtaaatcaacattatttaatgcaattacaaaggcgggtgccttggcagcaaactatccgttcgcaactatagacccaaatgtgggtattgtagaagtgccagatgcaagactacttaaattagaagaaatggttcaacctaaaaaaacattacctactacatttgaatttacagatattgccggaattgttaaaggtgcttctaaaggtgaaggtttaggtaataaattcttatcacatattagagaagtagatgcaatttgtcaggttgttcgtgcttttgacgatgataatgtaacacatgtagctggtcgagttgatccaattgatgacatcgaagttatcaatatggaattagtacttgcagacttagaatcagttgaaaaacgcttacctagaattgaaaaattggcacgtcaaaaagataagactgctgaaatggaagtgcgtattttaacaactattaaagaagctttagaaaatggtaaacccgctcgtagtattgactttaatgaagaagaccaaaaatgggtgaatcaagcgcaattactgacttctaaaaaaatgctttatatcgctaatgttggtgaagatgaaattggtgatgatgataatgataaagtaaaagcgattcgtgaatatgcagcgcaagaagactctgaagtgattgttattagtgcaaaaattgaagaagaaattgctacattagatgatgaagataaagaaatgttcttagaagatttaggtatcgaagaaccaggattagatcgattaattagaacaacttatgaattattaggattatcaacatattttactgctggtgtgcaagaagtacgtgcttggacatttaaacaaggtatgactgcacctcaatgtgctggtatcattcatactgattttgaacgtggatttatccgtgccgaagtaacaagttatgatgactatgtacaatatggcggcgaaagtggcgctaaagaagcgggcagacaacgattagaaggtaaagaatatattatgcaagatggcgatatcgttcatttcagatttaatgtataa

SEQ ID NO: 7663 - DNA, 204 bp, Staphylococcus aureus
atggcgtcaaaatatggaataaatgatatagtagaaatgaaaaaacaacatgcgtgtggaaccaatcgttttaaaattattagaatgggtgctgacattagaattaagtgtgaaaattgtcaacgaagcattatgattccacgtcaaacgtttgataaaaaactaaaaaaaatcatcgtatctcaggatgatacacaaagatag

SEQ ID NO: 7664 - DNA, 882 bp, Staphylococcus aureus
atggatcaagttatgagtattatttcatcgctattcgaaccattaactaaaattgaaacatatgaaaatattgcaactaaaatcgctatgattgttatttatattatcgtagccctcatagttattaaaatactgaataaaatgattgaacagggatttaagattcaaaataaaagtaaaaagagtaacaaaaagcgctctaaaactttaatatctcttgttcaaaatgtagtgaagtatatcgtttggtttatagttattacgacgattttaagtaaatttggcattagtgttgaaggtgttattgcaagtgctggtgtcgtaggtttagcagtaggttttggtgcgcagaccattgttaaagacgttattactggatttttcattatatttgaaagccaatttgatgtaggtgattatgttaagataaacaacggtggtacaactgtagcagagggaacagttaaatcaattggactccgttcaacacgtattaatacaatatctggagaacttacaatcttgccaaatagtagcatgggtgaaataacgaattactcaattacgaatggaacagcaattgttaaaattccagtatctgtagatgaaaatattgataatgttgagaagaaattaaacaaattatttacatctctgcgtagtaaatattatttatttgtaagtgatcctgttgtgattggtattgatgcctttgaagatactagagtaatattaagggtttcagcagaaacaataccaggtgaaggtttctctggtgcgcgtattattcgtaaagaagtacaaaaaatgtttttacaagaaggtatcaagacaccacaaccaataatgacaccttttaatcatagtgaaaacggtgtttag

SEQ ID NO: 7665 - DNA, 1317 bp, Staphylococcus aureus
atgcctgaaagagaacgtacatctcctcagtatgaatcattccacgaattgtacaagaactatactaccaaggaactcactcaaaaagctaaaactcttaagttgacgaactatagtaaattaaataaaaaagaacttgttctagctattatggaagcacaaatggaaaaagatggtaactattatatggaaggtatcttagatgatatacaaccagatggttatggttttttaagaacagtgaactattctaaaggggaaaaagatatttatatatctgctagccaaattcgtcgttttgaaattaaacgtggggataaagtaactgggaaagttagaaaacctaaagataacgaaaaatattatggcttattacaagttgactttgtcaatgaccataacgcagaagaagtgaagaaacgtccgcatttccaagctttgacaccactttatccagatgagcgtattaaattagagacagaaacacaaaattattcaacgcgcatcatggatttagtaacaccgattggtttaggtcaacgtggtttaatagtggcgccacctaaagcaggtaaaacatcgttattaaaagaaatagcgaatgcaatcagtacgaacaaaccagatgcaaagctatttattttgttagttggcgagcgtcctgaagaggtgacagatttagaacgctcagtagaagctgctgaagtcgttcattcaacgtttgacgaaccaccagaacaccatgttaaagtagctgaattattacttgaacgtgcaaagcgtttagtagaaattggggaagatgtcattattttaatggattctataacgagattagcacgcgcttataacttagttattccaccaagtggtcgtacattatcaggtggtttagatcctgcatctttacacaaaccaaaagcattcttcggtgcagcgagaaatattgaagcgggtggaagtttaacaatacttgcaactgcattagttgatacgggttcacgtatggacgatatgatttacgaagaatttaaaggaacaggtaacatggagttacatttagatcgtaaattgtctgaacgtcgtatcttccctgcaattgatattggcagaagttcaacgcgtaaagaagaattgttaataagtaaatctgaattagacacattatggcaattaagaaatctattcactgactcaactgactttactgaaagatttattcgcaaacttaaaaggtctaagaataatgaagatttcttcaagcagctacaaaagtctgcagaagaaagtactaaaacgggtcgacctataatttaa

SEQ ID NO: 7666 - DNA, 1158 bp, Staphylococcus aureus
atgtattatcatcaaccgttgttattaacacctggcccaacccctgtacctgatgccattatgagagaaattcaagcacctatggttggtcatcgttctaaagattttgaagacatcgcacaacaagcatttcaaggtctaaagccaatatttgggagtcaaaatgatgtacttattttaacatctagcggtacaagcgtcttggaggctagtatgttgaacattgtaaaccctgaagatcacttcgttgtcattgtttcaggtgcctttggtaaccgatttaaacaaattgcacaaacttattacaaaaatgtgcacatttatgacgtaacatggggagaagctgtagatgttaaagatttcatcaattacctttcaactttagatgttgaagttaaagcagtatttagtcaatattgcgaaacatctacgacagtgctacaccctattcacgagttaggaaatgccatcaatcaatttaatagtaatatttattttgtagttgacggcgtaagttgcattggtgctgttgatgttgacattaacaaagataaaattgatgtacttgtttctggtagtcaaaaagcaattatgttacctccaggattagcttttgtagcttatagccaccgtgcaaaagaacgtttcaaagaagtaactacgccaaaattttatctagacttaaataaatacatttcgtcacaagctgacaattctacaccgttcacaccaaatgtgtctttatttagaggtgtaaatgcatacgttgaaaccgtaaaagcagaaggtttcaatcacgtaatagcacgacactatgcaattagaaatgcattaagaagcgccttaaaagcattagatttaactttattagtcaatgataaagatgcatctccaacggttacagcattcaaacctaatacaaatgaagtgaaaataatcaaagatgaacttaaaaatcgctttaaaataacaattgctggtggtcaaggccatcttaaaggtcaaattttaagaattggtcatatggggaaaattagtcctttcgatattttatcggtagtatctgctttagaaattattttaactgaacaccgtaaagttaactatatcggtaaaggtatatcaaaatatatggaggttattcatgaagcaatttaa

SEQ ID NO: 7667 - DNA, 447 bp, Staphylococcus aureus
ttgcatcaacatgactttaaagtccaaacttcttggcaaggtggtcgtaacaatgtcggaaacgttcaaggcgacatactttcagagaatatttcaatacctgcttctttaggtggtgttggtataggaacaaatcccgatgaaatgttagtatcagccgcttcatcatgttatatcatctcattagcagctactcttgaacgtgcaaagttcacagatatttcaattgaacaacaatcgattggaacagcttgtttaaataatggaaaattcagtatgtcaaaaattgtgcaccatcctcacattgaaattccaagtgatcaaatagcacaattagaaaagcgattaccaaaattgataacaattgcagataataattgcatgatttcaaatgctgtaagaaataatgtagacataaaaatctatcccatcattcaggccaaataa

SEQ ID NO: 7668 - DNA, 1125 bp, Staphylococcus aureus
atggaaaaactgaaattaatgacaatagttggtacaaggcctgaaatcattcgtttatcatcaacgattaaagcatgtgatcaatattttaatcagatattagtacacactggtcaaaattatgattatacattgaatcaaattttctttgatgatttggaattaagacaaccggaccactacttagaggcagttggaagtaaccttggagaaacgatggggaatattattgcgaagacatatgacgttttattacgcgaacaaccagatgcacttttaattcttggtgatacaaatagttgtttagcagcagtatctgctaaacgattaaagattcctgtgttccacatggaagcgggtaatagatgctttgatcagaatgtacctgaagaaatcaatcgtaaaattgttgaccatgtcagtgatgtgaatctaccttatacagaacatagcagacggtatttattagatgaaggcttcaataaagcgaatatctttgtgacaggatcaccgatgacagaagtgatagaagcgcatcgagataaaattaatcacagtgacgttttaaataaactaggattagaaccgcaacaatacattttagtatctgcgcatagagaagagaatatcgataatgaaaagaattttaaatcattaatgaatgcgataaatgatattgccaaaaagtataaaatgcctgtgatttattcaacgcatccaagaagttggaagaaaattgaagaaagtaaatttgaatttgatccattagttaaacagttaaagccatttggtttctttgattataatgcattgcaaaaagatgcatttgttgtgctatcagatagtggaacattgtcagaagagtcgtctattttgaagttccctggtgtccttattcgaacttccacagaaagaccggaagtactagataaaggtacggttattgtaggtggtattacctataacaatctaatccaatccgttgaactagcaagagagatgcaaaacaataacgaaccgatgattgatgctattgattataaagacactaacgtttcgacaaaggtagttaaaattattcaaagctataaagatattatcaatcgaaatacttggaggaaatga

SEQ ID NO: 7669 - DNA, 861 bp, Staphylococcus aureus
atgcctttagtttcaatgaaagaaatgttaattgatgcaaaagaaaatggttatgcggtaggtcaatacaatattaataacctagaattcactcaagcaattttagaagcgtcacaagaagaaaatgcacctgtaattttaggtgtttctgaaggtgctgctcgttacatgagcggtttctacacaattgttaaaatggttgaagggttaatgcatgacttaaacatcactattcctgtagcaatccatttagaccatggttcaagctttgaaaaatgtaaagaagctatcgatgctggtttcacatcagtaatgatcgatgcttcacacagcccattcgaagaaaacgtagcaacaactaaaaaagttgttgaatacgctcatgaaaaaggtgtttctgtagaagctgaattaggtactgttggtggacaagaagatgatgttgtagcagacggcatcatttatgctgatcctaaagaatgtcaagaactagttgaaaaaactggtattgatgcattagcgccagcattaggttcagttcatggtccatacaaaggtgaaccaaaattaggatttaaagaaatggaagaaatcggtttatctacaggtttaccattagtattacacggtggtactggtatcccgactaaagatatccaaaaagcaattccatttggtacagctaaaattaacgtaaacactgaaaaccaaatcgcttcagcaaaagcagttcgtgacgttttaaataacgacaaagaagtttacgatcctcgtaaatacttaggacctgcacgtgaagccatcaaagaaacagttaaaggtaaaattaaagagttcggtacttcaaaccgcgctaaataa

SEQ ID NO: 7670 - DNA, 768 bp, Staphylococcus aureus
atggcagtaatttcaatgaaacaattactagaagcgggtgttcacttcggtcaccaaacacgtcgttggaacccaaaaatgaaaaaatatatcttcactgagagaaatggtatttatatcatcgacttacaaaaaacagtgaaaaaagtagacgaggcatacaacttcttgaaacaagtttcagaagatggtggacaagtcttattcgtaggaactaaaaaacaagcacaagaatcagttaaatctgaagcagaacgtgctggtcaattctacattaaccaaagatggttaggtggattattaactaactataaaacaatctcaaaacgaatcaaacgtatttctgaaattgaaaaaatggaagaagatggtttattcgaagtattacctaaaaaagaagtagtagaacttaaaaaagaatacgaccgtttaatcaaattcttaggcggaattcgtgatatgaaatcaatgcctcaagcattattcgtagttgacccacgtaaagagcgtaatgcaattgctgaagctcgtaaattaaatattcctatcgtaggtatcgttgacactaactgtgatcctgacgaaattgactacgttatcccagcaaacgacgatgctatccgtgcggttaaattattaactgctaaaatggcagatgcaatcttagaaggtcaacaaggcgtttctaatgaagaagtagctgcagaacaaaacatcgatttagatgaaaaagaaaaatcagaagaaacagaagcaactgaagaataa

SEQ ID NO: 7671 - DNA, 1674 bp, Staphylococcus aureus
ttgagtttaataaagaaaaagaataaagatattcgcattataccattaggcggtgttggcgaaattgctaaaaatatgtatatcgttgaagtagacgatgaaatgtttatgttagatgctggacttatgtttccagaagacgaaatgctaggtattgatattgttataccagacatttcatacgtacttgaaaataaagataaattgaagggtatattccttacacacggacatgagcacgcgattggtgcagtgagttatgttttagaacaattagatgcaccagtatatggatctaaattgacaatagcgttaattaaagaaaatatgaaagcccgtaatattgataaaaaagttcgctactacacagttaacaatgattcaattatgagattcaaaaacgtgaatattagtttctttaatacgacacacagtattcctgatagtttaggtgtttgtattcacacttcatatggtgccattgtgtatacaggtgaatttaagtttgaccaaagtttacatggacattatgcaccagatattaaacgtatggcagagattggtgaagaaggcgtatttgtcttaatcagtgattctactgaggcagagaaacctggatataatactccggaaaatgtaattgaacatcatatgtatgatgcttttgcaaaagtgcgaggtcgcttgattgtttcatgttatgcttcgaactttatacgtattcagcaagttttaaatattgctagcaagctaaatcgtaaagtgtcatttttaggaagatcacttgaaagttcatttaatattgctcgtaaaatggggtatttcgacattcctaaagatttgctaattcctataacagaagttgataattatcctaaaaatgaagtgataattatagctactggtatgcaaggagaacctgtagaagccttaagtcaaatggcgcaacataagcataaaattatgaatatcgaagaaggcgattctgtatttttagcaattacggcttctgctaatatggaagttatcattgcgaatacattaaatgagcttgtacgtgctggcgcacatattattccaaataacaagaagattcatgcttcaagtcatggttgcatggaagaattaaaaatgatgattaatattatgaaacctgaatactttattcctgtacaaggtgaatttaaaatgcagatagcacatgcgaagctagcagctgaagcaggtgttgcaccggaaaagattttccttgtggaaaaaggagatgtcattaattacaacggtaaagatatgatattaaatgaaaaggtaaattcgggaaatattttaatagatggtattggtattggggatgtaggaaatatcgtgttgagagaccgtcatcttttagcagaagatggtatctttattgctgtagtaacgttagatcctaaaaatagacgtatagctgcgggtcctgaaattcaatctcgtgggtttgtatatgtacgtgaaagtgaagacttattacgtgaagcagaagagaaagtacgtgaaatagtagaagctggtttacaagaaaaacgcatagaatggtctgaaattaagcaaaatatgcgtgatcaaattagtaaactattattcgaaagtacaaaacgtcgtcctatgattattccagtaatttctgaaatttaa

SEQ ID NO: 7672 - DNA, 435 bp, Staphylococcus aureus
atgagcgaattatttagtaatgacaatatctttttaaatgtaaatgttaacagccaaaatgaagcaattgaaaaagcaggtaaagccttagttgatagtggtgctgtaacagatgcttatattcaagcaatgaaagatcgtgagcaagttgtatcaacatttatgggaaatggcttagcaattcctcatggcacagatgaagctaaaacaaatgtgattcactcaggtttaacattattacaaatccctgaaggcgttgactgggatggcgaagtagttaaagttgtagtgggaatcgctggtaaagatggcgaacatttagacttgttatctaaaattgcaattacatttagcgaagaagaaaatgtggatcgtatcgttcaagcaaaatctgcagaagaaattaaacaagtattcgaggaggcagatgcataa

SEQ ID NO: 7673 - DNA, 1698 bp, Staphylococcus aureus
atgaaacaattacatccaaatgaagtaggtgtatatgcacttggaggtctaggtgaaatcggtaaaaatacttatgcagttgagtataaagacgaaattgtcattatcgatgcaggtatcaaattccctgatgataacttattagggattgattatgttatacctgactacacatatctagttcaaaaccaagataaaattgttggcctatttataacacatggtcacgaagaccatataggcggtgtgcccttcctattaaaacaacttaatatacctatttatggtggtcctttagcattaggtttaatccgtaataaacttgaagaacatcatttattacgtactgctaaactaaatgaaatcaatgaggacagtgtgattaaatctaagcactttacgatttctttctacttaactacgcatagtattcctgaaacttatggcgtcatcgtagatacacctgaaggaaaagtagttcataccggtgactttaaatttgattttacacctgtaggcaaaccagcaaacattgctaaaatggctcaattaggcgaagaaggcgttctatgtttactttcagactcaacaaattcacttgtgcctgattttactttaagcgaacgtgaagttggtcaaaacgtagataagatcttccgtaattgtaaaggtcgtattatatttgctaccttcgcttctaatatttaccgagttcaacaagcagttgaagctgctatcaaaaataaccgtaaaattgttacgttcggtcgttcgatggaaaacaatattaaaatcggtatggaacttggttatattaaagcaccacctgaaacatttattgaacctaataaaattaataccgtaccgaagcatgagttattgatactatgtactggttcacaaggtgaaccaatggcagcattatctagaattgctaatggtactcataagcaaattaaaattatacctgaagataccgttgtatttagttcatcacctatcccaggtaatacaaaaagtattaacagaactattaattccttgtataaagctggtgcagatgttatccatagcaagatttctaacatccatacttcagggcatggttctcaaggtgatcaacaattaatgcttcgattaatcaagccgaaatatttcttacctattcatggtgaataccgtatgttaaaagcacatggtgagactggtgttgaatgcggcgttgaagaagataatgtcttcatctttgatattggagatgtcttagctttaacacacgattcagcacgtaaagctggtcgcattccatctggtaatgtacttgttgatggtagtggtatcggtgatatcggtaatgttgtaataagagaccgtaagctattatctgaagaaggtttagttatcgttgttgttagtattgattttaatacaaataaattactttctggtccagacattatttctcgaggatttgtatatatgagggaatcaggtcaattaatttatgatgcacaacgcaaaatcaaaactgatgttattagtaagttaaatcaaaataaagatattcaatggcatcagattaaatcttctatcattgaaacattacaaccttatttatttgaaaaaacagctagaaaaccaatgattttaccagtcattatgaaggtaaacgaacaaaaagaatcaaacaataaataa

SEQ ID NO: 7674 - DNA, 444 bp, Staphylococcus aureus
gtgtcattagacattttgtcaacaacacgcatcattgtaaaagaacaagtaaatgattggactgaagctataactatagcttctcagccattactacaagaacaaattattgaacaaggctatgttcaagcaatgattgatagcgttaatgaacttggaccttatatcgttatcgcacctgaaattgcaattgcacatgcaagaccgaacaatgacgtacatcaagttggtttaagtctattaaagttgaatcaacatgtggcattttgtgatgaagatcactacgcatctctcatttttgtattgagtgccatcgacaatcattcacacttatctgtattacaaaatttagcaaccgtactgggcgataaccaaacagtccagcaactattaactgcaaaaaacgcacaagacattaaaaacattttaaaggagcatgattaa

SEQ ID NO: 7675 - DNA, 1956 bp, Staphylococcus aureus
ttgttaagttatagacaaatcgaaattttgtatcttttaattcatgagcaaacgtttattccaatcaataccattgctaatcaacttggtgtatcacctcgtaccattcaatatgatatagcatatattgagcaatatgctgaaacttatcattaccaagtcagccgtaataaagctgcaggcatcaaagtaacaacagctcacgcgacactattaaatgaattagagcacaatctaacaaatcaaattcatttttcaaaagatgaacgactcacacatatcgctttaaagttattcgaaacaaccgatcctgtttcaacaaagcaacttgcgcaagatgttaatgtttcgcgtcggacaattgcagatgatattaaaatgattcaagcccaactagatcaataccatttaaagttaaattatgtccacaataaaggattcaatgttattggtgaggaagatcattatcgtaaagcgtatgcacactttatacatcaatatatgaaacaagctgcaccttttatagaggcggatatctttaattcagaatcaatcgcattggttcgccgtgccattattaagacattaaatagtgaaaattatcatttagttcagtcggctatcgatggcttaatctatcatatactcattgccattcagcgtttaaatgaaaatttttcgttcgatatacctatcaatgaaattgataaatggcgacatactaatcagtatgctattgcttcaaaaatgatagaaaacttagaacgcagttgtaatgtcacatttccagagtctgaaattatctttatcacgttacatttactaggctctaaaatgaccgaacatacagcatcttcaattacctttgaataccatgatttatcgcaaaatatacatgaattgatcacttgtgttagccaagaattaggcattgatatgtcaaaagacaacaagttgcataccagtctgatcacacatatcaaaccagctatacatcgtattaaatacgatatgctacaacctaatcctttgaggcaagaagttatgcgtcgctatcctcaaatcattgaagccgttagcaagcatattagcccaattgaacaagatgctgctattcgcttcaacgaagatgaattaacatacattacaattcacttcgcatcaagtatagagcgtgttgcaacacataaacaatcaatgattaaggttgtcttactatgtggttctggtataggcacgtcgcaacttttaaaatcaaaactaaatcatctgtatcctgagtttcacatttgggatgcctattccatttatcaattggaagaaagtcgattattgcaagataacattgattatgtcatttcaacagtaccttgtgaaatatcagctgtaccagttattcatgtcgatccatttatcaatcaacaatctcgtcaaaaattgaatcaaattatcaatgactcaagagaacaacgagtcatgaaaatggcaactgatggcaagtcactcgcagatttattgcctgaacatcgcatcattataaatgaacaaccattatcaattgaatccgcaattgcagtggctgtgcaacatttaatcaatgatggcattgtctattcaaattatacagctgcaattttaaaacaatttgaacaattcgggtcatatatggtcattagtccacatattgcacttattcacgctggtactgattatgtacagaatggtgtaggtttcgcactaacatatttcactgaagggattatctttggtagtaaagctaacgatcccgttcaccttgtaattacattagcaacggaccaccccaatgcacatttaaaggcattgggacagttaagcgaatgcttaagcaacgacttatatcgacaagatttcttagatgggaatatttttaaaattaaacaacacattgctttaactatgacaaaggaggtttaa

SEQ ID NO: 7676 - DNA, 1353 bp, Staphylococcus aureus
atgaataataaacgacattcaacaaatgaacaattaagtttagacgaaataaacaatacaattaaattcgatcatcgcagttcaaataaacagaaatttttatcatttcttggacctgggttattagtcgctgttggttacatggatcccggaaactggataacatcaatgcaaggtggcgcccaatatggctatactttgctattcgtaattcttatttcaagtttatcagcaatgttacttcaaagcatgacagtgagattaggaatagcaacaggtatggacttagctcaaatgacacgacattatttatcaagacctattgctataatcttttggatcattgcagaactagcaattatcgctacagatattgctgaggttattggtagtgctattgctcttaatctcctatttaacatacctttaatcgtcggtgcactaataactgtacttgatgtatttttactactatttataatgaaatatggttttagaaaaattgaagctattgttggtacatttattttcacagtgttattcatctttatatttgaagtctatatttcatcaccacagttgaatgctgtgttaaatggatttataccacatagtgaaatcattacaaataacggcattctctatattgcattaggtattattggcgctacaattatgcctcataatttgtacttacattcatcaattgtacaatctagaacatactcaagacataacaatgaagaaaaggcgcaagcgattaaatttgctacgatagattcgaacattcagttatcaatcgcatttgtagtcaattgcttattattagtgttaggagcatcactatttttcaactcgaacgctgacgatttaggtggtttctatgatttatatcacgccttaaaaactgaacctgtactaggtgcaacaatgggtgcaatcatgagtacattatttgcagttgcattattagcgtcaggtcaaaattcaacgattactggtactttagcaggacaaattgtaatggaaggatttttaagattacacataccaaattggttaagacgtttaattacacgttcccttgctgtcattcctgttatcgtatgcttaatcatttttaaaggtaatgcagctaaaattgagcaactacttgtattctctcaagtatttttaagtattgctctgccattctgtttaataccattacaattagctactagtaataaagacttgatgggacctttctataataaaacatgggttaatatcatttcatggacacttattattattctaagtattttaaatgtctatttaatcgttcaaacattccaagaactacaaagttaa

SEQ ID NO: 7677 - DNA, 2676 bp, Staphylococcus aureus
atgaacaaacatcacccaaaattaaggtctttctattctattagaaaatcaactctaggcgttgcatcggtcattgtcagtacactatttttaattacttctcaacatcaagcgcaagcagcagaaaatacaaatacttcagataaaatctcggaaaatcaaaataataatgcaactacaactcagcaacctaaggatacaaatcaaacacaacctgctacgcaaccagtaatcactgcgaaaaactatcctgcagcggatgaatcacttaaagatgcaattaaagatcctgcattagaaaataaagaacatgatataggtccaagagaacaagtcaatttccagttattagataaaaacaatgaaacgcagtactatcactttttcagcatcaaagatccagcagatgtgtattacactaaaaagaaagcagaagttgaattagacatcaatactgcttcaacatggaaaaagtttgaagtctatgaaaacaatcaaaaattaccagtgagacttgtatcatatagtcctgtaccagaagaccatgcctatattcgattcccagtttcagatggcacacaagaattgaaaattgtttcttcgactcaaattgatgatggagaagaaacaaattatgattatactaaattagtatttgctaaacctatttataacgatccttcacttgtgaaatcagatacaaatgatgcagtagtaacgaatgatcaatcaagttcagacgcaagtaatcaaacaaacacgaatacatctaatcaaaatacatcaacgaccaacaatgctaataatcaaccgcaggcaacgacaaatatgagtcaacctgcacaaccaaaatcgtcagcgaatgcagatcaagcgtcaagccaaccagctcatgaaacaaattctaatggtaatactaacgataaaacgaatgagtcaagtaatcagtcggatgttaatcaacagtatccaccagcagatgaatcactacaagatgcaattaaaaacccggctatcatcgataaagaacatacagctgataattggcgaccaattgattttcaaatgaaaaatgataaaggtgaaagacagttctatcattatgctagtactgttgaaccagcaactgtcatttttacaaaaacaggtccagtaattgagttaggtttaaagacagcttcaacatggaagaaatttgaagtttatgaaggtgacaaaaagttaccagtcgaattagtatcatatgattctgataaagattatgcctatattcgtttcccagtatctaatggtacgagagacgttaaaattgtgtcatctattgaatatggtgagaacatccatgaagactatgattatacgctaatggtctttgcacagcctattactaataacccagacgactatgtggatgaggaaacatacaatttacaaaaattattagctccgtatcacaaagctaaaacgttagaaagacaagtttatgaattagaaaaattacaagagaaattgccagaaaaatataaggcggaatataaaaagaaattagatcaaactagagtagagttagctgatcaggttaaatcagcagtgacggaatttgaaaatgttacacctacaaatgatcaattaacagatttacaagaagcgcattttgttgtttttgaaagtgaagaaaatagtgagtcagttatggacggctttgttgaacatccattctatacagcaactttaaatggtcaaaaatatgtagtgatgaaaacaaaggatgacagttactggaaagatttaattgtagaaggtaaacgtgtcactactgtttctaaagatcctaaaaataattctagaacgttgattttcccatatatacctgacaaagcagtttacaatgcgattgttaaagtcgttgtggcaaacattggttatgaaggtcaatatcatgtcagaattataaatcaggatatcaatacaaaagatgatgatacatcacaaaataacacgagtgaaccgctaaatgtacaaacaggacaagaaggtaaggttgctgatacagatgtagctgaaaatagcagcactgcaacaaatcctaaagatgcgtctgataaagcagatgtgatagaaccagagtctgacgtggttaaagatgctgataataatattgataaagatgtgcaacatgatgttgatcatttatccgatatgtcggataataatcacttcgataagtatgatttaaaagaaatggatactcaaattgccaaagatactgatagaaatgtggataatagcgttggtatgtcatcgaatgtcgatactgataaagactctaataaaaataaagacaaagtcatacagcttgctcatattgccgataaaaataatcatactggaaaagcagcaaagcttgacgtagtgaaacaaaattataataatacagacaaagttactgacaaaaaaacaactgaacatctgccgagtgatattcataaaactgtagataaaacagtgaaaacaaaagaaaaagccggcacaccatcgaaagaaaacaaacttagtcaatctaaaatgctaccaaaaactggagaaacaacttcaagccaatcatggtggggcttatatgcgttattaggtatgttagctttattcattcctaaattcagaaaagaatctaaataa

SEQ ID NO: 7678 - DNA, 540 bp, Staphylococcus aureus
ttgaaccgtttaaaagaaaagtttaacactgaagttactgaaaacttaatgaaaaaattcaattatagttcagtaatggaagtaccaaaaatagataaaatcgttgtgaacatgggtgtaggtgacgcagtacaaaattctaaagtattagacaatgctgttgaagaattagaattgatcactggtcaaaaaccattagtaactaaagctaaaaaatcaatcgcgactttccgtttacgtgaaggtatgccaatcggtgcgaaagtaacacttcgcggtgaaagaatgtatgaattcttagacaaattaatttcagtatcattaccacgtgtacgtgacttccaaggtgtttctaaaaaagcatttgacggacgcggtaactacactttaggtgttaaagaacaattaattttcccagaaatcgactatgataaagtaagtaaagttagaggaatggatattgttatcgtaacgactgctaacactgatgaagaagctcgtgaattgttagctaacttcggtatgccattccgtaaataa

SEQ ID NO: 7679 - DNA, 276 bp, Staphylococcus aureus
atggaagcaagagatattcttaagcgccccgtaatcactgagaaatcttctgaagcaatggctgaagacaaatacactttcgacgttgatactcgtgttaacaaaacacaagtaaaaatggcagttgaagaaatcttcaacgtaaaagttgcaagtgttaatatcatgaattacaaacctaagaaaaaacgtatgggccgttaccaaggctatacaaacaaaagaagaaaagcgattgtaactcttaaagaaggatcaatcgacttatttaactaa

SEQ ID NO: 7680 - DNA, 600 bp, Staphylococcus aureus
atgtatgaaacttaccattccggttggatagaatgtattacaggtagtatgtttagcggtaaatccgaagaactaataagacgtctaagaaggggtatatacgctaaacaaaaagtcgttgtatttaaaccggcgattgatgatcgatatcataaagaaaaagtggtctctcataatggtaatgccattgaagcgattaatatttctaaagcaagtgaaattatgacgcacaacttaactaatgttgatgttataggaatagacgaagtgcaattttttgacgatgaaattgtaagtatagtagaaaaactatcagcagatggacaccgtgttattgttgctggattagatatggattttaggggcgaaccgttcgaaccaatgcctaaattgatggctgtcagtgaacaagtaacgaaacttcaagcagtttgtgctgtttgtggttcttcatctagtagaacgcaacgattaataaatggtaaaccagctaaaatcgatgatccgattatcttagtaggtgccaatgaaagttatgagccacgttgtcgcgcgcaccatatcgtagcacctagtgataataataaggaggaattataa

SEQ ID NO: 7681 - DNA, 1077 bp, Staphylococcus aureus
gtgtttgatcaattagatattgtagaagaaagatacgaacagttaaatgaactgttaagtgacccagatgttgtaaatgattcagataaattacgtaaatattctaaagagcaagctgatttacaaaaaactgtagatgtttatcgtaactataaagctaaaaaagaagaattagctgatattgaagaaatgttaagtgagactgatgataaagaagaagtagaaatgttaaaagaggagagtaatggtattaaagctgaacttccaaatcttgaagaagagcttaaaatattattgattcctaaagatcctaatgatgacaaagacgttattgtagaaataagagcagcagcaggtggtgatgaggctgcgatttttgctggtgatttaatgcgtatgtattcaaagtatgctgaatcacaaggattcaaaactgaaatagtagaagcgtctgaaagtgaccatggtggttacaaagaaattagtttctcagtttctggtaatggcgcgtatagtaaattgaaatttgaaaatggtgcgcaccgcgttcaacgtgtgcctgaaacagaatcaggtggacgtattcatacttcaacagctacagtggcagttttaccagaagttgaagatgtagaaattgaaattagaaatgaagatttaaaaatcgacacgtatcgttcaagtggtgcaggtggtcagcacgtaaacacaactgactctgcagtacgtattacccatttaccaactggtgtcattgcaacatcttctgagaagtctcaaattcaaaaccgtgaaaaagcaatgaaagtgttaaaagcacgtttatacgatatgaaagttcaagaagaacaacaaaagtatgcgtcacaacgtaaatcagcagtcggtactggtgatcgttcagaacgtattcgaacttataattatccacaaagccgtgtaacagaccatcgtataggtctaacgcttcaaaaattagggcaaattatggaaggccatttagaagaaattatagatgcactgactttatcagagcagacagataaattgaaagaacttaataatggtgaattataa

SEQ ID NO: 7682 - DNA, 207 bp, Staphylococcus aureus
atgtcacaagaaattttaaatgttgaaggtatgagctgtggtcactgcaaaagtgctgttgaatctgcattaaataatattgacggtgtcacttcagctgacgttaaccttgaaaatggtcaagtaagtgttcaatatgatgacagtaaagttgctgtatctcaaatgaaagacgcaattgaagatcaaggttacgatgtcgtttaa

SEQ ID NO: 7683 - DNA, 984 bp, Staphylococcus aureus
ttgattaaaagtggcaaagcacgtgcacatacgaatattgcacttataaaatattggggtaaaaaagatgaagcactaatcattccaatgaataatagcatatctgttacattagaaaaattttacactgaaacgaaagtcacttttaacgaccagttaacacaggatcaattttggttgaatggtgaaaaggttagtggcaaagaattagagaaaatttcaaaatatatggatattgtcagaaatagagctggcatcgattggtatgctgaaattgaaagcgacaattttgtaccaacagcagcagggttggcttcatcagcaagcgcatatgcagctttagcagcagcttgtaatcaagcactagacttgcagctgtcagataaggatttatcgagattggcgcgaattggttcgggttctgcgtcgcgtagtatttatggtggatttgcagaatgggaaaaagggtataatgatgagacgtcatatgccgttccacttgaatcgaatcattttgaagatgaccttgccatgatatttgttgtgattaatcaacattctaaaaaggtacctagtcgatatggtatgtcgttgacacgaaacacatcaaggttttatcaatattggttagatcatattgatgaagatttagctgaagcaaaagcagcgattcaagacaaagattttaaacgccttggtgaagtaattgaagaaaatggtttacgtatgcatgccacgaatctgggatcaacaccgccgttcacttatcttgtgcaagaaagttatgatgtcatggcgctcgttcacgaatgccgagaagcgggatatccgtgttattttacgatggatgcgggtcctaatgtgaaaatacttgtagaaaagaaaaacaagcaacagattatagataaattattaacacagtttgataataaccaaattattgatagtgacattattgccacaggaattgaaataattgagtaa

SEQ ID NO: 7684 - DNA, 1077 bp, Staphylococcus aureus
atgattcaggtcaaagcacccggaaaactttatattgctggagaatatgctgtaacagaaccaggatataaatctgtacttattgcgttagatcgttttgtaactgctactattgaagaagcagaccaatataaaggtaccattcattcaaaagcattacatcataacccagttacatttagtagagatgaagatagtattgtcatttcagatccacatgcagcaaaacaattaaattatgtggtcacagctattgaaatatttgaacaatacgcgaaaagttgcgatatagcgatgaagcattttcatctgactattgatagtaatttagatgattcaaatggtcataaatatggattaggttcaagtgcagcagtacttgtgtcagttataaaagtattaaatgaattttatgatatgaagttatctaatttatacatttataaactagcagtgattgcaaatatgaagttacaaagtttaagttcatgcggagatattgctgtgagtgtatatagtggatggttagcgtatagtacttttgatcatgaatgggttaagcatcaaattgaagatactacggttgaagaagttttaatcaaaaactggcctggattgcacatcgaaccattacaagcacctgaaaatatggaagtacttatcggttggactggctcaccggcgtcatcaccacactttgttagcgaagtgaaacgtttgaaatcagatccttcattttacggtgacttcttagaagattcacatcgttgtgttgaaaagcttattcatgcttttaaaacaaataacattaaaggtgtgcaaaagatggtgcgtcagaatcgtacaattattcaacgtatggataaagaagctacagttgatatagaaactgaaaagctaaaatatttgtgtgatattgctgaaaagtatcacggtgcatctaaaacatcaggcgctggtggtggagactgtggtattacaattatcaataaagatgtagataaagaaaaaatttatgatgaatggacaaaacatggtattaaaccattaaaatttaatatttatcatgggcaataa

SEQ ID NO: 7685 - DNA, 1032 bp, Staphylococcus aureus
atggaaccaatattagaaatgattaaaacattaacaggtattaatagtccttcaggagacacagaagaagcaattcaatttgtcgaaaaatatgcaaaagacttgggttatcaaacaacactaacaaataaaggtgcgttattaataacagtgccaggcaaaaatgatgaagtacaacgctgtattactgctcatgttgatactttaggtgcaatggttaaagaaattaaagaagatggtcgcttagcaatagaattaattggaggattcacgtataacgcgattgagggtgaatattgccaaattaaaactgatgctggtcaaatatatacaggaacaatttgtctgcatgaaacaagtgttcatgtatatagaaataatcatgaaatacctagagatcaaaagcatatggaaataagaattgatgaagtaactacatcagaagaagatacaaagagtttaggtatttcagtaggtgattttgttagctttgatccacgtacagttatcacgtcatcaggttttattaaatctcgtcatttagatgataaagctagcgtagcgatgatactacaattactaaagaaattaaaagaagagcaaataatattaccacatacaacgcaattttatatttctaataacgaagaaataggttacggtgcaaatgcatcaattgattcgaaaatcaaagaatatattgcattagatatgggcgcgttgggagacggtcaagcatcggatgaatatacagtttctatttgtgccaaagatgcttcaggtccatatcataagcaattgaaatcgcacctagttaatctttgcaaaataaataacattccatataaagtagacatatatccatattatggttcagatgcttcagcagctttacatgctggtgcggatatcagacatggtttatttggcgctggcattgaatcatctcatgcaatggaacgaacacatattgattctattaaagcgacagagaaattactatatgcatattgcttatcaccaattgagtaa

SEQ ID NO: 7686 - DNA, 1059 bp, Staphylococcus aureus
atgtctgaacaacaaacaatgtcagagttaaaacaacaagcgcttgtagatattaatgaagcaaatgatgaacgtgcactgcaagaagttaaagtgaaatacttaggtaaaaaagggtcagttagcggactaatgaaattgatgaaggatttgccgaatgaagagaaacctgcgtttggtcaaaaagtgaatgaattgcgtcaaacaattcaaaatgaattagatgaaagacaacagatgttagttaaagaaaaattaaataagcaattggctgaagaaacaattgatgtatcattaccaggtcgtcatattgaaatcggttcaaagcatccattaacacgtacaatagaagaaattgaagacttattcttaggtttaggttatgaaattgtgaatggatatgaagttgaacaagatcattataacttcgaaatgctgaatttacctaaatcacaccctgcacgtgatatgcaagatagtttctatattacggatgaaattttattacgtacgcatacatcaccagtgcaggcacgtacgatggaatcacgtcatggtcaaggtccagttaaaattatttgccctggtaaagtgtatcgtcgtgactctgatgatgcgacacatagtcatcaatttacacaaatcgaaggattagttgttgataaaaacgttaaaatgagtgatttgaaaggcactttagaattgttagctaagaaattatttggtgctgatcgtgaaattcgtttacgtccaagttacttcccattcactgaaccttctgtagaagttgatgtgtcatgttttaaatgtaaaggaaaaggttgtaatgtgtgtaaacacacaggatggattgaaattttaggtgctggaatggtacatcctaatgtattagaaatggctggttttgattcttcagagtactctggatttgcatttggtatgggaccagaccgtattgcaatgttgaaatatggtatagaagatattcgtcatttctatactaatgatgtgagatttttagatcaatttaaagcggtagaagatagaggtgacatgtaa

SEQ ID NO: 7687 - DNA, 1698 bp, Staphylococcus aureus
ttgaattatcaagccttatatcgtatgtacagaccccaaagtttcgaggatgtcgtcggacaagaacatgtcacgaagacattgcgcaatgcgatttcgaaagaaaaacagtcgcatgcttatatttttagtggtccgagaggtacggggaaaacgagtattgccaaagtgtttgctaaagcaatcaactgtctaaatagcactgatggagaaccttgtaatgaatgtcatatttgtaaaggcattacgcaggggactaattcagatgtgatagaaattgatgctgctagtaataatggcgttgatgaaataagaaatattagagacaaagttaaatatgcaccaagtgaatcgaaatataaagtttatattatagatgaggtgcacatgctaacaacaggtgcttttaatgcccttttaaagacgttagaagaacctccagcacacgctatttttatattggcaacgacagaaccacataaaatccctccaacaatcatttctagggcacaacgttttgattttaaagcaattagcctagatcaaattgttgaacgtttaaaatttgtagcagatgcacaacaaattgaatgtgaagatgaagccttggcatttatcgctaaagcgtctgaagggggtatgcgtgatgcattaagtattatggatcaggctattgcatttggtgatggtacgttaacattgcaagatgcgttgaatgtcacaggtagcgtacatgatgaagcgttggatcacttgtttgatgatattgtacaaggtgacgtacaagcatcttttaaaaaataccatcagtttataacagagggtaaagaagtgaatcgcctaataaatgatatgatttattttgtcagagatacgattatgaataaaacatctgagaaagatactgagtatcgagcactgatgaacttagaattagatatgttatatcaaatgattgatcttattaatgatacattagtgtcgattcgttttagtgtgaatcaaaacgttcattttgaagtgttgttagtaaaattagctgagcagattaagggtcaaccacaagtgattgcgaatgtagctgaaccagcacaaattgcttcatcgccaaacacagatgtattgttgcaacgtatggaacagttagagcaagaattaaaaacactaaaagcacaaggagtgagtgtcgctcctgctcaaaaatcttcgaaaaagcctgcgagaggcatacaaaaatctaaaaatgcattttcaatgcaacaaattgcaaaagtgctagataaagcgaataaggcagatatcaaattgttgaaagatcattggcaagaagtgattgatcatgccaaaaacaatgataaaaaatcactcgttagtttattgcaaaattcggaacctgtggcggcaagtgaagatcacgtacttgtgaaatttgaggaagagatccattgtgaaatcgtcaataaagacgacgagaaacgtagtagtatagaaagtgttgtatgtaatatcgttaataaaaacgttaaagttgttggtgtaccatcagatcaatggcaaagagttcgaacggagtatttacaaaatcgtaaaaacgaaggcgatgatatgccaaagcaacaagcacaacaaacagatattgctcaaaaagcaaaagatcttttcggtgaagaaactgtacatgtgatagatgaagagtga

SEQ ID NO: 7688 - DNA, 528 bp, Staphylococcus aureus
atgaataaaaccagtaaagtttgtgtagcagcaacattagcattgggcacactgattggagtaacagttgttgaaaattcggcgccaacaagtaaacaggcacaggcagcaataaccccatattatacttataatggttatattggtaataatgctaattttattctggataagaattttattaacgcgattaagtatgataatgtgaaattcaatggtattaaattagctaaaacgaatacgataaaaaaagtagagaaatatgatcaaacttttaaaggtgtttctgcaaaaggaaacgaagcaagtcaattgcaatttgtagttaaaaataatatttcattaaaagatatccaaaaagcttatggcaaggacttgaaaaaagaaaatggtaaaacaaaggaagctgatagcggtattttttactatcaaaatgctaaaaagacattaggcatctggtttgtcgttgatcataatagagttgtcgaagtaacagttggacatacaccatacaaaacaagtaaataa

SEQ ID NO: 7689 - DNA, 618 bp, Staphylococcus aureus
atgtcagcttttataacttttgagggcccagaaggctctggaaaaacaactgtaattaatgaagtttaccatagattagtaaaagattatgatgtcattatgactagagaaccaggtggtgttcctactggtgaagaaatacgtaaaattgtattagaaggcaatgatatggacattagaactgaagcaatgttatttgctgcatctagaagagaacatcttgtattaaaggtcataccagctttaaaagaaggtaaggttgtgttgtgtgatcgctatatcgatagttcattagcttatcaaggttatgctagagggattggcgttgaagaagtaagagcattaaacgaatttgcaataaatggattatatccagacttgacgatttatttaaatgttagtgctgaagtaggtcgcgaacgtattattaaaaattcaagagatcaaaatagattagatcaagaagatttaaagtttcacgaaaaagtaattgaaggttaccaagaaatcattcataatgaatcacaacggttcaaaagcgttaatgcagatcaacctcttgaaaatgttgttgaagacacgtatcaaactatcatcaaatatttagaaaagatatga

SEQ ID NO: 7690 - DNA, 3168 bp, Staphylococcus aureus
gtgataaaaaagctattacaattttctttggggaataagtttgctatctttttaatggttgttttagttgtcttgggcggtgtatacgcgagtgctaaattgaaattagaattactaccaaatgtacaaaatccagttatttcagttacaacaacaatgccgggtgcaacgccacaaagtacccaagatgaaataagtagtaaaattgacaatcaagtaagatcgttggcatatgtgaaaaatgttaaaacgcaatccatacaaaatgcttcaattgtaacagttgaatatgaaaataatacagatatggataaagcagaagaacagcttaaaaaagaaatcgataaaattaaatttaaagatgaagttggtcaaccagaattaagacgtaattcgatggacgcttttccggttttagcatattcattttcaaataaagagaatgacttgaaaaaagtaacgaaagtactgaatgaacaattaataccaaaattacaaacggtagatggtgtgcaaaatgcgcaattaaatgggcagacgaaccgtgaaatcacccttaaatttaagcaaaatgaacttgaaaaatatgggttgactgctgatgatgtagaaaactatctaaaaacagcaacaagaacaacaccacttggattgttccaatttggtgataaagataaatcaattgttgttgatggtcaatatcaatctgttgatgcttttaaaaacataaatattccattaacgttggcaggagggcaagggcaatctcaatcccaaagtgataataaacaaaattcagccatgtcagacgttaatcaggcatcaccgcagcaaaattcaaaagcgtcagcaccaaataatataagtggtatgccgacagcgaaactaggagatttagctgatattacagttggtgatgtgcgtacttctatttctaaaacgaatggaaaggatgcggttaatctacaaataactaaagctcaagatgccaatacagttcaagtagccaaagatgtacaacgtaaaattgatacattcgttgatgaaaataaagattttaatgtcacaaaaacaatggatactgcaaagcctgttgagaaatcactttatacgatggttgaaaaagcatcattaggtacaatcgtggcaattatagttattttgctgtttttaagaaacattcgtacgacggcaatttctattatatccattccgttatcacttcttatggcgcttattgctctgaaattgagtgatgtttcattgaatatactaacgttaggtgcattaacagtagcgattggacgtgtgatagacgattcgattgtagttgttgaaaatatttatcgacgcttaacagattcagaagaacaactaaaaggtgaaaatttaattatcagtgcgacaactgaagtatttaaaccaataatgtcatcgacactagttactattatcgtcttcttaccacttgtgtttgtatcaggttcagtaggcgaaatgtttagaccttttgcattggctattgcatttagtttattagcatcgttattagtgtcaattacactcgttccagctttggcagcaacactatttaaaaaaggcgttaaacgtcgtaataaacaacatcaagaaggattaggtgttgttagtacaacttataaaaaagtattgcattggtcactaaatcataagtggattgtaattatattaagtacattaattttggttgcaactattgtatttggaggaccgagactaggcactagctttatttcagcaggtgacgataaatttttagctattacttatacaccgaagcctggtgaaacggagcaagcagtgttgaatcatgcgaaagatgttgaaaaatatttaaaacagaaaaagcatgtaaaaacaattcaatactcagttggtggtagtagtccagtagatccaacgggtagtacaaatagtatggcaatcatggttgaatatgataatgacacgcctaattttgatgtagaagcggataaggttattaaacatgtagatggctttaaacatcctggagagtggaaaaatcaagatttaggaacaggtgcaggtaataaatctgtagaggttactgtgaaaggcccatcaatggatgccataaaatcaactgtaaaagatattgaacagaaaatgaaacaggttaaaggactagccaatgtcaaatctgatttatcgcaaacatatgatcagtatgaaattaaagttgatcaaaataaagcggcagaaaatggtatttctgcaagtcaacttgcaatgcacttgaatgaaaacttaccagaaaaaacagttacgactgttaaagaaaatggtaaaactgttgatgttaaagtcaaacaaaataagcaaacagactggtcagaagataagttgaataatataactttgaaaaagccgactggtggtacgattaaattgggagatatcgctacgttagttaaaacaacgacaccaagtaaattgacgcaagaacaaggtgattatgcaacgacggtatctgctaaagtaacaaataaagatgtgggtggcacaacacgacaagtgatgtctaaaataaataatttggacaaaccgaataatgtaaaggttaatatcggtggtgcatcagatgatattaacaatgcaatgacacaattagcctttgcaatgttagctgcaatcattatcgtatatttaatcctagttattacatttaaaggtggcttagcgccatttacaattttattctctttaccatttacagttatcggtgtaattattgcactattaatcacaggagaaacaatatcagtaccaagtttaattggtatgctaatgttaattggaatcgtagtaacaaatgccattgtgttaatagaccgtgtcattaataatgagcagcagggcatggagatgaaagaagcattaatcgaagcaggcggtactagaattagaccgatattaatgacggcgattgcaacaatcggtgcattagttcctttgttatttggtcaagatagctcgattcttatttcgaaaggattagctgctacagttattggtggtttaatttcatcaactttattaacacttgtagttgtaccagtaatatatgaaattctctttactttaaaaaaacgattcactaaacgatag

SEQ ID NO: 7691 - DNA, 2982 bp, Staphylococcus aureus
atgaagaacgcatttaaattatttaaaatggatctgaagaaagtagctaagacgccagctgtgtggattatcttagcaggcttagctattttgccatcgttctacgcttggtttaacttatgggcaatgtgggatccatatggcaacacgggacacatcaaggtcgcagtcgttaatgaagataaaggcgacacaatcagagggaaaaaagttaatgtcggtaatacgatggttaatacactcaagaaaaataaaagttttgattggcagtttgtaagtagagagaaagctgatcatgagataaaaatgggtaaatattttgcaggtatttacatcccatctaagtttacacatgaaattaccgggacactacgtaagcagcctcaaaaagcagatgtagaatttaaggtgaatcagaagattaacgctgttgcgtctaagctaacagatactggttcgtcagttgtcgttgaaaaagcgaatgaacaatttaataaaacagtaactcgagcattattagaagaagctaacaaagcaggtttaactattgaagaaaatgtgccgacaattaacaagataaaaaatgcggtatattcagcagataaagctttacctaagattaatgactttgcgaataaaattgtgtatttgaataaccaccaagcggatttagataaatatgccaatgattttagaaaactaggaaattataaaggtgatattttagatgctcagaaaaaattaaacgaagtcaatggtgctattccgcaacttaatgaaaaggctaagttgatattagctttaaataattatatgccgaaaattgaaaaagcgttaaattttgcagctgatgacgtgccagcgcagttccctaaaattaatcaaggacttaacattgcgagtcaagggattgatcaagctaatggacagttaaatgatgccaaaggcttcgtcacacaagttagaagtagagtcggtgattatcaagatgcaattcgacgcgcgcaagatttaaatcgaagaaaccagcaacagattcctcaaaatagcgcggcgaacaacgaaacatcaaatagttcacctgcagctggtaatggtgtagcatcaacgccaccaagtgcaccaagtggcgatactgcaccaaataataatgttacgcaaaataccgcaccaaatagtaataatgcgcctgtatcgactacaccacaaagtacaagcgggaaaaaagatggtcaaagttttgcagatataacaacaacacaagtcagcacagctaacgagaacacacaaaacattacagataaagatgttaaatcaatggaagcggcattaacgggctctttattatcattatcaaataatttagatacccaagcgaaagccgcacaaaaagatagtcaggcattacgtaatatttcgtatggcattttagcatcggacaagccttctgattttagagagtctttagataatgttaagtccggtttagaatacacaacgcaatataatcaacaatttatcgatacattaaaagagattgagaagaatgaaaatgttgatttatcaaaagaaattgataaggtaaaagcagctaataatcgaattaatgaatcattaaggttagttaatcaattaagcaatgcattaaagaatggtagttcaggaactgctgaagctactaaattactagatcaactttcaaaactagattcatcattatcatcatttagagattatgttaaaaaagatcttaacagctctttagtatcaatatcacaacgtattatggatgaattgaacaaagggcaaactgcattatccaatgttcagtctaaattaaatacaattgatcaagtcattaacagtggacaagctattttaaaaaatggtaaaacacgtattgatcgcttacaaacagtattaccaagtattgaacaacaatacattagtgctgttaaaaatgctcaagcaaacttcccgaaagtgaaaagtgatgtagctaaagctgctaactttgtgcgcaatgacttaccacagttggaacagcgattaactaatgcgacagcaagtgtgaataaaaatttaccaacgttattaaatggttatgatcaagcggtaggattactaaataaaaatcagccacaagcgaaaaaggctttatcagatttagctgatttttctcaaaataaattgcctgatgttgaaaaagatttgaaaaaagcgaataaaattttcaagaaattagacaaagatgatgcagtcgacaaattaatcgacacacttaagaatgatttgaaaaagcaagcgggtattattgcaaatcctattaataagaagactgttgatgttttcccagttaaggattatggttcaggtatgacaccattctatactgcactgtcagtatgggtaggtgcactcttgatggtaagtttattaacggttgataataaacataagagtctagagtcagtcttaacgacaagacaagtgttcttaggtaaggcaggattctttataatgcttggtatgttgcaagcactcattgtatcggttggagatttgttaatcctaaaagcaggagttgagtcacctgtattatttgtacttataacgattttctgttcgattattttcaactcaatcgtatatacgtgcgtatcattacttggtaacccaggtaaagcaattgcaatcgtattgcttgtattacaaattgcaggtggtggaggaacattcccaattcaaactacgccacaatttttccaaaacatttcgccatacttaccatttacgtatgcaattgattcattacgtgaaacagtaggcggtattgttccggaaatcctaattacaaaattaattatattaacgttatttggcataggattcttcgttgtaggtttaattttaaaacctgtaacagatccattgatgaagcgcgtatctgaaaaagttgaccaaagtaacgttacagaataa

SEQ ID NO: 7692 - DNA, 2253 bp, Staphylococcus aureus
atgaaagctttattacttaaaacaagtgtatggctcgttttgctttttagtgtgatgggattatggcaagtctcgaacgcggctgagcagtatacaccaatcaaagcacatgtagtaacaacgatagacaaagcaacaacagataagcaacaagtaacgccaacaaaggaagcggctcatcaatttggtgaagaagcggcaaccaacgtatcagcatcagcacagggaacagctgatgaaataaacaataaagtaacatccaacgcattttctaacaaaccatctacagcagtttcaacaaaagtaaacgaaacgcacgatgtagatacacaacaagcctcaacacaaaaaccaactcaatcagcaacattcacattatcaaatgctaaaacagcatcactttcaccacgaatgtttgctgccaatgtaccacaaacaacaacacataaaatattacatacaaatgatatccatggccgactagccgaagaaaaagggcgtgtcatcggtatggctaaattaaaaacaataaaagaacaagaaaagcctgatttaatgttagacgcaggagacgccttccaaggtttaccactttcaaaccagtctaaaggtgaagaaatggctaaagcaatgaatgcagtaggttatgatgctatggcagtgggtaaccatgaatttgactttggatacgatcagttgaaaaagttagagggtatgttagacttcccgatgctaagtactaacgtttacaaagatgggaaacgcgcgtttaagccttcaacaattgtaacgaaaaatagtattcgttatggaattattggcgtaacgacaccagaaacaaagacgaaaacaagacctgagggcattaaaggtgttgaatttagagatccattacaaagtgtgacagcagaaatgatgcgtatttataaagacgtagatacatttgttgttatatcacatttagggattgatccttcaacacaagaaacatggcgtggtgattacttagtgaaacaattaagtcaaaatccacaattgaagaaacgtattacagtcattgatggtcattcacataccgtacttcaaaatggtcaaatttataacaatgatgcattagcacaaacaggtacagcacttgcgaatatcggtaaggttacatttaattaccgcaatggagaggtatcaaatattaaaccgtcattgattaatgttaaagacgttgaaaatgtaacaccgaacaaagcattagctgaacaaattaatcaagctgatcaaacatttagagcacaaacagcagaggttattattccaaataataccattgatttcaaaggagaaagagatgacgttagaacgcgtgaaacaaatttaggaaacgcgattgcagatgctatggaagcgtatggcgttaagaatttctctaaaaagactgactttgccgtgacaaatggtggaggtattcgtgcctctatcgcaaaaggtaaggtgacacgctatgatttaatctcagtattaccatttggaaatacgattgcgcaaattgatgtaaaaggttcagacgtctggacagctttcgaacatagtttaggtgcaccaacaacacaaaaagacggtaagacagtattaacagcgaatggcggtttactacatatctctgattcaattcgtgtttactatgatatgaataaaccgtctggcaaacgaattaacgctattcaaattttaaataaagagacaggtaagtttgaaaatattgatttaaaacgtgtatatcatgtaacgatgaatgacttcacagcatcaggtggcgacggatatagtatgttcggtggccctagagaagaaggtatttcattagatcaagtactagcaagttatttaaaaacagctaacatagctaagtatgatacgacagaaccacaacgtatgttattaggtaaaccagcagtaagtgaacaaccagctaaaggacaacaaggtagcaaaggtagtgagtctggtaaagatgtacaaccaattggtgacgacaaagcgatgaatccagcgaaacaaccagcgacaggtaaagttgtattgttaccaacgcatagaggaactgttagtagcggtacagaaggttctggtcgcacattagaaggagctactgtatcaagcaagagtgggaaccaattggttagaatgtcagtgcctaaaggtagcgcgcatgagaaacagttaccaaaaactggaactaatcaaagctcaagacagtga

SEQ ID NO: 7693 - DNA, 2532 bp, Staphylococcus aureus
atgggatttttatcaaaaattcttgatggcaataataaagaaattaaacagttaggtaaacttgctgataaagtaatcgctttagaagaaaaaacggcaattttaactgatgaagaaattcgtaataaaacgaaacaattccaaacagaattagctgacattgataatgtcaaaaagcaaaatgattatttagataaaattttaccagaagcatatgcacttgttagagaaggctctaaacgtgtattcaatatgacaccatataaagttcaaattatgggtggtattgcaattcataaaggtgatatcgctgagatgagaacaggtgaaggtaaaacattaacagcgacaatgccaacatacttaaatgcattagctggtagaggtgttcacgttattacagtcaatgaatacttatcaagtgttcaaagtgaagaaatggctgagttatataacttcttaggtttgactgtcggattaaacttaaacagtaagacgacagaagaaaaacgtgaagcatacgcacaagacattacttacagtactaataatgagctaggttttgattacttacgagataacatggtgaattattctgaagatagagtaatgcgtccattacattttgcaatcattgatgaggttgactcaattttaatcgacgaggcacgtacgccattaattatttctggtgaagctgaaaagtcaacgtcactttatacacaagcaaatgtttttgcgaaaatgttaaaacaggacgaagattataaatacgatgaaaaaacgaaagccgtacatttaacagaacaaggtgcggataaagctgaacgtatgttcaaagttgaaaacttatatgatgtacaaaatgttgatgttattagtcatatcaacacagctttacgtgcgcacgttacattacaacgtgacgtagactatatggttgttgatggcgaagtactaattgtcgatcaatttacaggacgtacaatgccaggccgtcgtttctcagaaggtttacaccaagctattgaagcgaaggaaggcgttcaaattcaaaatgaatctaaaactatggcgtctattacattccaaaactatttcagaatgtacaataaacttgcgggtatgacaggtacagctaaaactgaagaagaagaatttagaaatatttataacatgacagtaactcaaattccgacaaataaacctgtgcaacgtaacgataagtctgatttaatttacattagccaaaaaggtaaatttgatgcagtagtagaagatgttgttgaaaaacacaaggcagggcaaccagtgctattaggtactgttgcagttgagacttctgaatatatttcaaatttacttaaaaaacgtggtatccgtcatgatgtgttaaatgcgaaaaatcatgaacgtgaagctgaaattgttgcaggcgctggacaaaaaggtgccgttactattgccactaacatggctggtcgtggtacagatatcaaattaggtgaaggcgtagaggaattaggcggtttagcagtaataggtacagaacgacatgaatctcgtcgtattgatgaccagttacgtggtcgttctggacgtcaaggtgataaaggggatagtcgcttctatttatcattacaagatgaattaatgattcgttttggttctgaacgtttacagaaaatgatgagccgactaggtttagatgactctacaccaattgaatcaaaaatggtatcaagagctgtagaatcagcacaaaaacgtgtagaaggtaataacttcgacgcgcgtaaacgtatcttagaatacgatgaagtattacgtaaacaacgtgaaattatctataacgaaagaaatagtattattgatgaagaagacagctctcaagttgtagatgcaatgctacgttcaacgttacaacgtagtatcaattactatattaatacagcagatgacgagcctgaatatcaaccattcatcgactacattaatgacattttcttacaagaaggtgacattacagaggatgatatcaaaggtaaagatgctgaagatattttcgaagtcgtttgggctaagattgaagcagcatatcaaagtcaaaaagatatcttagaagaacaaatgaatgagtttgagcgtatgattttacttcgttctattgatagccattggactgatcatatcgacacaatggatcaattacgtcaaggtattcacttacgttcttatgcacagcaaaatccattacgtgactatcaaaatgaaggtcatgaattatttgatatcatgatgcaaaatatcgaagaagatacttgtaaattcattttaaaatctgtagtacaagttgaagataatattgaacgtgaaaaaacaacagagtttggtgaagcgaagcacgtttcagctgaagatggtaaagaaaaagtgaaaccgaaaccaatcgttaaaggcgatcaagttggtcgtaacgatgattgtccatgtggtagtggtaaaaaattcaaaaattgccatggaaaataa

SEQ ID NO: 7694 - DNA, 516 bp, Staphylococcus aureus
atggctgggataatcaaagaaatttcagaacaaaatgctagtgaattagttgaattagcaactagaacattttatgacacgtttggttcttactatgatgacaaagattttgatcaattttttaaagacaattatactgtagaaaaatttacacaagagattaaccatgtagattcatttcattatttttatcaagaagatggtgcgaatgttggttatataaagatgaatattaatagtgctcaaactgaagaaatgggggagacctatttagaagtgcagcgcatatattttttgaaagactttcaaggtggcggaagaggttcacaattgatagaattggccgaaaaaattgctcaagaacataataaacataaaatttggctaggagtttgggagcataatcctcgtgctcaagcattttataaacgtcatggatttaaagtggttggtgaacatcattttcaaacaggtgatgtaacggatacagatttaattatggaaaaagagttataa

SEQ ID NO: 7695 - DNA, 825 bp, Staphylococcus aureus
gtgaaggagaaacatattaaatgggataagattttttatggggatgactgggtaaataacgtagtcgaaacaataagaacaaaagatatattacaaagcgtttatttaaaacgttatttattacgcgcgatgatggcaggatttattatcggtattattacggtcttcgtgctatcagttaaagcaacacacgaaccagatttaccaccaggtatagtgaatatggctagcgccattacattcagctttgcgttagtactcattttatttacaaactccgaactactaaccagtaacttcatgtactttactgtaggcctgtattataaagtaattaaaccgactagagtattgaaaatatttttattatgctttgcaggaaatattttaggtgctgctattttatttagtttcatgcgtttttcaaatgtaatgacgccagatatgttaaatcagttatcagcagttattgagcacaaaacgttgtctactggttttgtaagtatattaatgaaagcgatcttcgccaatttctttatcaatatttcattagttattgccatgcaaattgacgatgtactcgcaaaaatgtttgtcatgatgttcggtgttaccatattcgcctttatgggttatgaacacgtcgtttacaacagttgcttatttatgggtggtttaatttatcaagttgatacattgcacttcataccagctatttcgaatatcgctgcggcttttatcggtaactatattggaggcggactcattataggtttattctatgcttacttgaatgatcatcatcaattttataaaaataattaa

SEQ ID NO: 7696 - DNA, 390 bp, Staphylococcus aureus
atggcacgtaaacaagtatctcgtaaacgtagagtgaaaaagaatattgaaaatggtgtagcacacatccgttcaacattcaacaacactattgtaactatcactgatgagttcggtaatgctttatcatggtcatcagctggtgcattaggattcaaaggatctaaaaaatcaacaccatttgcagcacaaatggcttctgaaactgcatctaaatcagctatggagcatggtttaaaaacagttgaagtaacagttaaaggacctggtccaggtcgtgaatcagctattcgtgcattacaatctgcaggtttagaagtaactgcgatcagagacgttactccagtacctcataacggttgtcgtccaccaaaacgtcgtcgtgtataa

SEQ ID NO: 7697 - DNA, 2790 bp, Staphylococcus aureus
atggcataccaaagtgaatacgcattagaaaatgaaatgatgaatcaacttgaacaattgggttacgaaagagtaacgatacgtgataataagcaattgcttgataattttagaacgattttaaatgagcgtcatgcggacaaattagaaggcaatcccttaacagataaagaatttcaacgtctgttaacgatgattgatgggaaaagtattttcgagagtgcccgtattttacgtgataaattaccacttagacgtgatgatgagtctgagatttatttgtcgtttttagataagaaaagttggtgtaaaaataagtttcaagtgacgaatcaagtatctgtcgaggatacatataaagcacgttatgatgtaacgatattaatcaacggactaccccttgtccaagttgaattgaaacgtcgaggtattgatattaatgaggcgtttaaccaagtaaaacgttaccgcaaacaaaattacacaggcttattccgctacatacaaatgtttatcattagtaatggtgttgaaacgcgatacttttctaataatgatagcgaactattgaagagtcacatgttttattggagtgataaacagaataaccgaatcaatacattacaatcatttgctgagtcgtttatgagaccctgtcaattagctaagatgatatcgcgctatatgattattaatgaaacagatagaatactgatggcaatgcgtccgtatcaagtgtatgcggtagaagcacttattcaacaagcgactgagacagggaataatggatatgtatggcatacaactggaagtggtaagacattgacttcttttaaagcgagtcagattttatcacagcaagatgacattaagaaagttatctttttggttgaccgtaaagacttggatagtcaaacagaagaggaatttaataaatttgctaagggtgctgtagacaaaacttttaatacctcgcaactggtacgccaactaaatgataaaagtttgccacttattgtaacgacgattcaaaaaatggctaaagcgattcaagggaatgcccatttattagaacagtataaaacgaataaagttgtatttattattgatgagtgtcatcgcagtcaatttggtgacatgcatcgtctagttaaacaacatttcaaaaatgcccaatactttggattcactggtacgccacgttttccagaaaatagtagtcaagatggtagaacaactgcagatattttcggtagatgcttacatacgtatttaattagagatgccattcatgatggtaatgtacttggtttctcagttgactatattaatacttttaaaaataaagctttaaaagcagaagataacagcatggttgaagcaattgatacggaagaagtatggttagcggataaacgtgtggaattagtaacacgacatatcatcaataatcatgataaatatacacgtaatcgtcaatattcaagtatatttacagtccaaagtattcacgcgcttattaaatattatgagacatttaagcgacttaacaaaaagttggaacaaccgttaacgatagctggtatatttacgtttaaacctaatgaagatgatcgtgatggtgaagtgccatatcattcacgtgaaaaattagagataatgattagtgattataataaaaagttcgagacgaatttttcaacagacacaactaatgagtattttaatcatatttcaaaaaacgttaaaaagggcgttaaagatagtaaaattgatatcttaatcgttgttaatatgttcttaactggttttgatagtaaagtactgaacactttatatgttgataagaatttaatgtatcatgatttaattcaagcgtattcacgtacaaatagggttgaaaaagaatcaaagccatttggtaaaattgtaaactatcgtgacttgaaaaaagagacagacgatgcactgagagtattctcacaaacaaatgatacggatacaattttaatgcgcagttatgaagagtataaaaaagaatttatggacgcttatcgtgagcttaaaatgattgtgccgacaccacacatggttgatgacattcaagatgaagaagagctaaagcgctttgttgaagcttatcgtttattagctaaaataatattacgtttaaaagcatttgacgagtttgagtttacaattgatgaaattggaatggatgaacaagagaatgaagactataaaagtaaatatttagctgtgtacgatcaagtaaaaagagcgacggctgagaaaaataaagtatccattttaaatgatattgatttcgaaatagaaatgatgcgtaatgatacgattaatgtgaattatattatgaatatattgagacaaattgatcttgaagacaaagcggaacaacgtcgtaaccaagaacaaattagacgcattttagatcatgcagatgatccgacattgaggttaaaacgagatctaattagagaattcatcgacaatgttgtaccttctttaaataaggatgatgatatcgatcaagaatatgttaatttcgaaagtattaaaaaagaagcggagttcaaaggatttgctggagagagatctatcgatgaacaagccctaaaaacaatttcaaatgactaccagtatagtggtgttgtaaacccacatcaccttaaaaaaatgattggtgatttgccattgaaagaaaagcgtaaagcaagaaaagccattgaatctttcgtggcagaaacaactgaaaaatacggtgtgtaa

SEQ ID NO: 7698 - DNA, 2754 bp, Staphylococcus aureus
atggattacaaagaaacgttattaatgcctaaaacagatttcccaatgcgaggtggtttaccaaacaaggaaccgcaaattcaagaaaaatgggatgcagaagatcaataccataaagcgttagaaaaaaataaaggtaacgaaacattcattttacatgatggcccaccatacgcgaatggtaacttacatatgggacatgccttgaacaaaattttaaaagactttattgtacgttataaaactatgcaagggttctatgcaccatacgtaccaggttgggatacacatggtttaccaattgaacaagcattaacgaaaaaaggtgttgaccgaaagaaaatgtcaacagctgaattccgtgagaaatgtaaagaatttgctttagaacaaattgaattacagaaaaaagattttagacgtttaggtgttcgtggtgactttaatgatccatatattacattaaaacctgaatacgaagctgcacaaattcgtatttttggagaaatggcagataaaggtttaatttataaaggtaaaaagccagtttattggtctccttcaagtgagtcttcattagcagaagcagaaattgaatatcacgataaacgttcagcatcaatttacgttgcatttgacgttaaagatgacaaaggtgtcgttgatgcagatgctaaatttattatctggacaacaacgccatggacaattccatcaaatgttgcgattaccgttcatcctgaattaaaatatggtcaatacaatgtaaatggcgaaaaatatattattgcagaagccttgtctgacgctgtagcagaagcactggattgggataaagcatcaatcaaattagaaaaagaatacacaggtaaagaattagagtatgttgtagcacaacatccattcttagacagagaatcgttagtgattaatggtgatcatgttactacagatgctggtacaggttgtgtacatacagcaccaggtcacggggaagatgactatattgttggtcaaaaatatgaattgccagtaattagtccaatcgatgataaaggtgtatttactgaagaaggcggccaatttgaagggatgttctatgataaagctaataaagccgttactgatttattaacagaaaaaggtgcactattaaaattagactttattacacatagctatccacacgactggagaacaaaaaaacctgtaatcttccgtgctacaccacaatggtttgcctcaatcagtaaagtaagacaagatattttagatgcaatcgaaaatacaaacttcaaagtaaattggggtaaaacacgtatttacaatatggttcgtgaccgtggcgaatgggttatttctcgtcaacgtgtgtggggtgtaccgttaccagtattttatgctgaaaatggcgaaattatcatgacgaaagaaacagtgaatcatgttgctgatttatttgcagaacacggttcaaatatttggtttgaaagagaagcgaaagacttactaccagaaggatttacacatccaggcagccctaacggtacatttactaaagaaacagacattatggacgtttggtttgattctggttcatcacaccgtggcgtgttggaaacaagaccggaattaagtttcccagcggatatgtatttagaaggtagtgaccaatatcgtggttggttcaactcttctatcacaacttcagttgctacaagaggagtatcaccttataaattcttactttctcatggttttgttatggacggtgaaggtaagaaaatgagtaaatctttaggtaatgtgattgtacctgaccaagtggttaaacaaaaaggtgctgatattgcgagactttgggtaagtagtacggactatttagctgatgttagaatttctgatgaaattttaaaacaaacatctgatgtttatcgtaaaatcagaaatacattaagatttatgttaggtaacattaacgatttcaatcctgacacagatagcattcctgaatcagagttattagaagtggatcgttacttgctaaatcgtttacgtgaatttactgcaagtacgattaacaactatgaaaactttgactacttaaatatttatcaagaagttcaaaactttatcaatgttgagttaagtaatttctatttggattacggtaaagatattttatatattgaacaacgtgattctcatatccgtcgtagtatgcaaacagtgttatatcaaattttagttgatatgacgaagttgttagcaccaatcttagtgcatacagctgaagaagtttggtctcatacaccacatgttaaagaagaaagtgttcacttagcagacatgcctaaagttgtagaagtagatcaagctttattggataaatggcgtacatttatgaatttacgtgatgatgtgaaccgtgcattagaaactgctcgtaatgaaaaagttattggtaaatcattagaagctaaagttacgattgctagtaacgataaatttaatgcatctgaattcttaacttcatttgatgcattacatcaattatttatcgtgtcacaagttaaagttgtagataagttagatgatcaggcaacagcttatgaacatggtgatattgtcatcgaacatgcagatggtgaaaaatgtgaaagatgttggaactattcagaggatcttggtgctgttgatgaattgacgcatctatgtccacgatgccaacaagttgtaaaatcactggtataa

SEQ ID NO: 7699 - DNA, 924 bp, Staphylococcus aureus
atgaatgctgccgtaagagcagttgttcgtacagcaatttacaatgaaattgaagtttatggtgtgtatcatggttaccaaggattgttaaatgatgatattcataaacttgaattaggatcagttggggatacgattcagcgtggaggtacattcttgtattcagcaagatgtccagagtttaaggagcaagaagtacgtaaagttgcaatcgaaaacttacgtaaaagagggattgagggccttgtagttattggtggtgacggtagttatcgcggtgcacaacgcatcagtgaggaatgcaaagaaattcaaactatcggtattcctggtacgattgacaatgatatcaatggtactgattttacaattggatttgacacagctttaaatacgattattggcttagtcgacaaaattagagatactgcgtcaagtcacgcacgaacatttatcattgaagcaatgggccgtgattgtggagatctagcattatgggctggattatcagttggtgctgagacaattgtagttccagaagtgaaaacagatattaaagaaatagctgataaaattgaacaaggtattaaacgtggtaagaaacactcaatcgttcttgtagcagaaggttgcatgactgcgcaagattgtcaaaaagaattatcacaatacatcaatgttgataatagagtgtctgtgttaggtcacgttcaacgtggtggtagcccaacaggtgcggatagagttttagcatcacgtttaggtggatatgcggtagacttattaatgcaaggtgaaacagctaagggtgttggaattaagaacaataaaattgtagcaacatcttttgatgaaatttttgatggtaaagatcataaatttgattatagtctatatgaacttgctaacaagttatctatataa

SEQ ID NO: 7700 - DNA, 3690 bp, Staphylococcus aureus
atgggaaaatttggattgaatttctttaagccaacagaaaaatttaatgggaattggtcgatcctagaaagtaaaagtagagaatgggaaaaaatgtacagagaacgttggagccacgataaagaagtaagaacaacacatggtgttaactgtacaggctcatgttcttggaaagtatttgtgaaaaatggtgtgattacctgggaaaatcaacaaactgactatccaagttgtggtccggatatgcctgaatatgaaccgagaggatgtccacgaggtgcgtcattctcttggtatgaatacagtccgcttcgaatcaaatatccatatattcgtggaaaactctgggatttatggactgaagcattagaagaaaactatggtaatcgcgttgctgcatgggcgtctattgttgaaaatgaagacaaagccaaacaatataagcaagcccgaggtatgggagggcacgtgcgttcaaattggaaagacgttacagagataatcgcagcacaattactgtatacaataaaaaaatatggtccagatcgaatcgcaggatttacacctattccagcgatgtcaatgattagttatgcagcaggtgctcgattcatcaatttgcttggtggtgaaatgcttagtttttatgactggtatgcagatttaccacctgcctctccacaaatttggggagagcaaacagatgtgcctgaatcaagtgactggtataacgcatcatacattattatgtggggctctaatgtacctttaacacgtactccggatgcacattttatgacagaagtccgctataaaggtacaaaagtcatttcagtagcaccagattacgcagaaaatgtgaaatttgcagataactggctagcaccgaatcctggttcagatgctgcaattgctcaagcaatgacacatgttattttacaagaacattatgttaatcaacctaatgaacgctttataaattacgctaaacaatatacagatatgccgtttcttatcatgctggatgaagatgaaaatggatataaagcgggtcgatttttaagagcgagtgacttaggtcaaacaacagagcaaggcgaatggaagccagttattcatgatgcaatcagcgatagtttagtagtacctaatggcacaatgggtcaacgttgggaagaaggtaagaagtggaacttaaaactagaaacagaagatggttctaaaattaaccctacattatcaatggcagaaggtggatacgaattagaaacaattcaattcccatactttgatagtgatggagatgggatattcaatcgtccaattccaactcgacaagtcactttagcaaatggtgacaaagtccgtattgctacaatttttgacttaatggcaagtcaatatggcgtgcgtcgttttgatcataaattagaatcaaaaggatacgacgatgcagaatcaaaatatacacctgcttggcaagaagccatttcaggcgtaaaacaaagtgttgtcattcaagtagcgaaagaatttgcgcaaaacgctatcgatactgaagggcgttcaatgattatcatgggtgcgggtattaaccattggtttaactcagatacgatttatcgttcaatcttaaacttagttatgttatgtggctgtcaaggtgtgaatggtggcggttgggctcactatgtgggacaagaaaaatgtcgtccgattgaaggatggagtactgtcgcatttgcgaaagactggcaaggaccaccacgtttgcaaaatggaacaagttggttctattttgcaacagaccaatggaaatatgaagagtcaaatgtagatcgtttaaaatctccattagctaaaacagaggatttaaagcatcaacacccagctgattataatgttttagcagctagacttggttggttaccatcatatccacaatttaataaaaatagtttgttgtttgcagaagaagctaaagatgaaggcattgagtcgaatgaggcaattttaaaacgagcgataaatgaagttaagtcaaaacaaacgcaatttgcgatagaagatccggatttgaaaaagaatcatccgaaatcactgtttatatggcgctcaaatctaatctcaagttctgcaaaaggtcaagaatactttatgaagcatttacttggcacaaaatcagggttattagctacaccaaatgaagatgaaaagccagaagaaattacgtggcgtgaggaaacaacagggaaattagatttagtcgtttctttagatttcagaatgacagcaacacctttatattctgacattgttttgccagcagcgacttggtatgagaagcatgatttgtcatctacagatatgcatccatatgtacatccttttaatccagctattgatccattatgggaatcgcgttcagactgggatatttataaaacgttggcaaaagcattttcagaaatggcaaaagactatttacctggaacgtttaaagatgttgtgacaactccacttagtcatgatacaaagcaagaaatttcaacaccatacggcgtagtgaaagattggtcgaagggtgaaattgaagcggtacctggacgtacaatgcctaactttgcaattgtagaacgcgactacactaaaatttacgacaaatatgtcacgcttggtcctgtacttgaaaaagggaaagttggagcacatggtgtaagtttcggtgtcagtgaacaatatgaagaattaaaaagtatgttaggtacgtggagtgatacaaatgatgattctgtgagagcgaatcgtccgcgtattgatacagcacgtaatgtagcagatgcaatactaagtatttcatctgctacgaatggtaaattatcacaaaaatcatatgaagatcttgaagaacaaactggaatgccgttaaaagatatttctagcgaacgtgctgctgagaaaatttcgtttttaaatataacttcacaaccacgagaagtaataccgacagcagtattcccaggttcaaataaacaaggtcgacgatattcaccatttacaacgaatatagaacgtctagtaccttttagaacattaacaggacgtcaaagttattatgtggatcacgaagttttccaacaatttggggagagcttaccagtatataaaccgacattgccgccaatggtatttgggaatagagataagaaaattaaaggtggtacagatgctttggtactgcgttatttaacgcctcatggaaaatggaatatacactcaatgtatcaagataataagcatatgttgacactatttagaggtggtccaacggtttggatatcaaatgaagatgctgaaaaacacgatatccaagataatgattggctagaagtgtataaccgtaatggtgttgtaacggcaagagcagttatttcgcatcgtatgcctaaaggtacaatgtttatgtatcatgcacaagataaacatattcaaacgcctgggtcagaaattacagatacacgtggtggttcacacaacgcgccgactagaatccatttgaaaccaacacaactagtcggaggatacgcacaaattagttatcactttaattattatggaccaattgggaaccaaagggatttatatgtagcagttagaaagatgaaggaggttaattggcttgaagattaa

SEQ ID NO: 7701 - DNA, 984 bp, Staphylococcus aureus
atggctaaattatcttatttagaggcgatacgccaggcacaagacttagcattacaacaaaataaagatgtgtttattcttggtgaagatgttggtaaaaaaggtggcgtatttggtactactcaaggactacaacaacaatatggtgaagacagagttatcgatacgccattagctgagtcaaatattgttggaactgccattggtgcagctatggtaggtaaaagaccaattgcagaaattcaatttgcagattttattttacctgcgacaaatcaaattattagtgaagctgcgaaaatgcgttatcgttcaaataatgattggcaatgcccattaacgattcgtgcaccatttggtggcggtgttcacggaggactatatcattcacaaagtattgaaagtatatttgcttcatcaccaggtttaacaattgttattccttccacaccgtatgatgctaaagggcttttattatcatctatcgaatcaaatgatccagtattgtactttgagcataaaaaagcttatcgtttcttaaaggaagaagtgccagaagaatattacactgtacctttaggaaaagcagatgttaaacgtgaaggtgaagatttaacagtattttgttatggattaatggtcaattattgtttacaagcagcggatattttagctgcagacggtatcaacgttgaagtcgttgatttacgaactgtttatccattagataaagaaacaattattgatcgtgctaaaaatacaggtaaagttttacttgtaactgaagataatttagaaggtagtattatgtcagaagtgtcagcgattattgcagagcattgcttgttcgatttagatgcaccaatcatgcgtttagctgctccagatgtaccatctatgccattttctcctgtattagaaaatgaaattatgatgaatccagaaaaaatcttaaataaaatgcgtgaattagcagaattctag

SEQ ID NO: 7702 - DNA, 1275 bp, Staphylococcus aureus
atggaaataacaatgcctaagttaggtgagagtgttcatgaaggtaccattgaacaatggttagtttctgttggtgatcatattgatgaatatgaaccattatgtgaagttattacagataaagtgacagctgaagtcccttccacgatatcaggaacaattacagaaattttagttgaagcggggcagacagtagctattgatacaattatctgtaaaattgaaactgctgatgaaaagacaaatgaaacaactgaagagatacaagcaaaagtggatgagcatactcagaaatctactaaaaaagctagtgcaacagtggaacagacatttactgctaaacaaaatcaacctcgtaataatggtcgcttttcacctgttgtatttaaactcgcttcagagcatgacattgatttatcacaagttgtaggtagtggatttgaaggtcgtgtaactaagaaggatataatgtcagttattgaaaatggtggtaccacagctcaatctgacaaacaagttcaaacaaaatcaacatcagtagatacatcaagtaaccaatcatctgaagacaatagtgaaaacagcacaataccagtaaatggtgtgcgtaaagcaattgcgcaaaatatggttaatagtgtaacagagattccacatgcatggatgatgattgaagtagatgctacaaatcttgtgaatacgagaaatcattataaaaacagctttaaaaataaagaaggatataatctaacgttctttgctttctttgtaaaagctgtagcagatgctttaaaagcatatcctttattaaatagtagctggcaaggaaatgaaattgtcttacataaagacattaatatttcaattgctgttgctgatgaaaataaattatacgtacctgtgattaagcatgcagacgaaaagtcaatcaaaggtatagctagagaaattaatactttagcaacaaaagcgcgtaataagcaattgacaactgaagatatgcaaggtggaacatttacagttaataatactggtacatttggttcagtatcatcaatggggattataaatcaccctcaagcagcgatattacaagtagaatcaatcgttaaaaagccagtagtaattaatgatatgattgcaattcgaagtatggtaaatttatgtatttcaatagatcatcgcattttagatggtttacaaactggtaaatttatgaatcatattaaacagcgtatcgaacagtatactttagaaaatacaaatatatattag

SEQ ID NO: 7703 - DNA, 1413 bp, Staphylococcus aureus
atgactaaaacattacctgaagattttatttttggtggagcaacagcagcatatcaagcagaaggtgcgacaaatacagatggtaaaggtcgtgttgcatgggatacgtatttggaagaaaactattggtacactgcagaaccagcgagtgatttttataacagatatccagtggatttagaattaagtgaaaaattcggtgttaatggtatccgtatttcaattgcatggtcacgtatcttcccaaatggatatggcgaagttaaccctaaaggtgttgagtattaccataagttatttgcagagtgtcataaacgtcatgttgaaccatttgtaacattgcatcattttgatacaccagaagtgttacacaaagatggcgattttctaaatcgtaaaacgattgactactttgtagattatgctgaatattgttttaaagaattcccagaagtaaaatattggactacattcaatgaaattggacctattggtgatggtcaatatttagtaggtaaattccctccaggtattaaatatgattttgaaaaagttttccaatcacatcacaatatgatggttgctcatgcaagagcagtaaaattatttaaagatggcggctatcaaggagaaattggtgttgtacacgcattgccaacaaaatatccgttcgatccatcaaatcctgaagatgttcgtgcagcagaattagaagatatcatccataataaattcatcttagatgcaacatatttaggtaagtattctcgtgaaacgatggaaggtgtgcaacatatcttatctgttaatggcggtaaattaaatattacagatgaagattatgccattttagatgcagccaaagatttaaacgacttcttaggtatcaattactacatgagtgactggatgagaggttacgatggagaatctgaaatcacgcataatgcgacaggtgataaaggcggttctaaataccaacttaaaggtgtcggacaacgtgaatttgatgtcgacgtacctcgcacagactgggactggatgatctatcctcaaggtttatatgatcaaatcatgcgtgttgttaaagattatcctaactatcacaagatttatatcactgaaaatggtttaggatataaagatgaatttattgaatctgaaaaaacagttcatgatgatgcacgtattgattatgtaagacaacatttgaacgttattgcagatgctattaaagatggtgcaaatgttaaaggttactttatttggtcattaatggatgtgttctcttggtcaaatggttatgaaaaacgatatggtttattctatgtcgattttgagactcaagaacgttatcctaagaaaagtgcttattggtacaaagagttagccgaaacaaaagaaattaaataa

SEQ ID NO: 7704 - DNA, 681 bp, Staphylococcus aureus
atgatgtatggatatccagagaaatggttggaaggtatgacaactggagaaggtatcgcggcagaattacgcttaggtattgtgaatggtcacatagctgaaggtacgttactcactgaaaatcaaatggcaaagcaatttaatgtgagtcgttcgccaattcgagatgcatttaaattattgcaacaaaatcaactcatccaattagaaagaatgggtgcacatgtgttgccgtttggggaacaagaaaagaaagaaatgtacgatttgcgactgatgctagagtcatttgcattttcaagagttaaaaatcaagagagactacctatcgtaaaagaaatgaagaaacaacttgaaatgatgaaagtggcagtaaaatttgaagatgcagaatcatttacgaagcatgactttgaatttcatgaaacattaatcaaagcatctaaccaccaatatttaaactcattttggagtcatttaaaaccagtaatgatggcactcgttttaacatccatgcgacaacgtatgcaacagaacccgcaagattttgaacgcatacatcataatcatcaagtgtttattgatgcagtggaacaatacgacagtcaaattttgaaggaagcgtttcatttaaattttgacgatgttggtaaagatattgaaggattttggttgaattaa

SEQ ID NO: 7705 - DNA, 1560 bp, Staphylococcus aureus
gtgaatttattaagcctcctactcattttgctggggatcattctaggagttgttggagggtatgttgttgcccgaaatttgttgcttcaaaagcaatcacaagctagacaaactgccgaagatattgtaaatcaagcacataaagaagctgacaatatcaaaaaagagaaattacttgaggcaaaagaagaaaaccaaatcctaagagaacaaactgaagcagaactacgagaaagacgtagcgaacttcaaagacaagaaacccgacttcttcaaaaagaagaaaacttagagcgcaaatctgatctattagataaaaaagatgagattttagagcaaaaagaatcaaaaattgaagaaaaacaacaacaagtagatgcaaaagagagtagtgttcaaacgttaataatgaagcatgaacaagaattagaacgcatctccggtctcactcaagaagaagctattaatgagcaacttcaaagagtagaggaagaactgtcacaagatattgcagtacttgttaaagaaaaagaaaaagaagctaaagaaaaagttgataaaacagcaaaagaattattagctacagcagtacaaagattagcagcagatcacacaagtgaatcaacggtatcagtagttaacttacctaatgatgagatgaaaggtcgaatcattggacgagaaggacgaaacatccgcacacttgaaactttaactggcattgatttaattattgatgacacaccagaagcggttatattatctggttttgatccaataagaagagaaattgctagaacagcacttgttaacttagtatctgatggacgtattcatccaggtagaattgaagatatggtcgaaaaagctagaaaagaagtagacgatattattagagaagcaggtgaacaagctacatttgaagtgaacgcacataatatgcatcctgacttagtaaaaattgtagggcgtttaaactatcgtacgagttacggtcaaaatgtacttaaacattcaattgaagttgcgcatcttgctagtatgttagctgctgagctaggcgaagatgagacattagcgaaacgagctggacttttacatgatgttggtaaagcaattgatcatgaagtagaaggtagtcatgttgaaatcggtgtagaattagcgaaaaaatatggtgaaaatgaaacagttattaatgcaatccattctcaccatggtgatgttgaacctacatctattatatctatccttgttgctgctgcagatgcattgtctgcggctcgtccaggtgcaagaaaagaaacattagagaattatattcgtcgattagaacgtttagaaacgttatcagaaagttatgatggtgtagaaaaagcatttgcgattcaggcaggtagagaaatccgagtgattgtatctcctgaagaaattgatgatttaaaatcttatcgattggctagagatattaaaaatcagattgaagatgaattacaatatcctggtcatatcaaggtgacagttgttcgagagactagagcagtagaatatgcgaaataa

SEQ ID NO: 7706 - DNA, 1755 bp, Staphylococcus aureus
ttgcagaatcatacagcagtcaatacagcacaagcgataatattaagagatttagttgatgcattattatttgaagatatagccggaattgtatcgaatagtgagattactaaagaaaacggacaaacgcttttgatatacgaacgtgaaacacaacaaataaagatacctgtttattttagtgctttaaatatgtttcgttacgaaagttcacaaccaattacgatagagggaagggtgtctaagcaacctttaacggcagctgaattttggcaaacaattgctaatatgaattgtgatctaagtcatgaatgggaagtggctcgcgttgaagaaggactgactactgctgccacacagcttgctaaacaattatcagaattagatttagcgtcacatccttttgtgatgtcagagcagtttgcaagtttaaaagatcgtccatttcatccattagctaaagaaaaaagaggattaagagaagcggattatcaagtgtatcaagctgaattaaatcaatcatttcctttaatggttgcagcagttaaaaagacacatatgattcatggcgatactgcaaatatcgatgaattagaaaatttgacagtacctataaaagaacaagcgacagacatgttaaatgatcaagggttatcaatagatgactatgtactatttccggtacatccttggcaatatcagcatattctgccgaacgtctttgcgacagagattagtgaaaagttggttgtactattaccgttaaaatttggagattatctgtcgtcttcaagtatgcgttcattaattgatattggcgcaccgtataaccatgtcaaagtaccatttgcaatgcagtcattaggcgcattaaggctaacgcctacgcgttacatgaaaaacggagaacaagcagaacaattattacgtcagcttatagaaaaagatgaagcactagctaagtatgtcatggtttgtgatgaaacagcttggtggtcatatatgggtcaagataatgatattttcaaagatcaattaggtcatctaactgttcagctaagaaagtatcccgaagtgctagccaaaaatgatacgcaacagctagtgtcaatggcagcactcgcggcaaatgatcgcactttatatcaaatgatttgtggaaaagataatatttctaaaaatgatgtcatgacgttatttgaagatatcgcgcaagtctttttaaaggtaacactatcatttatgcaatacggcgcattaccagagttgcatggtcaaaatatattgttgtcatttgaagatggacgtgtacaaaaatgcgtgttacgtgatcatgatactgtcagaatttataaaccatggctaacagcacatcagctttcattgccgaagtatgtcgtcagagaagatacacctaatacgctaattaatgaggatttggaaacattctttgcttattttcaaacattagctgtatcggtaaatctatatgccattattgatgcaattcaagatttatttggtgtaagtgagcatgaacttatgtcgttgttaaaacaaattttaaaaaatgaagtggcaactatttcctgggttacaactgatcagctagctgtcagacacattttatttgataaacagacgtggccattcaaacaaattttattaccattgctatatcaacgtgatagtggtggaggtagtatgccttcaggtttaactaccgtaccaaatccaatggtgacatatgattaa

SEQ ID NO: 7707 - DNA, 984 bp, Staphylococcus aureus
atggataaagaaactaatgacaacgaatatagacgtcaaagtgaacatcgcacttcggcgcctaagcgaaaaaagaagaagaaaattaggaaattacctatcattcttctgattgttgtaattttacttatcgcattagttgtatatattgtacatagttacaatagcggtgtagaatatgccaagaaacatgcgaaagatgttaaagtacatcaatttaatggaccagtaaaaaatgatggtaaaatttctattcttgtactcggtgcagataaagcacaaggtggacaatcaagaacagattctatcatggttgttcaatatgactttatcaataaaaaaatgaaaatgatgtctgtcatgcgtgatatttatgcagatattccaggatatggaaaacacaaaattaattcagcatacgctttaggtggtccaaagctacttagaaaaacacttgataaaaatttaggaattaatcctgaatattatgcagtagttgattttactggatttgagaaaatgattgatgaattaatgccagaaggtgtaccaattaatgtcgaaaaggatatgtcgaaaaatattggtgtatctttgaaaaagggtaaccataggttgaatggtaaagaattacttggttatgcaagattccgtcacgaccctgaaggtgacttcggacgcgtgcgacgtcagcaacaagtgatgcaaacattgaaaaaagaaatggttaattttagaacagttgttaaattaccaaaagttgcaggtattttaagaggctatgtgaatacaaacattcctgattcagggattttccaaacaggtttgagttttggcatccgaggtgaaaaagatgttaagtcattgactgtgccaatcaagaactcatacgaagatgtcaatacaaatactgatggtagtgcattacagattaataaaaacacaaataaacaagctattaaagactttttagatgaagattaa

SEQ ID NO: 7708 - DNA, 444 bp, Staphylococcus aureus
atgagtaatcaacaagatgttgtaaaagaattgaatcaacaagtagcaaactggacagtagcttacacaaagctacataatttccactggtatgtgaaaggacctaacttcttctcattacacgttaaatttgaagaattatataatgaagcaagccaatatgtagacgaattagctgaaagaattttagcggtaggaggaaaccctgtaggtacattaactgaatgcttagagcaatcaattgttaaagaagctgcgaaaggttactctgcagaacaaatggttgaagaattatcacaagacttcacaaatatctcaaaacaattagaaaacgcaatcgaaattgctggtaatgctggcgatgatgtatcagaagatatgtttataggtatgcaaacatcagtagataaacataattggatgtttaaatcttacttaagctaa

SEQ ID NO: 7709 - DNA, 969 bp, Staphylococcus aureus
atgttttttaaaaggagcgacaaaaatatgaaagagaaaattgtcattgcattaggcggtaatgcgatacagacaaaagaagcaacagctgaagcacaacaaacagctattagacgtgcgatgcaaaaccttaaacctttatttgattcaccagcgcgtattgtcatttcacatggtaatggcccacaaattggaagtttattaatccaacaagctaaatcgaacagtgacacaacgccggcaatgccattggatacttgtggtgcaatgtcacagggtatgataggctattggttggaaactgaaatcaatcgcattttaactgaaatgaatagtgatagaactgtaggcacaatcgttacacgtgtggaagtagataaagatgatccacgattcaataacccaaccaaaccaattggtcctttttatacgaaagaagaagttgaagaattacaaaaagaacagccagactcagtctttaaagaagatgcaggacgtggttatagaaaagtagttgcgtcaccactacctcaatctatactagaacaccagttaattcgaactttagcagacggtaaaaatattgtcattgcatgcggtggtggcggtattccagttataaaaaaagaaaatacctatgaaggtgttgaagcggttatagataaagattttgctagtgagaaattagcaacgctgattgaagcagataccttaatgattcttacgaatgtagaaaatgtatttattaactttaatgaacctaatcaacaacaaatcgatgatattgatgtagcaacactgaaaaaatacgcggcacaaggtaagtttgcggaaggatcgatgttgccaaaaatagaagctgcgatacgatttgttgaaagtggggaaaacaaaaaagttatcattaccaatttagagcaggcatacgaagctttgattggtaataaaggtacacacattcacatgtag

SEQ ID NO: 7710 - DNA, 729 bp, Staphylococcus aureus
atggcgaaacaaaaaaagtttatgaagatttatgaggcgttgaaagaagatatattaaacgggcagattcaatatggtgaacaaattccgtctgaacatgatttggtgcaattgtaccagtcatctcgagagaccgtgcgtaaggcattagatttgttggcattagacggcatgattcaaaagattcatggtaaagggtcacttgtcatttatcaggaggttacagagtttccattttctgaacttgttagttttaaagaaatgcaagaagaaatgggcgtcgcatatttaactgaagttgttgtgaatgaggttgttgaagcgcatgaagttccagaagttcaacatgctttaaacatcaattctagtgaatcgctcattcatattgttagaactcgtcggcttaaccaacatgtgaagattgttgatgaagattattttctaaagtcgattgtttcagatataggtaatgatgttgcgagtgattctatttatgattatttggaaaaggtattaaatcttaatattagttattcaagtaagtctattacttttgaaccgtttgatgaacaagcatatcaattgtttggtgatgtatcggtggcttattcagcaacagttcgaagtattgtgtatttagaaaatacaatgccgtttcaatataatatttcaaaacatcttgcaaatgaatttaaatttaacgacttctcaagacgtcgtataaagtaa

SEQ ID NO: 7711 - DNA, 351 bp, Staphylococcus aureus
atagatacgcatactaaagaacaacaattctcgaatctagtaagatcttatcgtaaagaatacgtgggtaaaggacccaatagtattcgagtgtcgtttaaagataattgggcgattgcacatatgacaggtgttttgagtaaagttgagagtttttacctaaacgacaaacgcaatgaatcaatgctccattatacacgcacagagaagattaaacagatgtataaagaaatagatgtaaatgagatggaaagtcttgtaggcgctaagtttgtaaaattatttacagatattgatttgaatgatgatgaagtcatttcaatatttgttttcgataagtcaatagaataa

SEQ ID NO: 7712 - DNA, 1125 bp, Staphylococcus aureus
atgtcaaacggtgccgttttttttgtcatatttttaaaacaagcaacatgcaacacgtactttaaggaagtcaaaatttatcatttaggagagatggatatgaaaatcgtagcattatttccagaagcagtagaaggtcaagaaaatcaattacttaatactaaaaaagcaataggattaaaaacatttttagaggaaagaggacatgagttcattatattagcagataatggtgaagacttagataaacatttaccagatatggatgtgattattagtgcgccattttatcctgcatatatgactcgtgaacgtattgaaaaagcaccgaacttgaaattagcaattacagcaggtgtaggatctgaccatgtagatttagcggcagcaagtgaacacaatattggtgtcgttgaagttacaggaagtaatacagttagtgtggcagaacatgcggttatggatttattaatacttcttagaaactatgaagaaggtcatcgtcaatcagtagaaggtgaatggaacttgtctcaagtaggtaatcatgcgcatgaattacaacacaaaacaattggtatttttggatttggtcgaattggacaacttgttgctgaaagattagcgccatttaatgtaacattacaacactatgatccaatcaatcaacaagaccataaattgtctaaatttgtaagctttgatgaacttgtttcatcaagtgatgcgattacaattcatgcaccattaacaccagaaactgataacttatttgataaagatgttttaagtcgtatgaaaaaacacagttatttagtgaatactgcacgtggtaaaattgtaaatcgcgatgcgttagttgaagcgttagcatccgagcatttacaaggatatgctggtgatgtttggtatccacaacctgcacctgctgatcatccatggagaacaatgcctagaaatgctatgacggttcactattcaggtatgactttagaagcacaaaaacgcattgaagatggagttaaagatattttagagcgtttcttcaatcatgaacctttccaagataaagatattattgttgcaagtggtcgtattgctagtaaaagttatacagctaaatag

SEQ ID NO: 7713 - DNA, 1506 bp, Staphylococcus aureus
ttgctaattactggtgtgctatttacattgcgtatgcgattttttcaagttagacattttaaagaaatgattcgattaatgtttcaaggagagaagtctcctaatggtatttcaagttttcaagcgatagccatgtctttagcaggcagggttggtacaggtaatattgtcggtgtatctactgcaatatttataggaggacctggtgcagtattttggatgtggattactgcgtttttaggtgcaagtagtgcttttattgaatctacacttggtcaaatattcaagagagttgaaaataatgaataccgtggtggaccagcgtattatattgaatatggtattggtggtaaatttggtaaaatttacggaattatctttgctattgttacgattatctcagtaggtctattgcttcctggtgtgcaatctaacgctatagcaagttctatgcataatgcgattcatgttccacaatggttaatgggtgctattgttgtagttattttgggattaattatttttggtggtgtacgtagtattgccaatgttgcaacagccgttgtaccatttatggcaattatttacatactgatggctgtcattatcatttgtatcaatatacaagaagtgccagcgttatttgcattaattttcaaatcagcatttggattacaatctgcttttggtggtatcgttggcgcaatgatagagattggtgttaaacgtggattatactcaaatgaggctggtcaaggtacaggtccacacgcagcagcggcagcagaagtatcacatccaagtaaacaaggtctagtacaagcattttcagtttatattgatacattatttgtatgtactgcaactgctctgattatacttatttctggtacatataatgtgactgatggtacggttaatgcgaatggcacaccgcatttaattaaagatggcggtatttatgttgaaaatgcaacaggtaaagattattcaggtactgcgatgtatgcacaagccggcattgataaagcgttccatggcagtggttatcaatttgatcctactttctctggcgtaggttcgtactttattgcatttgctttattcttctttgcatttactacaattttgtcgtactactacattacagaaacaaatgttgcttatttaacgcgtaatcaaaataatcaagtttcatcgatatttattaatattgctcgtgtgattattttgttcgctacattttacggtgcagttaaaacagctgatgtagcatgggcattcggtgatttaggtgtaggtctaatggcttggttaaatatcattgcgatttggattttacataagcctgccgtaaatgctttaaaagattatgaaattcaaaagaaacgtttaggaaacggttataatgcagtttatcaacctgatccgaataaattacctaatgctgtcttttggttgaagacatatccagaacgtttaaaacaagcacgtgccaaaaagtaa

SEQ ID NO: 7714 - DNA, 1824 bp, Staphylococcus aureus
atgattattcctgcaataatcggttacttatgtggtaatttccaatttggattattagttgcaaccggaacactagcccatatttatgtttttaaaggtccgtcgcgatctaagctgcgaactgtaataatttgtaatttagcgtttgcaatatgtatgatgcttggtacgctaacagccaaaacgccactcgtttttggaatgacattattaattgttacggttataccattttatatatttactgccttaaaaatagctggaccgtcatcgacattcttcattgtgacattcagtctacccattaacttacctatagctcccgaagaagcattatatagaggctttgcgattttagtaggcggtatacttgccactatgatggtgttaatcacgatcgtattttctaaaaacaaagctgaagaacaagcaattcaaaatgattttaaactcatatctaggttgttacacacttataatgataaagctgcttttttacaagtagcaaaaacagcggtggatagttttaaagcatctgataaattattaatcacttctacttcaagtaacgataaattaagtagacgtttccaaaaattattattattacacacatctgcccaagggatttattctgaactgttagagttgaacgctaaacaaattcgaccattgccagatgagttaattgaaatgatggatcatatcattgcacaactagataatagtgatgaaaatgtaagatattggcgaaaagaagtgacagtaacagaggaatttcaaaatttattcaaccatatattgaaaattgatgaaatggtgcatgcaaatgaagcgcgtattgcgtatgaagcagacatgcgaaaacctttatatagtaaacgcatttatcaaaatttaacattagactctattgtttttagaaatacattgagatatacagcgattatgatgatagcgatatttattgcgttaatgtttgattttgaaaaagcatactggataccgttatctgcacatacaatattactaggaacatcaactatacatgcaatcgagagaggtatggcacgaggtttaggtactattttaggtgtgttagtactttcagtcatattgttgttttcaataccaacacctgttgcagtaattttaatgggcattgcagcattgtttactgaagcattggtgggagcaaattatgcgattgcagtagtttttattacaatacaagttattttaatgaatggattagcatcacagaatttaacaattaacattgcgtttccaagagttattgacgttgcaataggtattgtgattgcaatcataggtttatttgtccttggacaacgtaccgcatccgtattgcttcctaatgtaatggctgaagttgttcgtaaagaagcaacgctcttccattatttgttttctgaaaaccaatataaagataatgtgtatcagaaaaacacggccatgaacctatctgtgaaattaaataacatgacgcaagtttataatgcagctaatggtgaattatttagtgataagacattgattcaaaattattatcctagcttattcgcattagaagaaattagctttatgttaaatagagccatggctaatgaagatagacttacaataaatgaacaattaatgggcgagtatttagcaacatttgaaaacatcgctaagcatttagaattaaatacagaattagaaataaagatattaccagatttaccacagtataattatattcaatcagcaatgatgaatattcaacacaatggttttcgtgagagagacaagaacgtttaa

SEQ ID NO: 7715 - DNA, 1977 bp, Staphylococcus aureus
atgaaaaagcaaataatttcgctaggcgcattagcagttgcatctagcttatttacatgggataacaaagcagatgcgatagtaacaaaggattatagtaaagaatcaagagtgaatgagaaaagtaaaaagggagctactgtttcagattattactattggaaaataattgatagtttagaggcacaatttactggagcaatagacttattggaagattataaatatggagatcctatctataaagaagcgaaagatagattgatgacaagagtattaggagaagaccagtatttattaaagaaaaagattgatgaatatgagctttataaaaagtggtataaaagttcaaataagaacactaatatgcttactttccataaatataatctttacaatttaacaatgaatgaatataacgatatttttaactctttgaaagatgcagtttatcaatttaataaagaagttaaagaaatagagcataaaaatgttgacttgaagcagtttgataaagatggagaagacaaggcaactaaagaagtttatgaccttgtttctgaaattgatacattagttgtaacttattatgctgataaggattatggggagcatgcgaaagagttacgagcaaaactggacttaatccttggagatacagacaatccacataaaattacaaatgagcgtataaaaaaagaaatgatcgatgacttaaattcaattatagatgatttctttatggagactaaacaaaatagaccgaattctataacaaaatatgatccaacaaaacacaattttaaagagaagagtgaaaataaacctaattttgataaattagttgaagaaacaaaaaaagcagttaaagaagcagacgaatcttggaaaaataaaactgtcaaaaaatacgaggaaactgtaacaaaatctcctgttgtaaaagaagagaagaaagttgaagaacctcaattacctaaagttggaaaccagcaagaggttaaaactacggctggtaaagctgaagaaacaacacaaccagtggcacagccattagtaaaaattccacaagaaacaatctatggtgaaactgtaaaaggtccagaatatccaacgatggaaaataaaacgttacaaggtgaaatcgttcaaggtcccgattttctaacaatggaacaaaacagaccatctttaagcgataattatactcaaccgacgacaccgaaccctattttagaaggtcttgaaggtagctcatctaaacttgaaataaaaccacaaggtactgaatcaacgttgaaaggtattcaaggagaatcaagtgatattgaagttaaacctcaagcaactgaaacaacagaagcttctcaatatggtccgagaccgcaatttaacaaaacacctaagtatgtgaaatatagagatgctggtacaggtatccgtgaatacaacgatggaacatttggatatgaagcgagaccaagattcaacaagccaagtgaaacaaatgcatacaacgtaacgacaaatcaagatggcacagtatcatacggagctcgcccaacacaaaacaagccaagtgaaacaaacgcatataacgtaacaacacatgcaaatggtcaagtatcatacggtgctcgcccaacacaaaaaaagccaagcaaaacaaatgcatacaacgtaacaacacatgcaaatggtcaagtatcatatggcgctcgcccgacacaaaaaaagccaagcaaaacaaatgcatataacgtaacaacacatgcaaatggtcaagtatcatacggagctcgcccgacatacaagaagccaagcgaaacaaatgcatacaacgtaacaacacatgcaaatggtcaagtatcatatggcgctcgcccgacacaaaaaaagccaagcgaaacaaacgcatataacgtaacaacacatgcagatggtactgcgacatatgggcctagagtaacaaaataa

SEQ ID NO: 7716 - DNA, 675 bp, Staphylococcus aureus
atgataaataaaaatgacatagtagcagatatagtaatagattatccgaaagcagcagatatttttagaagcgtaggtatagacttttgttgcggtggacaagtaagtatagaagcagcatccttagaaaagaaaaatgtagatttgaacgaattattacagcgtctcaatgacgttgaacaaacgaatacaccaggttcgcttaaccctaaatttttaaatgtttcgtcacttattcaatatattcaagcagcatatcatgaacctcttagagaagaatttaaaaatttaacaccttatgtgacgaaattatcgaaagtacatggacctaaccatccatatttagtcgagttaaaagaaacatatgatacatttaaaagtggcatgttagagcatatgcaaaaagaagatgatgttgattttccaaaactaattaaatatgaacaaggtgaagtagtaaacgatattaatacagtgattgatgatttagtatctgatcacattgcaacgggacaattgttagtgaaaatgagcgatttaacatctagctatgaaccaccgatagaggcatgtggtacgtggcgactcgtttatcagagattaaaagcacttgaagtgttaacacatgagcatgttcatttagagaatcatgttttatttaaaaaagtatcataa

SEQ ID NO: 7717 - DNA, 882 bp, Staphylococcus aureus
atggcaactatttcagcaaaacttgttaaagaattacgtaaaaaaactggcgcgggtatgatggattgtaaaaaagcgctaactgaaactgatggtgacatcgataaagcgattgattacctacgtgaaaaaggtattgctaaagcagctaaaaaagcagaccgtattgcggctgaaggtttagtacatgtagaaactaaaggtaacgacgcagttatcgttgaaatcaactctgaaacagactttgttgctcgtaacgaaggattccaagagttagttaaagaaatcgctaatcaagtattagatacaaaagctgaaactgttgaagctttaatggaaacaactttaccaaatggtaaatcagttgatgaaagaattaaagaagcaatttcaacaatcggtgaaaaattaagtgttcgtcgttttgctatcagaactaaaactgataacgatgctttcggcgcttacttacacatgggtggacgcattggtgtattaacagttgttgaaggttcaactgacgaagaagcagcaagagacgttgctatgcatatcgctgcaatcaaccctaaatatgtttcttctgaacaagttagcgaagaagaaatcaaccacgaaagagaagttttaaaacaacaagcattaaatgaaggtaaaccagaaaacatcgttgaaaaaatggtggaaggacgtttacgtaaatacttacaagaaatttgtgctgtagatcaagacttcgttaaaaaccctgatgtaacagttgaagctttcttaaaaacaaaaggtggaaaacttgttgacttcgtacgctatgaagtaggcgaaggtatggaaaaacgcgaagaaaactttgcggatgaagttaaaggacaaatgaaataa

SEQ ID NO: 7718 - DNA, 1842 bp, Staphylococcus aureus
atgagtcaattcctcacacaattgaaagataatgttttagtagctgatggcgctattggaaccattttatactctgaaggattagacacctgtccagaagcatataatcttagccatccagataaagttgaacgcatccatcgttcatatattgaagccggtgctgatgtcattcaaaccaatacttatggtgcaaattttgaaaagttaaaacgattcggtcttgaagataaagttaaagcaatacatcaagccgccgttcgcatcgcaaaaaaagcagcaaataaagatacgtatatattaggcacagttggtgggtttagaggtatcaaacaagaggatatcagcttacaaactattctttatcatactgaaattcaaatagacaccttaattgaagaaggcgttgacgcgctacttttcgaaacgtattacgacctagaagagttaacaaatgtcatttcacgaacgagaaagaaatacgacattccaatcattgctcaattaaccgcttcaaacacaaattacttagttaatggtcaggcaatcaatgaaggattaaaacaactcgttcaatgtggtgcaaacatcgtgggactcaattgtcatcatggtccgcaccatatgcaagagtctttcacacatattgaattaccagagcacgcattcttatcttgttatccaaatgccagcttattagatattgaaaatagtgaatttaagtatagtgacaatgcacaatatttcggtcaagttgctcaaaatctaattcgcgaaggtgttcgtttaattggtggttgctgtggtacaacgccagagcacatcaaatttattaaagaatctattcagacacttaaacctgttaatgacaaaaaagtgattccgataccaacgaaagcacttttcaatccatctcaaaataaagttagacaatcattaacatctaaggttcaagaacgtccaaccgttattatcgaattggatacaccgaaacatttagacacggatagattttttgaaaatatcgctaaacttgataaagctaatgtagatgcggtaacactcgcagataattcattggcaactgtcagaattagcaatattgctgctgctagcttaattaagcaatattacaatattgaaccactcgtacatattacatgtcgagaccgaaacttaatcggcttgcagtcccatttacttggattatcgctcattggcgttaacgaaatattagccataactggtgatccttcaaaagttggtcacttaccaggtgcaaccaatgtctatgatgttaattctaaaggattaactgaactcgctctaagatttaatcaaggtattaacactgacggtgatgcgctgaagaaacgtacacacttcaacatcgctggcgcctttaaccctaatgttcgtaaattagatggtgccgtcaaaagattagagaaaaagatagaaagcggaatgtcttattttataacacaacccgtgtacagcaaagagaaaatcattgaaatttaccatgccactaagcacttgaacaaaccatttttcataggcattatgcctatcgcaagttacaaaaacgcactctttttgcataatgaagtgccaggaatcaagatgtcagatgaaattttacaacaatttgaagcagttaaagatgataaagccaaaacacgagaactaagtcttaagctttcaaaggatttaatcgatactgttcatgaatattttaatggtttatacattatcacaccgtttcaaaatgtcgaagattcattagaacttgcagcatactcaaaatctattactgctcacaaggaggcaatattatga

SEQ ID NO: 7719 - DNA, 1308 bp, Staphylococcus aureus
ttgaaaaaacaagttattatttcgggcctcatgttattttcactattttttggagccggaaatttaatattcccgcccattcttggccatacagcgggtcaaaatatgtggattggtatgctaggctttgcccttacaggcatattactcccctttattactgttattgttgttgcattttatgatgaaggtgttgaaagtgtaggcaatcgtatacatccatggttcgggtttatttttgctgtcgtgatttacatgtctatcggagcattttacggtattccacgtgctgcaaatgtcgcgtacgaaattggtacaagacacattttacctgtgcataaccaatggactttaattatattcgcagcaatcttttttgccatcgtttactggattagtttaaatccatcgaaaatcgttgataatttaggtaaattattaacaccattattactattaatggtcgctctattaagtattgctgtcattttcaaccctgaatctgcactaagtgcacctaaggataaatatataacacatcctttcatttcaggaagtttggaaggctattttacaatggatcttgttgctgcgttagctttttccgtagtcattgtcaatggttataagtttaaaggcctcacagatcgcatgaaaattttaaaatatgtctgcttttcaggtcttattgcagccatattacttggaatgatttactttgcacttgcatacgttggggcatcaacagctccaggaaactttaaagatggtacagatatattgacgtacaactcattacgagtatttggttcatttggcaacatagtatttggtatgacagtgatacttgcatgtttaacaacatgtataggactcgtcaatgcttgcgccacatttactaagaaacacgtacctaagttttcttataaaatattcgcacttattttctctatcatagggttcttatttacaacacttggtttagaaatgattttaaaaattgctgtaccattgttgacattaatatatcccgtgtctattgcacttgtactgatatcatttgctaacatgtttagcacattcagattcagttgggcctatcgactcgcaactgttattacattgattatttcaattttacaaatactaaatagtttcaacttattacacggtgttattttgaaatggtttatgatgttacctttagcagatatcgatttagcttggcttgtaccattcatgctctttgctattatcggtttcatcatcgatgtagttatacgtcgtccgaaacaagcgacaacttaa

SEQ ID NO: 7720 - DNA, 978 bp, Staphylococcus aureus
atggcacaaatgacaatggttcaagcgattaatgatgcgcttaaaactgaacttaaaaatgaccaagatgttttaatttttggtgaagacgttggtgttaacggcggtgttttccgtgttactgaaggactacaaaaagaatttggtgaagatagagtattcgatacacctttagctgaatcaggtattggtggtttagcgatgggtcttgcagttgaaggattccgtccggttatggaagtacaattcttaggtttcgtattcgaagtatttgatgcgattgctggacaaattgcacgtactcgtttccgttcaggcggtactaaaactgcacctgtaacaattcgtagcccatttggtggtggcgtacacacaccagaattacacgcagataacttagaaggtattttagctcaatctccaggtctaaaggttgttattccttcaggcccatacgatgcgaaaggtttattaatttcttctattagaagtaatgacccagtcgtatacttagagcatatgaaattgtatcgttcattccgtgaagaagtacctgaagaagaatatacaattgacattggtaaggctaatgtgaaaaaagaaggtaatgacatttcaatcatcacatacggtgcaatggttcaagaatcaatgaaagctgcagaagaacttgaaaaagatggttattctgttgaagtaattgacttacgtactgttcaaccaatcgatgttgacacaattgtagcttcagttgaaaaaactggtcgtgcagttgtagttcaagaagcacaacgtcaagctggtgttggtgcagcagttgtagctgaattaagtgaacgtgcaatcctttcattagaagcacctattggaagagttgcagcagcagatacaatttatccattcactcaagctgaaaatgtttggttaccaaacaaaaatgacatcatcgaaaaagcaaaagaaactttagaattttaa

SEQ ID NO: 7721 - DNA, 1293 bp, Staphylococcus aureus
gtggcatttgaatttagattacccgatatcggggaaggtatccacgaaggtgaaattgtaaaatggtttgttaaagctggagatactattgaagaagacgatgttttagctgaggtacaaaacgataaatcagtagtagaaatcccatcaccagtatctggtactgtagaagaagttatggtagaagaaggtacagtagctgtagttggtgacgttattgttaaaatcgatgcacctgatgcagaagatatgcaatttaaaggtcatgatgatgattcatcatctaaagaagaacctgcgaaagaggaagcgccagcagagcaagcacctgtagctactcaaactgaagaagtagatgaaaacagaactgttaaagcaatgccttcagtacgtaaatacgcacgtgaaaaaggtgttaacattaaagcagtttctggatctggtaaaaatggtcgtattacaaaagaagatgtagatgcatacttaaatggtggtgcaccaacagcttcaaatgaatcagctgcttcagctacaagtgaagaagttgctgaaactcctgcagcacctgcagcagtatcattagaaggcgacttcccagaaacaactgaaaaaatccctgctatgcgtagagcaattgcgaaagcaatggttaactctaagcatactgcacctcatgtaacattaatggatgaaattgatgttcaagcattatgggatcaccgtaagaaatttaaagaaatcgcagctgaacaaggtactaagttaacattcttaccttatgttgttaaagcacttgtttctgcattgaaaaaatacccagcacttaacacttcattcaatgaagaagctggtgaaattgtgcataaacattattggaatatcggtattgcggcggacactgatagaggtttattagtacctgtagtgaaacatgctgatcgtaagtctattttccaaatttcagatgaaattaatgaattagctgttaaagcacgtgatggtaaattaacagccgatgaaatgaaaggtgcaacatgcacaatcagtaatatcggttcagctggtggacaatggttcactccagttatcaatcacccagaagtagcaatcttaggaattggccgtattgctcaaaaacctatcgttaaagatggagaaattgttgcagcaccagtattagcattatcattaagctttgaccacagacaaattgatggtgcaactggccaaaatgcaatgaatcacattaaacgtttattaaataatccagaattattattaatggaggggtaa

SEQ ID NO: 7722 - DNA, 1026 bp, Staphylococcus aureus
atgattaatcaagtatatcaactcgttgcaccgagacagttcgacgtcacatataataatgttgatatttatggtaatcatgtcatcgtaagacctttatacttgtctatttgtgcagctgatcaaaggtattacacaggtcgaagagatgaaaatgtactgcgcaaaaaattgccaatgtcattagttcatgaagctgttggtgaagttgtattcgatagtaaaggagtatttgaaaaaggtacgaaagtagtaatggtgccgaatacacctacagagcaacatcatattatcgcggagaattacttagcctctagttattttagatctagtggttatgatggttttatgcaagactacgttgtgatggcacatgatcgtatcgttccgctgcctaatgacattgatttgagtacgatttcatacacagagttagtgtcagtaagttatcatgctatacaacgatttgaacgtaaatctatacctttgaaaaacagctttggtatttggggtgatggtaacttaggttatattactgctattttgctacgtaagttgtacccagaagctaaaatttatgtatttggtaagacagactataaattaagtcatttttcatttgtagatgacatctttacagtaaatcaaataccagatgatcttaaaattgatcatgcatttgaatgtgttggaggtaaaggaagtcaagttgcacttcaacaaatagttgaacatatttcaccagaaggcagtattgctttgttaggcgtaagtgaattacccgtggaagtgaatacacgattagtacttgaaaaaggattaacgttgattggtagtagtcgaagcggctctaaagattttgagcaagttgttgatttatatcgtaagtacccagacatagttgaaaagttagcattattaaaaggacatgaaattaatgtatgtacgatgcaagatatcgtccaagcgtttgaaatggatttatcgacatcttggggaaaaacagtattgaaatggacgatttaa

SEQ ID NO: 7723 - DNA, 1407 bp, Staphylococcus aureus
atgacacaacaaattggagttattggtttagccgttatgggtaaaaacctagcttggaatattgaatcacacggatatagtgtatctgtatttaaccgctcaagtgaaaaaactgatttaatggttgaagaatcaaaagggaaaaatattcatccaacgtattcattggaagaatttgttaattctttagaaaaaccacgtaaaattttattaatggttcaagcaggtaaagctacggatgcaacaattgatagtttgttacctttattagatgatggagatattttaattgatggtggtaatacaaactatcaagatactatcagacgtaataaagcattagcacaaagtgcaatcaactttattggtatgggcgtttctggtggtgaaattggagcgttaactggtccgtcattaatgccgggtggacaagaagaagcttataacaaagttgcagatattcttgatgcaattgctgctaaggcaaaagacggtgcttcatgtgttacttatattggaccaaatggtgctggacactatgtgaaaatggtacataatggtattgaatatgctgacatgcaattaattgcagaaagttatgctatgatgaaagaattattaggtatgtctcatgaagacattgctcaaacgttcaaagactggaatgctggtgaattagaaagttatttaattgaaatcactggtgatattttcatgaaattagatgaaaataaagaagcattagttgaaaaaattcttgatactgcaggtcaaaaaggtacaggaaaatggacttcaattaatgcattagaattaggtattccattaacaatcattactgaatctgtatttgcacgttttatctcttcaatcaaagaagagcgcgtaaatgcttctaaagaattaaatggtccaaaagcatcatttgatggtgacaagaaagactttttagaaaaaattcgtaaagcattatatatgagtaaaatttgttcttatgcacaaggtttcgcgcaaatgcgtaaagcaagtgaagataatgaatggaatttaaaacttggtgatttagctatgatttggagagaaggttgcattatacgtgcacaattcttacaaaagatcaaagatgcttacgataataatccaggattacaaaacttattgctagatccttactttaaaaacatcgttactgaatatcaagatgcgttacgtgatgttgtcgcaactggtgttcaaaatggtgtaccaacacctggtttctcatcaagtattaattactatgatagttaccgtgcagctgatttacctgcaaacttaattcaagcacaacgtgactacttcggtgctcacacgtacgaaagaaaagataaagaaggcgtattccatacacaatggattgaagaataa

SEQ ID NO: 7724 - DNA, 1878 bp, Staphylococcus aureus
gtggttcaagaatatgatgtaatcgttataggtgcgggacatgcaggtgtagaagcaggtttagcatctgcaagacgtggtgctaaaacattaatgctaacaataaatttagataatattgcatttatgccatgtaacccatctgtaggtggaccagctaaaggcatcgttgttcgtgaaattgatgctttaggtggacaaatggcaaaaacaatcgataaaacacacattcaaatgagaatgttaaatacaggtaaaggacctgctgtaagagcactaagagcgcaagcagataaagtactttatcaacaagaaatgaaacgcgtgattgaagatgaagaaaatttgcatataatgcaaggtatggtagacgaacttattatagaagataatgaagttaaaggtgtacgtacaaatattggtacagagtatttatctaaagcagtaattattacaacgggaacatttttacgtggtgaaatcattttaggtaatatgaagtattcaagtggaccaaatcaccaattaccatcaatcacattatcagacaatttaagagaacttggttttgatattgttcgttttaaaacaggtacaccaccgcgtgtaaattcaaaaacaattgactattcgaagactgaaatacaaccaggtgacgatgtaggtcgtgcattcagctttgaaacaacagaatatatattagatcaattgccatgttggctaacgtatactaatgctgaaacacacaaagttatcgatgataatttacatctatctgcaatgtattcagggatgattaaaggaaccgggccacgttattgcccttcaattgaagataaatttgttcgatttaatgataagccgcgacatcaacttttcttagagcctgaaggtcgtaatacaaatgaagtatatgtgcaaggattgtctacaagtcttcctgaacatgtgcaacgtcaaatgttagagacgataccaggtcttgaaaaagcagatatgatgcgtgccggctacgcaattgaatatgatgcgattgtgccaacgcagttatggcctacacttgaaacgaaaatgattaaaaacttatatactgcaggtcaaattaatggtacatctggttatgaagaagcagcaggacaaggattgatggcaggtattaacgctgcaggtaaagtgttaaacacaggcgaaaagatattaagtcgttcagatgcatatattggtgtcttaatcgatgatcttgtaactaaaggtactaatgaaccttatcgtttactaacatcacgtgcagaatatcgtttgttactacgtcatgataatgctgatttgagattgacggatatgggatatgaacttggtatgatttctgaagaacgatatgcacgttttaatgaaaaacgtcagcaaattgatgcggaaattaagcgtttatcagatattcgtattaaaccaaacgaacatacgcaagcgattatcgaacaacatggtggttctcgcttaaaagatggtattttagctatcgatttattacgcagacctgaaatgacttacgatataattttagaaattttagaagaagaacatcaattgaatgcagatgttgaagaacaagtagaaatacaaacaaaatatgaaggttatatcaataaatcactacaacaagttgagaaagttaagcgtatggaagagaagaaaattccagaagacttagattatagtaagattgatagtttggcgactgaagcgcgagaaaaattatcagaagtaaaacctttaaatattgcacaagcttctagaatatcaggggtaaatccagcagacatatctatattattgatttacttagaacaaggtaaactccaaagggtgagtgactaa

SEQ ID NO: 7725 - DNA, 1152 bp, Staphylococcus aureus
atagggaaatgtaaagtaataggagttctaagtggaggatttacgatggataaaatagtaatcaaaggtggaaataaattaacgggtgaagttaaagtagaaggtgctaaaaatgcagtattaccaatattgacagcatctttattagcttctgataaaccgagtaaattagttaatgttccagctttaagtgatgtagaaacaataaataatgtattaacaactttaaatgctgacgttacatacaaaaaggacgaaaatgctgttgtcgttgatgcaacaaagactctaaatgaagaggcaccatatgaatatgttagtaaaatgcgtgcaagtattttagttatgggacctcttttagcaagactaggacatgctattgttgcattgcctggtggttgtgcaattggaagtagaccgattgagcaacacattaaaggttttgaagctttaggcgcagaaattcatcttgaaaatggtaatatttatgctaatgctaaagatggattaaaaggtacatcaattcatttagattttccaagtgtaggagcaacacaaaatattattatggcagcatcattagctaagggtaagactttaattgaaaatgcagctaaagaacctgaaattgtcgatttagcaaactacattaatgaaatgggtggtagaattactggtgctggtacagacacaattacaatcaatggtgtagaatcattacatggtgtagaacatgctatcattccagatagaattgaagcaggcacattactaatcgctggtgctataacgcgtggtgatatttttgtacgtggtgcaatcaaagaacatatggcgagtttagtctataaactagaagaaatgggcgttgaattggactatcaagaagatggtattcgtgtacgtgctgaaggggaattacaacctgtagacatcaaaacactaccacatcctggattcccgactgatatgcaatcacaaatgatggcattgttattaacggcaaatggtcataaagtcgtaaccgaaactgtttttgaaaaccgttttatgcatgttgcagagttcaaacgtatgaatgctaatatcaatgtagaaggtcgtagtgctaaacttgaaggtaaaagtcatattgcaaggtgcacaagttaa

SEQ ID NO: 7726 - DNA, 441 bp, Staphylococcus aureus
atggaaacaatttttgattataaccaaattaaacaaattatacctcacagacagccatttttattaattgataaagtagttgaatatgaagaaggtcaacgttgtgtggctattaaacaagtatcaggaaacgaaccattctttcaagggcattttcctgagtatgcggtaatgccaggcgtattaattactgaagcgttagctcaaacaggtgcggtagctattttaaatagtgaagaaaataaaggtaaaatcgctttatttgctggtattgataaatgtcgttttaaacgtcaagtagtacctggtgatactttaacgttggaagtagaaatcactaaaattaaaggaccaatcggtaaaggtaatgctaaagctactgtcgatggtcaacttgcttgtagttgtgaacttacatttgcaattcaagatgtaaaataa

SEQ ID NO: 7727 - DNA, 207 bp, Staphylococcus aureus
gtgctaaacttgaaggtaaaagtcatattgcaaggtgcacaagttaaagcgactgatttaagagcagcagcagccttaattttagctggattagttgctgatggtaaaacaagcgttactgaattaacgcacctagatagaggctatgttgacttacacggtaaattgaagcaattaggtgcagacattgaacgtattaacgattaa

SEQ ID NO: 7728 - DNA, 1740 bp, Staphylococcus aureus
atggcaaaaataaaagcaaatgaagcattagttaaagcattacaagcatgggatatagatcacttgtatggtattccaggagactcaatcgacgcagttgtcgatagtttacgtacagtgagagatcaatttaaattttatcatgtacgtcatgaagaagtagcaagcttagcggctgctggttacacaaaattaactggtaaaatcggtgtggcattaagtatcggtggccctggtttaattcatttattaaatggtatgtacgatgccaaaatggataatgtaccgcaattaatattatctggacaaacgaatagtacagcacttggaacgaaagcatttcaagaaacaaatttacaaaaattatgtgaagatgtagccgtttataatcaccaaattgaaaaaggtgacaatgtgtttgaaatcgttaacgaagcaattcgtacggcatatgaacaaaaaggtgtcgctgttgttatttgtcctaacgacttattaactgaaaaaattaaagatacaacgaataaaccagtagatacatcaagaccaacagttgtatcaccaaaatataaagacatcaaaaaagcggttaaactaattaataaaagtaaaaagcctgtcatgttaattggtgtaggtgcaaaacatgcgaaagatgagctacgtgaatttattgaaatggctaaaattcctgtcattcattcattaccagctaaaacaatcttgccggatgatcatccatatagtatcggtaacttaggtaaaattggtaccaaaacatcttatcaaacaatgcaggaagcggatttattaattatggttggtacaaactatccatatgtggattacttacctaagaaaaatattaaagcaatccaaatcgacacaaatcctaaaaatatcggacatcgttttaatattaatgtaggaattgttggagacagtaaaattgcattgcatcagttaactgaaaatattaaacatgttgcggaaagaccatttttaaacaaaacgttagaacgtaaagcggtttgggataaatggatggaacaagataaaaataataatagcaaaccattacgtccagaacgtttaatggcatcaattaacaaatttattaaagatgatgcagtaatttcagcagatgttggtactgcaacagtttggtctacacgttatttaaatcttggtgtgaacaacaagttcatcatttcaagttggttaggtacaatgggttgcggtcttccaggagctatggcatcaaaaattgcatatccaaatagacaagcgattgccattgctggtgacggtgcattccaaatggtaatgcaagacttcgctacagcagtacaatatgatttacctttaactgtatttgtacttaataacaaacagttagcatttattaaatatgaacaacaagcagctggtgaattagaatatgcagttgatttttctgatatggatcatgcaaaatttgctgaggcagcaggtggtaaaggttatacaattaagagtgctagcgaagtagatgctatagtcgaagaggcattagcacaagatgtaccaacgattgtagatgtatatgttgatcctaatgctgcgccattaccaggtaaaattgtaaatgaagaagcgcttggttatggtaaatgggcatttagatctattactgaagataaatatttagatttagatcaaattccacctatttcagttgcagcaaaacgtttcttataa

SEQ ID NO: 7729 - DNA, 468 bp, Staphylococcus aureus
attaaagatgatgcagtgatttcagcagatgtaggtacagcaacagtttggtcaactcgatacttaaaccttggtgtaaataacaagttcatcatttcaagttggttaggtacaatgggttgcggtcttccaggtgcaattgcatcaaaaattgcatatccaaatagacaagccatcgcaattgctggtgacggtgcattccaaatggtaatgcaagacttcgctacagcagtacaatatgatttaccttgtatttgtacttaataacaaacagttagcatttattaaatatgaacaacaagcagctggtgaattagaatatgcagttgatttttctgatatggatcatgcaaaatttgctgaggcagcaggtggtaaaggttatacaattaagagtgctagcgaagtagatgctatagtcgaagaggcattagcacaagatgtaccaacgattgtagatgtatatgt

SEQ ID NO: 7730 - DNA, 612 bp, Staphylococcus aureus
atggctaaagaaattgcaaaatcattattagatattgaagctgtaacattatcaccaaatgatttatatacatggagttcaggtattaaatcaccgatttactgtgataaccgtgttacgttaggttatcctttagttcgaggcgcaatccgcgatggtttaattaacttaattaaagaacactttcctgaagtagaagttatttctggtactgcaacagctggtattccacatgcagcttttattgctgaaaaattaaaattaccaatgaattatgttcgttcatcaaataagagtcatggtaagcaaaatcaaatcgaaggtgctaaaagtgaaggtaaaaaagtagttgtgatagaagatttaatttcgacagggggatcttcagtcacagcagttgaagccttaaaacaagcaggtgcagaagtattaggtgttgtagctatctttacttacggtttgaaaaaagcagatgatacatttagcaatattcaactacctttttacactttaagtgattacaatgaattaattgaagtagctgaaaatgaaggtaaaatttctagtgaagatatccaaacattagttgaatggagagacaacttagcataa

SEQ ID NO: 7731 - DNA, 1650 bp, Staphylococcus aureus
atgaataagcaatggtggaaagaagcagtagcatatcaagtatatccaagaagttttaatgatagtaatcacgatggtattggggatttacctggaatgattgataaattggactacttaaaagatttaggtatcgatgtcatttggctcagtccaatgtttaaatcacctaatgatgacaatggttatgatattagtgactatcaagaaattatggatgaatttggaacgatggaagactttgattgtttattaaaaggtattcatgatagaggcatgaagcttattttagatttagttgtaaatcatacatctgatgaacatccttggtttatagaatctaaatctagtaaagacaatcccaaacgtgattggtatatttggcaagatccaaagcaagatggctctgaacctaacaactgggaaagtatctttaatggatctacatgggaatatgatgctaatactgagcaatattatttccatttattcagtaaaaaacaacctgatttgaattggggtaatccagaagttagagatgctgtatttgaaatgatgaactggtggtttgataaaggcattgatggatttagagtagatgcaattacgcatattaagaagacgtttgaagcgggtgacttacctgtacctgagggtaaaacatatgccccagcatttgatgtagatatgaatcagccaggtatacaaacttggttacaagagatgaaagatcgctcattaagtaagtatgacattatgactgtcggtgaagcgaatggtgtaagccctgatgatgctgatgactgggtcggggaagaaaatggtaaatttaatatgatattccaatttgaacatttgggactgtggaatagtggtgattctcactttgatgtaaattcgtataaatctgtattaaatagatggcaaaaacaacttgaaaataaaggttggaatgcgttgtttattgaaaatcacgaccaaccacgacgtgtatcgacgtggggtgacgatgacaagtattggtatgaatcagcaacaagtcatgcagctgtttatttcttgcaacaaggtacgccattcatttatcaaggtcaagaaattggtatgacgaattatccatttgaaagtattgaaacgtttaacgatgttgctgtaaaaaatgactatcaaatagtgaaagctcaaggtggagatgtagacgctttacttgcgaaatataaagatgagaaccgagataattctcgcacaccaatgcaatgggatgatacgttaaatggaggatttacaaatggtgaaccgtggttcccagtgaatctgaattataaaactatcaatgttgcacaacaattagaagatgagcattcagtattacaattttataaagatttaattcaattaagaaagtctaatgatgtatacgtatatggtcaatttgatttagtagatgctgaaaattcacaagtttttgcgtacacgagaacattaaatgaaaagcaagttcttattgtaggtaatcttactaaccacgaagcagaattaactgtaccatttgatttaagccatggagaagtaaagctatttaattatgatgccaaagttaatttaaaacagttacgtccatatgaagcatgtgttatcgaactaaattaa

SEQ ID NO: 7732 - DNA, 1020 bp, Staphylococcus aureus
atggttacgattaaagatgttgcactaaaagccggtgtttctccttcgacagtttcaagagttataaaaggaaataaacgtattagcgaagcgacaatttcaaaagtgaagaaagttatggaagaattgaattattttcctaataccgctgctagaactttaattacaaaccaaacatataaaattggtttagtgttaaaagggtctgaggagcctattcgactgaatccattctacatcaatgtattgctaggaatttctgaaacgtgtaaccagcatggctatggtacacaaacgacagtctcaaataatatgaatgatttaatggatgaagtttataaaatgattaaacaacgaatggttgatgcgtttatactgctttattcaaaagaaaatgatccaattaaacaaatgttaattgatgaaagcatgccatttattgtgattggtaagcctacatcggatatagatcatcaatttacacacatagataatgataatatattagcttctgaaaatttgacacgacatgttattgaacaaggtgtagatgaattaatatttattacagaaaaaggaaattttgaagtttcaaaagatagaattcaaggatttgaaacggttgcatcacaatttaatctggattatcaaattattgagactagtaatgaaagagaagttattttaaattacatgcaaaatctacatacgcgtttgaaggacccaaatattaaacaggcaatcatttcgttagatgctatgttacatttagcgattttaagtgtcctatatgaacttaatattgaaattccgaaagatgtaatgacagcaacgttcaatgattcttatttaaccgaaattgcgtcaccacctcaaacctgtattgacatcaagcctcgaatgttaggtcaacaggctggttcagcaattttaaatatattgaaaaacaaagcacaggatgttattgaactcgtcattatagatacagaattaaaaataagaaaatcaacacagcgatag

SEQ ID NO: 7733 - DNA, 507 bp, Staphylococcus aureus
atgaataagcaatggtggaaagaagcagtagcatatcaagtatatccaagaagttttaatgatagtaatcacgatggtattggggatttacctggaatgattgataaattggactacttaaaagatttcggtatcgatgtcatttggctcagtccaatgtttaaatcacctaatgatgacaatggttatgatattagtgactaccaagagattatggatgaatttggaacgatggaagactttgatcgtttattaaaaggtgttcatgatagaggcatgaagcttattttagatttagttgtaaatcatacatctgatgaacatccttggtttatagaatccaaatctagtaaagacaatcccaaacgtgattggtacatttggcaagatccaaagccagatggctctgaacctaacaactgggaaagtatatttaatggatctacatgggaatatgatgctaatactgagcaatattatttccatttattcagtaaaaaacagggc

SEQ ID NO: 7734 - DNA, 771 bp, Staphylococcus aureus
atgttaaatcttgaaaacaaaacatatgtcatcatgggaatcgctaataagcgtagtattgcttttggtgtcgctaaagttttagatcaattaggtgctaaattagtatttacttaccgtaaagaacgtagccgtaaagagcttgaaaaattattagaacaattaaatcaaccagaagcgcacttatatcaaattgatgttcaaagcgatgaagaggttattaatggttttgagcaaattggtaaagatgttggcaatattgatggtgtatatcattcaatcgcatttgctaatatggaagacttacgcggacgcttttctgaaacttcacgtgaaggcttcttgttagctcaagacattagttcttactcattaacaattgtggctcatgaagctaaaaaattaatgccagaaggtggtagcattgttgcaacaacatatttaggtggcgaattcgcagttcaaaattataatgtgatgggtgttgctaaagcgagcttagaagcaaatgttaaatatttagcattagacttaggtcctgataatattcgcgttaatgcaatttcagctggtccaatccgtacattaagtgcaaaaggtgtgggtggtttcaatacaattcttaaagaaatcgaagagcgtgcacctttaaaacgtaacgttgatcaagtagaagtaggtaaaacagcggcttacttattaagtgacttatcaagtggcgttacaggtgaaaatattcatgtagatagcggattccacgcaattaaataa

SEQ ID NO: 7735 - DNA, 519 bp, Staphylococcus aureus
atagcaaaagatcaaactcaaatcaatgacaaaattcgtgcaaaagaattacgtttaatcggtcaagatggtgaacaaattggtgttaaatcaaagcgtgaagctttagaaatggctgaacgtgtagatttagacttagtggtcgttgcaccgaatgcgaaaccaccagttgcaagaattatggattacggtaaattcaaattcgaacaacagaaaaaagaaaaagaaatgaaaaagaaacaaaaaattatcaatgttaaagaaattcgtttaagtccaacaattgaggaacatgatttccaaactaagttgaaaaacggacgtaaattcttaactaaaggcgataaatgtaaagtatctattcgtttcagagggcgtgccattacgcataaggaaattggtcaacgtgtgctagaaaaatatgcagatgaatgcaaagatatagcaacagttgaacaaaaacctaaaatggacgggcgtcaaatgtttatcatgttagcgccaacagctgaaaaataa

SEQ ID NO: 7736 - DNA, 654 bp, Staphylococcus aureus
gtgggtcaaaaaattaatccaatcggacttcgtgttggtattatccgtgattgggaagctaaatggtatgctgaaaaagacttcgcttcacttttacacgaagatttaaaaatccgtaaatttattgataatgaattaaaagaagcatcagtttctcacgtagagattgaacgtgctgcaaaccgtatcaacattgcaattcatactggtaaacctggtatggtaattggtaaaggcggttcagaaatcgaaaaattacgcaacaaattaaatgcgttaactgataaaaaagtacacatcaacgtaattgaaatcaaaaaagttgatcttgacgctcgtttagtagctgaaaacatcgcacgtcaattagaaaaccgtgcttcattccgtcgtgtacaaaaacaagcaatcactagagctatgaaacttggtgctaaaggtatcaaaactcaagtatctggtcgtttaggcggagctgacatcgctcgtgctgaacaatattcagaaggaactgttccacttcatacgttacgtgctgacatcgattatgcacacgctgaagctgacactacttacggtaaattaggcgttaaagtatggatctatcgtggagaagttcttcctactaagaacactagtggaggaggaaaataa

SEQ ID NO: 7737 - DNA, 444 bp, Staphylococcus aureus
atgaacatttatgatgaatatagaagttatttaatagaagaactggatgattgtctcacaatacaaaaaaataatgacactgcatattacgatgtgctagaagcgataaatgatttatcaaatgattcattatgtgtgttaaatcatttatatattaacgaaggacaagaagaaacattcgagcaaaaatttttgcaacgtaataagcatttaaaaaacgttgatgggtttaaagcattaaggtttttaagacctagaacagctggtagacactatatcattattacgctgtgggaaaataggcaagcattttatcattggcaaaattcagctgagtacaagcatacacacaagcatcgtggcacttcgaaaggtgcagatgtaaaaataattaatcgtgaattatcatacaatattcgtattgaattagctgatatggtctag

SEQ ID NO: 7738 - DNA, 2046 bp, Staphylococcus aureus
gtgaggaagaaacttttcggtcaattgcaacgtattggtaaagcgctaatgttacctgttgcaattttaccagcagcgggtctgttattagctatcggtacagctatacaaggcgaagcattacaacactacttgccgtttatacaaaatggtggcgttcaaaatgtcgctaaattaatgacagctgccggtagtattatttttgaaaacttacctatgattttcgcattaggtgtcgcaatcggattagctggcggtgatggcgtagcagctatcgcagcattcgtcggttacataatcatgaacaaaacaatgggcgactttttacaagttacacctaaaaatgttactgatccagcgagtggttacgctagcattttaggtattccaacattacaaacaggtgtgttcggcggtattattatcggggccctggcagcttggtgttataacaagttctataacattaacttaccatcttatttaggtttcttcgctggtaagcgtttcgtacctattatgatggctacaacatcatttattttagcatttccaatggcattaatttggccaacgattcaatcaggattaaatgcattcagtacaggattattagattcaaatactggtgttgccgtattcttatttggtttcatcaagcgtttattaattccattcggtctacatcacattttccacgcaccgttctggttcgagtttggttcatggaaaaatgcagctggtgaaattattcacggtgaccaacgtatctttatcgaacaaattcgtgaaggcgcacatttgacagctggtaaattcatgcaaggtgaattccctgttatgatgttcggtttacctgcagcagctttagcaatttatcacacagctaaacctgaaaataagaaagtagtagcaggtttaatgggttctgctgctttaacatcattcttaactggtattacagaacctttagaattctcattcttattcgtagcaccattattattctttattcacgcagtacttgatggtttatcattcttaacattgtacttattggatgttcacttaggttatactttctcaggtggtttcatcgactacgttttacttggcgtactacctaataagacacaatggtggttagtcattcctgtaggtcttgtatacgcagttatttactacttcgtattccgattcttaattgtaaaattaaaatacaaaacaccaggtcgtgaagataagcaatcacaagctgttactgcttcagcaactgaattaccatatgcagtattagaagctatgggtggcaaagcaaacattaaacatttagacgcttgtatcacacgtctacgtgttgaagttaacgacaaatctaaagttgatgttcctggtttgaaagatttaggcgcatctggtgtattagaagtcggcaataatatgcaagcaatttttggtcctaaatctgaccaaatcaaacatgaaatgcaacagattatgaatggtcaagtagtagaaaaccctactactatggaagacgataaagacgaaactgttgttgttgcagaagataaatctgcaacaagcgaattgagccatatcgttcatgcaccattaactggtgaagtaacacctttatcagaagtgcctgatcaagtgttcagcgaaaaaatgatgggtgacggtatcgctattaaaccttcacaaggtgaagttcgtgcaccattcaacggtaaaatacaaatgattttcccaacaaaacatgcaattggtcttgtatcagatagtggtttagaactattaatccacatcggtttagacactgttaaattaaacggagaaggctttactttacatgttgaggaaggtcaagaagttaaacaaggtgatttattaatcaactttgatttagactacatccgcaatcatgcaaagagtgatattacgcctattatcgtgacacaaggaaacattacaaaccttgattttaaacaaggtgaacatggcaacatttcatttggcgatcaattatttgaagctaaataa

SEQ ID NO: 7739 - DNA, 660 bp, Staphylococcus aureus
atgtttggttctgatttagacagtgcacagttattacaagcattgtacgaaacgttatatatggtatctattgctttatttttaggagcagtgattggtattccattaggtgtcttattggtaattactcgaaaacaaggcatatggcccaatatagtgatacatcaagttttaaatcctttaatcaatattttaaggtcactaccatttattattttgttaattgcgattgtgccattcacaaaattagtagtaggtacttcaattggtacgactgctgccatcgtgcctttaactgtatatgtggcaccttacattgcaagacttgttgaaaactcattattggaagtagacgaggggattattgaagcggcgaaagcgatgggcgcttcaccactacaaatcattagatattttttaattcctgaagcgttaggttcattagtattagcaattaccactgcgattattggacttattggaagtacggcgatggcaggagctgttggcggtggtggtataggagacttagctttagtgtatggttatcaaagatttgatacgacggtcattattattaccgttattgtattagtcattattgtccaagtgattcaaacgctagggaatgtcctagctagattcatacgtagacattaa

SEQ ID NO: 7740 - DNA, 6816 bp, Staphylococcus aureus
atgagtaaaagacagaaagcatttcatgacagcttagcaaacgaaaaaacaagagtaagactttataaatctggaaaaaattgggtaaaatccggaattaaagaaatagaaatgttcaaaattatggggctaccatttattagtcatagtttagtgagtcaagataatcaaagcattagtaaaaaaatgacgggatacggactgaaaactacggcggttattggtggtgcattcacggtaaatatgttgcatgaccagcaagcttttgcggcttctgatgcaccattaacttctgaattaaacacacaaagtgaaacagtaggtaatcaaaactcaacgacaatcgaagcatcaacatcaacagccgattccacaagtgtaacgaaaaatagtagttcggtacaaacatcaaatagtgacacagtctcaagtgaaaagtctgaaaaggtcacttcgacaactaatagtacaagcaatcaacaagagaaattgacatctacatcagaatcaacatcctcaaagaatactacatcaagttctgatactaaatctgtagcttcaacttcaagtacagaacaaccaattaatacatcaacaaatcaaagtactgcatcaaataacacttcacaaagcacaacgccatcttcggtcaacttaaacaaaactagcacaacgtcaactagcaccgcaccagtaaaacttcgaactttcagtcgcttagctatgtcaacatttgcgtcagcagcgacgacaaccgcagtaactgctaatacaattacagttaataaagataacttaaaacaatatatgacaacgtcaggtaatgctacctatgatcaaagtaccggtattgtgacgttaacacaggatgcatacagccaaaaaggtgctattacattaggaacacgtattgactctaataagagttttcatttttctggaaaagtaaatttaggtaacaaatatgaagggcatggaaatggtggagatggtatcggttttgccttttcaccaggtgtattaggtgaaacagggttaaacggtgccgcagtaggtattggtggcttaagtaacgcatttggcttcaaattggatacgtatcacaatacatctaaaccaaattcagctgcaaaggcgaatgctgacccatctaatgtagctggtggaggtgcgtttggtgcatttgtaacaacagatagttatggtgttgcaacaacgtatacatcaagttcaacagctgataatgctgcgaagttaaatgttcaacctacaaataacacgttccaagattttgatattaactataatggtgatacaaaggttatgactgtcaaatatgcaggtcaaacatggacacgtaatatttcagattggattgcgaaaagtggtacgaccaacttttcattatcaatgacagcctcaacaggtggcgcgacaaatttacaacaagtacaatttggaacattcgaatatacagagtctgctgttacacaagtgagatacgttgatgtaacaacaggtaaagatattattccaccaaaaacatattcaggaaatgttgatcaagtcgtgacaatcgataatcagcaatctgcattgactgctaaaggatataactacacgtccgtcgatagttcatatgcgtcaacttataatgatacaaataaaactgtaaaaatgacgaatgctggacaatcagtgacatattattttactgatgtaaaagcaccaactgtaactgtaggcaatcaaaccatagaagtgggtaaaacaatgaatcctgttgtgttgactacaacggataatggtactgggactgtgacaaatacagttacaggattaccaagcggattaagttacgatagtgcaacgaattcaatcattgggacaccaacaaaaattggtcaatcaacagtgacagttgtgtctactgaccaagcaaataacaaatcgacgacaacttttacaataaatgttgtggatacgacagcaccaacagtgacaccaataggagatcaatcatcagaagtgtattcaccaatatccccgattaaaattgctacgcaagataacagtggaaatgcggtgacgaatacagtgactggattgccatccggactaacatttgatagtacaaataatactattagtggtacaccaacaaacattggtacaagtactatatcaatcgtttctacagatgcgagcggtaacaaaacgacgacaacttttaaatatgaagtaacaagaaatagcatgagtgattccgtatcaacatcaggaagtacacaacaatctcaaagtgtctcaacaagtaaagctgactcacaaagtgcatcaacgagtacatcaggatcgattgtggtatctacatcagctagtacctcgaaatcgacaagtgtaagcctatctgattctgtgagtgcatctaagtcattaagcacatctgaaagtaatagtgtatcaagctcaacaagcacaagtttagtgaattcacaaagtgtatcatcaagcatgtcaggttcagttagtaaatcaacatcattaagcgattcgatttcgaactctaacagtactgaaaaatccgaaagtctatcaacaagtacatctgattcattgcgtacatcaacatcactcagtgactcattaagtatgagtacatcaggaagcttgtctaagtcacaaagcttatcaacgagtatatcagggtcgtctagtacatcagcatcattaagtgacagtacatcgaatgcaattagtacatcaacatcattgagcgagtcagctagcacctcggactctatcagtatttcaaatagcatagccaactctcaaagtgcgtcaacaagcaaatcagattcacaaagtacatcaatatcattaagtacaagtgattcaaaatcgatgagtacatcagaatcattgagcgattcgacgagcacaagtggttctgtttctggatcactaagcatagcagcatcacaaagtgtctcaacaagtacatcagactcgatgagtacttcagagatagtaagtgactctatcagtacaagtgggtcattatctgcatcagacagtaaatcaatgtctgtaagtagttcaatgagcacgtctcagtcaggtagtacatcagaatcattaagtgattcacaaagtacatctgattctgatagtaagtcattatcactaagtactagtcaatcaggttcaacaagtacatcaacgtcgacaagtgcttcagtacgtacttcggaatcgcaaagtacgtctggttcaatgagtgcaagtcaatccgattcaatgagcatatcaacgtcgtttagtgattcaacgagtgatagcaaatcagcatcaactgcatcaagtgaatcaatatcacaaagtgcttctacgagcacatctggttcggtaagtacttcgacatcgttaagtacaagtaattcagaacgtacatcaacatctgtgagtgattccacaagcttaagtacatcagagtctgattcaataagtgaatcaacgtcaacgagcgattctataagtgaagcaatatctgcttcagagagcacgtctatatcattaagtgaatcaaatagtactagcgattcagaatcacaaagtgcatctgcctttttaagtgaatcattaagtgaaagtacgtctgaatcaacatcagagtcagtgagtagttcgacaagtgagagtacgtcattatcagacagtacatcagaatctggtagcacatcaacatcattaagtaattcaacaagtggtagtgcgtccatttcaacatcgacaagtatcagtgaatcaacgtcaacgtttaagagcgagagtgtttcaacatcactgagtatgtcaacgagtacaagtttgtctaactctacaagtttgtcaacatcattaagtgattccacaagtgatagtaagtctgattcattaagtacatcaatgtcgacaagtgattcaatcagtacaagtaaatctgattccattagtacatctacatcattaagtggttctacaagtgaaagtgaatccgactcaacatcatcaagtgaaagtaaatccgattcaacatcaatgagcataagtatgtctcaatcaacatcaggaagtacaagtacgtcaacgagtacaagtttgtctgactcaacgagtacgtcattgtcactaagtgcatcaatgaatcaaagcggagtagactcaaactcagcaagccaaagtgcctcaaactcaacaagtacaagcacgagcgaatccgattcacaaagcacatcaacatatacaagtcagtcaacaagccaaagtgaatcaacatcgacatcaacgtcactaagcgattcaacaagtatatctaaaagtacgagccaatcaggttcaacaagcacatcagcatcattaagtggttcagagagtgaatctgattcacaaagtatctcaacaagtgcaagtgaatcaacatcagaaagtgcgtcaacatcactcagtgactcaacaagtacaagtaactcaggatcagcaagtacgtcaacatcgctcagtaactcagcaagcgcaagtgaatccgattcgtcgtcaacatctttaagtgattcaacatctgcgtcaatgcaaagcagtgaatccgattcacaaagcacatcagcatcattaagtgattcgctaagtacatcaacttcaaaccgcatgtcgaccattgcaagtttatcaacatcggtaagtacatcagaatctggctcaacatcagaaagtacaagtgaatccgattcaacatcaacatcattaagcgattcacaaagcacatcaagaagtacaagtgcatcaggatcagcaagtacatcaacatcaacaagtgactctcgtagtacatcagcttcaactagtacttcgatgcgtacaagtactagtgattcacaaagtatgtcgctttcaacaagtacatcaacaagtatgagtgattcaacgtcattatctgatagtgtgagtgattcaacatcagactcaacaagtgcgagtacatctggttcgatgagtgtatctatatcgttaagtgattcgacaagtacatcaacatcggctagtgaagtaatgagcgcaagcatatctgattcacaaagtatgtcagaatctgtaaatgattcagaaagtgtaagtgaatctaattctgaaagtgactctaaatcgatgagtggctcaacaagtgtcagtgattctggctcattgagcgtctcaacgtcattaagaaaatcagaaagtgtaagcgagtcaagttcattgagtggctcacaatcgatgagcgattcagtaagcacaagcgattcgtcatcattaagtgtatcgacgtcactaagaagttcagaaagcgtgagtgaatctgattcattaagtgattcaaaatcaacaagtggttcgacttcaacaagtacatctggttcattgagtacctcaacatcattaagtggttcagaaagcgtaagcgagtctacctcgctaagtgattcaatatcaatgagtgattctactagtacaagtgactccgactcattaagtggatcaatatctttaagtggttccacaagtcttagcacttcggattcattaagtgattcaaaatcattgagtagctcgcaaagtatgagtggatcagaatcaacgtcaacaagtgtgagcgattcgcagtcaagctcaacaagtaatagtcaatttgactctatgagcatcagtgcatcagaaagcgactcaatgtctacaagtgattcgtctaacatcagtggatcaaattcaacgagtacatcactttcaacatctgactcaatgagcggaagcgtatcagtttcaacatcgacaagtttaagtgactcaatatcaggttcaacaagtgtaagtgactcgagctcaacaagcacatctacatcattaagtgattcaatgtcacaaagccagtcaacaagtacaagtgcatctggttccttaagtacatcgatatcaacatcaatgtcaatgagtgctagtacatcgtcatcacaaagcacatcggtgtcgacatcattatcaacatcagacagtatcagtgattctacttcaataagtatcagtggttcacaaagtacagtagaatcagaatctacaagtgattcaacttctatcagtgactcagaatcattgagtacatcagattcagactcgacatcgacaagtacatcggactcaacaagtggttcaacttcaacaagcatatctgaatcattaagtacgtctggttcaggttcaacgagcgtatctgactcaacatcaatgagtgaatccgattcaacaagtgtttcaatgtcacaagacaaatctgactcaacatcaattagcgactcagaatcagtgtcaacaagcacatcaacgtcattgagcacatccgattcgacaagcacatccgaatcgctgagtacatctatgtctggttcacaaagcatttctgactcaacatcaacaagtatgtccggctcaacaagtacatctgaatctaactcaatgcatccgtcagactcaatgagtatgcatcatactcacagcacgagcacatctcgcttatcaagtgaagcaacaacgagcacgagtgaatctcagtctacattaagtgcaacatctgaagtgactaaacataatggcacgcctgcacaaagtgaaaaaagattgccagatacaggtgactcaataaaacaaaatggattactaggtggcgttatgacattattagttggtttaggtttaatgaagagaaagaaaaagaaagatgaaaatgatcaagatgattctcaagcataa

SEQ ID NO: 7741 - DNA, 891 bp, Staphylococcus aureus
atgaataaagagcaattagaaaaaatgaaaaatggaaaaggctttattgccgcattagaccaaagtggtggtagtacaccaaaagcacttaaagaatatggtgtaaacgaagatcaatatagcaatgaagacgaaatgttccaacttgttcacgatatgcgtacacgtgtggtaacttcaccttcattctcaccagataaaattttgggtgctattcttttcgaacaaacaatggatcgcgaagtagaaggcaaatacactgcagattacttagctgataaaggtgttgttccgttcttaaaagtagacaaaggtcttgctgaagagcaaaatggtgttcaattaatgaaaccaatcgacaacttagacagtttattagaccgtgcaaacgaacgtcacatttttggtacaaaaatgcgttctaacattttagaattaaatgagcaaggtatcaaagacgttgttgaacaacaatttgaagttgctaaacaaattattgctaaaggtttagtgccaattatcgaaccagaagttaatattaatgcaaaagacaaagctgaaattgaaaaagtattaaaagctgaacttaaaaaaggtttagatagcttaaatgctgatcaattagtaatgttgaaattaacaattcctactgaaccaaacttatacaaagagttagctgaacatcctaatgttgttcgtgtcgttgtattatcaggtggttacagcagagaaaaagcaaatgaattacttaaagataacgatgaacttatcgcaagtttctcacgtgcattagctagtgatttaagagctgatcaatctaaagaagaattcgataaagctttaggtgatgctgtagaatcaatctacgacgcatctgtaaacaaaaactaa

SEQ ID NO: 7742 - DNA, 1293 bp, Staphylococcus aureus
atgattcaaacccttgtgaacttctttagaacaaaagaggttcgtaacaagattttcttcacactagcaatgttagtaatttttaaaatagggacttatataccagctccaggagtaaatcctgcagcttttgataatccccaaggttctcaaggtgccactgagttattaaatacttttggtggcggagccttgaaacgattttctatttttgcaatgggtattgtaccctacatcactgcatcaatcgtaatgcaattattacaaatggatattgtccctaaattctcagaatgggcaaaacaaggtgaagtaggtagaagaaagttaaataacgttactcgttatttagcaatttctttagcatttatccaatctataggtatggcattccaatttaataattatctcaaaggtgcgctgattatcaatcagtcaattatgagttatttattaatagcactagttttgacagcaggaactgctttcttaatatggcttggtgatcaaatcactcagttcggtgttggtaatggtatttctattatcatatttgcgggtattttatcaacgttgccagccagtctaattcaatttggacaaactgcgttcgttgggcaagaagatacatcattagcatggttgaaagtattaggacttttagtgtcactgatactattaactgtaggtgctatttatgtacttgaagccgttcgtaaaattccgattcaatatgctaagaaacaaactgctcaaagattaggttcacaggcaacttatctacctttaaaagtgaactcagccggtgttattcctgtaatctttgcaatggcgttcttcttactgcctagaacattaacgttgttctatccagataaagaatgggcacaaaacattgcgaatgctgcaaatccttcaagtaatgttggtatggttgtatatattgtactaattatactattcacatacttctatgcatttgtacaagttaatccggaaaaaatggctgataaccttaagaaacaaggtagctatgttccaggcattagacctggtgaacaaaccaaaaaatatattactaaagttttatatcgtttaacttttgtaggttctatcttcttagccgttatttcaattctaccaatattagcaactaagtttatgggattaccacaatcaattcagattggtggtacaagtttacttatcgttattggtgtagcgattgaaacaatgaaatctttagaagctcaagtatctcaaaaagaatataaaggctttggtggtagataa

SEQ ID NO: 7743 - DNA, 1476 bp, Staphylococcus aureus
atgaattttaaattaaataacacactaagcaacgaaataaatacattgattattggtataccagaacatttaaatcagttagagcgcattagttttaatcatatcgatattacagaatcacttgaaagactaaaacatcaacatattattggtagtaaagttgggaagatttatacaactgcatttgatgtacaagatcaaacatatcgtttaattacagttggtttaggaaacttaaaagcacgtagttatcaagatatgttgaaaatatggggacatcttttccaatacataaagtcagaacatattgaagatacttatttacttatggattcatttatttcaaaatatgatcagttatcagatgtattaatggcatgcggtattcaaagtgagcgtgcaacatatgaattcgatcattataaatcaagtaagaaggcaccgtttaagacgaatttaaaccttattagtgaatcattaattgaattagatttcattcatgagggtatcagtattggccaatccattaatttggcaagagactttagtaatatgccaccgaatgtattaacaccacaaacatttgcagaagatattgttaatcattttaaaaatacaaaggtcaaagtagatgttaaagattatgacactttagtttctgaaggattcggacttttacaagcagtaggtaaaggtagtaagcataaaccgagattagtaaccatcacatataatggcaaagacaaagatgtagcaccaattgccttagttggtaaaggtataacgtatgattctggtggttatagtattaaaacgaagaatggcatggctacaatgaagtttgacatgtgtggcgctgcgaatgtcgttggtatcattgaagcggctagtcgtttacaactgcctgtaaatattgtcggagtgcttgcttgtgctgaaaatatgataaatgaagcatcaatgaagccagatgatgtatttacagcattaagtggtgaaactgtagaagtaatgaatacagacgctgaaggtagattagtccttgcagatgctgtgtattatgcaaatcaatatcagcctagtgtgattatggactttgctacattaacgggtgcagccatcgttgcactaggcgatgataaagctgctgcatttgaatcgaatagtaaagtgatattaaacgatatattacaaataagttctaaagtcgatgaaatggtatttgaattaccgattactgcaaccgaacgtgcaagtattaatcacagtgatatcgctgatttagttaaccatacgaatggacaaggtaaagcgctatttgcggcaagttttgtaacacattttagtggtcaaacacctcacattcatttcgatattgcaggtccagcaacgactaataaagcttcatataatggtccaaaagggccaacaggatttatgattccgacgatagtacaatggttaaaacaacaataa

SEQ ID NO: 7744 - DNA, 1362 bp, Staphylococcus aureus
atgtcggaaaaagaaatttgggaaaaagtgcttgaaattgctcaagaaaaattatcagctgtaagttactcaactttcctaaaagatactgagctttacacgattaaagatggtgaagctatcgtattatcgagtattccttttaatgcaaattggttaaatcaacaatatgctgaaattatccaagcaatcttatttgatgttgtaggctatgaagttaaacctcactttattactactgaagaattagcaaattatagtaataatgaaactgctactccaaaagaaacaacaaaaccttctactgaaacaactgaggataatcatgtgcttggtagagagcaattcaatgcccataacacatttgacacttttgtaatcggacctggtaaccgctttccacatgcagcaagtttagctgtagccgaagcaccagccaaagcgtacaatccattatttatctatggaggggttggtttaggaaaaacccatttaatgcatgccattggtcatcatgttttagataataatccagatgccaaagtgatttacacatcaagtgaaaaattcacaaatgaatttattaaatcaattcgtgataacgaaggtgaagctttcagagaaagatatcgtaatatcgacgtcttattaatcgatgatattcagttcatacaaaataaagtacaaacacaagaagaatttttctatacttttaatgaattgcatcagaataacaagcaaatagttatttcgagtgatcgaccaccaaaggaaattgcacaattagaagaccgattacgttcacgctttgaatgggggctaattgttgatattacgccaccagattatgaaactcgaatggcaattttgcagaagaaaattgaagaagaaaaattagatattccaccagaagctttaaattatatagcaaatcaaattcaatctaatattcgtgaattagaaggtgcattaacacgtttacttgcatattcacaattattaggaaaaccaattacaactgaattaactgctgaagctttaaaagatatcattcaagcaccaaaatctaaaaagattaccatccaagatattcaaaaaattgtaggccagtactataatgttaggattgaagatttcagtgcaaaaaaacgtacaaagtcaattgcatatccgcgtcaaatagctatgtacttgtctagagagcttacagatttctcattacctaaaattggtgaagaatttggtgggcgtgatcatacgaccgtcattcatgctcatgaaaaaatatctaaagatttaaaagaagatcctatttttaaacaagaagtagagaatcttgaaaaagaaataagaaatgtataa

SEQ ID NO: 7745 - DNA, 879 bp, Staphylococcus aureus
atgaaaataacaacaattgctaaaacaagtttagcactaggccttttaacaacgggtgtaatcacaacgacaacgcaagaagcaaacgcgacaacaccatcttccactaaagtggaagcaccacaatcaacaccgccctcaactaaagtagaagcaccgcaatcaaaaccaaacgcgacaacaccgccttcaactaaagtggaaacaccgcaacaaacaccgaacgcgacaacaccatcttcaactaaagtggaaacaccacaatcgccaaccacaaaacaagtaccaacagaaataaatcctaaatttaaagatttaagagcgtattatacgaaaccaagtttagaatttaaaaatgagattggtattattttaaaaaaatggacgacaataagatttatgaatattgttccagattatttcatatataaaatagctttagttggaaaagacgataaaaaatatgatgaaggagtacataggaatgtcgatgtatttgtcgttttagaagaaaaaaataaatatggagtggaaagatactcggtcggtggtatcacaaagagtaatagtaaaaaagttgatcacaaagcaggagtaagaattactaaagaagataataaaggtacaatctctcatgatgtttcagaattcaagattactaaagagcagatttccttgaaagaacttgattttaaattgagaaaacaacttattgaaaatcataatctgtacggtaacgttggttcaggtaaaattgttattaacatgaaaaacggtggaaagtacacgtttgaattacacaaaaaattacaagaaaatcgcatggcagacgtcatagatggcactaatattgataacattgaagtgaatataaaataa

SEQ ID NO: 7746 - DNA, 624 bp, Staphylococcus aureus
atggctaattatgatgttttaaaattagacggaactaaatcaggttcaatcgaattaagcgatgcagtattcggtattgagccaaataatagcgttttattcgaagctattaatttacaacgtgcttcattacgtcaaggtacgcatgctgttaagaatcgttcagcagtaagcggtggcggacgtaaaccatggaagcaaaaaggaacaggtcgtgctcgtcaaggtacaatccgtgctccacaatggcgtggcggtggtatcgtattcggaccaactccaagaagttatgcatacaaaatgcctaagaaaatgcgtcgtttagctttacgctcagcattatctttcaaagctcaagagaatggcttaactgtagttgacgcattcaacttcgaagctccaaaaactaaagaattcaaaaatgtattatctacattagaacaacctaaaaaagtattagtagttactgaaaacgaagatgtaaatgttgaattatcagcacgcaacatccctggcgttcaagtgacaactgctcaaggtttaaatgttttagatatcactaatgctgacagcttagtaattactgaagctgctgctaaaaaagttgaggaggtgctcggataa

SEQ ID NO: 7747 - DNA, 489 bp, Staphylococcus aureus
gtgtttaatatgtttcattttataattatggtggtatataacatgaattataacatattggaggttaaggaaatgccctttacaatgaaaggttaccccgaaaaatggaaagaatttgaagtaattaaacggcaaaaagcgatagaaattgcgaatgcaatgttaaaagaaggatatcttgaaaaagatgttgttcctattgcggcgaaaaaagcgaaagattggtatcgagcgttatcgaaagaagaaatcaaagcattagaagaagagaacttcgtacaattccatacagcaacaatggaaaaagcagaggtggatagtgaatatgcaacaactgataatgaagaacatattcaagaacaatcaaatcaagataaatcgtactttgatagcgaatcaattggcaaccaaagtggtggcgttcgacaaagagaaccgcttatggatggtgcacatccaaaagttgtggaatcatttaaagacgtataa

SEQ ID NO: 7748 - DNA, 609 bp, Staphylococcus aureus
atgtctaaatttgatgaacaaatcattgtagtacctagagaaattatttttaataatgaaaagaatactttcaatgggtttttaaataagaataaaccagaaggtcaaaatatttttgatgcgctaagtcaatatgaagttaagcgacgcggcgatatggaagaggatccatcatataaacaactcatttcttattgtttacttgaaaatgagcatggcgagatattagtgtatgaacgattatctggcggtggagaagctcgattgcatggacaatcttcaataggtgtaggcggtcatatgaatgatgttccaggagcagaatctattaacgaagtattgagagttaatgcacagagagaattagaagaagaagtaggtttaagtgagcaagattcacaaaatatggaatatatcggttttattaatgacgataataatgaagtgggcaaggtacatattggtgttgtatttaaaatcactgtaagtacgaatgatgtagaagctaaagaaacagatactttacgaataaaatgggttgaaaaaggcaacatagagtcatatgatgatttcgaaacgtggagcgcattaatccttcaagatttataa

SEQ ID NO: 7749 - DNA, 1974 bp, Staphylococcus aureus
atggctaaagaaacattttatataacaaccccaatatactatcctagtgggaatttacatataggacatgcatattctacagtggctggagatgttattgcaagatataagagaatgcaaggatatgatgttcgttatttgactggaacggatgaacacggtcaaaaaattcaagaaaaagctcaaaaagctggtaagacagaaattgaatatttggatgagatgattgctggaattaaacaattgtgggctaagcttgaaatttcaaatgatgattttatcagaacaactgaagaacgtcataaacatgtcgttgagcaagtgtttgaacgtttattaaagcaaggtgatatctatttaggtgaatatgaaggttggtattctgttccggatgaaacatactatacagagtcacaattagtagacccacaatacgaaaacggtaaaattattggtggcaaaagtccagattctggacacgaagttgaactagttaaagaagaaagttatttctttaatattagtaaatatacagaccgtttattagagttctatgaccaaaatccagattttatacaaccaccatcaagaaaaaatgaaatgattaacaacttcattaaaccaggacttgctgatttagctgtttctcgtacatcatttaactggggtgtccatgttccgtctaatccaaaacatgttgtttatgtttggattgatgcgttagttaactatatttcagcattaggctatttatcagatgatgagtcactatttaacaaatactggccagcagatattcatttaatggctaaggaaattgtgcgattccactcaattatttggcctattttattgatggcattagacttaccgttacctaaaaaagtctttgcacatggttggattttgatgaaagatggaaaaatgagtaaatctaaaggtaatgttgtagaccctaatattttaattgatcgctatggtttagatgctacacgttattatctaatgcgtgaattaccatttggttcagatggcgtatttacacctgaagcatttgttgagcgtacaaatttcgatctagcaaatgacttaggtaacttagtaaaccgtacgatttctatggttaataagtactttgatggcgaattaccagcgtatcaaggtccacttcatgaattagatgaagaaatggaagctatggctttagaaacagtgaaaagctacactgaaagcatggaaagtttgcaattttctgtggcattatctacggtatggaagtttataagtagaacgaataagtatattgacgaaacaacgccttgggtattagctaaggacgatagccaaaaagatatgttaggcaatgtaatggctcacttagttgaaaatattcgttatgcagctgtattattacgtccattcttaacacatgcgccgaaagagatttttgaacaattgaacataaacaatcctcaatttatggaatttagtagtttagagcaatatggtgtgcttactgagtcaattatggttactgggcaacctaaacctattttcccaagattggatagcgaagcggaaattgcatatatcaaagaatcaatgcaaccgcctgctactgaagaggaaaaagaagagattcctagcaaacctcaaattgatattaaagactttgataaagttgaaattaaggcagcaacgattattgatgctgaacatgttaagaagtcagataagcttttaaaaattcaagtagacttagattctgaacaaagacaaattgtatcaggaattgccaaattctatacaccagatgatattattggtaaaaaagtagcagttgttactaacctgaaaccagctaaattaatgggacaaaaatctgaaggtatgatattatctgctgaaaaagatggtgtattaaccttagtaagtttaccaagtgcaattccaaatggtgcagtgattaaataa

SEQ ID NO: 7750 - DNA, 936 bp, Staphylococcus aureus
gtgtttcatcatatcagcgttatgttaaacgaaaccattgattatttaaatgtaaaagaaaatggtgtgtacattgactgtacgctaggtggagcgggacatgccctttatttactaaatcaattaaatgacgacggaagattaatagcaatcgatcaagaccaaactgcaattgataatgctaaagaggtattaaaggatcatttgcataaggtgacttttgttcatagcaacttccgtgaattaactcaaatattaaaagacttaaacattgaaaaagtagatggaatttattacgacttgggtgtttcaagcccacaactcgacattccagaacgaggattcagttatcaccatgacgcaacattagacatgcgtatggaccaaacacaagaactaacagcatatgaaattgttaacaattggtcatatgaagcgttagtgaagattttttatcgttatggcgaggagaaattttcaaaacagatagctcgaagaatcgaagcacatcgtgaacaacaaccaataacaacaacattagaattagttgacattataaaagaaggtattcctgcaaaagcaagaagaaaaggcggacatcctgcaaaacgagtatttcaagcactacgaattgcagtaaacgatgaattgtcagcttttgaagattcaatagaacaagcgattgaattagtgaaagtagacggcaggatttcggtaatcactttccattctttagaagatcgtttatgtaaacaggtgttccaagaatatgaaaaaggtccagaggtaccaagaggattgccagttataccagaagcatatacacctaagttaaagcgtgttaatcgtaaaccgattaccgctacagaagaagatttagatgacaataacagagcacgaagcgcgaaattacgtgtagctgaaatacttaaataa

SEQ ID NO: 7751 - DNA, 507 bp, Staphylococcus aureus
atgggcgaacatcaaaacgttaaattgaatcgtacagttaaagcagccgtactaacggtatcagatactagagactttgttacagataaaggtggtcaatgcgtgcgccaactattacaagcagatgacgttgaagtgagtgacgcacattatacaattgtgaaagatgaaaaagtagccatcacgacgcaggtgaagaagtggttagaagaagatattgatgtcatcattacgactggtggaacaggtattgcacaacgtgatgtgacgattgaagcagtaaaaccacttttaactaaagagatagaaggctttggggaattgtttagatatttgagttatgttgaagatgttggcacgcgtgcattattgtctcgtgctgtagcaggtacagttaataataaattgatattttcgattccaggatcaacaggcgcagttaaattagcattagaaaagctcattaaaccagaattaaatcatctgattcatgagcttacaaaataa

SEQ ID NO: 7752 - DNA, 1005 bp, Staphylococcus aureus
gtgagtcaagaacgttattcaaggcaaattttatttaaacaaataggtgaaataggtcaaagcaaaataaatcaaaaatgtgcgttgattattggtatgggcgcattaggtacacatgtggccgaaggacttgttagagcaggcattgctaaactaatcattgttgatagagattatattgaatttagtaatttacaaagacaaacattgtttactgaagaagatgctttgaaaatgatgcctaaagtggttgcagctaaaaagcatttgctagcgttacgtagtgatgttgatattgatggttgtattgcccatgtggattattattttttggaaacacatggacaggacgttgacgttattattgatgcaaccgataactttgaaacacgacaactgattaatgattttgcatataaacatcgtataccttggatttatggtggtgttgtacagagtacatatacagaagctgcatttatacctggtaaaacaccttgctttaactgtttggtaccacaattgccagcattaaatttaacatgtgatacagtaggggtcattcaacctgccgtgacgatggcaacaagtttacaattaagagatgcgatgaaagtattaacggaacaaccaattgacacaaaaataacttatggcgatatttgggaaggtagtcattattcatttggtttcagtaaaatgcaacgttcagactgtacaacttgtggagatgtaccaagttatccgtatttaaacaagaatgaacaacgttatgcaacattgtgtggtagagacactgtacagtatgaaaatgcatcaattacacacgacattcttgttcaatttttaaaacaacatcaactaaattatcgcagtaattcgtatatggttatgtttgaatttaaaggacaccgcattgttgcttttaaaggtggaaggtttttaatacatggcatgacacgcacatcagatgccacacatctaatgaatttattgtttggataa

SEQ ID NO: 7753 - DNA, 348 bp, Staphylococcus aureus
ttggaaaaagcttaccgaattaaaaagaatgcagattttcagagaatatataaaaaaggtcattctgtagccaacagacaatttgttgtatacacttgtaataataaagaaatagaccattttcgcttaggtattagtgtttctaaaaaactaggtaatgcagtgttaagaaacaagattaaaagagcaatacgtgaaaatttcaaagtacataagtcgcatatattggccaaagatattattgtaatagcaagacagccagctaaagatatgacgactttacaaatacagaatagtcttgagcacgtacttaaaattgccaaagtttttaataaaaagattaagtaa

SEQ ID NO: 7754 - DNA, 1833 bp, Staphylococcus aureus
atgagtaaaattattggcatagacttaggtacaacaaattcatgtgtaacagtattagaaggcgatgagccaaaagtaattcaaaaccctgaaggttcacgtacaacaccatctgttgtagctttcaaaaatggagaaactcaagttggtgaagtagctaaacgtcaagctattacaaacccaaacactgttcaatctattaaacgtcatatgggtactgattataaagtagatattgaaggtaaatcatacacaccacaagaaatctcagctatgattttacaaaatttaaaaaatacagctgaaagctatttaggtgagaaagttgacaaagctgtaattacagtacctgcatactttaacgacgctgaacgtcaagcaactaaagatgctggtaaaattgctggtttagaagttgagcgtatcattaatgaaccaacagctgcagcattagcatatggtttagataaaactgataaagatgaaaaagttcttgtttttgacttaggtggcggtacatttgacgtatctatcctagaattaggtgacggtgtattcgaagtactatcaacagccggtgacaacaaacttggcggtgatgattttgaccaagtaattattgactacctagttgcagaattcaaaaaagaaaatggcgtagacttatctcaagataaaatggcattacaacgtttgaaagatgctgctgaaaaagctaaaaaagacttatcaggtgtatcacaaactcaaatctcattaccatttatctcagctggtgaaaacggtccattacacttagaagtaaacttaactcgttctaaatttgaagaattatcagattcattaattagaagaacaatggaacctacacgccaagcaatgaaagacgctggcttaacaaactcagatatcgatgaagttatcttagttggtggatcaactcgtattccagcagtacaagaagctgtcaaaaaagaaatcggtaaagaacctaacaaaggtgtaaacccggacgaagtagtggcaatgggagctgcaatccaaggtggcgttatcacaggtgacgttaaagacgtagtattattagacgtaacaccactatctttaggtattgaaattttaggtggacgtatgaatacgttaattgaacgtaacactacgattcctacatctaaatctcaaatctattcaacagcagtagataatcaaccatcagtagatgtacacgtattacaaggtgaacgtccaatggctgcggataataaaacacttggtagattccaattgactgatattccaccagctgaacgtggtaaacctcaaattgaagtaacgtttgatatcgataaaaacggtattgtaaatgtaactgcaaaagacttaggtacaaataaagaacaaagaattacaattcaatcaagttcttcattatcagacgaagaaatcgaccgtatggtaaaagatgctgaagttaacgctgaagcagataaaaaacgtcgtgaagaagtagacttaagaaacgaagctgacagtctagtattccaagttgaaaaaactttaactgatttaggcgaaaatattggtgaagaagataaaaaatctgctgaagagaaaaaagacgctcttaaaactgctttagaaggtcaagatatagaagatattaaatctaaaaaagaagaacttgaaaaagtgattcaagaattatcagcaaaagtatatgagcaagcggctcaacagcaacaacaagcacaaggtgcaaatgctggtcaaaacaacgatagtactgtagaagatgctgaatttaaagaagtaaaagacgacgacaaaaaataa

SEQ ID NO: 7755 - DNA, 342 bp, Staphylococcus aureus
atgaaaaatacattccttatttgtgatgaatgtcaggcagtcaatataagaacgttacaaaagaagttggaaaaattagatcccgatgctgaaatcgtgataggttgtcaatcttattgtggacctggacgccgaaaaacattcacttttgttaataaccgcccactggctgcgcttactgaagaagaattaatcgaaaaagtttctcaacaattaaagaaaccacgtgatcctgaagaagaagagcgtttaagaaaacgacatgaagaacgtaaacgtcgtaaagaagaacaagatagaaagcttaaagaaaaattagaaaagcgaaaagcacaacaataa

SEQ ID NO: 7756 - DNA, 897 bp, Staphylococcus aureus
atgtttaaaagaattaaactaatcttaatagcaacgataatactatcaggatgttcaactaccaataacgaatccaacaatgaaacaaaatcagtaccagaagaaatggaagcttcaaaatatgtaggacaaggcttccaactacctgcagaaaaagatgcgattgaatttgcgaagaagcatcgtaaagaatttgaaaaagtaggtgaacaattctttaaagataactttggactaaaagttaaagctacaaatgttgtaggtaaagatgatggtgtagaagtttatgtgcattgcgaagatcatggcattgtatttaatgcaagtctacctttgtacaaagatgccatccatcaaaaaggatcaatgcgtagtaatgacaacggtgatgatatgagtatgatggtgggtacagtgctgagtggctttgaatatcgagcgcaaaaagaaaagtatgataatttatataaatttttaaaagaaaatgaaaagaaatatcaatatacaggttttactaaagaagcaattaacaagacgcaaaacgtcgggtatcaaaatgaatatttttatattacatatttatcaagaaatttaaaagaatatcgtaaatattacgaaccattgattcataaaaaggataaagaatttaaagaaggtatgcaacgagctagaaaagagctaaactatactgctaatactgatgttgtttctacacttttttctactaagaaaaactttactaaagacaatacagtagatgatgtgattgaattgagtaataaattaaaagataaacccaatatgcctcaaaaatctcaagttactattcaattaggaaaaccaagtataaatactaaaaagccgttttatgacgatataaatccaattgaaggatga

SEQ ID NO: 7757 - DNA, 867 bp, Staphylococcus aureus
atggaaaatgaatcaagtaaagacacgaatacagaaacaaaatcagtaccagaagaaatggaagcttcaaaatatgtaggacaaggcttccaaccacctgcagaaaaagatgcgattgaatttgcgaagaagcatcgtaaagaatttgaaaaagtaggtgaacaattctttaaagataactttggactaaaagttaaagctacaaatgttgtaggtaaagatgatggtgtagaagtttatgtgcattgcgaagatcatggcattgtatttaatgcaagtctacctttgtacaaagatgccatccatcaaaaaggatcaatgcgcagtaatgacaatggtgatgatatgagtatgatggtgggtacagtgctgagtggctttgaatatcgagcgcaaaaagaaaagtatgataacttatataaattcttcaaagaaaatgaaaagaaatatcaatatacaggctttacaaaagaggcaattaacaagacacaaaacgttggatatcaaaatgaatacttttatatcacatatttatcaagaaacttaaaagaatatcgtaaatattacgaaccgttgattcataaaaatgataaagaatttaaagagggtatgcaacgagctagaaaagagttagattatactgctaatagtaatacagtagcaacgttgtttagtacgaatgataaaaaaaatagaaaagaaaagataaataatgtaatagatttatccgagaaaattgaaagaacaaaagatatgccaatcaagaatactataactactcaattaggaaataaacttattggcacaaaaaaagctcgttttgatgataagaaagtagtgtcgtttggagcatttgaagatgaataa

SEQ ID NO: 7758 - DNA, 438 bp, Staphylococcus aureus
atggacatgaatttcgatttatacatgaacggtgttgtagaacaagcaaggaatgaaattgaatctgcgggatatgagcaattaactactgcagaagatgttgacaaagttcttaaacaagatggtacaacactagttatgatcaattctgtatgtggttgtgcaggtggtatcgcaagaccagcagcatcacatgctttacattatgacgtattacctgatcgtctagtgacagtatttgctggacaagataaagaagcgacacaaagagcgcgtgaatacttcgaaggttatgcgccttcaagtccgtcatttgcattagtaaaagatggaaagattacagaaatgattgaaagacatcaaatcgaaggtcatgatgtgatgaacgtaattaatcaattacaaacattattcaataaatattgtgaagaaagataa

SEQ ID NO: 7759 - DNA, 981 bp, Staphylococcus aureus
atgttaaagttaaatccttacaagattggatttagaacaataaaaacagcagtgggtatgactttaggtgtaattattagtaagctgttaggtttagataattatgcttcaagcgccatattagtcgtattatgtattaaacatacaaaagtacattcgctacaagcgattatttcaagattagtatcatgttttttagtattgtttttaggttcagcaatatttagtttattaggtcagagtccaattgtactcggtattatcgtattgttatttataccattaactgtcgtattaaaagtacaagaaggtgtcattacgagttgcgttatattacttcatgtttttaatgcaaaatcaattgatgcacatttaattgttaatgaaacattattactgttaattggactgagcattgcatttacaatgaatttaatgatgccaagtttagacaaacaactagacgaatacaaatgtaaaattgagcaacaaattgctgatatttttagtaaatatagttatatttgtgaaaaatatgaagataccattgcgattgaatttgaagtgttacttttaaatattaaaaaggcgaagtctatcgcgttccgagatgttaaaaatcattttgttagaaacgaaaattcatactatcattattttgatatgcgagaagagcaagtggaattgttaatgagaatgaaaccgctcatcgaaagtatctgtcataaagatccacttttaaatgatgtttcgtcactgctgaaagaaattggtctaaatgtgaatagtaatgactatacagcaatgcgtttacacaatttgtatgagacgcgtttgaaattggatgaactgccattgccaacaacacacaaagcgcttaactcgagagcaagtattattcaaatattaaatgaattagaagaatatttacaaatcaaatcgcaatttggttcattgaaaatgcatagtgaagtagcttaa

SEQ ID NO: 7760 - DNA, 933 bp, Staphylococcus aureus
atgctagaaagtaaatggggcttgagatttattgcctttcttttggcattgtttttctttttatctgttaataatgtttttggaaatatctttaacactggtaatcttggtcaaaagtctagtaaaacgattcaagatgtacccgttgaaattctttataacactaaagatttgcatttaacaaaagcgcctgaaacagttaatgtgactatttcaggaccacaatcaaagataataaaaattgaaaatccagaagatttaagagtagtgattgatttatcaaatgctaaagctggaaaatatcaagagaagtatcaagttaaagggttagctgatgacattcattattctgtaaaacctaaattagcaaatattacgcttgaaaacaaagtaactaaaaagatgacagttcaacctgatgtaagtcagagtgatattgatccactttataaaattacaaagcaagaagtttcaccacaaacagttaaagtaacaggtggagaagaacaattgaatgatatcgcttatttaaaagccacttttaaaactaataaaaagattaatggtgacacaaaagatgtcgcagaagtaacggcttttgataaaaaactgaataaattaaatgtatcgattcaacctaatgaagtgaatttacaagttaaagtagagccttttagcaaaaaggttaaagtaaatgttaaacagaaaggtagtttagcagatgataaagagttaagttcgattgatttagaagataaagaaattgaaatcttcggtagtcgagatgacttacaaaatataagcgaagttgatgcagaagtagatttagatggtatttcagaatcaactgaaaagactgtaaaaatcaatttaccagaacatgtcactaaagcacaaccaagtgaaacgaaggcttatataaatgtaaaataa

SEQ ID NO: 7761 - DNA, 897 bp, Staphylococcus aureus
ttgaatcatattcaagaagcgtttttaaatacattgaaagttgaacggaatttttcggaacatacattgaaatcatatcaagatgacttaattcagtttaatcaatttttagaacaagaacatttacagttgaaaacttttgaatacagagatgctagaaattatttgagctatttatattcaaatcatttgaaaagaacatctgtttctcgtaaaatctcaacgttaagaactttctatgaatattggatgacgcttgatgagaacattattaatccatttgttcaattagtacatccgaaaaaagaaaaatatcttccgcaattcttttacgaagaagaaatggaagcgttattcaaaactgtagaagaggacacttcaaaaaatttacgggatcgagttattcttgaattgttgtatgctacaggcatccgtgtttcggaattagtaaatattaaaaaacaagatatagatttttacgcgaatggtgttaccgtattaggaaaagggagcaaagagcgttttgtaccgtttggtgcttattgtagacaaagcatcgaaaattatttagaacatttcaaaccaattcagtcatgcaatcatgattttcttattttaaatatgaagggtgaagcaatcactgaacgcggtgtacgatatgttttaaatgatattgttaaacgaacagcaggcgtaagtgagattcatccccacaagctcagacatacatttgcaacgcatttattgaatcaaggtgcagacctaagaacagtacaatcgttattaggtcatgttaatttgtcaacaactggtaaatatacacacgtatctaaccaacaattaagaaaagtgtatctaaatgcacatcctcgagcgaaaaaggagaatgaaacatga

SEQ ID NO: 7762 - DNA, 1233 bp, Staphylococcus aureus
atgattatgttaagtattaagcatttaacgaaaatttattctggtaataaaaaggcagtagatgacatctctttagatattcaatctggggaatttatcgcatttattggaaccagtggaagtggtaaaacaactgctttaagaatgataaaccgtatgattgaagcgacagaaggacaaattgaaattgatggtaaagatgttcggagtatgaatcctgtcgaattacgtagaaatattggttatgttattcaacaaattgggttaatgcctcatatgacgattaaagagaatattgtattggtacccaaattgttgaaatggactaaagaagaaaaggataaacgtgcaaaggaattaattaaacttgtggatttaccggagtcatttttagagcgttatccagcagaactatcaggtgggcaacaacaacgtatcggtgtcgtaagagcacttgcggccgaacaagatattattttaatggatgaaccttttggtgcattggatcctattacgagagatacgttacaagatttagttaaaacgttacaacgaaaattaggcaagacgtttatctttgtaacacatgatatggatgaagcgattaaattagcagacaaaatttgtattatgtcagaaggtaaggtggtgcaatttgatacaccagacaatattttaagacatcccgcaaatgattttgtacgtgattttataggacaaaatagactgattcaagaccgtcccaatgacaagactgtagaaggtgtaatgattaaaccaatcacgatacaggcagatgcaacgcttaatgatgctgttcatattatgagacaaaagcgtgttgatactatttttgtagtagatagtaataaccatttactaggtttcttagacattgaagatataaatcagggtatacgtggacacaaaagtttacgagacaccatgcaacaacatatttataccgttcaaattgattctaaattacaagattctgtacgtacgattttaaaaagaaacgttaggaatgtacctgtcgtagatgataagcaacgtttagtaggactgattacgcgtgccaatgttgttgacattgtatatgacacgatttggggcgatagtgaggatgcagtgcaaacagaacatgtgggggaagacactgtgtcctcaaaaatgcatgagcaacacactactaatgtcaaagtacgtgacataggagatgataaatcatga

SEQ ID NO: 7763 - DNA, 1227 bp, Staphylococcus aureus
atgaagaaccaattgatagatagattaacaagatatacgacaattgatacgcaatctgatccaaaatctacaacaacaccttcaactgaaaagcaatgggatttgttacatttattagaaaaagaattacaacaattaggattgccaactgatttagatgaaaatggctacttatttgctacattagaaagtaacatcgatgccgacgtcccaacagttggatttttggcgcatgttgatacatcacctgatttcaatgcttcaaatgttaaaccgcaaattattgaaaactatgatggtaagccatacaaactaggcaatactaaacgtgtcttagatcctaaagtatttccagaacttaacagtttagttggtcatacattaatggtaactgatggtacatcgttactaggtgcagacgataaagcgggtattgtggaaattatggaagctatttgttatttacaagaacatccagaaattaaacatggtaccattcgcattggatttacaccagacgaagaaatcggtcgtggtccacataaatttgatgttgaccgcttcaatgctgattttgcttatactatggatggtagtcaatatggagaattacaatatgaaagctttaacgctgctgaagcggttattacatgccacggtgtaaatgttcatcctggttcagctaaaaatgcaatggtaaacgcaatacgtttaggtgaacaattcgatagtttgctacctgatagtgaagttccggagcgaacagaaggatacgaaggcttttatcacttaatgaactttgaaggaactgttgaaaaagcaactttgcaatacattattcgtgatcatgataaaaaacaattcgaattgcgtaagaaacgtattttagaaatacgtgacgatatcaatgcccattttgaaaattatccagttaaagttgatatatcggatcaatatttcaatatggcagaaaaaatattaccattgcctcatattattgatatacctaaacgtgtctttgccaaattagatattccagcaaacactgaacctattcgtggtggtacagatggttcacaattgtcatttatggggttaccaactccaaacatctttacaggttgcggtaacttccacggcccatatgaatatgcatccattgatgttatggaaaaagcagtacaagtaatcattggaattgtagaagatatcgctgaaaatcactaa

SEQ ID NO: 7764 - DNA, 927 bp, Staphylococcus aureus
atgagtaaaacagcaattatttttccgggacaaggtgcccaaaaagttggtatggcacaagatttgtttaataacaatgatcaagcaactgaaattttaacttcagcagcaaagacgttagactttgatattttagagacaatgtttactgatgaagaaggtaaattgggtgaaactgaaaacacgcaaccagctttattgacgcatagttcggcattattagcagcgctaaaaaatttgaatcctgattttactatggggcatagtttaggtgaatattcaagtttagttgcagctgacgtattatcatttgaagatgcagttaaaattgttagaaaacgtggtcaattaatggcgcaagcatttcctactggtgtaggaagcatggctgcagtattgggattagattttgataaagtcgatgaaatttgtaagtcattatcatctgatgacaaaataattgaaccagcaaacattaattgcccaggtcaaattgttgtttcaggtcacaaagctttaattgatgagctagtagaaaaaggtaaatcattaggtgcaaaacgtgtcatgcctttagcagtatctggaccattccattcatcgctaatgaaagtgattgaagaagatttttcaagttacattaatcaatttgaatggcgtgatgctaagtttcctgtagttcaaaatgtaaatgcgcaaggtgaaactgacaaagaagtaattaaatctaatatggtcaagcaattatattcaccagtacaattcattaactcaacagaatggctaatagaccaaggtgttgatcattttattgaaattggtcctggaaaagttttatctggcttaattaaaaaaataaatagagatgttaagttaacatcaattcaaactttagaagatgtgaaaggatggaatgaaaatgactaa

SEQ ID NO: 7765 - DNA, 741 bp, Staphylococcus aureus
atgaaaatgactaagagtgctttagtaacaggtgcatcaagaggaattggacgtagtattgcgttacaattagcagaagaaggatataatgtagcagtaaactatgcaggcagcaaagagaaagctgaagcagtagtcgaagaaatcaaagctaaaggtgttgacagttttgcgattcaagcaaatgttgccgatgctgatgaagttaaagcaatgattaaagaagtagttagccaatttggttctttagatgttttagtaaataatgcaggtattactcgcgataatttattaatgcgtatgaaagaacaagagtgggatgatgttattgacacaaacttaaaaggtgtatttaactgtatccaaaaagcaacaccacaaatgttaagacaacgtagtggtgctatcatcaatttatcaagtgttgttggagcagtaggtaatccgggacaagcaaactatgttgcaacaaaagcaggtgttattggtttaactaaatctgcggcgcgtgaattagcatctcgtggtatcactgtaaatgcagttgcacctggttttattgtttctgatatgacagatgctttaagtgatgagcttaaagaacaaatgttgactcaaattccgttagcacgttttggtcaagacacagatattgctaatacagtagcgttcttagcatcagacaaagcaaaatatattacaggtcaaacaatccatgtaaatggtggaatgtacatgtaa

SEQ ID NO: 7766 - DNA, 720 bp, Staphylococcus aureus
atgactgtagaatggttagcagaacaattaaaagaacataatattgaattaactgagactcaaaaacaacagtttcaaacatattatcgtttacttgttgaatggaatgaaaagatgaatttgacaagtattacagatgaacacgatgtatatttgaaacatttttatgattccattgcacctagtttttattttgattttaatcagcctataagtatatgtgatgtaggcgctggagctggttttccaagtattccgttaaaaataatgtttccgcagttaaaagtgacgattgttgattcattaaataagcgtattcaatttttaaaccatttagcgtcagaattacaattacaggatgtcagctttatacacgatagagcagaaacatttggtaagggtgtctacagggagtcttatgatgttgttactgcaagagcagtagctagattatccgtgttgagtgaattgtgtttaccgctaattaaaaaaggtggacagtttgttgcattaaaatcttcaaaaggtgaagaagaattagaagaagcaaaatttgcaattagtgtgttaggtggtaacgttacagaaacacatacctttaaattgccagaagatgctggagagcgccagatgttcattattgataaaaaaagacagacgccgaaaaagtacccaagaaaaccagggacgcctaataagactcctttacttgaaaaataa

SEQ ID NO: 7767 - DNA, 1497 bp, Staphylococcus aureus
atggaaaaatatattttatctatagaccaaggaacaacaagctcaagagcgattttattcaatcaaaaaggggaaattgcaggggtagcacaacgtgagtttaagcaatattttccacaatcaggttgggttgaacatgatgcaaatgaaatttggacatctgtgttagctgtaatgacggaagtaattaatgaaaatgatgttagagctgatcaaattgcaggaatcggtattacaaaccaacgtgaaacaacggttgtttgggacaaacatactggccgcccaatttatcacgcaattgtttggcaatcacgtcaaacacaatcaatttgttcagaattaaaacaacaaggatatgaacaaacatttagagataagacaggattacttttagatccgtattttgcaggtacaaaagttaaatggattctagacaatgttgaaggtgcacgagaaaaagcagaaaatggcgatctattatttggaacgattgatacttggttagtatggaaattatcaggaaaagctgcgcatattactgattattcaaatgcgagtcgtacattaatgtttaatatccatgatttagaatgggacgatgagttattagaactacttacagtacctaaaaatatgttgccagaagttaaaccttcaagtgaaatatatggtaagacaattgattaccacttctatggtcaagaagtaccaatcgctggtgtagctggtgatcaacaagcagcattatttggacaagcttgcttcgaatgtggtgacgtgaaaaacacatatggaactggtggcttcatgttaatgaatacaggtgacaaagcggttaaatctgaaagtggtttattaacaacaattgcttatggtattgatggaaaagtaaattatgcgcttgaaggttccatctttgtttcgggttcagcaatccaatggttacgtgatggattaagaatgattaattcagcaccacaatcagaaagttatgcgacacgagttgactctactgagggtgtttatgttgttccagcttttgtaggtttaggaacaccatattgggattctgaagcacgtggtgcgattttcggtttaacacgtggaactgaaaaagagcactttatccgtgcaactttagaatcattatgttaccaaactcgtgacgttatggaagcaatgtcaaaagactctggtattgatgtccaaagtttacgtgtcgatggtggtgcagttaaaaataactttattatgcagttccaagcagacattgttaatacttctgttgaaagacctgaaattcaagaaactacagctttaggtgctgcatttttagcaggtttagcagttggattctgggagagtaaagatgatatcgctaaaaactggaaattagaagaaaaattcgatccgaaaatggatgaaggcgaaagagaaaaattatatagaggttggaaaaaagctgttgaagcaacacaagtttttaaaacagaataa

SEQ ID NO: 7768 - DNA, 726 bp, Staphylococcus aureus
atggctgacaataaagcaaataaagagcaagtacatcgcgtttttcaaaatatttcaaaaaaatatgatagattaaataatattattagttttgagcagcataaagtatggagaaaacgcgtcatgaaagacatgggtgttagaaaagggacgaaagcattagatgtttgttgtggtactggtgattggacaatcgcattaagcaaagctgtaggaccaacaggtgaagttactggtattgactttagtgagaatatgttagaagtaggaaaagaaaaaactgcttcaatggaaaatgttaaacttgttcatggtgatgcaatggaattgccgtttgaagacaattcttttgattatgtaacaattgggtttggattaagaaatgtgccagactatttagtcgcgttaaaagaaatgaatagagtacttaaaccaggtggtatggtggtatgtcttgaaacgagccaaccaactttgccagtctttaaacaaatgtatgcactatactttaaatttgttatgcctatttttggaaaattatttgcaaaatcaaaagaagaatatgaatggttacagcaatctacgtttaattttcctggaaaagaagagttgaagcgcatgtttgaagaagcaggtttcataaatgtaagagtacgtagttttacagggggcgttgctgcaatgcaccttggctataaagaaaaagataataccaaaggtgattaa

SEQ ID NO: 7769 - DNA, 960 bp, Staphylococcus aureus
gtggcaaagttaaacatgaacaatgaaattaagaaagtggaacaacgacttgaaaaggcaataaaaagtaaagattctgtattagaacaggcatcattacacttattgtcttctggtggtaaaagagtacgcccagcatttgttattctgagtagccaatttggcaaagatgaacaaacgtctgaacaaacgtatcaagttgcagtcgcattagagttaattcatatggcaacacttgttcatgatgacgttattgataaaagcgacaagcgtcgaggcaagttaaccatatcaaagaaatgggatcagacaactgctattttaactgggaattttttattggcattaggacttgaacacttaatggccgttaaagataatcgtgtacatcaattgatatctgaatctatcgttgatgtttgtagaggggaacttttccaatttcaagaccaatttaacagtcaacagacaattattaattatttacgacgtatcaatcgcaaaacagcactgttaattcaaatatcaactgaagttggtgcaattacttctcaatctgataaagagactgtacgaaaattgaaaatgattggtcattatataggtatgagcttccaaatcattgatgatgtattagacttcacaagtaccgaaaagaaattaggtaagccggtcggaagtgatttgcttaatggtcatattacgttaccgattttattagaaatgcgtaaaaatccagacttcaaattgaaaatcgaacagttacgtcgtgatagtgaacgcaaagaatttgaagaatgtatccaaatcattagaaaatctgacagcatcgatgaggctaaggcagtaagttcgaagtatttaagtaaagctttgaatttgatttctgagttaccagatggacatccgaaatcactacttttaagtttgacgaaaaaaatggggtcaagaaacacatag

SEQ ID NO: 7770 - DNA, 498 bp, Staphylococcus aureus
atgaaaaccatgaaaaaatatatcaaaacagcatttttttgtagtatgtattggttaattgttcaactaaatatagcaaatttaggtacaagaattcctgataagtattttcgtcagaagtacataatatttaaatcatttaattttgagaagcatggaaaattttggaacaaatggttttacgtaagaaaatggaaacataagattttagatggtcatcagcttaatcaaaatatatatgatcagcgtcatttaatgacaatcaatactgatgaaattgaaaaaatgattatagagacaaagagggcagagttgattcattggatatcgatacttccagtcatcatattcaataaaggctctcgtttagtaaagtatataaatattttctatgcaatgatagctaatgttccaatcattattgtgcaacgctataatcgaccgagattaacgcagttactacgcatattaaaacgaagaggtgaacgtcatgactaa

SEQ ID NO: 7771 - DNA, 1494 bp, Staphylococcus aureus
atgactaaacatatcatcgttattggtggtggcttaggtgggatttctgcagcaattcgaatggcacaaagtggctattcggtctcattatatgaacaaaatactcatataggaggcaaagtgaatcgtcatgaatcagatggctttggctttgatttaggtccatctattttaacgatgccttatatttttgaaaaattattcgaatatagcaagaagcaaatgtcagactacgttacaatcaagcgtttgccacatcaatggcgtagcttttttccagatggcacgactatcgatttgtatgaaggtattaaagaaacaggtcagcataatgcgatattgtcgaaacaggatatagaggaactgcaaaattatttgaattatacaagacgaatcgatcgtattactgaaaaagggtattttaactatggtttagatacactatctcaaattattaaatttcatgggccattaaatgctcttattaattatgattatgtacatactatgcaacaggccatagacaagcgtatctcgaatccatacttgcgacaaatgttaggctattttatcaaatatgtaggttcttcatcatacgatgcgccagctgtattatctatgttattccatatgcaacaagagcaaggcctttggtatgtagaaggtggaatccatcatttagccaatgccttggaaaagctagcgcgtgaagaaggtgtcacaattcatacaggtgcacgtgtggacaatattaaaacatatcaaagacgtgtgacgggtgtcagattagatacaggtgagtttgtaaaggcagattatattatttcaaatatggaagtcatacctacttataaatatttaattcaccttgatactcaacgattaaacaaattagagagggaatttgagccggcaagctcaggatatgtgatgcatttaggtgttgcttgccaatacccgcaattagcacatcataatttcttttttacggaaaatgcttatctcaattatcaacaagtttttcatgaaaaggtattgccagatgatccgaccatttatctagtaaatacgaataaaactgatcacacacaagcgccagtaggttatgaaaatatcaaagtcttaccacatattccatatattcaagatcagccttttaccactgaagattatgcgaagtttagggataaaattttggataaattagaaaaaatgggacttactgatttaagaaaacacattatttatgaagatgtttggacaccggaggatattgaaaaaaattatcgttctaatcgtggtgcaatatatggtgttgtagcagataaaaagaaaaacaaaggatttaaatttcctaaagaaagtcagtattttgaaaacttgtactttgtaggtggatcagtaaatcctggtggtggcatgccaatggttacattaagtgggcaacaagtcgcagacaaaataaacgcgcgagaagcgaagaataggaagtga

SEQ ID NO: 7772 - DNA, 1347 bp, Staphylococcus aureus
atgcaagcaatccttaattttatagtcgatattttaagtcaaccagccattcttgttgcactgattgcctttataggtttaatcgttcagaaaaaacctgccgcaacgatcacttcaggaaccattaaaacgatattaggcttcttaattttaagtgcaggtgctgatgtcgtcgttcgatctcttgaaccattcggcaaaatattccaacacgcatttggtgtgcaaggtatcgtacctaacaacgaagctatcgtctcactagccttaaaagattttggaacaacagctgcactcatcatggtctgtggcatgattgttaatattttaattgctcgcttcactaatttaaaatatatctttttaacaggtcatcatacattttacatggctgcgtttttagcaatcattttaacagtcagtcatattaaaggctggctaacaattgttatcggcgcactcgtattaggattaatcatggcagtattacctgcattactccaacctacgatgcgaaaaattacagggaatgaccaagtagcgttaggtcattttggctcaatcagttactttgccgcaggtgctgtaggtcaattattcaaaggtaagtctaaatcaacggaagagattaaatttccaaaaggcttaagtttcttacgagaaagtacaattagtatctcgattacaatggcattactttacttcatcgcatgcttatttgcgggcgttagttatgtacacgaatctattagtgatggtcaaaactttattgtcttttctttaattcaaggtgtgacatttgctgctggtgtatttattattttaacgggcgttcgtttaatcttagctgaaatcgtcccagcatttaaaggaatttctgaaaagcttgtaccaaattctaaacctgcattagactgccctattgtgttcccttatgcacaaaatgcagtattaattggattctttgtcagctttattacaggtgtcatcggtatgtttatcttattcttatttggtggcgtcgtcattttacctggcgtagttgcacacttcttcttaggtgcaacggctgctgtattcggtaatgcaagaggcggtattaaaggtgctgttgctggcgccgctctaaatggtatcctaatcacgtttttaccattattattcttgccatttttaggcgaattaggtggtgctgcaacaacattctcagatacagactttttaactgtcggtatcgtgttcggtaacgcagtaaaatatatgggattatttggtgcgattctatttattattatcgtaggtgcgacagcaattttattaaaaggccgtcaaaagccacagcaatag

SEQ ID NO: 7773 - DNA, 681 bp, Staphylococcus aureus
atgaaatttaaagcgatagcaaaagcaagtttagcattgggaatgttagcaacaggtgtaattacatcgaatgtacaatcagtacaagcgaaaacagaagttaaacaacaaagtgaatcagagttgaaacactattataataaaccggttttagagcgtaaaaatgttactggatataaatatactgaaaaaggtaaagattatatagatgttatagtagacaatcaatattctcaaatttctttagttggatctgataaagacaaatttaaagatggagacaactcgaatatagatgtgtttatccttagagaaggtgacagtagacaagcaacaaattactcaattggtggcgtaacaaaaacaaacagtcaaccttttattgactatatacacacaccaatccttgaaatcaagaaaggtaaagaagaaccacaaagtagtttataccaaatttataaagaagacatctcattgaaagaacttgattatagattaagagaacgtgcaatcaaacaacacggcttgtattcaaatggtcttaaacaaggtcaaattacaattacaatgaaagatggcaaatcacatactatcgatttaagtcaaaaacttgaaaaagaacgtatgggtgattctatcgacggcagacaaatacaaaaaattctagtagaaatgaaataa

SEQ ID NO: 7774 - DNA, 951 bp, Staphylococcus aureus
atgaaaaaattaacagcagcagcgattgcaacgatgggcttcgctacatttacaatggcgcatcaagcagatgcagcagaaacgacaaacacccaacaagcacatacactaatgtcaacacaatcacaagacgtatcttatggtacttattatacaattgattctaatggggattatcatcacacacctgatggtaactggaatcaagcaatgtttgataataaagaatatagctatacattcgtagatgctcaaggacatacgcattatttttataactgttatccaaaaaatgcaaatgccaatggaagcggccaaacatatgtgaatccagcaacagcaggagataacaatgactacacagcgagtcaaagccaacagcatattaatcaatatggttatcaatcaaatgtaggtccagacgcgagctattattcacatagtaacaacaaccaagcgtataacagccatgatggtaatggaaaggtcaattatcctaatggcacatctaatcaaaatggtggatcagcaagtaaagcgacagctagtggtcatgcgaaagacgcaagctggttaacaagtcgtaaacaactacaaccatatggacaatatcacggtggtggtgcgcattacggtgtcgactatgcaatgcctgaaaattcaccagtttactcattaactgatggtacagtagtacaagcaggttggagtaactatggtggcggcaatcaagtaactattaaagaagcgaacagtaataactaccaatggtatatgcataataatcgtttaactgtttcagctggtgataaagtcaaagctggtgaccaaattgcatattcaggtagtacgggtaattcaacagcgcctcacgtacacttccaacgtatgtctggtggcatcggtaatcaatatgcagtagacccaacgtcatacttgcaaagtagataa

SEQ ID NO: 7775 - DNA, 885 bp, Staphylococcus aureus
atgaaaattattcagttagaatacttcttggctatcgtgaaatataatagttttactaaagctgcacaatttttacatattagccagccatctttaactgctacgattaaaaaaatggaagcagatttaggttatgacttatttacacgttcaacaaaagacatcaagattaccgaaaaaggaatacagttttatcgttatgcgagcgaattagttcaacaatatcgatccacgatggaaaaaatgtatgatttaagcgttacatcagaaccaaggataaaaattgggactcttgaatctacgaatcaatggattgcgaatttaattcgaaagcaccattccgactaccctgaacagcaatatcgtttatatgaaatacatgacaaacatcaatctatagagcaatcactgaattttaatattcatttagctataacaaatgaaaaaataacccacgaagatataagatccattcctttatatgaggaatcttacattttattagcacccaaggaaacatttaaaaatcaaaattgggtagatgttgaaaatttgccactcatattaccaaacaaaaattctcaagtgcgcaaacacttagatgactattttaatagaagaaatattcgtccaaatgtcgttgtagaaacagatcgattcgaatcagcagttggatttgttcatctcggcttaggttacgctatcattccgagattttattaccaatcatttcacacgtctaatttagaatataaaaaaattcgtccaaacttaggccgaaaaatttatatcaattaccataaaaaacgcaaacactccgaacaagtacatacattcgtacaacaatgccaagattatttatatggacttttagaggctctttaa

SEQ ID NO: 7776 - DNA, 420 bp, Staphylococcus aureus
atgttaaaatctattaatcatatatgcttttcagtcagaaatttaaacgattcaatacatttttatagagatattttacttgggaaattgctattgactggtaaaaaaactgcttattttgagcttgcaggcctatggattgctttaaatgaagaaaaagatataccacgtaatgaaattcacttttcatatacacatatagctttcactatagatgacagcgaatttaaatattggcatcagaggttaaaagataataacgtgaatattttagaaggaagagttagagatattagagatagacaatcaatttactttactgaccctgatggtcataagctagaattacatactggcacacttgagaacagattaaattattataaagaggctaaaccacatatgacattttacaaataa

SEQ ID NO: 7777 - DNA, 2991 bp, Staphylococcus aureus
atgaacactatttacgaaccgtcaagtatttgtatgattagaacacctttattatcagttgaatttttcaatttatttttaaatactgaacaaattaaatatagcgacttacaattaaatgctcagatgaaagaatcaatcctaacaacaacatttaacttatattgtactttacaagaaataaattttgatggcgataacaagaaggttagagatgctaaagaaagtttattaaaatatttaattagaatgtcaacacgtccaactccatttggattattaagtggtattaatttggggcattttgtaaatgaaccaacacgtcttaaagttggaaatagtattcaaaaatatgtgaaagtcgatggcgaatggttgtataaactggttagttatattgagagtattgatgaatattatcaaaatttgaaagttatttggaatagtaaagcacatattatcaatgatcgaatatatttaaatgaacaaagtgctatttatttaaacaacaataaagatacatctttttccattaaaaatagcgaattactcgtattcatcaaaaccactgtgacgaataataatattactttttcaaatttagctgaaaagataaatcaagaatttgaaattaatgatattactaaagtgaaagtatatatccataatcttgtctcaaaggaaattatatattcaacaatcagaccaccgttatcatatagcgataatttaaattatattttaaataaactttctttacataatgatgattttgtgaaaaaaattagagaaatccagaaattgatattagcttatgaaaaaactgaaattggatttggcgaggaattatataaagacattattcatcatatgaaggcactattcaaatgtaaaaactatcttcaaattgataccaaaattgacatgattaacaattatttacatcaagatatagcaacaaatatatctgaagcagcgtacttattgtggcttttatcaagaaataatattggattcacagatttgaaagttcttcacaaccgttttattgaaaagtatggatttgaacaactcgtgaatattaaagatttgatttcagatataacaggtttcgggacaacaatttttcaagaagaagaaaccgatggaaataatattgtaatgcttaagcaaaaatttttacatgccttgagaaataacgatgagatagtcataaatgaaaaagatgtagagtcattgattaacgataatgaaatcaatcattatcatgcgccaatgagtgcagatgtttatgctgaactttatttaggacgtttttacaatcagtacaatgagctcattgttattagtcctttaacggcgtcttttaatgctggcgctacatttgggcgatttcatcatttaattgatactgaaactttagcaaaattagaacatgaaaaaggacattattatcagaagatgatatgtgatgacaatgtagaaatgatttctataaataacataccgaaatatccgagaaatcataatgtattaactaatcatgactcatacgaatattcattgaatttaggaagtagtaatagttattcaaagtatgagcttaccttagatgatatttatgttggtgctacctttaacaaattatatttatattctagccaactaaataaaagggtactatttgaatcaaacaatatgtataactttttaaaagaatgtaatttatatcgattgttacgagaaatttcaatggaatctgtgaaatgcattgaacctatgaatgatgtgagtattgattcatttagttattcaccacgaatcagatataaaaatgtcattcttaaaccagcatattggaaaattaacgagatggtattacctttacctaaaaatgaagaatgggatcaacaatttttgaaatatcaagaacaattcaatatacctaatatcgtgaatttagtttatggagataacaagcttctactaaatttatcattagctaatcatagatatttattgatgaaagaatataagaagcataaacgtgtacgtttagtagaatcatttttacctcaatcaaagaatgatcatgtgtatgaaattgttacaccaatttataaaaaatcatcttatcgaggacccgaaatcgaaattccaaaatataaaaatacagatattgaatatgacaaagactggtttgcattacatattcatatcgataagccatcgcaagatacatttatcatcgacaatttgtatccatttgtaaaacatcttaaagataagggagatatagatcaatattttttaatgcgttatatcaaacaaggtgacattttaaagttgaggttattcaggaatgacgaaaattacgcagaaatatacagcatcttgaagaattggttaccacatgttcgacaaacgacagaagtttcagattatgaatttgtatcatacgagccagaattttttagatatggtggaaagaacacgattaatgaaatagaagccttctttgaatatgacacgaatttagctgtcaatattattgaaaatgattttaagtttgatcgaccatatattgttgctatttcaataatgtatttatttgagatgttttcaatttctaatgaagagcgtatggaaattgttaataactatgtacctacatcatttaaaagtaaagatattagaccttttaaaaatgaacttgtaactatatgtaatcctgctaataattttgaatatatggctaaacactatagtggtatttatcgaattttaaaagatggcaaccaaattttgagcaaattaaatgaagggcttaaaaaaactttaactactaaaaggtcaaggattattggcagcttaattcatatgcgctgcaatcgaatatttggcattgataaggatcaagaaacatttgttttatctattgtaaaagaaattgttaaaactcaaaagcattggtgtggtgacaaaaatgat

SEQ ID NO: 7778 - DNA, 1716 bp, Staphylococcus aureus
ttggtgaaacattatttgactaaatttgtagcaatgctaataactgctgctatggtgtgtagctttgggttactgaaaagtcaggcagcagaacaacaaagtattagtgatgtatatagtgtgataacggatgcgaaatctgcactttctaataattcgatatcgaatgacaataagcagaaagcaattgagcaagtggtaagtgcagttaagaaattatcgcttgaagataatagtgaaggtaatgctgtcaaatcagatgtgagaaagcttgaagatgcaaaagcgaatgataatcaaaaagatacactttcgcaattaacgaagtcattaattgcttatgaagagaaattggctagtaaagatgcgggttctaaaattaaactattgcaacagcaagtcgatgccaaagatgctgcgatgacaaaagcgattaaagataaaaataaagcggaattagaatctttgaacaatagtttgaatcagatttggacaagtaatgaaacagtgattcgcaattatgacgcaaatcaatatggacaaattgaagtcgcattattacaacttagaattgcaattcataagtcaccattagatacggcaaaagtgtcacatgcttggacaacttttaaatcaaatattgatcatgtcgataaaaaaagtgatacgtctgcaaatgatcaataccatgtatcacaattaaatgatgcgttagagaaggcgattaaagctatcgacgacaatcaattgtcggatgctgatgctgcgcttacacattttatagaaatttggccgtatgttgaaggtcaaattcaaactaaagacggggctttgtatacgaaaattgaagataaaataccatattatcaaagtgtattagacgaacataataaatcgcatgtcaaagatggtttagtagatataaacaatcaaattaaagaggttgttggccatagttatagctttgtcgatgtgatgattatctttttacgtgaaggactagaagtgttattaattgtaatgacattgactaccatgacgcgtaaagtcaaagataataaggggactgcaagtgtgattggtggtgcaattgccggacttgtactgagtattatcttagcaattacgtttgtagaaactttagggaatagtggcattcttcgtgaaagtatggaagcgggattaggtatcgttgcggtcatattaatgtttatcgttggtgtttggatgcacaaacgttcaaatgcgaaacgctggaatgatatgattaaaaatatgtatgccaatgcgattagtaatggtaatttggtattgttagcgacgattggtttaatatctgtgttgcgtgaaggtgttgaggttatcattttctatatggggatgataggtgagctagcgacaaaagattttattattggtattgccttggccatagtgatattaattgtctttgcggtattatttagatttatcgtcagattgatacctatattctatatatttagagtattgtcgatctttatttttattatgggattcaaaatgcttggcgtaagtattcaaaagttacaattattaggtgcgatgccaagacatgttattgaaggattcccaacgattaactggttgggcttctatccaagttatgaaccattgatagcacaagctgcttatattatggtagttgctatcttaatctttaaatttaaaaaataa

SEQ ID NO: 7779 - DNA, 1071 bp, Staphylococcus aureus
atgaatatgaaaacaattgctaaaaccagtttagcactagggcttttaacaacaggcgcaattacagtaacgacgcaatcggtcaaagcagaaaaaatacaatcaactaaagttgacaaagtaccaacgcttaaagcagagcgattagcaatgataaacataacagcaggtgcaaattcagcgacaacacaagcagctaacacaagacaagaacgcacgcctaaactcgaaaaggcaccaaatactaatgaggaaaaaacctcagcttccaaaatagaaaaaatatcacaacctaaacaagaagagcagaaatcgcttaatatatcagcaacgccagcgcctaaacaagaacaatcacaaacgacaaccgaatccacaacgccgaaaactaaagtgacaacacctccatcaacaaacacgccacaaccaatgcaatctactaaatcagacacaccacaatctccaaccataaaacaagcacaaacagatatgactcctaaatatgaagatttaagagcgtattacacgaaaccgagttttgaatttgaaaagcagtttggatttttgctcaaaccatggacgacggttaggtttatgaatgttattccaaataggttcatctataaaatagctttagttggaaaagatgagaaaaaatataaagatggaccttacgataatatcgatgtatttatcgttttagaagacaataaatatcaattaaaaaaatattctgtcggtggcatcacgaagactaatagtaaaaaagttgatcacaaagcagaattaagcgttactaaaaaagataatcaaggtatgatttcacgcgatgtttcagaatacatgattactaaggaagagatttccttgaaagagcttgattttaaattgagaaaacaacttattgaaaaacataatctttacggtaacatgggttcaggaacaatcgttattaaaatgaaaaacggtgggaagtatacgtttgaattacacaaaaaactgcaagagcatcgtatggcagatgtcatagaaggtacaaacattgataaaattgaagtgaatataaaataa

SEQ ID NO: 7780 - DNA, 1422 bp, Staphylococcus aureus
atgtcagagaaacaatatgatttagtcgttctcggtggaggtactgcaggatatgttgctgcgatacgtgcgtctcaattaggtaagaaagtggcaatagtagaacgacaactattaggaggtacttgtctccataaaggttgtattcctactaaatcgctgcttaaatctgctgaagtatttcaaacagtaaaacaggcagcaatgtttggcgttgatgtcaaagatgctaatgttaattttgaaaatatgttggcacgaaaagaagacattattaatcaaatgtatcaaggtgtaaagcatttaatgcaacacaatcacattgacatttataatggcacgggacgtattctaggtacatctatattttcacctcaaagtggcacaatttctgtcgaatatgaagatggtgaatcagacttattacccaaccaatttgtattaattgcaactggttcttcgcctgcagagttgccattcttatcatttgatcatgataaaattttatctagcgatgatatattatcattaaagacgttaccatcaagtattggtattattggtggtggtgttatcggaatggaatttgcatcattgatgatagatttaggtgttgacgtaacagttatagaagcaggtgaaagaattttaccaactgaaagtaaacaagcttcacaactattaaaaaaatcattgtcagcacgtggtgttaaattctatgagggaataaaactttctgaaaatgatataaatgttaacgaagatggtgttacgtttgaaatttcttcagacataattaaagtagataaagtgttgctatcgattggtagaaaacctaacacatcagatattggtttaaacaacactaaaataaaactttctacatcaggacatattttaacgaacgaatttcaacaaactgaagataaacatatttatgcagctggtgattgtataggaaaattacaattggcacatgttggatcaaaagaaggtgttgtggctgttgatcatatgtttgaggggaacccaatcccagtaaactataacatgatgcctaagtgtatttattcacaacctgaaattgcttctatcggtttaaacattgaacaagcaaaggcagagggaatgaaagttaaaagttttaaagtaccatttaaagcaattggtaaagcagtgattgatagccatgacgcaaacgaagggtatagcgaaatggtgattgatcaatcaactgaagaaattgtgggtattaatatgattggtccacatgtaacagaattgattaatgaggcatcactgttacagttcatgaatggctcggcattagaattaggactaacaacacacgcacatccttccatctctgaagtgttgatggaattaggattgaaagcagaaagtagagctattcacgtataa

SEQ ID NO: 7781 - DNA, 993 bp, Staphylococcus aureus
atgattgattataaatcattaggccttagcgaagaagacctaaaagtaatatataaatggatggatttaggtagaaaaatagatgaaagactgtggttattgaaccgtgcaggtaaaattccatttgttgtaagtggtcaaggacaagaagcaactcagattgggatggcatacgcattagaagaaggtgatattacagcgccttattatagagatctagctttcgttacttatatgggtatctcagcgtatgatacgtttttatcagcgtttggaaagaaagacgatgttaactctggtggaaaacaaatgccatcacactttagtagtagagctaagaatattttgtctcaaagttcaccggtagcaactcaaataccccatgctgttggtgctgctttagctttaaaaatggatggtaagaagaaaattgcaacagcaactgttggtgaaggtagctcaaaccaaggtgacttccatgaaggtttaaacttcgcgggtgtacacaaacttccttttgtatgtgtcattataaataataaatatgcaatttcagtacctgattcattacaatacgcagctgaaaaattatcggatagagcacttggttacggtatacatggtgaacaagtagatggtaatgatccattagcaatgtataaagcgatgaaagaagcaagagatcgagctatttctggtcaaggttcaactttgattgaagcagtaacaagtcgtatgacagctcattcatcagatgatgacgaccaatatcgtacgaaagaagagcgtgaagcgcttaaaaaagctgactgcaatgaaaagttcaaaaaagagttgctttcagctggcattatcgatgatgcttggttggcagaaatagaagcggagcataaagacatcatcaataaagcgacaaaggctgctgaagacgcgccatatccaagtgtcgaagaagcctatgcatttgtgtacgaagaagggagtcttaactaa

SEQ ID NO: 7782 - DNA, 438 bp, Staphylococcus aureus
atgcgtcaaacatttatggcaaatgaatcaaacattgagcgcaaatggtatgttatcgatgctgaaggccaaacattaggtcgtttatcatcagaagtagcatctatcttacgcggtaaaaataaagtaacttacacaccacacgttgatactggtgattatgtaatcgttattaatgcatcaaaaatcgaatttactggtaacaaagaaactgacaaagtttactaccgtcactcaaatcatccaggtggtatcaaatcaatcactgctggtgaattaagaagaactaacccagaacgtttaattgaaaactcaattaaaggtatgttaccaagcactcgtttaggcgaaaaacaaggtaaaaaattatttgtatatggtggcgctgaacatccacacgctgcacaacaaccagaaaactacgaattacgtggttaa

SEQ ID NO: 7783 - DNA, 393 bp, Staphylococcus aureus
ttggcacaagttgaatatagaggcacaggccgtcgtaaaaactcagtagcacgtgtacgtttagtaccaggtgaaggtaacatcacagttaataaccgtgacgtacgcgaatacttaccattcgaatcattaattttagacttaaaccaaccatttgatgtaactgaaactaaaggtaactatgatgttttagttaacgttcatggtggtggtttcactggacaagctcaagctatccgtcacggaatcgctcgtgcattattagaagcagatcctgaatacagaggttctttaaaacgcgctggattacttactcgtgacccacgtatgaaagaacgtaaaaaaccaggtcttaaagcagctcgtcgttcacctcaattctcaaaacgttaa

SEQ ID NO: 7784 - DNA, 930 bp, Staphylococcus aureus
atgattaaaaataaaatattaacagcaactttagcagttggtttaatagcccctttagccaatccatttatagaaatttctaaagcagaaaataagatagaagatatcggtcaaggtgcagaaatcatcaaaagaacacaagacattactagcaaacgattagctataactcaaaacattcaatttgattttgtaaaagataaaaaatataacaaagatgccctagttgttaagatgcaaggcttcatcagctctagaacaacatattcagacttaaaaaaatatccatatattaaaagaatgatatggccatttcaatataatatcagtttgaaaacgaaagactctaatgttgatttaatcaattatcttcctaaaaataaaattgattcagcagatgttagtcagaaattaggctataatatcggcggaaacttccaatcagcgccatcaatcggaggcagtggctcattcaactactctaaaacaattagttataatcaaaaaaactatgttactgaagtagaaagtcagaactctaaaggtgttaaatggggagtgaaagcaaattcatttgttacaccgaatggtcaagtatctgcatatgatcaatacttatttgcacaagacccaactggtccagcagcaagagactatttcgtcccagataatcaattacctcctttaattcaaagtggctttaatccatcatttattacaacattgtcacacgaaagaggtaaaggtgataaaagcgagtttgaaatcacttacggcagaaacatggatgctacatatgcttacgtgacaagacatcgtttagccgttgatagaaaacatgatgcttttaaaaaccgaaacgttacagttaaatatgaagtgaactggaaaacacatgaagtaaaaattaaaagcatcacacctaagtaa

SEQ ID NO: 7785 - DNA, 1485 bp, Staphylococcus aureus
gtgttaagttttcaattgctattttcactgtttgttattgcgcttatcattgcattgataagtggcttgttgtttttagcaccagttatgccaatgagatatattaaattacatttatacatactagtcatgccagtattatttgcagtcattggctttttcggtattcatggtcaacatgtcttaggtccatttaaaatagatcgtttatcttggttattagctggctttgtaatggcgcttggttttattattcaaaagttttcaatgcgatatttactaggtgatcatcattatagacattactttccattgttcactgcgattacgtcgtttgcatctttagcatggatgtctgaagacttaagactgatggcactctgctggggtatgacattattatgtttaacactgctgatgaacgttaatcgtttttggaaagtgccacgtgagtctgcgaaattatcaagcatgacatttttatgtggttggcttgcattcgttggagcaattgtaactatttatattgcgactggtgagtggcgggtaccacaacatatagtacatccgacatggtcattgttgacgaatgtactacttgtattagctgtcatgataccggcagcacaatttccttttcatcgatggttgattgaatctgtaacggcaccaacgccagtatcggcaattatgcatgcaggaattgtgaatgcaggtggtgttattctaactcgttttgcgccgatatttgataatggatttgcgttatcattattacttatcctttctagtatttctgtattgttaggatcgggtattagcttggttcaagttgactacaaaagacagttagtgggctctacgatgagtcaaatgggctttatgttagttcaatgtgcattgggtgtatattcagcagcgattattcatttaatattgcacggtatttttaaagcaacattatttttacaatcaggttctatcgtgaagcgattcaatattccaaaacaagcatctgctaaagacgcttatggctggattgtcatgggacgtgtattagctattatcgtggcatttctattttggatgagtagtgacagaagtgcatatgaagtgttaagtgcactcattctagcatggtcattacttgtatcttggaatcagatggtagcctttagtaaagggcgcatggcacgtctggttggcatgattttgattgcaattgtgacatttatctacgtcatcacacacaattatttttacgatgtattacaaaatataacaacacatgcgacaacaccgcctacagtgagtgtcatcattagtgttgtcattttaatctttggcagtttattaagtatttgggtggcgcgtcatcgatactctaagggttttgcggtattgtacgtgtggttagttaatctaggtgaagcacgctcgaaagcgatagaaagtcatccgaattatttgaagaagtatttatag

SEQ ID NO: 7786 - DNA, 267 bp, Staphylococcus aureus
aatatcaattcagtcattgaaaatgcgaaacgtgttattacaccattatcaccgatttcgatttttgcagcacgaaatccatgggaaggattagaagcggatacgtttgaagatgtcgcaaaatggttacgtgatgttcgcgatgtggatattttcccaaataaagcattaatagaaagtgctgtggcacgcggtgaattagacgaaagtgtctttaatcaacttgttactgatatgctacttgaacatcactacaatatcccgcaa

SEQ ID NO: 7787 - DNA, 51 bp, Staphylococcus aureus
ctgagccctgtgaccacatcacgatatcaaggaggtgcacatcgtggctaa

SEQ ID NO: 7788 - DNA, 972 bp, Staphylococcus aureus
atgaaaaggttaagcataatcgtcatcattggaatctttataattacaggatgtgattggcaaaggacgtctaaagaaccgtctaaaaatgcccaaaatcagcaagtgattaaaattggatatttgccgattacacattcagctaatttgatgatgactaaaaaattattatcacaatacaatcatccgaaatataaactagaattagttaaattcaataattggccagatttaatggacgcattaaacagtggtcgtattgatggtgcatcaactttaatagagctagcgatgaaatcaaaacagaagggctcaaatataaaggctgtggcattgggccatcatgaaggcaatgtcattatgggacaaaaaggtatgcacttaaatgaatttaataatggcgatgattaccattttggtataccacatcgttattcaacacattatcttttacttgaggaattacgtaaacaattaaagattaaaccggggcattttagctatcatgaaatgtcgccagcagaaatgccagccgcattgagtgaacacagaattacagggtattctgtagccgaaccattcggtgcactgggtgaaaagttaggcaaaggtaagactttgaaacatggtgatgacgttatacctgatgcgtattgctgtgtgctagtactgagaggggaattgcttgatcaacacaaggatgtagcgcaagcatttgtacaagattataaaaagtctggctttaaaatgaatgatcgcaagcaaagtgtagacattatgacgcatcattttaaacaaagtcgtgacgttttaacacagtcagcggcatggacatcctatggtgatttaacaattaagccatccggctatcaagaaattacgacattggtaaaacaacatcatttgtttaatccacctgcatatgatgactttgttgaaccgtcattgtataaggaggcatcgcgttcatga

SEQ ID NO: 7789 - DNA, 2097 bp, Staphylococcus aureus
atgaacggggataatcagcaaatactcagagaaattgtattgaatcctactattcatggtaaagaacttgaatcgatatttggtttgtctcgtagacaactaggatatcgcattcaaaaaatcaatttgtggcttgaacaagagggttatccaaaacttgaaagaacaagccaaggaaattttattgtaagttctgaaatcatgacgttattcaagcgagatgtatcggagcagcaaatgttaaacggcaacaatgtcatttttagcatagaaacacgtcgttattatttaatgctcatgctttttagtaaggaaaatgcaatgtctctaaaccatttttcaattgatttacaagtcagtaaaaatactgtcattcacgatataaatcatgtgaaagagcaattggaagatcatggtttgtcacttaagtattctcgaaagcatggttatgaaattgttggtgatgaatttgaagttcgccgtttcttcattaagttgattgatcaaaggttgaatcatgatattactaaaagtgaagttttaaaggcgctcaacttaacattcgaagatatcgcatatcaaaaagacaagatcaaacaggtagaacaatttttgaagagtcgctttatagacaaatcacttagttcattgccttatgtcctttgtgtgattcgtagacgaattcaaagtggtcatgtgatgaatccattaaatattaattatcagtatttgagggatacgaaagaatatcaagcaacggagattatgacgcaacatgagcctgatttgccagaagcggaaaagttatatttgacattacacttactttcaacaagtgtgcaatggactgatttgcaggaatcagataacatatcgaatttaacgatggccatcgctcaaatgattcaccattttgaacaaatcacttttattaacattgaagataaggagaaattatcacagcaactcttgttacatttaacgcctgctttttataggattaaatataacttaacggatcgtgatgaattaataaatcctttacaaggaaattatcaatccttatttcatatggtgaaacaatcatgtcaatcgttaactgaatatttcggaaaatcgttgcctgataatgaaatagcatatttaaccatgttgttcggaggtagtttgagacgtcaagatgaaaacttcgatggcaagataaaagctattatcgtgtgtacacaaggcacgtcagtatcacaaatgatgttatacgagttgcgaaacttatttccagaaattattttcttagatgcgatttcacttagaacatttgaaaattacacattagattatgacatcgtcttttcaccaatgtttgtcctaacacataaaaaattatttatcacaaaagtagctttatctgaaaatgagcaacgaaagttacgtaaagaagtgatgaagtacattaataaggaatcggctgacattgataaggaaataaacaagttaatggcattaattgaacgcacaacgacagttaatgacattacagaactacgtgatggtttagaagattttattgccaattataattcaatttcaaccattaatggatcgattgtcacacaaaataagacattagatttagctgacttgataccggcaaggcacgtgaaaagaatgcatcatgttgaaaatattgatgaagctattgctaaagcaagtgatgtgttagttgctaatcattttattgatattaaatatattcatgagatgcaacaggtatttgatgattcgtatatggttatcatgcaaaatattgctattccacatgcatactctgaaaagcatgtacataaaacagcgatgagtatgttgatattacaagaaccaatatacatgtcagatggcacagcaatccatattattgtacctattgctgctgttgataaagtgacacacttaagagcgttactacaattgagagatgtggcgcaagacaatgacgcaattaagcgcatcatacaaagtcgcaaaaattctgatgtaaatgagattttaaaaaattattcaaataaagaagcgagggaaaatggatgggacagcaattag

SEQ ID NO: 7790 - DNA, 477 bp, Staphylococcus aureus
attgtaaccggttccaaaaatatttgcaacactctattatcattttatataaacacctacaccatttttgatagcgcattcatttttattgctatactatatgcatgtatattaacattaattatcggaggtaattttatgaaagaacgtggccatatcgaacagctttggcgtgaggaaaaataccatgtattgttacacagtcaacagtcttaccaaatgataaggaatgctttaaaaacggatttatcacttcatcaagtccaacaaatgattgatgatgctttgttaattgaaccgagtataggaagtgtatgtaatgcttttgatcatatgtggggatattttaaaaaatgtgcgaatgaagaagaaagaaaacaatcaaaactacttaaagctgattttattaatggtaaaatcgacacccaaactttattagattttttaggttctccaccaaatgtggtgggtatataa

SEQ ID NO: 7791 - DNA, 987 bp, Staphylococcus aureus
atggctgatttattaaatgtattaaaagacaaactttctggtaaaaacgttaaaatcgtattacctgaaggagaggacgaacgtgttctaacagctgcaacacaattacaagcaacagattatgttacaccaatcgtgttaggtgatgagactaaggttcaatctttagcgcaaaaacttgatcttgatatttctaatattgaattaattaatcctgcgacaagtgaattgaaagctgaattagttcaatcatttgttgaacgacgtaaaggtaaagcgactgaagaacaagcacaagaattattaaacaatgtgaactacttcggtacaatgcttgtttatgctggtaaagcagatggtttagttagtggtgcagcacattcaacaggagacactgtgcgtccagctttacaaatcatcaaaacgaaaccaggtgtatcaagaacatcaggtatcttctttatgattaaaggtgatgaacaatacatctttggtgattgtgcaatcaatccagaacttgattcacaaggacttgcagaaattgcagtagaaagtgcaaaatcagcattaagctttggcatggatccaaaagttgcaatgttaagcttttcaacaaaagggtctgctaaatcagacgacgtgacaaaagttcaagaagctgtcaaattagcacaacaaaaagctgaagaagaaaaattagaagcaatcattgatggcgaattccaatttgatgctgcgattgtaccaggtgttgctgagaaaaaagcgccaggtgctaaattacaaggtgatgcaaatgtctttgtattcccaagtttagaagctggtaatattggttacaaaattgcacaacgtttaggtggatatgatgcagttggtccagtattacaaggtttaaattctccagtaaatgacttatcacgtggctgctcaattgaagatgtatacaatctttcaattattacagcagcgcaagccttacaataa

SEQ ID NO: 7792 - DNA, 5952 bp, Staphylococcus aureus
atgaatttgttaaagaaaaataaatatagtattaggaagtataaagtaggcatattctctactttaatcggaacagttttattactttcaaacccaaatggtgcacaagccttaactacggataataatgtacaaagcgatactaatcaagccacacctgtaaattcacaagatacaaatgttgctaataatagaggtttagcaaatagtgctcagaatacacctaatcaatctgcaacaactaatcaatcaacgaatcaagcattggttaatcataataatggtagtatagcaaatcaagctacgccaacatcagtgcaatcaagtacgccttcagcacaaaacaataatcatacagatggcaatacaacagcaactgagacagtgtcaaacgctaataataaggatgtagtgtcgaataataccacattaaatgtacctaataaaacaaatgaaaatggttcaggaggacatctaactttaaaggaaattcaagaagatgttcgtcattcttcagataaaccagagctagttgcaattgctgaacaagcatctaatagaccgaaaaagagaagtagacgtgcggcaccggcagatcctaatgcaactccagcagatccagcggctgcagcggcaggaaacggtggtgcaccagtagcaattacagcgccatacacgccgacaactgatcctaatgccaataatgcaggacaaaatgcacctaacgaagtgctgtcttttgatgacaatggtattagaccaagtaccaaccgttctgtaccatcagtaacagttgttgataatttaccaggctttacacttatcaatggtggtaaagtaggtgtgtttagtcatgcgatggttagaacaagtatgtttgattcaggagatgctaagaactatcaagcacaaggaaatgtaattgcattaggtcgtattaagggaaatgatacaaatgatcatggtgattttaatggaattgaaaaatctttaacagtaaatccaaattctgaattaattttcgaatttaatacgatgactacaaaaaactatcaaggtgtgacaaatttaataattaaaaatgctgataatgatactgttattgcagaaaaatcagtagcttatggtccgatttggcgtttgtttaaagtgcctgaaaatgttagtcacttaaaaattcaatttgtacctaaaaatgatgcaataacagatgcgcgtggcatttatcaactaagagacggttataaatactatgactttgttgactcaattggtctacattctggttcgcatgtctatgttgaaagacgaacaatggaacccacagctactaataataaagaatttacagtcacaacttcattaaagaataatggtaacttcggtgcttcatttaatacagatgattttgtatataaagttcaattacctgaaggggtagaatatgttaataactcattgactaaagattttccaagcagtaattcaggtgttgatatgaatgattttaatgtgacgtatgatgcggcgaatcgagtgataacaattaaaagtactggtggaggttcaggtaactcgccggcacgattaatgcctgataaaatattggatttaaagtataagttgcgtgttaataatgtaccgacaccaagaacagtaacatttaatgatacattaacatataaaacatatacacaagattttattaattcacctgctgaaagtcatactgtaagtacaaatccatatacaatcgatatcatcatgaataaagatgcattacaagccgaggttgatagacgcattcaacaagctgattatacatttgcatcattagatatctttaatgatcttaaaagacgtgcacaaacgattttagatgaaaatcgtaacaatgtaccattaaataaaagagtttctcaagcagatattgattcattaactaatcaaatgcaacatacgttaattcgaagtgttgatgctgaaaatgcagttaataaaaaagttgaccaaatggaagatttagttaatcaaaatgatgaattgacagatgaagaaaaacaagcagcaatacaagttatcgaggaacataaaaatgaaataattggtaatattggtgaccaaacgactgatgatggcgttactagaatcaaagatcaaggtatacagaccttaagtggggatactgcaacaccggttgttaaaccaaatgctaaaaaagcaatacgtgataaagcaacgaaacaaagggaaattatcaatgcaacaccagatgctactgaagacgagattcaagatgcactaaatcaattagctacggatgaaacagatgctattgataatgttacgaatgctactacaaatgctgacgttgaaatagctaaaaataatggcatcaatactattggagcagttgttcctcaagtgacacataaacaagctgcaagagatgcaattaaccaagcaacagcaacgaaaagacaacaaataaatagtaatagagaagcaactcaggaagagaaaaatgcagcattgaacgaattaactcaagcaaccaaccatgctttagaacaaatcaatcaagcaacaacaaatgctgatgttgataacgccaaaggagatggtctaaatgccattaatccaattgctcctgtaactgttgttaagcaagctgcaagggatgctgtatcacatgatgcacaacaacatatcgcagaaatcaatgctaatcctgatgcgactcaagaagaaagacaagcagcaattgacaaagtgaatgctgctgtaactgcagcaaacacaaacattttaaacgctaataccaatgctgatgttgaacaagtaaagacaaatgcgattcaaggaatacaagcaattacaccagctacaaaagtaaaaacagatgcaaaaaatgccatcgataaaagtgcggaaacgcaacataatacgatatttaataataatgatgcgacgctcgaagaacaacaagcagcacaacaattacttgatcaagctgtagccacagcgaagcaaaatattaatgcagcagatacgaatcaagaagttgcacaagcaaaagatcagggcacacaaaatatagttgtgattcaaccggcaacacaagttaaaacggatgctcgcaatgctgtaaatgataaagctcgagaggcgataacaaatatcaatgctacacctggcgcgactcgagaagagaaacaagaagcgataaatcgtgtcaatacacttaaaaatagagcattaactgatattggtgtgacgtctactactgcgatggtcaatagtattagagacgatgcagtcaatcaaatcggcgcagttcaaccgcatgtaacgaagaaacaaactgctacaggtgtattaaatgatttagcaactgctaaaaagcaagaaattaatcaaaacacaaatgcaacaactgaagaaaagcaagtggctttaaatcaagtggatcaagagttagcaacggcaattaataatataaatcaagctgatacaaatgcggaagtagatcaagcgcaacaattaggtacaaaagcaattaatgcgattcagccaaatattgttaaaaaacctgcagcattagcacaaatcaatcagcattataatgctaaattagctgaaatcaatgctacaccagatgcaacgaatgatgagaaaaatgctgcgatcaatactttaaatcaagacagacaacaagctattgaaagtattaaacaagctaacacaaatgcagaagtagaccaagctgcgacagtagcagagaataatatcgatgctgttcaagttgatgtagtaaaaaaacaagcagcgcgagataaaatcactgctgaagtggcgaagcgtattgaagcggttaaacaaacacctaatgcaactgacgaagaaaagcaggctgctgttaatcaaatcaatcaacttaaagatcaagcaattaatcaaattaatcaaaaccaaacaaatgatcaggtagacacaactacaaatcaagcggtaaatgctatagataatgttgaagctgaagtagtaattaaaccaaaggcaattgcagatattgaaaaagctgttaaagaaaagcaacagcaaattgataatagtcttgattcaacagataatgagaaagaagttgcttcacaagcattagctaaagaaaaagaaaaagcacttgcagctattgaccaagctcaaacgaatagtcaggtgaatcaagcagcaacaaatggtgtatcagcgattaaaattattcaacctgaaacaaaagttaaaccagctgcacgtgaaaaaatcaatcaaaaagcgaatgaattacgtgctaagattaatcaggataaagaagcaacagcagaagaaagacaagtagcactagataaaatcaatgaatttgtaaatcaagccatgacagatattacgaataatagaacaaatcaacaagttgatgatacaacaagtcaagcgcttgatagcattgctttagtagcgcctgaacatattgttagagcagctgctagagatgcagtaaagcaacaatatgaggctaaaaagcaagaaatagagcaagctgaacatgcgactgatgaagaaaaacaagttgctttaaatcaattagcgaataatgaaaaacttgcattacaaaacatcaatcaagcagtaacgaataatgatgtgaaacgtgttgaaacaaatggcattgctacactaaaaggtgtacaacctcatattgtaattaagcctgaagcacaacaagcaataaaagcaactgcagaaaatcaagtagaatcaataaaagatacaccacatgcaacagttgatgaattagatgaagcgaatcaattaattagcgacacactcaaacaagcgcaacaagaaatagaaaatacaaatcaagatgctgctgttactgatgttagaaatcaaacaatcaaggcaattgagcaaataaaacctaaagtaagacgtaaacgagctgcgcttgatagcattgaagaaaataataaaaatcaactcgatgcaatccgaaatacgttggatactactcaagatgaaagagatgttgctattgatactttaaataaaattgtaaatacaattaaaaatgacattgcacaaaacaaaacgaatgcagaagtggatcgaactgagactgatggcaacgacaacatcaaagtgattttacctaaagttcaagttaaaccagcagcgcgtcaatctgttggtgtaaaagccgaagctcaaaatgcactaatcgatcaaagcgatttatcaactgaagaagaaagactagctgctaaacatttagtagaacaagcacttaatcaggctattgatcagatcaatcatgcagataagactgcccaagttaatcaagatagtatagatgctcaaaatattatttcaaaaattaaaccagcgacaacagttaaagcaacagcattacaacaaattcaaaatatcgctacaaataaaattaatttaattaaagcaaataacgaagcgacagatgaagaacaaaatattgcaatagcacaagttgaaaaagagttaattaaagctaaacaacaaattgctagtgcagtgactaatgctgatgtggcatatttattgcatgatgagaaaaacgaaattcgtgaaatcgaacctgttattaacagaaaggcgtctgctcgagaacaattgacaacattattcaacgataaaaaacaagcaattgaagcgaatattcaagcaacggtagaagaaagaaatagtatattagcacagttacaaaatatttatgacactgctattggacaaattgatcaagatcgtagcaatgcacaagttgataaaacagcatcattaaatctacaaacaatacatgatttagatgtacatcctattaaaaagccagatgctggaaaacgattaatgatgatcttgcacgcgtcactgctttag

SEQ ID NO: 7793 - DNA, 1815 bp, Staphylococcus aureus
atgaacaaaacaaagggttttacaaagtataagaaaatgagatatatgccagggctcgatggtttgagggcaatcgctgttctaggaattattatttaccacttaaacaagcaatggttgacaggtggctttttaggtgtggatacattttttgtgatctctggttatttaattacaagcttattactcaaagagtatgatgacacaggtatcattaaattgaaaagcttttggatacgtcgtttaaaacgtttattaccagcagtcatagttttattaatggttgtagggacagcaaccttattattaaaatcagataatatcattagggttaaacatgatattattgctgcgatattttatgtatcaaactggtggtatatagcaaaagatgttaattattttgagcaattttcatttatgccattaaagcatttatggtctttagcaattgaagaacagttttacatatttttcccagttattttggttacattattgttaacaattaaaaagcgatacaaaataggatttattttttggggagtatcaataatttctttagggttaatgatgtttatctacagtattaatggggatcattcacgagtgtattttggtacagatactagattacagacattgttactgggtgttattttagcttttttatggccaccgtttaaattgaaaaatgatccacctaaagttgtaaaatatgttattgatagcataggtagtttatcatttatagtacttatattattatttttcattattaatgatgagacgaattggatatatgatggtggtttctatttaatatccatattaacgttatttattattgccagtgtcgttcatccatctacatggatagcgaagatattttcaaatccagtgttagtatttatcgggaaaaggtcttatagtttatatttatggcattttgcagtaattagtttcgtacatagttactatgtagatggacagatacctgtatatgtgtactttatagatataagtttaacaattatatttgcagagctatcatatcgctttatagaaactccatttagaaaagaaggtattaaagctttaaattggcgaccttcttatataccacaatttataagaatggcaattgtagtaaccttgttaattccatttatgttgattttagtaggtgcattcaataaatatggtaaagacattattggagaaaaagcgaatagctttgataccactattgaagataattatttaatgcggatagcaccaattgataacattcacattgatggcttagtaagtgagaagaaaaaggaatcttccgacgtatataataatattaaacctcttttaatcggtgattcagtaatggttgatatcggtgagtcatttaagtcatcagttcctaagtctagaattgatggaaaagtagggcgtcaattgtatcaaaccttacctttagttaaagcgaattattcacaatataaaaaatcatctgatcaagtcgtattagaattaggtacaaatggcgactttactgtcaaacagctcgacgatttacttaatcaatttggaaaagccaagatttatttagttaatacacgtgttccaagaatttatgaggcaaatgtaaatcgattattagctgacgcggcgaaacgaaagtccaatgtcacattaattgattggaataagcgatcacaaggacatagtgaatattttgcaccagacggtgtacatttagagtacaaaggagtcctagctttaaaagatgaaatattaaaagcacttaaaaagaaataa

SEQ ID NO: 7794 - DNA, 1998 bp, Staphylococcus aureus
ttggcaatgaataaacaaaataattattcagatgattcaatacaggttttagaggggttagaagcagttcgtaaaagacctggtatgtatattggatcaactgataaacggggattacatcatctagtatatgaaattgtcgataactccgtcgatgaagtattgaatggttacggtaacgaaatagatgtaacaattaataaagatggtagtatttctatagaagataatggacgtggtatgccaacaggtatacataaatcaggtaaaccgacagtcgaagttatctttactgttttacatgcaggaggtaaatttggacaaggcggctataaaacttcaggtggtcttcacggtgttggtgcttcagttgtaaatgcattgagtgaatggcttgaagttgaaatccatcgagatggtagtatatatcatcaaagttttaaaaacggtggttcgccatcttctggtttagtgaaaaaaggtaaaactaagaaaacaggtaccaaagtaacatttaaacctgatgacacaatttttaaagcatctacatcatttaattttgatgttttaagcgaacgactacaagagtctgcgttcttattgaaaaatttaaaaataacgcttaatgatttacgcagtggtaaagagcgtcaagagcattaccattatgaagaaggaatcaaagagtttgttagttatgtcaatgaaggaaaagaagttttgcatgacgtggctacattttcaggtgaagcaaatggtatagaggtagacgtagctttccaatataatgatcaatattcagaaagtattttaagttttgtaaataatgtacgtactaaagatggtggtacacatgaagttggttttaaaacagcaatgacacgtgtatttaatgattatgcacgtcgtattaatgaacttaaaacaaaagataaaaacttagatggtaatgatattcgtgaaggtttaacagctgttgtgtctgttcgtattccagaagaattattacaatttgaaggacaaacgaaatctaaattgggtacttctgaagctagaagtgctgttgattcagttgttgcagacaaattgccattctatttagaagaaaaaggacaattgtctaaatcccttgtgaaaaaagcgattaaagcacaacaagcaagggaagctgcacgtaaagctcgtgaagatgctcgttcaggtaagaaaaacaagcgtaaagacactttgctatctggtaaattaacacctgcacaaagtaaaaacactgaaaaaaatgaattgtatttagtcgaaggtgattctgcgggaggttcagcaaaacttggacgagaccgcaaattccaagcgatattaccattacgtggtaaggtaattaatacagagaaagcacgtctagaagatatttttaaaaatgaagaaattaatacaattatccacacaatcggggcaggcgttggtactgactttaaaattgaagatagtaattataatcgtgtaattattatgactgatgctgatactgatggtgcgcatattcaagtgctattgttaacattcttcttcaaatatatgaaaccgcttgttcaagcaggtcgtgtatttattgctttacctccactttataaattggaaaaaggtaaaggcaaaacaaagcgagttgaatacgcttggacagacgaagagcttaataaattgcaaaaagaacttggtaaaggcttcacgttacaacgttacaaaggtttgggtgagatgaaccctgaacaattatgggaaacgacgatgaacccagaaacacgaactttaattcgtgtacaagttgaagatgaagtgcgttcatctaaacgtgtaacaacattaatgggtgacaaagtacaacctagacgtgaatggattgaaaagcatgttgagtttggtatgcaagaggaccaaagtattttagataattctgaagtacaagtgcttgaaaatgatcaatttgatgaggaggaaatctag

SEQ ID NO: 7795 - DNA, 369 bp, Staphylococcus aureus
atggctaatcatgaacaaatcattgaagcgattaaagaaatgtcagtattagaattaaacgacttagtaaaagcaattgaagaagaatttggtgtaactgcagctgctccagtagcagtagcaggtgcagctggtggcgctgacgctgcagcagaaaaaactgaatttgacgttgagttaacttcagctggttcatctaaaatcaaagttgttaaagctgttaaagaagcaactggtttaggattaaaagatgctaaagaattagtagacggagctcctaaagtaatcaaagaagctttacctaaagaagaagctgaaaaacttaaagaacaattagaagaagttggagctactgtagaattaaaataa

SEQ ID NO: 7796 - DNA, 609 bp, Staphylococcus aureus
atgagtcattattacgatgaagatccaagtgtaattagcaatgaacaacgtattcaatatcaattaaaccatcataaaattgatttaataactgataacggagtgttttcgaaagataaagtagattatggttcagatgttcttgttcaaacttttttaaaagcgcatccacctggtccaagtaagcgaattgccgatgttggttgtggttacggaccaattggtttgatgattgctaaagtatcaccacatcattcaattacaatgctagatgttaatcacagagcgctagccttagttgaaaaaaacaaaaaattaaatggtattgataatgtgatcgtaaaggaaagtgatgctttgtctgctgtggaagacaaaagttttgattttattttaaccaatccaccaataagagcagggaaagaaaccgtgcatcgtatattcgagcaagcattacatagattagactcgaacggtgaactattcgttgtaattcagaagaagcaaggtatgccatctgcaaagaaaagaatgaatgaactttttggaaatgtagaagtggtaaataaagataaaggatattacattctgagaagtataaaagcttga

SEQ ID NO: 7797 - DNA, 522 bp, Staphylococcus aureus
atggagtataagagttactatgattcgcctgtaggacgattggaacttttgagtgatggggtaagtctgaccgctgttttgtttgaaaatcaacaaggtgatggtactagggaagaaaatacgtctttagcgatatttagagaggcgacacagtggttagacgcgtattttaaaggtgacaatcctgaaatcacaatacctttaaagccaacaggtagtcattttcaacagtgtgtttggaatgaattaagacaggttccttatgggactctaacaacgtatggtgctattgccaaaaaagtaggtaaggtgcttgataagccaaaaatgtcagcccaagcggttggaggtgcagtcggaagtaatccattatcaattatcgtgccatgtcatcgtgttgtcggtaaaacgggtagcttaacaggattcggtggaacgattaataataaaattaagctgttagagttggagaatatcgatatgtcaaagctttatatacctaaacacagtacaaagccgtaa

SEQ ID NO: 7798 - DNA, 1113 bp, Staphylococcus aureus
atggctcctaagttacaagcccaattcgatgcagtaaaagttttaaatgatactcaatcgaaatttgaaatggttcaaattttggatgagaatggtaacgtcgtaaatgaagacttagtacctgatcttacggatgaacaattagtagaattaatggaaagaatggtatggactcgtatccttgatcaacgttctatctcattaaacagacaaggacgtttaggtttctatgcaccaactgctggtcaagaagcatcacaattagcgtcacaatacgctttagaaaaagaagattacattttaccgggatacagagatgttcctcaaattatttggcatggtttaccattaactgaagctttcttattctcaagaggtcacttcaaaggaaatcaattccctgaaggcgttaatgcattgagcccacaaattattatcggtgcacaatacattcaagctgctggtgttgcatttgcacttaaaaaacgtggtaaaaatgcagttgcaatcacttacactggtgacggtggttcttcacaaggtgatttctacgaaggtattaactttgcagcagcttataaagcacctgcaattttcgttattcaaaacaataactatgcaatttcaacaccaagaagcaagcaaactgctgctgaaacattagctcaaaaagcaattgctgtaggtattcctggtatccaagttgatggtatggatgcgttagctgtatatcaagcaactaaagaagcacgtgaccgcgcagttgcaggtgaaggtccaacattaattgaaactatgacatatcgttatggtcctcatacaatggctggtgacgatccaactcgttacagaacttcagacgaagatgctgaatgggagaaaaaagacccattagtacgtttccgtaaattccttgaaaacaaaggtttatggaatgaagacaaagaaaatgaagttattgaacgtgcaaaagctgatattaaagcagcaattaaagaggctgataacactgaaaaacaaactgttacttctctaatggaaattatgtatgaagatatgcctcaaaacttagcagaacaatatgaaatttacaaagagaaggagtcgaagtaa

SEQ ID NO: 7799 - DNA, 900 bp, Staphylococcus aureus
gtgatggaaaatagtacgaccgaagcgcgtaatgaagcgacgatgcatcttgatgaaatgactgtggaagaggctttaattacgatgaataaagaagatcagcaagtcccgttagcagttcgaaaggcaataccacaattgacaaaagtaataaaaaaaacaattgcacagtataaaaagggtggacgattgatctatatcggtgcaggtacaagtggaagattgggtgtcttagatgcagcggagtgtgtacctacattcaatactgaccctcatgaaattataggtattattgctggtggacaacatgctatgacgatggctgtagaaggtgcggaagatcacaaaaaattagcggaagaagatttgaaaaatatagatttaacatcaaaagatgtcgttataggaattgccgcgagtggcaaaacgccatatgttataggcggtttaacatttgctaacacaatcggtgctacaacagtatctatttcatgcaatgaacatgcagttataagtgaaattgcgcagtatccagtagaagttaaagttggtccagaagtattaactggttcaacacgtttaaagtctggtacagcacaaaagttaattttaaatatgatttcaaccatcacaatggttggtgtcggaaaagtttacgataacctcatgattgatgttaaagcaaccaatcaaaaactgatcgaccgttcagtgcgtattattcaagaaatatgtgctatcacatatgatgaagcaatggcgttatatcaggtatctgagcatgatgtgaaagttgcgacagttatgggtatgtgtggcatttctaaggaagaagcaacaagacggttattaaacaatggtgacattgttaaacgagcaatcagagatagacaaccttag

SEQ ID NO: 7800 - DNA, 792 bp, Staphylococcus aureus
atgagcaataaatataaagaacaagcccaagacattcttacagctgtaggtggtgtcgaaaacattgttgatgcaacgtatgatacgaagtgcattacaattcatatgcaacatacaattccttctacagcaaatgaagtgaaacaaatagttgatgtgacatctgtagcagaaaatgatgcgcagttagtcataaaattaaatggaaatgtcgatgaagtgtatcagcaattacagcgattaattaagaatgctaatgtcgaagagagtgagaatactgacaatattaatagccaagatacaagttatacacctcaagtaaaagtaacaacaccaattttagtgaaagcaccaatcgctggtcgtcgtattttacttaaagaagtaagagattcaatttttagagagaaaatggtaggtgaaggcttagcaatcaaagctcatgaagaatccaaagtaatcgcaccgttcaatggtttaatatctatgattgtaccaactaagcatgcagttggtattcaatcagaagacggtgtggacatagtcattcatattggcgtgaatacagttgacttggaaggtaaagggttcaagtgctttgtaaagcaaaatgatcatgttgaagcagggcaaacgttgttgcaattcgaccagcaatatatacaacaacaaggctacaatgctgacgttattgtcgttattagcaactctgccgatttaggaaaagtagaactgacaatgaatgaaatcattacgactgaagatgttatttttaaaatatttaaaaactag

SEQ ID NO: 7801 - DNA, 1437 bp, Staphylococcus aureus
atgacaaaattaccgcaaaattttatgtggggtggcgctcttgccgcaaatcaatttgaaggtggatatgaaaaaggtggtaaagggttaagtgtaattgatgttatgacgagtggtgcacatggcaaagcacgtcagattacagaatctatagacctcaatcactattatccaaatcatgaaggtattgatttttatcatcgttataaggaagatattgccttgtttaaagaaatgggattgaaatgtttacgtacgtcgattgcgtggacacgtatctttccgaatggggatgaagatgtgccaaatgaagaaggacttgccttttatgatcgtatctttgatgaattaattgcacaaggtattgaacctgttgtgacgttatcacattttgagatgccacttcatttagcgaaacattatggtggatttagaaatagagaagttgtcgattattttgtgcattttgcgcgtgttgtatttgaaagatataaagataaagttacatattggatgacgtttaatgaaattaataatcagatggacacatcaaatcctatctttttatggacgaattctggggtagcattgacagaaaatgataatcctgaagaagtcttgtatcaagtagcacatcatgaacttttagccagtgctttagcagttcgtcttggtaaagagattaatccgaagtttaagattggaacaatgatttcacatgtacccatttatccatattcgtgtcatccgaaagatatgatggaagcacaaattgcgaatcgcttacgtttctttttcccggatgtccaagtgagaggttattatccaagctatgctaaaaaaatgttggcacgaaaaggatatgatgttggatggcaagaaggggacgacagtattttacagcagggcacggttgattatattggctttagttattacatgtctacggctgtaaaacatgatgttgatactacagttgaaaacaacatcgtcaacggtggtttgaatcattctgtggagaatccgcatatcgcaacgagtgattggggttgggcgattgatccagatggcttaagatatacattgaatgtgttatatgatcgttatcagttaccactttttattgtggaaaatggttttggtgcagttgatgaagtggtagatggacatattcatgatgattatcgcattgaatatttaaaagcacatattacagcagcgatagaagcagttgatcaagatggtgtagatttaatcggttatacaccgtggggaatcattgatattgtttcatttacaaccggtgaaatgaagaaacgctatggtttaatatatgttgatcgagataatgatggtcatggcacgatggaacgcttgaaaaaagattcgttctattggtatcaacaagtgatagcatcaaatggagataaattataa

SEQ ID NO: 7802 - DNA, 1371 bp, Staphylococcus aureus
atgggtcaaacattatttgacaaggtgtggaacagacatgtgttatacgggaaattgggcgaaccgcaactattatacattgatttacaccttatacatgaagttacttctcctcaagcatttgaaggacttaggcttcaaaacagaaaattaagacgcccagatttaacatttgcaacactcgatcacaatgttcctactattgatattttcaatattaaagatgaaattgcaaacaaacaaatcacaacattacaaaaaaacgccatagattttggggtgcatatttttgatatgggctctgatgaacaaggtattgttcacatggtaggacctgagacaggacttacacagcccggcaaaacaatcgtttgtggtgactctcacacagcaacacatggagcatttggtgctattgcatttggaattggaacaagtgaagttgaacatgttttcgcaactcaaacgctatggcaaacaaaacccaaaaacttaaaaatcgatattaatggtaccttaccaacaggcgtctatgctaaggacattattctgcatttaattaaaacgtatggtgttgattttggtacaggctatgctttggaatttactggcgaaacaattaaaaacctttcaatggacggtcgaatgactatttgtaacatggctatcgaaggtggtgccaaatacggcataatccaacctgatgatataacatttgaatatgttaaagggagaccatttgccgataacttcgctaaatcagttgataagtggcgtgagctatattctgatgacgacgcgatatttgatcgtgtaattgaacttgatgtttcaacattagaaccacaagtgacatggggaactaatcctgaaatgggtgttaatttcagtgaaccattccctgaaatcaatgatatcaacgatcaacgtgcgtatgattatatggggttagaaccaggtcaaaaagctgaagacatcgacttagggtatgtttttctcggttcatgtacaaatgctagactatcagatttgattgaagctagtcatattgttaaaggaaataaagttcatccaaatattacagctattgtcgtaccaggttctcgtacagtaaaaaaagaagcagaaaaattaggtctagatactatctttaaaaatgcaggatttgaatggcgtgaaccaggatgttcaatgtgtttaggcatgaatcctgaccaagtacctgagggcgtacattgtgcatctacaagtaatcgaaactttgaaggacgacaaggcaaaggtgcaagaacacatttagtatcccctgctatggcagcagcagcagctattcatggtaaatttgtggacgtaagaaaggtggttgtttaa

SEQ ID NO: 7803 - DNA, 1878 bp, Staphylococcus aureus
atggaagcatataaaattgaacatttaaataaatcttatgccgataagactatattcgataacctagatttatcaatttcagaaggtgaaaaaataggtttggtgggcataaatggtacagggaaaagtacgttgttaaaagtaattggtggtattgatgatgattttacagccaatgttatgcatccaaatcaatatcgaattcgatattcgtctcagaaacaggaccttaatgaagatatgacagtttttgatgcagtattaagttctgatacaacaactttacgcatcatcaagcaatatgagcaggcagtacaagcttatgcggatgaccaaagtgataaattgttcaagcgaatgatagatgcgcaagatgctatggatcaacatgatgcttgggactataacgctgaaattaaaacaatcctctcaaaactaggtatacatgatactactaaatacattaaagaattatccggcggacaacaaaaacgtgttgtacttgctaaaacattaatagaacaaccagatttattgttattagatgaacctacgaaccatttagacttcgaatcaatcagctggttgatcaattatgtgaagcaatatcctcatacagttttattcgtaacccatgatcgatattttttaaatgaagtttccactagaattattgaactaaacagaggtaagttagcgtcatatcctggtaactatgaatcttatattgaaatgcgcgctgaaagagaagtaacacttcaaaagcaacaacaaaagcaacgagctttatataaggaagaacttgcttggatgagggctggagctaaggctcgtactacaaagcaacaagctagaattaatcgatttaatgacctagaaaatgaagttaaccagcaatataaagacgataaaggtgaattgaatcttgcttattcaagattaggtaagcaagtgttcgaattagaagacttatcaaaggctattaatgataaagtattatttgaacatctgacggaaattattcaaaaaggtgagcgtattggtgttgttgggccaaatggagctggtaaaacaacactcttaaatattttgagtggagaagaccaacaattcgaaggtaaattgaagactgggcagacggttaaagtagcttattttaagcaaacagatgagaccctggatagagatattcgtatgattgattatttaagagaagaaagtgaggtcgcaaaagaaaaagatggaacctcggtatctattacacaacttcttgaacgatttttatttccaagtgcaactcatggtaaaaaagtttataaattatctggtggagagcaaaagcgtttgtatttattacgtctactcgtacaccagccaaatgttctgttgttagatgaaccgacaaatgatttagatactgagactttaacaatacttgaagattatattcatactttcggtggtacagtgattaccgtaagccatgatcgctacttcttaaataaagttgcacagtcatattggtttattcatgatggtcagatggaaaagattatcggaacttttgaagattatgaaagttataaaaaatcattagataaaaataaatccacattgaagcaacaatctaaatcttatacaactgtacgtaagaaaaatggtttatcatataaagaaaaattagaatatgaacaattgatgaaacgcatagaacaagcggaagtaagaatggaagaaattgatgtgctcatgattgaggcaagtgcagattatgggaaaattaaagaactaaacgaagaaaaagaacaacttgaaattcaatatgatttagacatcacaagatggagtgagttagaagaaattaaagaacaacaataa

SEQ ID NO: 7804 - DNA, 2136 bp, Staphylococcus aureus
atgaaatctttaatattagctgaaaaaccatcagttgcaagagatattgctgatgctttacaaataaatcagaagcgtaatggttactttgaaaataaccaatatattgtcacgtgggcgttaggtcatctagtgacaaatgcgacacctgaacaatacgataaaaatttaaaggaatggcgattagaagaccttccaattatacctaaatatatgaaaactgttgttattggtaaaacaagcaaacaatttaaaacagtaaaagcgttaattttagataataaagtgaaagatattattattgcaacagatgctggacgagaaggtgaactagttgcaagattgattttggataaagttggtaacaaaaagccaatccgtcgattatggattagctcagttactaaaaaagctattcaacaaggttttaaaaatttaaaagacggtcgtcaatataacgatttgtattatgcagcgttagcgagaagcgaggcagattggattgttgggattaatgcaacgcgtgcactaacaacaaagtatgatgcacagctatccctgggacgtgttcagacaccaacgattcaattagtaaatacacgacaacaagagattaatcagttcaaaccacaacaatactttacattatcattaacggtaaaagggtttgattttcagctagaatcaaatcagcgatataccaataaagaaactttagaacagatggttaataatttgaaaaatgtcgatggtaagattaaatctgttgctactaaacataagaagtcgtatccgcaatcactgtacaatttaacagatttacaacaagatatgtatagacgttataaaattggacctaaagaaacattgaatacacttcaaagcttatatgagagacataaagtcgtaacctatccaagaacagattcaaactatttaacaactgatatggtagatactatgaaagaacgtattcaggcgacgatggcaacaacatataaagaccaagcacgcccattaatgtctaaaacattttcatcaaaaatgtcgatatttaataatcaaaaagtatctgatcaccatgcaattattcctacagaagtgagacctgtcatgtcagacttaagtaatagagaattaaagttatacgatatgattgtcgagcgttttttagaagctttaatgcctccgcacgagtatgacgcgataactgtaactttagaggttgcagggcacacatttgttttgaaagagaatgtaacaactgttttaggttttaaatctattagacaaggtgaatctattacagagatgcaacagcctttttcagaaggcgatgaagtgaagatttcaaaaacaaacattagagaacatgaaacaacacctccagaatattttaatgaaggttcgttattaaaagcgatggagaaccctcagaactttattcaattgaaggataaaaaatatgcgcaaactttaaaacaaacaggtggtatcggcacagttgcaacaagggccgacattatcgataaattatttaatatgaatgccattgaatcaagagacggtaaaattaaagtaacgtcaaaaggtaaacaaatattagaattagcaccagaagaattaacgtcgccacttttaactgcacaatgggaagaaaaattacttttaattgaacgtggtaaatatcaggcgaaaacatttattaatgaaatgaaagattttacgaaagatgttgtaaatgggattaaaaatagtgatcgtaaatataaacacgataatttaacaaccacagaatgcccaacgtgtggtaaattcatgattaaagttaaaactaaaaatggtcagatgcttgtgtgccaagatccatcttgtaagacgaaaaagaatgtacagcgcaaaacaaatgcaagatgtccaaactgtaaaaagaaattaacgttgtttggtaaagggaaagaagcggtatatcgttgtgtttgtggacattctgaaacgcaagcacatatggatcagcgtatgaagtctaaatcctctggtaaagtatctcgtaaagaaatgaaaaagtatatgaataaaaatgaaggtttagacaataatccgtttaaagatgcattaaagaacttgaatttatag

SEQ ID NO: 7805 - DNA, 1485 bp, Staphylococcus aureus
ttggatgcaagtacgttgtttaagaaagtaaaagtaaagcgtgtattgggttctttagaacaacaaatagatgatatcactactgattcacgtacagcgagagaaggtagcatttttgtcgcttcagttggatatactgtagacagtcataagttctgtcaaaatgtagctgatcaagggtgtaagttggtagtggtcaataaagaacaatcattaccagctaacgtaacacaagtggttgtgccggacacattaagagtagctagtattctagcacacacattatatgattatccgagtcatcagttagtgacatttggtgtaacgggtacaaatggtaaaacttctattgcgacgatgattcatttaattcaaagaaagttacaaaaaaatagtgcatatttaggaactaatggtttccaaattaatgaaacaaagacaaaaggtgcaaatacgacaccagaaacagtttctttaactaagaaaattaaagaagcagttgatgcaggcgctgaatctatgacattagaagtatcaagccatggcttagtattaggacgactgcgaggcgttgaatttgacgttgcaatattttcaaatttaacacaagaccatttagattttcatggcacaatggaagcatacggacacgcgaagtctttattgtttagtcaattaggtgaagatttgtcgaaagaaaagtatgtcgtgttaaacaatgacgattcattttctgagtatttaagaacagtgacgccttatgaagtatttagttatggaattgatgaggaagcccaatttatggctaaaaatattcaagaatctttacaaggtgtcagctttgattttgtaacgccttttggaacttacccagtaaaatcgccttatgttggtaagtttaatatttctaatattatggcggcaatgattgcggtgtggagtaaaggtacatctttagaaacgattattaaagctgttgaaaatttagaacctgttgaagggcgattagaagttttagatccttcgttacctattgatttaattatcgattatgcacatacagctgatggtatgaacaaattaatcgatgcagtacagccttttgtaaagcaaaagttgatatttttagttggtatggcaggcgaacgtgatttaactaaaacgcctgaaatggggcgagttgcctgtcgtgcagattatgtcattttcacaccggataatccggcaaatgatgacccgaaaatgttaacggcagaattagccaaaggtgcaacacatcaaaactatattgaatttgatgatcgtgcagaagggataaaacatgcaattgacatagctgagcctggggatactgtcgttttagcatcaaaaggaagagaaccatatcaaatcatgccagggcatattaaggtgccacatcgagatgatttaattggccttgaagcagcttacaaaaagttcggtggtggccctgttgatcaataa

SEQ ID NO: 7806 - DNA, 171 bp, Staphylococcus aureus
atgacgtcaaatcatcatgccccttatgatttgggctacacacgtgctacaatggacaatacaaagggcagcgaaaccgtgaggtcaagcaaatcccataaagttgttctcagttcggattgtagtctgcaactcgactacatgaagctggaatcgctagtaatcgtagat

SEQ ID NO: 7807 - DNA, 129 bp, Staphylococcus aureus
ttgtattcagttttgaatgtttatttaacattcaaatattttttggttaaagtgatattgcttatgcgagcgcttgacaatctattctttttaaagaaagcggttgtcagacaatgcattgagaaaaat

SEQ ID NO: 7808 - DNA, 648 bp, Staphylococcus aureus
atgaatatcattttgatgggtttacctggcgcaggtaaaggaactcaagcaagtgaaattgtcaagaaattcccaataccccacatttcaactggtgacatgttcagaaaagctataaaagaagaaactgaattaggtaaagaagctaagtcttatatggaccgtggcgaattagttcctgatgaagtgactgtaggtatcgttaaggaaagaatttctgaagacgatgcaaaaaaaggctttttattagatggcttcccaagaacaatcgagcaagctgaggcattaaataatattatgtctgagcttgacagaaacattgatgctgtcatcaatatcgaagttccggaagaagaattaatgaaccgtcttacaggtcgtcgaatctgtgagtcatgtggtacaacgtatcatcttgtatttaatcctccgaaggtcgaaggtatttgtgatatcgatggtggtaaattgtatcaacgagaagatgataatcctgaaacggtagctaatcgtttgagtgttaatattaaacaatctaagcctattttagatttctatgatcaaaaaggtgtattgaaaaatattgatggttcaaaagatattagcgacgttaccaaagatgtcattgatattttagatcatttgtaa

SEQ ID NO: 7809 - DNA, 1542 bp, Staphylococcus aureus
atggaaatggcaaaagaacaagagttaatccttgtcttagactttggtagccaatacaaccaattaattacacgccgaattcgtgaaatgggcgtttatagtgaattacacgatcatgaaatttcaattgaagaaattaagaaaatgaatccaaaaggtatcatcttatcaggtggtccaaattcagtttatgaagaaggttcatttacaattgatccggaaatatataatttaggaattccagtacttggtatttgttacggcatgcaattaactactaaattattaggtggtaaagttgaacgtgccaatgaacgtgaatacggtaaagcaatcattaatgcgaagtcagatgagttattcgctggcttaccagcagaacaaactgtttggatgagtcattctgataaagttattgaaattccagaaggctttgaagttatcgctgatagcccaagcacagactatgcagcaattgaagataagaaacgtcgcatttatggtgtgcaattccatccagaagtacgtcatacagaatatggtaatgatttattaaacaacttcgtacgtcgtgtttgtgattgtaaaggacaatggacgatggaaaactttatcgaaattgaaattgaaaagattcgtcaacgcgtaggcgaccgtcgtgtattatgtgcgatgagtggtggcgtagattcatctgttgttgctgtattattgcataaagcaattggggatcaactaacatgtatctttgtagaccatggcttacttcgtaaaggtgaaggcgacatggttatggaacaattcggtgaagggttcaacatgaatattattcgtgttaatgcgaaagatcgttttatgaataaattaaaaggtgtttcagatcctgaacaaaaacgtaaaatcattggtaatgaatttgtatatgtatttgatgatgaagcatcaaaacttaaaggtgtagacttccttgcgcaaggaacactatatacagacgtcatcgaatcaggtactaagacagcacaaacaatcaaatcacaccacaatgttggtggattaccagaagacatggaattcgaattaatcgaaccaatcaatacattgtttaaagatgaagtacgtaaattaggtattgaattaggtattccagaacatttagtgtggagacaaccattcccaggacctggtcttggtattcgtgtacttggagaaattactgaagataaactagaaatcgttagagaatcagacgcgattttacgccaagtgattagagaagaaggtcttgaaagagaaatttggcaatacttcacagtgttaccaaacattcaatcagtaggtgttatgggagactaccgtacgtatgatcacacagtaggtatccgtgcagtaacatctatcgacggcatgacaagtgacttcgcacgcatcgattgggaagtcttacaaaagatttcaagtcgtatcgtaaacgaagtagaccacgtcaatcgcgtagtctatgacattacatcaaaaccaccaagcacaattgagtgggaatag

SEQ ID NO: 7810 - DNA, 1284 bp, Staphylococcus aureus
atgtcatcaatcgtagtagttgggacacaatggggagacgaaggaaaaggaaaaataacggatttcttggcagaacagtcagatgttatcgcgcgtttttcaggtggtaataatgcaggccataccattcaatttggcggagaaacatataaattacatttagtaccatctggtatcttttacaaagacaaattagcggtaatcggtaacggtgtcgttgttgatccagttgcactattgaaagaattagacggattaaatgaacgtggcattcctacaagtaatttacgtatatctaatcgtgcgcaagtgattttaccatatcacttagcacaagatgaatatgaagaacgtttacgcggtgacaataagattggtacaactaaaaaaggtatcggtccagcatatgtagacaaagttcaacgtatcggtattcgtatggcagatttacttgaaaaagaaacattcgaaagattattaaaatcaaacattgaatataaacaagcatatttcaaaggtatgtttaacgaaacatgtccatcatttgatgatatctttgaagaatactatgctgcaggtcaacgtttaaaagaatttgtaacagacacatcaaaaatcttagacgatgcatttgtagcagatgaaaaggtacttttcgaaggtgcgcaaggtgtaatgttagatatcgaccatggtacatatccattcgttacatcaagtaatccaattgcaggtaacgttactgttggtacaggtgtaggtcctacattcgtttcgaaggtaattggtgtatgtaaagcttatacatcacgtgttggtgatggtccattccctactgaattattcgatgaagatggacatcatattagagaagttggtcgtgaatacggtacaacaacaggacgtccacgtcgtgtaggttggtttgactcagttgtattacgtcactctcgtcgtgtaagtggtattacagatttatctattaactcaatcgatgttttaacaggcctagacacagtgaaaatctgtacagcttatgaattagacggtaaagaaattactgagtacccagcaaacttagatcaattaaaacgttgtaaaccaatctttgaagagttaccaggttggacagaagacgtaacaagtgtgcgtactttagaagaattacctgaaaatgcacgtaaatatttagagcgtatttcagaattatgtaatgtacaaatttctatcttctcagttggtccagatagagaacaaacaaacctattaaaagaattgtggtag

SEQ ID NO: 7811 - DNA, 576 bp, Staphylococcus aureus
ttgaaaaaagaattattggaatggattatttcaattgcagtcgcttttgtcattttatttatagtaggtaaatttattgttacaccatatacaattaaaggtgaatcaatggatccaactttgaaagatggcgagcgagtagctgtaaacattattggatataaaacaggtggtttggaaaaaggtaatgtagttgtcttccatgcaaacaaaaatgatgactatgttaaacgtgtcatcggtgttcctggtgataaagtagaatataaaaatgatacattatatgtcaatggtaaaaaacaagatgaaccatatttaaactataatttaaaacataaacaaggtgattacattactgggactttccaagttaaagatttaccgaatgcgaatcctaaatcaaatgtcattccaaaaggtaaatatttagttcttggagataatcgtgaagtaagtaaagatagccgtgcgtttggcctcattgatgaagaccaaattgttggtaaagtttcatttagattctggccatttagtgaatttaaacataatttcaatcctgaaaatactaaaaattaa

SEQ ID NO: 7812 - DNA, 1014 bp, Staphylococcus aureus
gtgaaagacttattgcaagcacagcaaaagcttataccggatctcatagataaaatgtataaacgtttttctattcttactactatctcaaaaaatcagcctgtcggacgtcgaagtttaagcgaacatatggatatgactgaacgtgtactgcgttctgaaacagatatgcttaagaaacaagatttgataaaagttaagcctaccggaatggaaattacagctgaaggtgagcaactgatttcgcaattgaaaggttactttgatatctatgcagatgataatcgtctgtcagaaggtattaagaataaatttcaaattaaggaagttcatgttgttcctggtgatgctgataatagtcaatctgttaaaacagaattaggtagacaagcaggtcaattacttgaaggcatattacaagaagacgcgatagttgctgtaactggcggatccacgatggcatgtgttagtgaagcaattcatttattaccatataatgtattcttcgtaccagccagaggtggactaggcgaaaatgttgtctttcaggcaaacacaattgcagccagtatggcacaacaagctggcggttattatacgacgatgtatgtacctgataatgtcagtgaaacaacatataacacattgttgttagagccatcagtcataaacactttagacaaaattaaacaagcaaacgttatattacacggcattggtgatgcgctgaagatggcgcatcgacgtcaatcacctgaaaaggtcattgaacaacttcaacatcatcaagctgtcggagaggcatttggttattattttgatacacaaggtcaaattgtccataaggttaaaacaattggacttcaattagaagaccttgaatcaaaagactttatttttgcagttgcaggaggcaaatcgaaaggtgaagcaattaaagcatacttgacgattgcacccaagaatacagtgttaatcactgatgaagccgcagcaaagataatacttgaataa

SEQ ID NO: 7813 - DNA, 1011 bp, Staphylococcus aureus
atggcagtaaaagtagcaattaatggttttggtagaattggtcgtttagcattcagaagaattcaagaagtagaaggtcttgaagttgtagcagtaaacgacttaacagatgacgacatgttagcgcatttattaaaatatgacactatgcaaggtcgtttcacaggtgaagtagaggtagttgatggtggtttccgcgtaaatggtaaagaagttaaatcattcagtgaaccagatgcaagcaaattaccttggaaagacttaaatatcgatgtagtgttagaatgtactggtttctacactgataaagataaagcacaagctcatattgaagcaggcgctaaaaaagtattaatctcagcaccagctactggtgacttaaaaacaatcgtattcaacactaaccaccaagagttagacggttctgaaacagttgtttcaggtgcttcatgtactacaaactcattagcaccagttgctaaagttttaaacgatgactttggtttagttgaaggtttaatgactacaattcacgcttacacaggtgatcaaaatacacaagacgcacctcacagaaaaggtgacaaacgtcgtgctcgtgcagcggcagaaaacatcatccctaactcaacaggtgctgctaaagctatcggtaaagttattcctgaaatcgatggtaaattagatggtggtgcacaacgtgttcctgtagctacaggttcattaactgaattaacagtagtattagaaaaacaagacgtaacagttgaacaagttaacgaagctatgaaaaatgcttcaaacgaatcattcggttacactgaagacgaaatcgtttcttcagacgttgtaggtatgacttacggttcattattcgacgctacacaaactcgtgtaatgtcagttggcgaccgtcaattagttaaagttgcagcttggtatgataacgaaatgtcatatactgcacaattagttcgtacattagcatacttagctgaactttctaaataa

SEQ ID NO: 7814 - DNA, 3567 bp, Staphylococcus aureus
atggtttatttaaaatcaatagatgccattggatttaagtcttttgcagatcaaaccaatgttcaattcgataaaggtgtaactgcaattgttggtccaaatggaagcggtaaaagtaatattacagatgctattaaatgggtgttgggtgaacaatcggctaaatcattacgtggctcaaaaatggaagatattatcttctcaggtgcagaacatcgcaaagctcaaaattatgctgaagtacagttaagattagataatcattctaaaaagctcagtgttgatgaaaacgaagttattgtaacaagaagattgtatcgaagtggtgaaagtgagtactacataaataatgaccgtgcaagattaaaagatattgccgatttatttttagattctggattgggaaaagaagcgtatagcattatctcgcaaggtagagttgatgaaatactaaatgctaaaccaattgatagacgtcaaattattgaagaatcggctggtgtacttaaatataaaaaacgtaaggctgaatcattaaataaacttgaccaaacagaagataatttaacgagagtagaagacattttatatgatttggaaggtcgcgtagaacctctaaaagaggaggcagctatagctaaagaatataagacactttcacatcaaatgaaacatagtgacattgtagttacagtgcacgatattgatcaatatacaaatgacaatagacaattagatcaacgtttaaatgatttacaaggtcaacaagcaaataaagaagctgacaagcaacgtttaagccaacaaattcaacaatataaaggtaaacgacatcaacttgataacgatgttgaatcgcttaattatcaattagtaaaagctacggaagcctttgaaaaatatacgggacaattaaatgttttagaagaacgtaagaaaaatcaatctgaaacaaatgcacgatatgaagaagaacaagaaaatttaatggagcttttagaaaatatatcaaatgagatttctgaagctcaagatacttataagtctctgaaaagtaaacaaaaagaactcaatgctgtcattcgtgaacttgaagaacaactatatgtttcagacgaagcacatgatgaaaaattggaagaaattaaaaacgaatactatacattaatgtcagagcaatcagatgttaacaatgatattcgttttttaaagcatactatagaagagaatgaggctaaaaaatcaagactagattctcgattagttgaagtttttgagcaattgaaagatattcagggtcaaataaaaacgacaaaaaaagaatatcaacagaccaacaaagaactttctgctgtagataaagaaattaaaaatatagaaaaagatctcactgatacaaaaaaagcacaaaatgaatacgaagagaaattgtatcaagcatatcgatataccgaaaaaatgaaaacacgtattgatagtttggcaacgcaagaggaagaatacacttattttttcaatggcgtcaaacatattttgaaagctaaaaataaagaattaaagggtattcatggtgcagttgcggaaattattgatgtgccatctaaattaactcaggcaattgaaacagcattaggtgcttcattacaacatgtcattgtagattcagaaaaagatggacgccaggctattcaatttttaaaagaacgtaatttaggtcgtgcgacgtttttaccattaaatgttatacagagtagagtggtagcgactgatattaaatctattgctaaagaggcaaacggatttattagtattgcttcggaagcagtgaaagtagcaccagaatatcaaaatattatcgggaatttattaggtaatacgattatcgttgatcatttaaagcatgcaaatgaattggcacgtgcgattaaatatcgaactcgtattgttactttggaaggtgatattgtaaaccctggtggttctatgactggtggtggcgctcgtaagtccaaaagtattctgtctcaaaaagacgagttgacaacaatgagacaccaattagaagattacttgcgtcaaacagaatcatttgaacaacaatttaaagagttgaagataaaaagtgatcaattaagtgaactgtattttgaaaaaagtcaaaagcataatacacttaaagagcaagtgcatcattttgaaatggagctcgatagattaactacacaagaaacacaaataaaaaatgatcatgaagaattcgaatttgaaaaaaatgatggttatacgagtgacaaaagtcgacaaactttgagtgaaaaagaaactcatttagaaagtattaaagcatctttaaaacgactagaagatgaaattgaacgctacacaaaactttctaaagaaggtaaggaaagcgtaactaaaacacaacaaacgttacatcagaaacaatctgatcttgctgtggttaaagagcgtattaaaacacaacaacagacaatagatcgattaaataatcaaagtcaacaaactaaacatcaattaaaagatgttaaagaaaaaattgcattctttaattcggatgaagtgatgggcgaacaagcttttcaaaatattaaagatcaaattaatggtcaacaagaaacgagaacacgcttatctgatgaattagataaattgaaacaacaacgtattgagttgaatgaacaaatcgatgcgcaggaagctacactacaagtttgtcaccaagatattttagctatcgaaaatcactaccaagatattaaagctgaacaatcaaagttagatgtattaattcatcatgcgatagatcatttaaatgatgaatatcaattgactgttgaacgtgcgaaatctgaatatacgagtgatgaatcgattgacgcattacgtaaaaaagttaagttaatgaagatgtcgattgatgaactaggtcctgtaaacttaaatgcaattgaacaatttgaagagttaaatgaacgttatacatttttaagtgaacaacgtacagatcttcgtaaagctaaagaaacattagagcaaattataagtgaaatggatcaagaggttactgaaagatttaaagaaactttccatgctattcaaggacattttacagctgtgttcaaacaattgtttggtggaggcgatgcagaattgcaattaactgaagccgattatttaacagctggtattgatattgtggtacaaccaccgggtaaaaagttgcaacatttatcgttactgagtggtggtgagcgtgcattaactgctattgctttactatttgcaattttaaaagtaagatctgcaccttttgttatattagatgaggttgaagctgcactagatgaagcaaatgttattagatacgcaaaatatttaaatgagttatcagacgaaacacaattcattgttattacacaccgtaaaggaacaatggaatttgcagataggttatacggtgtaacaatgcaagaatcaggtgttactaaacttgtgagtgtgaatttaaatacaatagatgatgtgttgaaggaggagcaataa

SEQ ID NO: 7815 - DNA, 7176 bp, Staphylococcus aureus
atgattatgggtaatttgagatttcaacaggaatattttcgtatatacaaaaataatacagaatcaacgacacaccgtaatgcgtattgggttaaactcgctaaaaatgttgaagctactaaaatgatgtatgcattatcgacaattgtgcaacaacatgcatctataagacatttttttgatgttactaccgatgacaatttaacaatgatacttcatgaatttctgccttttattgagataaaacaagttccatcttcttccgcaaactatgatttagaagctttttttaagcaagaattaagtacttaccattttaatgattcacctttattcaaagttaaattgtttcagttcgctgatgctgcatatatactattagattttcatgtgtccattttcgatgatagtcaaattgatatttttcttgatgatttatgcaatgcatatcgtggcaatactgttattaacaatactcgacagcatgcacatataaatagaaatgatgataaagacaatcaagatgcatcgcatatagcattagactcaaactattttcggttagagaataactctgacatccatattgatagttattttccaattaagcatccatttgaacaagctttatatcaaacgtatttgattgatgatatgacatcaatagatatggcatcgttggctgttagtgtgtatttagctaatcatataatgagtcaacaacatgatgtcacattaggtatacatgtaccatcacatttaccaaatgatttacacggaaatattgtgccgttaacgttaacaatcgatgcaaaagatgtatgtcaacgttttacaacagattttaataaatgtgtgttgcaaaatatgtcgcaattacagtgcgcgaagtcttcgctttcactagagactatttttcattgttatcatcatatgatgtcttgttgtaatgatgttattgaggatgtacatcaaatacatgatgcacatacatctttagcggatattgaaatttttccacatcaacacgggttcaaaattatatataacagtgcagcatatgatttgctctcaatcgagacgctgagtgacttagttcgaaatatttatttgcaaattactgaagaaaatggaaataaacgaacaactgtagatgaacttaatttgatgacagaacgtgatattcaattatatgacgatatcaatttaagtttgcctgagatagatgatgcgcaaacagttgttaccttatttgagcaacaagttgaagcaacgccgaatcatgtcgctgtgcaatttgacggagtgtttataacatatcaaacattgaatgcacgcgcgaatgatttagcacaccgtttgagaaaccagtatggtgttgaacctaatgatcgtgtcgctgtcatagctgaaaaaagtattgagatgataatagcgatgataggtgtgttgaaagctggtggggcttacgtgccaattgatccgaactatccaagtgatcgtcaggagtacattttaaaagatgcaacgcctaaagttgtaataacgtaccaagctttatatgaaaatggtaaacaaaatattaatcacattgatttgaataagatagcgtggaaaaatattgataatctttctaaatgtaacacgttagaagatcatgcttatgttatttacacgtcggggacaactggtaaccctaaagggacactaattccgcaccgaggtattgttcgcttggtccatcgaaatcattatgtaccattaaatgaagagacgacaattttgttatcaggaactatagcctttgatgctgcaacatttgaaatatatggtgcattgctcaatggtggaaagctgattgttgctaaaaaagaacaattattaaatccaatagcggtagaacaattaatcaatgaaaatgacgttaatactatgtggttaacctcctcattatttaatcagattgctagtgaacgaatagaagtattggtaccgttaaagtatttattaattggtggagaagtattgaatgctaagtgggtggatttgcttaatcaaaaaccgaagcatcctcaaattattaatggttatggaccaactgaaaatacaacatttacaacgacgtataatatacctaacaaagttccaaatcgtattcctattggtaaaccgattctgggtactcatgtttatatcatgcaaggcgagcgtcggtgtggcgttggtattcctggagaattatgtacaagtggctttgggttagctgcaggttatttaaatcagccagaattgacagcagataaatttatcaaagattcaaatataaatcagctgatgtatagaagtggtgatatcgttcgtttgttacccgatggcaacatagattatttatatcgaaaggacaaacaagttaagattcgagggtttaggattgagttgtcagaggttgagcatgcgctcgagcgtatacaaggtattaataaagcagttgttattgttcaaaatcatgatcaagatcagtatatcgttgcttattatgaagcgatgcatacattatcacataataagattaaatcacaattacgtatgaccttaccggagtacatgataccagttaatttcatgcatattgagcaaattcctattactattaatgggaaattagataagaaggcattgcctatcatggactatgtcgatacggatgcctatgtagcaccgagtacagataccgaacacttgctatgccaaatttttgcagatattttacatgtgaatcaagtaggtattcatgataatttctttgaattaggtggccattcattaaaagcaacgttagtggtgaatcggatagaggcatctactgggaaacgattacaaattggtgatttattacaaaagccaactgtatttgaactagcacaagcgattgctaaggttcaagaacaaaactatgaagtgattccagaagctatagttaaagatgattatgtgctgagctctgcacaaaagcgtatgtatttattatggaaatcaaaccataaagatacggtgtataacgtaccttttttatggcggttatcatcaggacttaatgtagctcaattgcaacaagcagttcagcatttgatagcgcgacatgagattctacgaacacaatatattgttgtagatgatgaggttcgacaacgtattgtggcagatgttgtagctgactttgaagaagttaacacgcattttacggatgaacaagaaattatgcgccaatttgtggcaccttttaatttggaaaagccaagtcaaattagagtgagatacattagaagtcccttacatgcatacctgtttatagatacacatcatatcattaatgacggtatgagtaatatacaattaatgaatgatcttaacgcactttatcaacataaattattgttaccacttaaattgcaatataaagactatagtgagtggatgtcgcatcgtgatatgacgaaacatagacaatattggttatctcaattcaaagatgaagtacctattttaagcttaccgacagactatgttagaccaaatattaaaacgacaaatggagcaatgatgtcatttacaatgaatcaacaaatgagacagctacttcaaaagtatgtagaaaagcatcaaattactgattttatgttctttatgagtgtggtcatgacgttgttaagcagatatgctcgaaaagatgatgttgttgtcggtagtgtgatgagtgcgcgtatgcataaaggcacggagcaaatgctaggcatgtttgctaatacgttggtatatagagggcaaccgtcacctgataaaatgtggacacagtttttacaagaggttaaggaaatgagtttggaggcatacgagcatcaagaatacccattcgaatgtttagtaaatgacttagatcaatcacatgatgcctcacggaatccattatttgatgtcatgttagtactacaaaacaatgaaacgaatcatgctcattttgggcatagtaaattaacacacattcaacccaaatcagtgacggcgaaatttgatttatctttcatcattgaagaagatcgcgatgactatacaatcaatatcgagtataataccgatttatatcactcagaaacagttcgtcacatgggtaatcaatgtatgattatgattgattatattttgaagcatcaagatacactacaaatttgtgatataccaaacggtacggaggaacttctaaattgggtcaatacgcatgttaacgatcgaatgcttaatgtcccgggaaataaatctatcataagttactttaatgaagttgtctcacgacaaggtaatcatgttgcgctagtcatgaatgatttgacaatgacgtatgaaacattacgcaactatgtggatgccattgcgcacatgctcctatcaaatggtgtgggcaatggtcaacgggttgccttgtttacagaacgtagttttgaaatgattgcggcgatgttggcgacagttaaagtaggtgcatcttatatacctatcgatattgattttccgaataaacgacaaggtgcaattttggaggatgctaaagtaactgcagtcatgtcttacggcgttgaaattgaaacgacattaccagtcattcaattggaaaatgctaaaggctttgttgaatcaaaggaaaatgaacaatatgatgatttacatggcaatcaacttgaaaacacagcgatgttagataatgagatgtatgctatttacacatctggtacgaccgggatgcctaaaggggttgccatacgacaacgaaatttgttgaatttagtgcatgcatggtcaactgaattgcaattaggcgacaatgaagtatttttgcaacatgcaaatattgtttttgatgcatcagttatggagatttattgttgtttgttaaatggtcatacgcttgtgattccagatagagaggaacgtgttaatccagaacagttacaacaactcattaataagcatcgtgtgacggttgcgtcgattccgttacagatgtgtagtattatggaagacttttatattgaaaagttgattacaggcggggcaactagtacggcatcctttgttaaatatattgagaagcattgtggcacgtatttcaatgcctatggaccatctgagtcaacagtcatcacatcgtattggtcacatcattgtggtgatttgatacctgagacgattccaattggcaaacccttatctaacatccaagtgtatattatgtcagatggtttgttatgcggtattggtatgccaggcgagttgtgtattgcaggtgatagtttagcgataggatatattaaccgtccagaattaatggctgataaatggcaaaataatccatttggtaaaggaaagttgtatcatagtggtgatttagcacgttatacatctgatggtcaaattgaatttttaggaagaatagataaacaagtgaaagttaacgggtaccgtattgaacttgatgaaattgaaaatgtaatattagctattcgtggtatatctgattgtgttgtaacagtaagtcactttgatacgcatgatatattgaatgcttattatgtcggagagcaacaagtggagcaggatttgaagcaatatttaaatgatcagctgcctaagtatatgattcctaagactataacgcatatcgattgtatgccattaaccacgaatgacaaggtggatactacgcgtttgccaaatccatcacctatacaacagtctaataaagtgtatagcgaaccctctaatgaaattgagcagacatttgttgatgtatttggagaggtgttgaaacaaaatgatgtcggtgttgacgatgatttctttgaacttggtggtaactcattagaggcgatgttagttgtctcgcatttaaaacgatttggccatcatatttcaatgcagacattataccaatataaaaccgtgcgacagattgttaattatatgtaccaaaatcaacaatcattagttgcattaccggataatctttcggaattacaaaagattgttatgtctcgttataacttgggtattttagaggatagtctaagtcatcgacctctaggaaatacactattgactggcgcgacaggttttttaggtgcttatctgattgaagcactacaaggatacagtcatcgcatttattgtttcatacgtgctgataatgaggaaatagcatggtataagttgatgacgaatttaaatgattatttttcagaagagacggttgaaatgatgttatcaaacattgaagtcattgttggtgatttcgagtgtatggatgatgttgttttacctgaaaacatggatacgattattcatgcaggtgctcgtacggatcactttggtgatgatgatgaatttgaaaaagtaaatgttcaaggtactgttgatgtcatacgtttggcacaacaacatcatgcaaggttaatatatgtgtctacgataagtgtgggaacttattttgatatagacacagaagatgtgacattttcagaagcggatgtctataaagggcaactactaacatcaccatatacacggagcaaattttatagtgaattaaaagtattagaagctgtaaataatggcttagatggtcggattgtacgtgttggtaatttgacgagtccttacaatggaagatggcatatgagaaatataaagactaaccgtttttcaatggtaatgaatgatttgttacaactggattgtatcggggttagcatggctgaaatgcctgtagatttttcttttgtggatacgactgcaagacaaattgtcgcattagcacaggtcaacacaccacaaatcatttaccatgtgctatcacctaataaaatgccggtgaaatctttgttagaatgcgttaagcgcaaagaaattgaactcgtcagcgatgaatcatttaatgaaattttacagaaacaagacatgtacgaaacgattggattaactagtgttgaccgtgaacaacaactagcaatgatagatacaacattaacattaaaaataatgaatcacatcagtgaaaaatggccaacgataactaacaattggctgtatcattgggcacaatatatcaaaacaatattcaataagtaa

SEQ ID NO: 7816 - DNA, 1290 bp, Staphylococcus aureus
atgaattttagtgaaagtgaacgtttacaacaactttcaaacgaatatattctaggcggtgtcaattccccttctcgttcttataaagctgtaggaggcggtgcacctgttgttatgaaagaaggacacggtgcatatttatatgatgtcgatggcaataaatttattgattaccttcaagcatacggtccaattattgcggggcatgcacatcctcatattactaaagcaattcaagaacaagcagccaaaggtgttttatttggtacaccgactgaactagaaattgaattcagcaaaaaattacgtgatgcaattccatctcttgagaaaattcgctttgtaaattctggaacagaagcagtcatgacaacaattcgtgttgcacgtgcatatactaaaagaaataaaattataaaatttgctggatcttatcatggccattctgatttagtattggttgcagcaggtagtggcccatctcagctcggttctccagactcagctggtgttccagaaagcgtcgcacgtgaagtcattactgtacctttcaatgatattaacgcatataaagaagcaattgaattttggggtgatgaaattgccgcagtattagtagaaccaattgttggtaactttggaatggtaatgcctcaacctggatttttagaagaggttaatgaaatttcgcataacaatgggacactagtgatttatgatgaagtaattactgcattccgtttccattacggtgccgctcaagatttattaggtgttatccctgatttaactgcatttggtaaaattgttggcggtggtttaccaattggaggctatggtggacgtcaagatattatggaacaagtagcacctctaggacctgcatatcaagctggtacaatggctggtaacccgttatctatgaaagcaggtattgcattactcgaagtactagaacaagacggtgtttatgaaaaattagacagcttaggccaacaactagaagaaggtttacttaaattaatcgaaaaacataatatcacagctacaattaatcgtatttatggatctttaacattgtactttacagatgaaaaagtcacacattatgatcaagttgaacattctgacggcgaagcgttcggtaaatttttcaaattaatgttaaatcaaggtatcaatttagcaccttctaagtttgaagcttggttcttaacaactgaacatacagaagaagatattcaacaaactttaaaagctgcagactatgcttttagtcaaatgaaataa

SEQ ID NO: 7817 - DNA, 360 bp, Staphylococcus aureus
atgatcagtaaaattgataaaaataaagtgcgtttaaaaagacatgctcgtgttcgtactaacttatcaggtacagctgaaaagccacgtttaaacgtatatcgttcaaacaagcatatctacgctcaaattattgatgataataaaggcgtaacattagctcaagcttcttcaaaagacagcgacattgctactacagcaactaaagttgaattagcaactaaagtcggtgaagcaattgctaaaaaagctgctgacaaaggcattaaagaaatcgtatttgaccgtggaggatatttatatcacggacgtgttaaagcattagctgaagcagcaagagaaagcggattagaattttaa

SEQ ID NO: 7818 - DNA, 501 bp, Staphylococcus aureus
atggctcgtagagaagaagagacgaaagaatttgaagaacgcgttgttacaatcaaccgtgtagcaaaagttgtaaaaggtggtcgtcgtttccgtttcactgcattagttgtagttggagacaaaaatggtcgtgtaggtttcggtactggtaaagctcaagaggtaccagaagcaatcaaaaaagctgttgaagcagctaaaaaagatttagtagttgttccacgtgttgaaggtacaactccacacacaattactggccgttacggttcaggaagcgtatttatgaaaccggctgcacctggtacaggagttatcgctggtggtcctgttcgtgccgtacttgaattagcaggtatcactgatatcttaagtaaatcattaggatcaaacacaccaatcaacatggttcgtgctacaatcgatggtttacaaaaccttaaaaatgctgaagatgttgcgaaattacgtggcaaaacagtagaagaattatacaattaa

SEQ ID NO: 7819 - DNA, 2151 bp, Staphylococcus aureus
atggacaatcaattgattaattcaatcatagagaaatatcaatttagtaaaaaacaaattgaagcagtattaacactgctagaagaaaaaaatacagtaccatttattgcgaggtatcgaaaagagcaaactggtggactagatgaagttcaaataaagcaaattgatgacgaataccaatatatggtcaatttacaaaaacgtaaagaagaagttatcaaaaatatagaacagcaaggattacttactgaggaattaaagaaggatattttaaaacagaacaaattacaacgtgttgaagacctatataggccttttaaacaaaagaaaaagacaagggcaactgaggcgaaacgtaaagggttagagccattagcgatatggatgaaggcacgtaaacatgaagtctcaattgaagaaaaagcacaacaatttataaatgaagaagtgcaatcggttgaagatgctatcaaaggtgcacaagatattattgcggaacaaatttcagataatcctaaatatagaacaaaaattttaaaagatatgtatcatcaaggtgtgttaactacatctaaaaagaaaaatgctgaagatgaaaaaggtatttttgaaatgtactatgcatatagtgagccaattaaacgcattgctaatcatagagttttagctgttaatcgtggtgaaaaagagaaagtattatctgtaaagtttgaattcgatacgacatcagtagaggatttcattgcacgtcaagaaatcaatcataataatgtaaatcgcagttatattttagaggcgattaaagatagcttgaaacgcttaattgtcccttcgatagagcgtgaaatccatgctgatttaactgaaaaagctgaaaatcatgcaatagatgtttttagtgaaaacttaagaaatctattactgcaacctccaatgaaaggtaaacaaatattaggcgtagatccagcatttagaacaggttgtaaattagcagtcattaacccattcggtacttttatagcaaaaggtgtgatttatccgcatccaccagtttctaaaaaagaggcagcagagaaggattttgtacaaatggttaaagcgtatgatgtgcaattaattgcaattggcaatggtactgcaagtcgtgaaacagaacaatttgttgcagatttaattaaaaagcatcagttgccagtacaattcatcattgtcaatgaagcgggcgcttcagtatactcagcatcagaaattgctagagatgaatttcctgattttcaagtggaagaaagaagtgccgtatcaattggacgacgcgttcaagatccattaagtgaattagttaaaatcgatcctaaatctattggtgtcggacaataccagcatgatgttaatcaaaaagcactagaaaatgcattaactttcgttgttgaaacagcagttaaccaagtaggtgttgatgtcaatacagcatcatcatcattattacaatatgtgtctggtctaagttcgcaaattgctaaaaatataattgcatatagagaagaaaatggcgcaataaagcataataaagagttaagcaagattaagcgtttgggtgctaaaacttttgagcagagtataggatttttaagaatagtagacggttcagagccattggataatacatcgattcatcccgaaagctataaagtaacgtatcagttattagataaactcggatttggtggcaatgatttaggtagtgatgcattaaaagctaaattaaattcattggatatggatgaactggcgattgaattacaagtcggtgtacctacattagaggatattattaaatccttgaaagcacctaatcgagacccaagggacgagtttgatacaccaatccttaaatccgatgtgctatcaattgaagatttaaaagaaggaatgaaattgagtggcacagttagaaatgtagtagattttggagcatttgtagatataggtgttaaacaagatggacttgtccatgtttcgaaactttctaagaagttcgtaaaaaatccaatggatattgtcagtgttggtgatatcgttgacgtttgggtttacagtattgacaaaaataaagacaaagtatcattaacgatgattgatccacatgaataa

SEQ ID NO: 7820 - DNA, 309 bp, Staphylococcus aureus
atgtttgctattattgaaacaggtggaaaacaaatcaaagtagaagaaggtcaagaaatcttcgttgaaaaattagacgtaaacgaaggagatacttttacatttgataaagtattatttgtaggtggagattcagttaaagttggagcgccaacagttgaaggtgcaacagttactgctactgttaataaacaaggtcgcggtaaaaaaatcactgtattcacatacaaacgtcgtaaaaattcaaaacgtaaaaaaggccatcgtcaaccatacactaaattaacaatcgataaaatcaacgcgtaa

SEQ ID NO: 7821 - DNA, 264 bp, Staphylococcus aureus
atgagattagataaatatttaaaagtatcacggttaataaagcgacgtacgctagcaaaagaagtaagtgatcaaggtagaattacaataaatggtaatgttgctaaagctggatcggatgttaaagttgaagatgtgctgacgattcgctttggtcaaaaattagtaacagttaaagtaactgcattaaatgaacatgcatctaaagataacgcgaagggcatgtatgaaatcattgaagagcgtcgacttgaagaagcgtaa

SEQ ID NO: 7822 - DNA, 1194 bp, Staphylococcus aureus
atggcacataccattacgattgttggcttaggaaactatggcattgatgatttgccgctagggatatataaatttttaaagacacaagataaagtttatgcaagaacgttagatcatccagttatagaatcattgcaagatgaattaacatttcagagttttgaccatgtttatgaagcacatgaccaatttgaagatgtctataacgatattgtggcgcaattggttgaagctgctaatgaaaaagatattgtctatgcggttccgggtcatcctagagttgctgagacaactacagtgaaattactggctttagcaaaggacaatactgatatagatgtgaaagttttaggtggtaaaagctttattgatgatgtgtttgaagcagttaatgtagatccaaatgatggcttcacactgttagatgcgacatcattacaagaagtaatacttaatgttagaacgcatacattgattacgcaagtttatagtgcaatggttgctgctaatttgaaaatcactttaatggaacgatatcctgatgattaccctgttcaaattgtcactggtgcacgaagcgatggtgcggataacgttgtgacatgcccattatatgaattggatcatgatgaaaatgcattcaataatttgacgagtgtattcgtaccaaaaatcataacatcgacatatttgtatcatgactttgattttgcaacggaagtgattgatactttagttgatgaagataaaggttgtccatgggataaagtgcaaacgcatgaaacgcttaagcgttatttacttgaagaaacatttgaattgttcgaagctattgacaatgaagatgattggcatatgattgaagaactaggagatattttattacaagtgttattgcatactagtattggtaaaaaagaagggtatatcgacattaaagaagtgattacaagtcttaatgctaaaatgattcgtagacacccacacatatttggtgatgccaatgctgaaactatcgatgacttaaaagaaatttggtctaaggcgaaagatgctgaaggtaaacagccaagagttaaatttgaaaaagtatttgcagagcattttttaaatttatatgagaagacgaaggataagtcatttgatgaggcctcgttaaagcagtggctagaaaaaggggagagtaatacatga

SEQ ID NO: 7823 - DNA, 1413 bp, Staphylococcus aureus
atggaagaacattactacgtaagtattgatattggatcatcaagcgtaaaaacaatagtaggcgagaaatttcacaatggtataaatgtgataggtacaggacaaacctacacgagcggtataaaaaatggtttaattgatgattttgatattgcgcgacaagcaatcaaagacacaattaaaaaggcatcaatcgcttcgggtgttgatattaaagaagttttcctgaaattacctatcattggaacggaagtttatgatgaatcaaatgaaatcgacttttatgaggatacagaaatcaacggttcacatatcgaaaaagtattagaaggtattagagaaaaaaatgatgtgcaagaaacagaagtaattaatgtgttcccgattcgttttatagtcgataaagaaaatgaggtttcagaccctaaagaattaattgccagacattcattaaaggttgaagcaggcgtaattgctattcaaaaatcgattttaattaatatgattaaatgcgtagaagcatgtggtgttgatgtattagatgtttactctgatgcatataactatggttcaatcctaacagctactgaaaaagagttaggtgcatgtgtcattgatattggtgaagacgttacgcaagttgctttttatgaacgcggtgaattagtagatgctgattctatcgaaatggcagggcgtgatattacagacgatattgcacaaggattaaacacttcttatgaaactgctgaaaaagttaaacaccaatatggtcatgcattctatgattctgcttcagatcaagatatcttcactgttgaacaggttgatagtgatgaaacagtacagtatactcaaaaagatttgagtgactttattgaagcgcgtgtagaagaaatattcttcgaagtatttgatgttttacaagatttaggattaacaaaagtaaatggtgggtttattgtaactggtggatctgcaaacttacttggcgtaaaagaattattatcagatatggtaagtgaaaaagttagaattcacacgccatcacaaatgggaattagaaaacctgaattttcttcagcaatttctacaatttctagtagtatcgcttttgatgagttattagattatgttacaattaattatcatgataatgaagaaactgaagaagatgttattgatgtgaaagacaaagataacgaatctaaattaggcggatttgattggtttaaacgtaaaacaaacaaaaaagatactcatgaaaatgaagtagagtcaacagatgaagaaatttatcaatcagaagataatcatcaggaacataaacagaatcatgaacatgttcaagacaaagataaagataaagaagaaagtaaattcaaaaaactaatgaaatctctatttgaatga

SEQ ID NO: 7824 - DNA, 1173 bp, Staphylococcus aureus
atgttagaatttgaacaaggatttaatcatttagcgactttaaaggtcattggtgtaggtggtggcggtaacaacgccgtaaaccgaatgattgaccacggaatgaataatgttgaatttatcgctatcaacacagacggtcaagctttaaacttatctaaagctgaatctaaaatccaaatcggtgaaaaattaacacgtggtttaggagcaggagctaaccctgaaatcggtaaaaaagctgcagaggaatctcgtgaacaaattgaagatgcaatccaaggtgcagacatggtatttgttacttctggtatgggtggcggaactggtactggtgcagcaccagtcgttgctaaaattgcaaaagaaatgggcgcattaactgttggtgttgtaactcgtccatttagttttgaaggacgtaaacgtcaaactcaagctgctgctggagtagaagctatgaaagctgcagtagatacattaatcgttataccaaatgaccgtttattagatatcgttgacaaatctacgccaatgatggaagcatttaaagaagctgataacgtgttacgccaaggtgtacaaggtatctcagacttaatcgctgtttctggtgaagtaaacttagactttgcagacgttaagacaattatgtctaaccaaggttctgcattaatgggtattggtgtttcttctggtgaaaatagagcggtagaagctgctaaaaaagcaatctcttctccattacttgaaacatctatcgttggtgcacaaggtgtgcttatgaatattactggtggcgagtcattgtcattatttgaagcacaagaggctgctgatattgtccaagatgctgcagatgaagacgttaatatgattttcggtacagttattaatcctgaattacaagatgagattgttgtaacagttattgcaactggttttgatgacaaaccaacatcacatggtcgtaaatctggtagcactggattcggaacaagcgtaaatacttctagcaatgcaacttctaaagatgaatcattcacttcaaattcatcaaatgcacaagcaactgatagtgtaagtgaaagaacgcatacaactaaagaagatgatattccaagcttcattagaaatagagaagaaagacgttcaagaagaacaagacgttaa

SEQ ID NO: 7825 - DNA, 1770 bp, Staphylococcus aureus
atgtctaaaactcaacatgaagtaaaccaaaatattgaccctttaaaaatggctgaatcacttgaacttgaacaactaaatgaaaaaactttaaatgacatgcgttcaggatcagaagtgctagtagaagctctacttaaagaaaatgtggattatttattcggttatcctggtggtgccgtactacctttatacgacacattttatgatggtaaaatcaaacatattttagcaagacacgaacaaggtgctgttcatgctgcagaaggttatgcacgtgtatctggtaaaactggcgtcgttgtagttacaagcggtccaggtgcaactaatgtaatgacaggtattacggatgcacattgcgactctttacctctagttgtattcactggacaagttgctacaccaggcattggtaaagatgcattccaagaagcggatattctatctatgacttcaccaattacaaaacaaaattatcaagtgaaacgtgttgaagatatccctaaaatcgtacacgaagctttccatgtagctaattctggacgcaaaggtcctgtagtgattgattttccaaaagatatgggtgttttagctacaaatgtggatttatgcgacgaaatcaatattccaggttatgaagttgttacagaaccagaaaataaagacattgacactttcatctcacttttaaaagaagcgaaaaagcctgtcgtattagccggcgcaggtattaatcaatcaaaatcaaatcaattattaacacagtttgttaataaacatcaaatcccaacagttactactttactaggtctaggtgctgtaccttatgaggatacactatttttaggtatgggaggtatgcatggttcttatgctagtaacatggcattaactgagtgtgatttactcattaatttaggtagccgcttcgatgatagattagcaagcaaacctgatgcctttgcacctaacgccaaaattgtacatgtagatattgatccttcagaaatcaataaagttattcatgtagatttaggtattattgcagactgtaaaagatttttagaatgtttaaatgataaaaatgttgagactatagaacacagtgactgggttaaacattgtcaaaataataagcagaaacacccatttaaacttggtgaagaagatcaagtattttgtaagccacaacaaacaatcgaatatatcggcaaaattacaaatggtgaagcaattgttactacagacgtgggacaacatcaaatgtgggcagctcaattttatccatttaaaaatcacggacaatgggttacaagcggtggtttaggaacaatgggattcggtattccttcgtcaattggtgccaaattagctaatcctgataaaacagtcgtatgtttcgtcggtgacggtggtttccaaatgacaaaccaagaaatggcacttttacccgaatatggtttagatgtcaaaatcgtactaatcaataatggaacattaggtatggttaaacaatggcaagataagttctttaatcaacgcttctcacactcagtatttaatggtcaacctgattttatgaaaatggcagaagcatatggcgtcaaaggtttcttaatcgataagccagaacaactggaagaacaattagatgcagcgtttgcttatcaaggaccagttttaattgaggttcgtatttcccctactgaagctgtaaccccaatggttccgagtggcaaatcaaatcatgaaatggagggcttataa

SEQ ID NO: 7826 - DNA, 255 bp, Staphylococcus aureus
atgacaagaattcttaaattacaagttgcggatcaagtcagcacgctaaatcgaattacaagtgcttttgttcgcctacaatataatatcgatacattacatgttacacattctgaacaacctgggatttctaacatggaaattcaagtcgatattcaagatgatacatcacttcatatattaattaaaaaattaaaacaacaaattaatgttttaacggttgaatgctacgaccttgttgataacgaagcttaa

SEQ ID NO: 7827 - DNA, 270 bp, Staphylococcus aureus
atggcaatttcacaagaacgtaaaaacgaaatcattaaagaataccgtgtacacgaaactgatactggttcaccagaagtacaaatcgctgtacttactgcagaaatcaacgcagtaaacgaacacttacgtacacacaaaaaagaccaccattcacgtcgtggattattaaaaatggtaggtcgtcgtagacatttattaaactacttacgtagtaaagatattcaacgttaccgtgaattaattaaatcacttggtatccgtcgttaa

SEQ ID NO: 7828 - DNA, 642 bp, Staphylococcus aureus
atgtttaaccaatcgtatctaaatgtgtattttatttgtgggacctccgatgttccgagtcatcgaactattcatgaagtattagaagcagcattaaaggcagggattacacttttccaatttcgagaaaagggtgaatcagctttaaaaggaaacgataaacttgtattagctaaagaattacagcatctctgtcatcaatatgatgtgccttttatcgttaatgatgatgtatccttggcaaaagaaattaacgcggatggtatacatgtcggtcaagatgatgcgaaagtcaaagagatagcacaatatttcactgataaaattattggacttagtattagtgatttagatgagtatgcaaaatctgatttaactcatgttgattatataggtgttggaccaatctatcctacgccgtcgaagcatgacgcgcatataccagtaggtccagaaatgattgcaacgtttaaagaaatgaatccgcaactaccgattgtagctattggcggtatcaatactaataatgtggcgccgattgtagaagcaggtgccaatggaatttcagtcatttcagccatttctaaaagtgaaaatattgaaaagactgttaatcgattcaaagatttttttaataattag

SEQ ID NO: 7829 - DNA, 792 bp, Staphylococcus aureus
atgaattatctaaataaaatacgtattgaaaacccattaacaatttgttatacaaacgatgtagttaaaaattttacagcgaatggtttattaagtattggtgcgagccctgccatgagtgaagctcccgaagaagctgaagaattttacaaagttgcacaagcgctattaatcaatatcggtactttaacagcacaaaatgaacaagatattattgcgattgctcaaacggcaaatgaggcaggcttacctattgtatttgaccctgtagctgttggtgcttctacatatcgaaagcaattttgtaaattattattgaaatcagcgaaagtatcagtaattaaaggcaatgcatctgaaatattagcgttgattgatgatacagcaactatgaaaggtacagatagtgatgctaatcttgatgcggttgcaatagcgaaaaaggcttacgcaatatataaaactgcaatagtaatcacaggtaaagaggacgttattgttcaagataataaagccatcgtattagctaatggatctccattattagcacgagtaactggagctggttgtttattaggaggcgttattgctggatttttatttagagaaacagaaccagacatagaagcgttaattgaagcggtaagcgtatttaatattgctgctgaggtagctgctgaaaatgaaaattgtggtggtcctggtacgttttcaccattgttgcttgatacgttatatcatttaaatgaaacaacctatcaacaacggattcgtattcaagaggtggaataa

SEQ ID NO: 7830 - DNA, 690 bp, Staphylococcus aureus
atggaattttcacaaaaattgtaccaagctgcaaagccaatcattaatgatatttatgaggatgactttattcagaagatgttatccggagatataggagctgacgcattacgccattacttaaaagctgatgctgcgtatttaaaagaatttacaaacttatatgctttgttaattccaaaaatgaatagcatgaatgacgtaaaatttttagtagagcaaatagaatttatggttgaaggtgaagtacttgcgcatgatattttagcgcaaattgttggtgaatcatacgaagaaatcattaaaacaaaagtttggcctccaagtggcgaccattacataaaacatatgtatttccaagcgcatagtcgtgaaaatgctatttatacaattgctgcaatggcaccttgtccatatatttatgcagaattagctaagcgctctcaaagtgatcataagcttaatagagaaaaagatacggcaaaatggtttgatttttatagtactgaaatggatgacataattaacgtatttgaggcattaatgaataaattagccgaatcaatgtctgacaaggaattggaacaagtaaagcaagtatttttagaaagttgcatacatgagcgtcgatttttcaatatggctatgacactagaacaatgggaatttggaggaaaagtaaatgattaa

SEQ ID NO: 7831 - DNA, 318 bp, Staphylococcus aureus
atgacgttgagtggaaaaattagtgttaaagctgaaacgattgcacatgttgtaaaagaattggaaagcattagtcaaaagtatgatgaaatagctcaaaactttggaaaaatagcgcaattaaattactacagtagtgaaaaagctgcacattctatggaaaatggctatagtagtgctgcaacagtcattagtggtctcaaaggtccattgagtacactcggtggtggcgtcatgaattcagcacaaaagttctttgaagcagatgaacattggggtacggaatttgccaagctttactataatattgagggatag

SEQ ID NO: 7832 - DNA, 1845 bp, Staphylococcus aureus
atgacaaaagatattgaatatctaacagctgattatgacaatgaaaagtcatctatccaaagtgtaatagatgcaatagagggtcaagacttcttagatgtagatacaacaatggatgatgcggtaagcgatgtcagttctttagacgaagatggcgcaatatcattaacaagtagtgtagtaggtccacaaggatctaaattaatggggtattatcaaaatgagctatatgattatgcatctcaattagattcgaaaatgaaagaaattattgacacgccatttatagaagatatagataaagcattcaaaggtataacgaatgttaaattggaaaatatattaataaaaaatggcggtggtcatggtagagatacctatggggcttctgggaaaattgcaaagggagatgccaagaaaagtgacagcgatgtttatagcatcgatgaaatattaaaatcggatcaagaatttgtaaaagtaattgatcagcattacaaagaaatgaaaaaagaagataagaaactatctaagagtgattttgaaaaaatgatgactcaaggtgcttcttgtgattacatgacagtagctgaagcggaagagatagaagagcaaaagaaaaaagaagaagctatagagattgcagcactagctggtatggtagttttatcttgtattaatcctgttgctggagcagtagctattggtacttattccgcttattcagcagcaaatgcagccacaggaaaaaatattgtaactggaagaaagctatctaaagaagaacgaatcatggaaggactttcgcttattccattgccaggtatgggcttcctcaaaggtgctgggaaaagtttaatgaaattaggcttcaaaggcggagaaaaatttgcagttaaaacaggattgcaaaagacaatgcaacaagcagttagtcgtatttcacctaaaatgggaatgatgaaaaacagtgtgttgaatcaatctcgtaactttgctcaaaatactcatgttggacaaatgctgagtaacatgcgtggtcaagcaactcatactgttcaacaaagtagaaattggattggacaacaagcacaaaatgtcaaacgaatagtgaataatggacttgataaagaaatagcacatccatttaaacaacaacttgcaccagcgggaatgggtggtataaaatttgctgaaacaactactttgagaaacatgggtcaaaacatgaaacgtgctgttacaccacaaaatcacgtgacacatggtccgaaagatagtatggtgagaagtgaaggtaaacatagtgtaagtagccatgaaataaatttatcaaaatatgttgaatcaccaaactacaccaaggtcaaatatggagagcaatatgcaagacttagacctaagaaactaaaagcaaatatagaatatacaacaccaactggtcacatatatcggactgatcataaagggcgcataaaagaagtttatgtagacaatctttctctaaaagatggcggtcgtaataaccatgcacaaagaactgtgggaggagaggatagattaccagacgatgatggaggtcacttaatcgccagaatgtttggtgggtcaaaagacatagataaccttgtagcacaaagtaaatatatcaaccgttcatttaaggaaaatggtgattggtacaagttggaaaaactatgggaaaaggcaatcaagtctggaaaatcaatagaaaatattaaaatagaagttaaatataaaggtaatagtcaaaggccgactatatttaaagttgaatatgaaattaatggtaaaagaaatattagaagaatattaaataagtag

SEQ ID NO: 7833 - DNA, 631 bp, Staphylococcus aureus
gggtctttccgtcctgtcgcgggtaacctgcatcttcacaggtactatgatttcaccgagtctctcgttgagacagtgcccaaatcgttacgcctttcgtgcgggtcggaacttacccgacaaggaatttcgctaccttaggaccgttatagttacggccgccgtttactggggcttcgattcgtagcttcgcagaagctaaccactcctcttaaccttccagcaccgggcaggcgtcagcccctatacatcaccttacggtttagcagagacctgtgtttttgataaacagtcgcttgggcctattcactgcggctcttctgggcgttaaccctaaagagcaccccttctcccgaagttacggggtcattttgccgagttccttaacgagagttcgctcgctcaccttagaattctcatcttgactacctgtgtcggtttgcggtacgggcacctattttctatctagaggcttttctcggcagtgtgaaatcaacgactcgaagacacaatgtcttctccccatcacagctcagccttaacgagtaccggatttgcctaatactcagccttactgcttagacgtgcaatccaatcgcacgcttcgcctatcctactgcgtccccccatc

SEQ ID NO: 7834 - DNA, 633 bp, Staphylococcus aureus
gggtctttccgtcctgtcgcgggtaacctgcatcttcacaggtactatgatttcaccgagtctctcgttgagacagtgcccaaatcgttacgcctttcgtgcgggtcggaacttacccgacaaggaatttcgctaccttaggaccgttatagttacggccgccgtttactggggcttcgattcgtagcttcgcagaagctaaccactcctcttaaccttccagcaccgggcaggcgtcagcccctatacatcaccttacggtttagcagagacctgtgtttttgataaacagtcgcttgggcctattcactgcggctcttctgggcgttaaccctaaagagcaccccttctcccgagttacggggtcattttgccgagttccttaacgagagttcgctcgctcaccttagaattctcatcttgactacctgtgtcggtttgcggtacgggcacctattttctatctagaggcttttctcggcagtgtgaaatcaacgactcgaagactcaatgtcttctccccatcacagctcagccttaacgagtaccggatttgcctaatactcagccttactgcttagacgtgcaatccaatcgcacgcttcgcctatcctactgcgtccccccatcgat

SEQ ID NO: 7835 - DNA, 1593 bp, Staphylococcus aureus
atgtcagtagacacatacactgaaacaactaaaattgacaaattactgaaaaaaccaacgtcacattttcaactttcgacgacacaactttataataaaatcttagacaataacgaaggggtattaacagaacttggtgctgttaatgcaagtactggaaaatatactggtcgttcgcctaaagacaaattttttgtctctgaaccttcatatagagataacattgattggggagaaattaatcaacctatcgatgaagaaactttcttgaagttataccataaagtactagactatttagataaaaaagatgaactatacgtatttaaaggctacgctggtagcgataaagatacaatgttaaaacttacagtcatcaatgaattagcatggcataatttatttgctaaaaatatgtttattagacctgaatcaaaagaagaagctacaaagattaaacctaacttcactatcgtttctgcaccacattttaaagcagatccagaagttgatggtactaaatctgaaacctttgtcattatttcatttaaacacaaagtcattttaatcggcggtactgaatacgctggtgaaatgaaaaaaggtatcttctctgtaatgaattatctcttaccgatgcaagatattatgagcatgcattgctcagcaaacgttggtgaaaaaggcgatgttgcattattctttggtctatctggcactggtaaaacaaccttatcggctgacccacaccgtaaactaatcggtgatgatgaacacggatggaataaaaacggggtctttaatatcgaaggtggctgctatgcaaaagcaattaatctttccaaagaaaaagaaccacagatttttgacgcaatcaaatatggtgcaattttagagaacactgtagttgcagaagatggttcagtggactttgaagacaatcgttatacagaaaacacgcgtgccgcttatccaattaatcacattgacaatattgtagtaccatcaaaagcagcacatccaaatacaattattttcttaactgcggatgcatttggtgttattccaccgatttcaaagttaaataaagaccaagcaatgtatcatttcttgagtggtttcacttctaaattagctggtacagagcgtggtgtgacagaacctgaaccatcattctcaacatgtttcggagcaccgttcttcccgttacaccctactgtttacgctgatttattaggtgaacttatcgatttacatgatgttgatgtttatcttgttaatactggatggactggcggaaaatatggtgtaggacgtagaatcagcttacattacacacgtcaaatggtaaaccaagcgatttctggcaaattgaaaaatgcagaatatacaaaagatagtacgtttggtttaagcattcctgtagaaattgaagatgtaccgaaaacaattttaaatccaattaatgcttggagcgacaaagagaaatataaagcacaagcagaagatttaattcaacgttttgaaaagaacttcgaaaaatttggtgaaaaagttgaacatattgctgaaaaaggtagcttcaacaaataa

SEQ ID NO: 7836 - DNA, 705 bp, Staphylococcus aureus
atgaaagcattagtattaggtggttctggttcaattggttctgagatagtcaaacaattattaactgatggatttgaagtttatgtgcaatattatcgtactgatataaatgaattaactagcaaatttaatgatgataaagttcgttttatacaagcggatttatctcaaacaattgatattgacaaaacatttggtgacattaaatcattagactgtttaatatatgcaagtggtcagtctttatatggtgttttacaagatatgaaagaccatgatattgatgcatgttatcagttaaatgtcttgcaattaattcgattatgtagatatttcgttgatgttttacgtcaaagtgccaatggaagaattattgtaatttcatcaatttggggtgagacaggagctagtatggaaactatttattcggcgatgaaaagtgcacaattaggtttcgttaaggcgcttagtcaagagcttgcactaacatcagtgacagtaaatgctatcgcacctggatttgtagccggtaatatggcaagtgagtggcaagaagatgaacttcaagcaatgataactgaattaccacaacagcgattggttttaccgagtgaggttgctcatacatgcgcctatttatatcactcaaatgctagaagcgttactggaactatacagaaagttaatggtgcttggtatatttaa

SEQ ID NO: 7837 - DNA, 186 bp, Staphylococcus aureus
gtggctaaaacttcaatggttgctaagcaacaaaaaaaacaaaaatatgcagttcgtgaatacactcgttgtgaacgttgtggccgtccacattctgtatatcgtaaatttaaattatgccgtatttgtttccgtgaattagcttacaaaggccaaatccctggcgttcgtaaagctagctggtaa

SEQ ID NO: 7838 - DNA, 1008 bp, Staphylococcus aureus
atgaatttggctaaacgcatattacaaggggaacaattaacaaaagagactgtattgaaaatttatgaggatactaatattgataccttagatttattaaatgaggcgtacattttaagaaaacattattttggtaaaaaagtaaaattaaacatgattttaaatgctaaaagtggtatatgtcctgagaattgtgggtactgtggacaatcacgagatattaaacaaaaacagcgatatgctttaattccagaggaacaaattatcgatggagcaaaggtggcacatgataatcatattggaacatattgtattgttatgagtggtagaggaccgagcgataaagaagttgatcatattagtaatactgtaagaacgattaaatctcaacacccgcaactaaaaatctgtgcatgtttaggattaacgaatgacgaacaagctaagaaacttaagtcagctggtgtagacagatataaccacaatattaatacaagtgaaaattaccatgataacgtcgtgacaacgcatagttataaagatagaacagatacgatagaactaatgaaagcgaataatatatcaccatgttctggcgtgatttgtggtatgggagaatctaatcaagatattgttgatatggcatttgctttaaaagaaatggatgccgacagtattccgattaattttttgcatccaatcaaaggcacaaagtttggaagcatggatgatttaacaccaatgaaatgtttaagaatcgtagcattattccgattaatcaatcctacgaaagaaattcgtattgctggaggaagagaggtcaacttacgttcgttacagccattagcattaaaagcggcgaattcaatatttgtcggtgattatctaattactggtgggcaaccgaaccaattagactacgatatgattaatgatttgggctttgaaattgattatgacacttgtgaaaataaggaaaacaagaatgatgtttcaagagcaaattga

SEQ ID NO: 7839 - DNA, 423 bp, Staphylococcus aureus
atgaaaatttctactaaagggagatatggacttacattgatgatttctcttgctaaaaaagaggggcaaggatgtatatcattaaagtcaattgctgaagaaaataatttgagtgatttatatttagaacagcttgtaggtcctttaagaaatgcggggttaattcgaagtgtacgcggtgctaaaggtggataccaattaagagtaccagcggaagaaatctcagcaggggatattataagactgttagaaggtccaattacatttgttgaaagtattgaatcagaaccacctgcgcaaaaacaactatggattcgcatgagagatgcagtgagagatgttttagataatacaacattgaaatatttagcggaatatgtagatacaagtgaagatttagacggatacatgttttatatttaa

SEQ ID NO: 7840 - DNA, 183 bp, Staphylococcus aureus
atggcagacgaaagtaagttcgatcaatttaaaggaaatgttaaagaaacagtaggtaacgttactgataacaaagaattagaaaaagaaggtcagcaagataaagcgactggtaaagcaaaagaagttgttgaaaatgctaaaaacaaaataactgatgcaattgataaacttaaaaaataa

SEQ ID NO: 7841 - DNA, 147 bp, Staphylococcus aureus
atgagttttatggataaagctaaagacgcagtagaaaaatttaaaaatagcgataatgaacaagttaaaaatgtaaaagataagataaatgaatatacaggatcgaataacgaagagaaaaaagaaaatgaagataaagagaaataa

SEQ ID NO: 7842 - DNA, 1182 bp, Staphylococcus aureus
atgacgagagtcgtattagcagcagcatacaggacacctattggcgtttttggaggtgcgtttaaagacgtgccagcctatgatttaggtgcgactttaatagaacatattattaaagagacgggtttgaatccaagtgagattgatgaagttatcatcggtaacgtactacaagcaggacaaggacaaaatccagcacgaattgctgctatgaaaggtggcttgccagaaacagtacctgcatttacagtgaataaagtatgtggttctgggttaaagtcgattcaattagcatatcaatctattgtgactggtgaaaatgacatcgtgctagctggcggtatggagaatatgtctcagtcaccaatgcttgtcaacaacagtcgcttcggttttaaaatgggacatcaatcaatggttgatagcatggtatatgatggtttaacagatgtatttaatcaatatcatatgggtattactgctgaaaatttagtagagcaatatggtatttcaagagaagaacaagatacatttgctgtaaactcacaacataaagcagtacgtgcacagcaaaatggtgaatttgatagtgaaatagttccagtatcgattcctcaacgtaaaggtgaaccaatcttagtcactaaggatgaaggtgtacgtgaaaatgtatcagtcgaaaaattaagtcgcttaagaccagctttcaaaaaagacgggacagttacagcaggtaatgcatcaggaatcaatgatggtgctgcgatgatgttagtcatgtcagaagacaaagctaaagaattaaatatcgaaccattggcagtgcttgatggctttggaagtcatggcgtagatccttctattatgggtattgcaccagttggcgctgtagaaaaggctttgaaacgtagtaaaaaagaattaagcgatattgatgtatttgaattaaatgaagcatttgcagcacaattattagctgttgatcgtgaattaaaattacctcctgaaaaggtgaatgttaaaggtggcgctattgcattaggacaccctattggtgcatctggtgctagagttttagtgacattattgcatcaactgaatgatgaagttgaaactggtttaacatcattgtgtattggtggcggtcaagctatcgctgcagttgtatcaaagtataaataa

SEQ ID NO: 7843 - DNA, 909 bp, Staphylococcus aureus
atgagtgtatttatagataagaatactaaagtaatggtacaaggtattacagggtctactgcccttttccatacaaaacaaatgcttgattatggtacgaaaatagtagcaggtgtgacgcctggtaaaggtggtcaagttgttgaaggcgttcctgttttcaacactgttgaagaagctaaaaatgaaactggggcaacggtttcagtcatttacgttccagcaccatttgctgcagactcaattttagaagcagctgatgcagacttagatatggttatttgtatcactgaacatattcctgtattagacatggttaaagttaaacgctacttacaaggtagaaaaacacgtttagttggtccgaactgtccaggtgtgattacagcagatgaatgtaaaattggtattatgcctggctatattcacaaaaaaggtcatgttggtgtagtatcacgttcaggtacactaacatatgaagcagtgcaccaattgactgaagaaggtattggtcaaactacagctgttggtattggtggagacccagtcaacggaacaaactttattgatgttttaaaagcattcaatgaagatgacgaaacgaaagcagttgttatgattggtgaaatcggtggtacagctgaagaagaagcagctgaatggattaaagcgaatatgacaaaaccagttgtaggctttatcggtggacaaacagcacctcctggaaaacgtatgggacatgctggtgcaatcatttcaggtggtaaaggtactgctgaagagaaaataaaaacattaaatagttgtggtgtgaaaacagcggcaacaccttcagaaattggttcaacattaattgaagctgctaaagaagcaggtatttatgaatcattattaacagttaataaataa

SEQ ID NO: 7844 - DNA, 1362 bp, Staphylococcus aureus
atgcttcgttgtttaattgcgaacagaggtgaaattgctgtaaggattataagagcttgcagagaatatgggattgaaactgtagcagtttatgcaaaaggggacgagcaaagcttgcatgtacatttagcagatcaagctatatgtattggggaagctaatgctttagatagttatttaaatattgaccgcatcatatctgctgcacaaatcactggtgctaatgcaattcacccaggatatggctttttatcagaatcaacaaaatttgctcaaaccgttgaggaacaaggcatagcgtttatagggcctactaaaaaaacgatggaaatgatgggggataaaataacagcaagacaaacagttcatcatgcaggtgttcctgtgattccaggatcaaatggtgctgtgaatcatgtgtctgaaattgagaatcttgccaaagacatcggttatccagttgttatcaaagctgccagtggcggtggtggtaaaggtatacgtattgtaaagaaagctgaagatttagaaaaggcatttaaagaagctaaaagtgaaggaaaaaaatactttgatgatgatcgtgtttatgttgaggcttttatacctgttgcaaaacatgttgaagttcaagttatgggagatgggcaggataattatgtacatttaggggaacgtgattgttctgtacaacgtaaaaatcaaaaattaatcgaagaatctccttgtgcagcattaactgaagaacgacgacaacaaatatgtaacgatgctgttaaagttgcacgtgcagcaaattatagaagtgcaggtacgattgaatttttagtaactgataccgcacattactttattgaaatgaatgctcgaatacaagttgaacatactgttacagagatgcgagcagaacgtgatttggttgcagcacaactgtatttattggaacataatcatttacctttttcacaaagcgatattcaatttaatggtcatgtgatagaagcgagaataaatgccgaaaatcctgaaaagaaatttcaaccaacaccaggtaaagtgacagcgttacatttacctcaaggctttaatgtgcgagtcgattctttactatatcacggttatcaagtttcaccatattatgattctttagtagctaaagtaattgtaaaatctcatgatagagcttcagcaattgataagttgaaagtcaccttagatgaaatggtgatagatggattttctacaactgccgattttttatatgcagttttaaattatccactatatcgtgatggagatgcaaaagatgttgatattaaatttttagaaaaacatcaaattgttaaaggggtggaattataa

SEQ ID NO: 7845 - DNA, 369 bp, Staphylococcus aureus
atgtcgaataaacttgatggaatcaataaaatgatcacagcgaaacataagcaaatggatgacttatatgatgaaaagcgagaggttaaagctttgatagacgaaagtgatgagcttaatcattcgatagaacaattatatcaacatttaggtgaccgttatcatagtagcaatatggctagtcgtatggaacagttccgcgatgaatttcattttgcgaaacgacgttcaacggaagcgttatacgagcagcaacagcaaattcaacatggcattcgtaaagcggaagaagagatgattgacttggaaatgcgaaggaatgttgaaattgagacggtgacaaaggaggaaaataaatggaaacaatag

SEQ ID NO: 7846 - DNA, 297 bp, Staphylococcus aureus
atggaaacaataggaagcattatttatttaaaagaaggttcgcaaaagttaatgattattaatagaggaccaattgtagaaattgaaaatcaaaagtatatgtttgactattctgcatgtaaatatccgattggtgttgtggaagatgaaatttattattttaacgaagaaaatatagattcagttatttttaaaggttattctgatcaagatgaggttagatttcaagagttgtttgaaaatatgaaacaaaatttggatagtgaaatacaacgtggagaagttacaccacaataa

SEQ ID NO: 7847 - DNA, 1002 bp, Staphylococcus aureus
atgcaaaataaacaaattctttttaacaaaataccagaaggcatgcctcaagaggatacattcaaaattgaagagattgacacgcctaaacttgagagcgatggtgtacttgtacaaacgctgtatatttcagtggatccatatatgagaggacgtatgactaaggcagattcgtatgtacagccttttgaaattggtaaaccgattgttagccatgtcgttgcaaaagtaattgattcgacactcgcagattataaaaaaggagatgtcgttgtaggtatgttgccttggcgaatcattaatcatgtccaagcggatcaaattactaaagttccaacgacagatgtaccacttgatttatatttaagtgttttaggaatgccaggacaaacagcatatcatggtctgcttgatattggacaacctaaagccggtgatactgttgtggtttcagctgcatctggtgctgtaggttcagttgtaggtcaaattgctaagattaaaggttgccgtgtagtaggtattgcgggtggcgacaaaaaagtaaattatttaacagagacactgggctttgacgctggtattgattataagaaagaggattttgcagaagcgttagcacaagcagtaccagatggtattgatgtttattttgaaaatgttggtggtacagttggcgatgaagtatttaagcatttaaatcgttttgcacgtgtaccagtatgcggcgcaatttcgtcatataatcatcctgaagcagatatcggaccacgtattcaaggtacgcttattaagaagcaagtaatgatgagaggcttcttagtaagtgaattcgctaatgcttttaaagaagctagtgaacagctcgcaacatgggttcaagaaggtaaaattcagtcacaagtaaccattgaagatggttttgaaaatgcgccacatgcatttaaaaatttatttactggcgataactttggtaaacaagttattaaagtaacggaataa

SEQ ID NO: 7848 - DNA, 918 bp, Staphylococcus aureus
atggcgacaaaaaacgaggaaatattacgtaaaccggattggttgaaaataaaattaaataccaacgaaaactatacaggacttaagaagatgatgagggaaaaaaatcttaatactgtatgtgaagaagctaaatgtcctaatatacatgaatgttggggtgcacgtcgtacagcgacatttatgattttaggtgccgtatgtacaagagcttgtcgtttttgtgcggttaagacaggtttacctaatgaacttgatttaaatgagcctgaacgtgtagctgaatcagttgaattaatgaatttgaaacacgttgttatcactgctgttgcgcgtgatgatttaagagatgctggttcaaatgtttatgctgagacagtacgtaaagttagagaaagaaatccatttacaacgattgaaattttaccatcagatatgggcggggactatgatgcgttagaaacattaatggcgtcaagacctgacattttaaaccataatattgaaactgttcgtcgcttaacaccgagagttcgtgcgcgtgcgacttacgacagaacattagagtttttacgtcgttcaaaagaattacaaccagatatcccaactaaatcaagtattatggttggattaggtgaaactatagaagaaatttatgaaacgatggatgatttacgtgcgaatgatgtagatattttaacgattggtcaatatttacaaccttcacgtaaacatttaaaggttcaaaaatattacacgcctttagagtttggtaaattaagaaaagtggcaatggataaagggtttaaacattgccaagctggacctttagtacgtagttcttatcatgcggatgagcaagtaaatgaagctgctaaagaaaagcaacgccaaggtgaggcacagttaaatagttaa

SEQ ID NO: 7849 - DNA, 384 bp, Staphylococcus aureus
ttgataaaagtagatcaacattactttgaattaatagaaaattatcgcgaatgttttaatgaagaacaatttattgctaggtattcagatattttagacaaatatgattacattgttggtgactatggttacgatcaattacgattaaaaggcttttacaaagattctaataaaaaagcagagatgagtaaacgtttttcaaatattcaagattacatatttgaatattgtaactttggttgtccttactttgtattaagacatttgtctaaacaagaggttaaaaagttaatcgaagaagttcatccgtctgatgtgatagatgacgacaataaacttcaagatgtgaagattaagccaaccattcaagatactgaacattaa

SEQ ID NO: 7850 - DNA, 603 bp, Staphylococcus aureus
atggctcgattcagaggttcaaactggaaaaaatctcgtcgtttaggtatctctttaagcggtactggtaaagaattagaaaaacgtccttacgcaccaggacaacatggtccaaaccaacgtaaaaaattatcagaatatggtttacaattacgtgaaaaacaaaaattacgttacttatatggaatgactgaaagacaattccgtaacacatttgacatcgctggtaaaaaattcggtgtacacggtgaaaacttcatgattttattagcaagtcgtttagacgctgttgtttattcattaggtttagctcgtactcgtcgtcaagcacgtcaattagttaaccacggtcatatcttagtagatggtaaacgtgttgatattccatcttattctgttaaacctggtcaaacaatttcagttcgtgaaaaatctcaaaaattaaacatcatcgttgaatcagttgaaatcaacaatttcgtacctgagtacttaaactttgatgctgacagcttaactggtactttcgtacgtttaccagaacgtagcgaattacctgctgaaattaacgaacaattaatcgttgagtactactcaagataa

SEQ ID NO: 7851 - DNA, 525 bp, Staphylococcus aureus
atgaaagaacgttacttaatcattgatggatacaatatgataggacaatcaccaacgctaagcgccattgcaaaagagaatttagaagaagctagaatgcaattaatagatgcaattgcaaattataatgcagttatttcagatgaaattatttgtgttttcgatgcttatgaccaatcgggtgttgaaagagaatacatgtatcatggcgttaaaacgatttttaccaaggaaaaagaaacagctgatagtttcatagaacgttatgtttatgaactttatgacaagcatactaagcatattgcagttgtaacaagtgatatgagtgagcaacatgctatctttggatcaggtgcatatagaatatcatctcgcgaaatgtggagagatttaaaagaaaatgaaattgatgtgagtaaatcattagatgatataagtgaaaacaagccaagaactcgaattccgttatcttctgaaatccttgcagaatttgaaaaaatacgaagaggacatcataagaaatga

SEQ ID NO: 7852 - DNA, 1314 bp, Staphylococcus aureus
atgaatcaatatcattctaatgcacaacaaccaagtgcatggcgtttttttgtctatagtttagtgggcatactatgtttctttattccttttacgattaatggtaacaacactattttcgtcgatcatgttcatctagccattcgctcaatcataggtccacttatgccctatgttgcactgattatgattttaattggtacagcgttaccaatagtgagacgtacttttatgacttcaatcacaaacttggtcattacattatttaaagttgcaggtgcaatgattggtataatgtatgtatttaaaatcggtccatcaatactatttaaagctaactatggtccgttcttgtttgaaaaattaatgatgccattaagtatcttaattccagtaggtgcaattgcgctttctttattagtaggctatggcttattagaatttgtcggtgtttatatggagcctattatgagacctatttttaaaacaccaggaaaatccgctgtcgatgcagtagcttcgtttgtcggcagttattccttaggattattgattactaatcgtgtctataagcaagggatgtacaacaaacgagaagccacgattattgcgactggcttttcaacagtttcagcaacttttatgattatcgttgctaaaactttagggctaatgccgcattggaatttatacttttggataactttagtcatcacatttgtcgtgactgcaattactgcatggctaccgccaatcaccaatgaatcaacagaatattataacggacaagaaggagaacaagaagttgctattgaaggaagcagactgaaaactgcatatgcagaggcgatgaaacaaaatgcattaacaccatctctcgtgaagaacgtttgggacaattttaaagacggtttagaaatgactgttggtattttgccttctatattatcgattggttttttaggactgattgtagcgaactatacaccattcattgattggcttggctatatattctatccatttatttatattttcccaattgctgatcaggctgtacttgcaaaagcgtcagcgatttctattgtagaaatgtttctaccatctttgttagtaactaaagctgcaatgagtactaaatttgtcgtcggtgtagtaagcgtatcagccattatctttttctcagcattagtgccatgtatactagcaactgaaattaaaatacctgtctggaaactcatcatcatttggtttttacgcgtggcattgtcgctattaatcaccatccccgtcgctttacttatttttggataa

SEQ ID NO: 7853 - DNA, 3507 bp, Staphylococcus aureus
atgacaatattgacaacgcttataaaagaagataatcattttcaagaccttaatcaggtatttggacaagcaaacacactagtaactggtctttccccgtcagctaaagtgacgatgattgctgaaaaatatgcacaaagtaatcaacagttattattaattaccaataatttataccaagcagataaattagaaacagatttacttcaatttatagatgctgaagaattgtataagtatcctgtgcaagatattatgaccgaagagttttcaacacaaagccctcaactgatgagtgaacgtattagaactttaactgcgttagctcaaggtaagaaagggttatttatcgttcctttaaatggtttgaaaaagtggttaactcctgttgaaatgtggcaaaatcaccaaatgacattgcgtgttggtgaggatatcgatgtggaccaatttcttaacaaattagttaatatggggtacaaacgggaatccgtggtatcgcatattggtgaattctcattgcgaggaggtattatcgatatctttccgctaattggggaaccaatcagaattgagctatttgataccgaaattgattctattcgcgattttgatgttgaaacgcagcgttccaaagataatattgaagaagtcgatatcacaactgcaagtgattatatcattactgaagaagtgattagacatcttaaagaagagttgaaaactgcatatgaaaatacaagacccaaaatagataaatcagtgcgcaatgatctgaaagaaacgtatgaaagctttaaattattcgaaagtacatactttgatcatcaaatactacgtcgtttagtagcgtttatgtatgaaacaccttcgacaattattgagtatttccaaaaagatgcaatcattgcagttgatgaatttaatcgtattaaagaaactgaagaaagtttaacagtagagtctgattcgtttattagcaatattattgaaagtggtaatggatttataggacaaagttttataaaatatgatgattttgaaacattgattgaaggctatcctgtcacttatttttcattattcgctacaacaatgccgataaaactaaatcatattattaaattttcatgtaaacctgtccaacaattttatgggcaatatgacattatgcgttctgaatttcaacgatatgtcaatcaaaattatcatatcgtggttttggtcgaaactgaaactaaagttgaacgtatgcaagcgatgttaagtgaaatgcatattccatcaataacaaaattgcatcgctcaatgtcatcggggcaagcagtgattattgaaggcagtttatctgaaggatttgaactacctgatatgggattagttgtcattactgagcgtgagctttttaaatcaaaacagaaaaagcaacgaaaacgtacgaaagctatctcaaatgctgaaaaaattaagtcttaccaagatttaaatgtgggagattatattgttcatgtgcatcatggtgttggtagatatttaggtgttgagacgctcgaagtggggcaaacgcatcgtgattatattaaattgcaatataaaggtacggatcaactatttgttccagtagatcaaatggatcaagttcaaaaatatgtagcttcggaagataagacgccaaaattaaataaactcggtggcagtgaatggaaaaaaacaaaagcaaaagttcaacaaagtgttgaagatattgctgaagagttgattgatttatataaagaaagagaaatggcagaaggttatcaatatggggaagacacagctgagcaaacaacatttgaattagattttccatatgaacttacgcctgaccaagctaaatctatcgatgaaattaaagatgacatgcaaaaatcgcgtccaatggatcgcttgctatgtggtgatgttggttatggtaaaactgaagttgcagtgagagcagcattcaaagctgtaatggaaggaaagcaagttgcatttttagttcctacaactattttagctcagcaacattatgagacgttaattgagcgtatgcaagattttcctgttgaaattcaattaatgagtcgttttagaacgccgaaagagataaaacaaactaaggaaggacttaaaactgggtttgttgacatagttgttggtacacacaaattacttagtaaagatatacagtataaagatttagggctgttgattgtagatgaagaacaacgatttggtgtacgccataaagagcgtattaaaacattaaaacataatgtagatgtactaacattgactgcaaccccaatacctagaacattgcatatgagtatgctaggtgtgcgcgatttgtcagtgattgaaacgccgccagaaaatcgtttcccagttcaaacatatgtattagaacagaacatgagttttatcaaagaagctttagaaagagaactatcccgtgatggccaagtgttttatctttataataaagtgcaatccatttatgaaaaacgagaacaactccagatgttaatgccagatgctaacattgcagttgctcatggacaaatgacagagcgcgatttagaagaaacgatgttaagttttatcaataatgaatatgatattttagtaacgacgacgattattgaaacaggtgtcgatgtcccaaatgcaaatactttgatcattgaagatgcagatcgctttggattgagtcagttgtatcaattaagaggtcgtgttggtcgttcaagtcgtattggttatgcatacttcttacatccagcaaataaggtactaactgagactgcagaagatcgattacaagcgattaaagaatttacggagttaggctcaggatttaagattgcgatgcgtgatttgaacattcgtggtgctggtaatttgttaggtaaacaacagcacggctttattgatacagttggatttgatttgtacagtcaaatgttagaagaagctgtaaatgaaaaacgtggtattaaggaaccagaatctgaggtgccagaagtcgaagttgatttaaacttggatgcatatttgccaacagaatatattgcaaatgaacaagctaaaattgaaatttataaaaagctacgaaaaactgaaacatttgatcaaattatcgacattaaagatgaattaattgatcgttttaatgattatcctgttgaagtagcacgtttgcttgatatagtggaaataaaagtacacgcattacattcaggtatcacgttgattaaagataaagggaaaataattgatattcatttatctgtaaaagccactgaaaatattgatggcgaagtgctgttcaaagcaacacaacctttaggtagaacaatgaaggttggtgttcaaaataatgcaatgacaattactttaacgaaacaaaatcaatggcttgatagtttgaagtttttagttaagtgcattgaagaaagcatgagaatcagtgatgaagcataa

SEQ ID NO: 7854 - DNA, 618 bp, Staphylococcus aureus
atgccttttacaccaaatgaaattaagaataaagagttttcacgtgtaaagaatggtttagaacctactgaagttgctaattttttggagcaactaagcactgaaattgaacgtcttaaagaagataaaaaacaacttgaaaaagtaatcgaagagagagatactaatattaagtcttatcaagacgtgcatcaatctgtaagtgatgctttgatacaagctcaaaaagctggtgaagaaactaagcaagctgcagagaaacaagctgaagcgattatagctaaggcagaagcgcaagctaatcaaatggttggtgacgcggtagaaaaagcacgccgtttagcattccagactgaagatatgaaacgtcaatcaaaagtatttagatcgcgtttccgtatgttagttgaagcgcaattagacttattaaaaaacgaagattgggattacttgttgaattatgatttagacgctgaacaagtgacgcttgaaaatattcatcatttgcatgaaaatgatttaaagccagatgaagttgcagcaaatgcacaaaataatgcatcaaatacaccagacaataatcaacaatccaatgattcagaaacaactaagaagtaa

SEQ ID NO: 7855 - DNA, 1182 bp, Staphylococcus aureus
gtgtcagaattaattatatataacggcaaagtttatactgaagatggcaaaatcgataatggttacattcatgtgaaagatggacagattgttgcaattggagaaggggatgataaagcagcaattgataatgatacgacaaataaaattcaagtgattgatgctaaaggtcatcatgtattaccaggttttattgatatacatattcatggtggttatggtcaagatgcaatggatgggtcatacgatggcttaaaatatctatccgaaaatttgttatctgaagggacgacatcatacttggccactacaatgacgcaatctactgataaaatagataaagcacttacaaatattgctaaatatgaagcggagcaagatgttcacaatgcagcggaaattgtaggtatacatttagaaggaccatttatatctgaaaataaagttggtgctcaacatccgcaatacgttgtacgcccatttatcgataaaattaaacattttcaagagactgctaacagattaataaagattatgacgtttgcacctgaagttgaaggtgcaaaagaagcgcttgaaacgtataaagatgacattattttttcaattggtcatacagtggcaacatacgaagaagcagtcgaagctgttgagcgaggagctaaacatgtcacgcatttatataatgcagcgacgccattccaacatagagaaccaggtgtttttggagcagcatggttgaatgatgctctacataccgaaatgattgttgatggcacacattctcatccggcatcggttgcaattgcttaccgtatgaaaggtaatgaacgtttttatttaattaccgatgcaatgcgtgcaaaaggtatgcctgaaggagaatatgatttgggtggacaaaaagtaactgttcaatcgcaacaagcacgtcttgcaaatggtgcgcttgctggtagtattttaaaaatgaatcatgggttacgtaacttaatatcatttacaggtgatacattagatcatttatggcgagtaacaagtttaaatcaagccattgcattaggtatcgatgatagaaaaggtagtattaaagtaaataaggatgcagatcttgttattctagatgatgatatgaatgtaaaatctacaataaaacaaggcaaggttcacacatttagctaa

SEQ ID NO: 7856 - DNA, 1521 bp, Staphylococcus aureus
ttgcaaaattttaaagaactagggatttcggataatacggttcagtcacttgaatcaatgggatttaaagagccgacacctatccaaaaagacagtatcccttatgcgttacaaggaattgatatccttgggcaagctcaaaccggtacaggtaaaacaggagcattcggtattcctttaattgagaaagtagtagggaaacaaggggttcaatcgttgattttagcacctacaagagaattggcaatgcaggtagctgaacaattaagagaatttagccgtggacaaggtgtccaagttgttactgtattcggtggtatgcctatcgaacgccaaattaaagccttgaaaaaaggcccacaaatcgtagtcggaacacctgggcgtgttatcgaccatttaaatcgtcgcacattaaaaacggacggaattcatactttgattttagatgaagctgatgaaatgatgaatatgggattcatcgatgatatgagatttattatggataaaattccagcagtacaacgtcaaacaatgttgttctcagctacaatgcctaaagcaatccaagctttagtacaacaatttatgaaatcaccaaaaatcattaagacaatgaataatgaaatgtctgatccacaaatcgaagaattctatacaattgttaaagaattagagaaatttgatacatttacaaatttcctagatgttcatcaacctgaattagcaatcgtattcggacgtacaaaacgtcgtgttgatgaattaacaagtgctttgatttctaaaggatataaagctgaaggcttacatggtgatattacacaagcgaaacgtttagaagtattaaagaaatttaaaaatgaccaaattaatattttagtcgctactgatgtagcagcaagaggactagatatttctggtgtgagtcatgtttataactttgatatacctcaagatactgaaagctatacacaccgtattggtcgtacgggtcgtgctggtaaagaaggtatcgctgtaacgtttgttaatccaatcgaaatggattatatcagacaaattgaagatgcaaacggtagaaaaatgagtgcacttcgtccacctcatcgtaaagaagtacttcaagcacgtgaagatgacatcaaagaaaaagttgaaaactggatgtctaaagagtcagaatcacgcttgaaacgcatttctacagagttgttaaatgaatataacgatgttgatttagttgctgcacttttacaagagttagtagaagcgaacgatgaagttgaagttcaattaacttttgaaaaaccattatctcgcaaaggccgtaatggtaaaccaagcggttctcgtaacagaaatagtaagcgtggtaatcctaaatttgacagtaagagtaaacgttcaaaaggatactcaagtaagaagaaaagtacaaaaaaattcgaccgtaaagagaagagcagcggtggaagcagacctatgaaaggtcgcacatttgctgaccatcaaaaataa

SEQ ID NO: 7857 - DNA, 1995 bp, Staphylococcus aureus
atgataggtaaaataataaatgaacgatataaaattgtagataagcttggcggcggtggcatgagtaccgtttatcttgcagaagatacgatacttaacattaaagttgcaattaaggcgatttttataccacctagagaaaaagaagaaacattaaaacgttttgaacgagaagtacataactcatcacagctatcacatcaaaatatagtaagtatgatcgatgttgatgaagaagatgactgttactacttagtaatggaatatattgaaggtccgactttgtctgagtatattgaaagtcatgggccattaagtgttgacacggcgattaattttacgaatcaaatattggatggcattaaacatgcgcatgatatgcgtattgtacatagagatattaagccacaaaatatattaattgacagcaataaaacgttgaaaatatttgattttggaattgctaaagctttaagtgagacgtctttaactcagactaatcatgtgttaggtactgtgcagtacttttcgccagaacaagcaaaaggtgaggcaacggatgaatgtacagatatttattctataggtattgtgttatatgaaatgcttgttggtgaaccaccctttaatggagaaactgcagttagcattgcgattaaacatattcaggattctgtgccaaatgtgacaacagatgtacgtaaggatattccgcaatctttaagtaatgtcattttacgcgctacagaaaaagacaaagcgaatcgttacaaaacaattcaagaaatgaaagatgatttgagtagtgttttacatgaaaatcgagcgaatgaagatgtctatgaactcgataaaatgaaaacgatagcggtacctttgaaaaaagaagatctagcaaagcatattagtgaacataagtcgaatcaacctaaacgtgaaacgacgcaagtacctattgtaaatgggcctgctcatcatcagcaattccaaaagccagaaggtacggtgtacgaaccaaaacctaaaaagaaatcaacacgaaagattgtgctcttatcactaatcttttcgttgttaatgattgcacttgtttcttttgtggcaatggcaatgtttggtaataaatacgaagagacacctgatgtaatcgggaaatctgtaaaagaagcagagcaaatattcaataaaaacaacctgaaattgggtaaaatttctagaagttatagtgataaatatcctgaaaatgaaattattaagacaactcctaatactggtgaacgtgttgaacgtggtgacagtgttgatgttgttatatcaaagggccctgaaaaggttaaaatgccaaatgtcattggtttacctaaggaggaagcattgcagaaattaaaatcgttaggtcttaaagatgttacgattgaaaaagtatataataatcaagcgccaaaaggatacattgcaaatcaaagtgtaaccgcaaatactgaaatcgctattcatgattctaatattaaactatatgaatctttaggcattaagcaagtttatgtagaagactttgagcataaatcctttagcaaagctaaaaaagccttagaagaaaaagggtttaaagttgaaagtaaggaagagtatagtgacgatattgatgagggtgatgtgatttctcaatctcctaaaggaaaatcagtagatgaggggtcaacgatttcatttgttgtttctaaaggtaaaaaaagtgactcatcagatgtcaaaacgacaactgaatcggtagatgtaccatacactggtaaaaatgataagtcacaaaaagttaaagtttatattaaagataaagataatgacggttcaactgaaaaaggtagtttcgacattactagtgatcaacgtatagacattcctttaagaattgaaaaaggaaaaacagcaagttatattgttaaagttgacggtaaaactgtagctgaaaaagaagtcagctatgatgatatttaa

SEQ ID NO: 7858 - DNA, 414 bp, Staphylococcus aureus
atgccaactattaaccaattagtacgtaaaccaagacaaagcaaaatcaaaaaatcagattctccagctttaaataaaggtttcaacagtaaaaagaaaaaatttactgacttaaactcaccacaaaaacgtggtgtatgtactcgtgtaggtacaatgacacctaaaaaacctaactcagcgttacgtaaatatgcacgtgtgcgtttatcaaacaacatcgaaattaacgcatacatccctggtatcggacataacttacaagaacacagtgttgtacttgtacgtggtggacgtgtaaaagacttaccaggtgtgcgttaccatattgtacgtggagcacttgatacttcaggtgttgacggacgtagacaaggtcgttcattatacggaactaagaaacctaaaaactaa

SEQ ID NO: 7859 - DNA, 831 bp, Staphylococcus aureus
atggaaactttagaattacaaggcgctaaattacgataccaccaagtcggacaaggacccgtgctcatctttattcctggtgcaaacggtaccggaaacatttttctgcctcttgcagaacagttaaaagaccattttactgttgtagccgttgatcgtcgtgattatggagaaagcgagttaactgaaccactccctgattccgcttcaaaccctgacagtgattatcgtgtcaaacgcgacgcacaggacattgccgaacttgcaaagtcattaagtgatgaacctgtctatatattaggttcaagttcaggttcaatcgttgcgatgcatgtgttaaaagattaccctgaagtcgttaaaaagattgcatttcacgaaccaccaattaatacatttttaccagacagtacttattggaaagataaaaatgatgacattgtgcatcaaattttaacagaaggcttagaaaaaggtatgaaaacatttggtgaaacattaaatatcgcaccaattgatgcaaaaatgatgtctcaacctgctgatactgaagaaggacgtatagaacagtacaaacgtacgatgttctggtcagaatttgaaattagacaatatacgcattcagatattactttggatgatttcacaaaatacagcgataaaatcaccctactaaatgggacagattctagaggctccttcccacaagatgttaacttttatataaacaaagaaactggcatacctattgtagatattccaggcggtcacttaggttatattcaaaaacctgaaggctttgctgatgtattattaaatatgtggggttaa

SEQ ID NO: 7860 - DNA, 1011 bp, Staphylococcus aureus
atgaaaagtattacgtttgaagaacattatgtcattgaagatattcaaaaagaaacgatgaatgcgatatcagcagatcctaaaggtgtaccgatgaaagtaatgttagaaggccttgaaaaaaagacaggttttacaaatgccgacgaattatcacatcatgatgaacgtatccaatttatgaataatcaagacgttcaaattcaagtcttatcttatggaaatggatctccttcaaatttagttggtcagaaagccattgaattatgtcaaaaagcaaatgatcaattggcaaactatattgcccaatatcccaatcgctttgtaggctttgcaactttacctatcaatgagcctgaagccgcagcgcgagaattcgaacgttgcatcaatgatttaggattcaaaggtgcgctcattatgggacgtgcacaagatggttttcttgatcaagacaaatatgacattattttcaaaacagctgaaaatttagacgtaccgatttatctacatcccgcgccagttaacagtgacatttatcaatcatactataaaggaaattatcctgaagtaactgcggcaacatttgcttgttttggttatggttggcacattgatgtcggaattcatgcaatacatctagtattatctggcatttttgatcgttatccaaagttaaatatgattattggacattggggtgagtttatcccattcttcttagaacgtatggatgaagctttattcgctgaacatttgaaccactctgtaagctattactttaaaaatagtttttatatcacaccaagtggcatgttaacgaagccacagtttgatttagtcaagaaagaagtaggtattgatagaattctttatgctgctgattatccatatattgagcctgaaaaattaggtgtatttttagatgaactgggtttaacagatgaagaaaaagagaaaataagttatacaaatggtgctaaattattaggtttatcatctaacaattaa

SEQ ID NO: 7861 - DNA, 1101 bp, Staphylococcus aureus
gtgtcaaaatttaagtctttgcttctattatttggcacactaattttacttagtggttgttcaaatatagaaattttcaacgcaaaagggccagtagcaagtagtcagaagttcttgattctttattcaatcgtcttcatgcttgttatttgtttcgttgtacttggcatgttcgccatttttatttacaagtatagttataataagaatgccgaatctggtaagatgcaccataatgccatcattgaaacaatatggtttgtaatacctatcataatcgttgctgctttagctattcctacagttaaaactttatacgattacgaaaaaccaccgaagagtgagaaagatccaatggttgtatatgcagtaagtgcaggatacaaatggttctttgcttatccagatgaacatatagagactgttaatacattaacaatccctaaagatcgtcctgtcgtatttaagcttcaagctatggatacaatgacaagtttctggattccacaattaggtggtcaaaaatatgccatgactggcatgacaatgaattggacgttagaagcatctcaaactggtacgttcagaggtcgtaactctaacttcaatggtgaaggattctcacgtcaaacatttaaagtaaatgccgttagtcaaaaagactacgacaaatgggtgaaagaagttaaaggtaagaaaacgttagatcaagatacatttgataaacaattattaccaagcacacctaataaagctttagaatttaatggtacacatatggcgtttgttgatccagcagccgatccagaatacatcttctatgcatataaacgtttcaatttcgaattgaaagatccaaacttcactagtgaagaaaatatgtttaaagatgtatcagacaaaccattaatacctgctcgtaaagctcaaattacaaatgcgaactataaacgacatggtatgaagttgatgattcttggaaatgacgaaccatataacaatgagttcaagaaagatgaatcgaaaaatgcgaaagaaatgaagaaaatttcaaaagatgcgcaagatcaagacaatgatgatcatggaggtggacattaa

SEQ ID NO: 7862 - DNA, 996 bp, Staphylococcus aureus
atgagcaatcaattcaaaagtgaagaagaacgaagacaatgggaacaattccaagctttccaaaatcaacaaaaccaacagcaccagcaatacggacaaaagaaatctaaaaaaggatggttctggggttgtggtggttgtctagtattatttattttaattatcatcggtatttcagcttgtacagctggtgtcactggtaaccttggtggaaatagttctaaagaagcgaacaaaacccataaaatcggtgaaactgttaaaaatggcgaccttgaagtcactgtaaattcagtggaaactatgaaatctgtaggaccgtctcttgcaccaacaaacgctaaaggtatatttgtcgttgctgatgtgacgattaaaaacaaaggtaaagaagcgttaacaattgatagttcaatgtttaagttaaaatccggtgataaaacatttgaagcagataatacaggttcaatgtctgctaatcaaagtgacaatggtagtatagaaaattcatttttcttacagcgtataaatcctgatagcactgcacaaggtaaaattgttttcgatgtgtcagaaaacatagccaacgcaaaagataaaaaattagaagttatttctagtttatttagcgtcaagaagattacatttgatttatccgatgctaaaaaaacatcaaaagctaaaaaagacaagcaagatacagaagtagctgttgcgagttcaaatagcgataatgtaaattatgaagcttcggctactacacctgctacaacttctagtgcggatactgattctgaagatagcgaaaagtctagtaaagatgaggataaacagaatgcgtctaaaagtgataaatctagtgtagaaaaaagtgaatctaatgaggaaactgctactgtagagcccatgccccagagcaaacctaccactagtgaagcaccacctagtcaaaataatcacaacgaaaataacatgtatgatgcttcaacagaataa

SEQ ID NO: 7863 - DNA, 1806 bp, Staphylococcus aureus
atgtgtggaattgttggttatattggctatgataatgccaaagaattattattaaaaggtttagaaaaattagaatacagaggttatgactctgcaggtatcgcggtagtaaatgatgataatacaactgtatttaaagaaaaaggtcgtattgcagaattacgtaaagttgctgatagtagcgattttgatggacctgttggaatcggtcacacacgttgggcaacacacggtgtaccgaatcatgaaaactctcatccacatcaatcatcaaatggccgttttactctagttcataacggtgttattgaaaactatgaagagttaaaaggtgaatacttacaaggtgtatcattcatttcagaaacagatacagaagttatcgttcaattagttgaatacttttcaaatcaaggactttcaactgaagaagcatttacaaaagttgtgtcattattacatggttcatatgcattaggtttattagatgctgaagacaaagacacaatctatgttgctaaaaataaatcaccattattattaggtgttggtgaaggtttcaatgttatcgcatcagacgcacttgcaatgttacaagtgacaagcgaatataaagaaatccatgaccatgaaatcgttattgttaaaaaagatgaagttattattaaagatgcagatggaaacgttgtagaacgtgattcatatattgctgaaattgatgcatcagatgctgaaaaaggtgtttatgcacactacatgttaaaagaaattcatgaacaaccagcagtaatgcgtcgtattattcaagaatatcaagatgcagaaggtaacttgaaaattgatcaagacatcatcaatgatgttaaagaagcagaccgcatttacgttattgcagcaggtacaagctaccatgcaggtttagtaggtaaagaatttttagaaaaatgggctggcgtaccaactgaagtacacgttgcatcagagtttgtctacaacatgccattattatctgaaaaaccattgttcgtttatatttctcaatcaggtgaaacagcagatagccgtgcagtattagttgaaactaataaattaggtcataaatcattaacaatcactaatgttgcaggttcaactttatcacgtgaagcagaccacacattgttattacatgcgggtcctgaaatcgcagttgcatctacaaaagcatatactgcacaaattgcagtattatcaatcttgtctcaaatcgttgcaaaagagcacggtcgtgaagcagatattgatttattgagagaattagcaaaagtaacaacagcaatagaagcaattgttgacgatgcaccaattatggaacaaattgcaacagatttcttagaaacaacacgcaatgcattctttatcggacgtactattgactataacgtaagtttagaaggtgcgttaaaacttaaagaaatttcttacattcaagcagaaggttttgctggtggcgaacttaaacatggtacgattgcattaatcgaagatggcacaccagttgttgctttagcaactcaagaaaacgttaatttatcaattcgtggtaacgttaaagaagtagtagcacgtggtgcacatccatgtattatttctatggagggtcttgaaaaagaaggcgacacttatgtcattcctcatgtacatgaattattgacaccattagtttcagtagttgcattacaattgatttcatattatgcagcattacacagagatttagatgtggataaaccacgtaaccttgctaaatcagttactgtagaataa

SEQ ID NO: 7864 - DNA, 1827 bp, Staphylococcus aureus
atgaagtggctaaaacaactacaatcccttcatactaaacttgtaattgtttatgtattactgattatcattggtatgcaaattatcgggctgtattttacaaataatcttgaaaaagagctgcttgataattttaagaagaatattacgcagtacgctaaacaattagaaattagtattgaaaaagtatatgacgaaaagggctccgtaaatgcacaaaaagatattcaaaatttattaagtgagtatgccaaccgtcaagaaattggagaaattcgttttatagataaagaccaaattattattgcgacgacgaagcagtctaaccgtagtctaatcaatcaaaaagcgaatgatagttctgtccaaaaagcactatcactaggacaatcaaacgatcatttaattttaaaagattatggcggtggtaaggaccgtgtctgggtatataatatcccagttaaagtcgataaaaaggtaattggtaatatttatatcgaatcaaaaattaatgacgtttataaccaattaaataatataaatcaaatattcattgttggtacagctatttcattattaatcacagtcatcctaggattctttatagcgcgaacgattaccaaaccaatcaccgatatgcgtaaccagacggtcgaaatgtccagaggtaactatacgcaacgtgtgaagatttatggtaatgatgaaattggcgaattagctttagcatttaataacttgtctaaacgtgtacaagaagcgcaggctaatactgaaagtgagaaacgtagactggactcagttatcacccatatgagtgatggtattattgcaacagaccgccgtggacgtattcgtatcgtcaatgatatggcactcaagatgcttggtatggcgaaagaagacatcatcggatattacatgttaagtgtattaagtcttgaagatgaatttaaacttgaagaaattcaagagaataatgatagttttttattagatttaaatgaagaagaaggtctaatcgcacgtgttaactttagtacgattgtgcaggaaacaggatttgtaactggttatatcgctgtgttacatgacgttactgaacaacaacaagttgaacgtgagcgtcgtgaatttgttgccaatgtatcacatgagttacgtacacctttaacttctatgaatagttacattgaagcacttgaagaaggtgcatggaaagatgaggaacttgcgccacaatttttatctgttacccgtgaagaaacagaacgaatgattcgactggtcaatgacttgctacagttatctaaaatggataatgagtctgatcaaatcaacaaagaaattatcgactttaacatgttcattaataaaattattaatcgacatgaaatgtctgcgaaagacacaacatttattcgagatattccgaaaaagacgattttcacagaatttgatcctgataaaatgacgcaagtattcgataatgtcattacaaatgcgatgaaatattctagaggcgataaacgtgtcgagttccacgtgaaacaaaatccactttataatcgaatgacgattcgtattaaagataatggcatcggtattcctatcaataaagtcgataagatattcgaccgattctatcgtgtagataaggcacgtacgcgtaaaatgggtggtactggattaggactagccatttcgaaagagattgtggaagcgcacaatggtcgtatttgggcaaacagtgtagaaggtcaaggtacatctatctttatcacacttccatgtgaagtcattgaagacggtgattgggatgaataa

SEQ ID NO: 7865 - DNA, 1767 bp, Staphylococcus aureus
atgagtaagagaacaacttattgtggattagttactgaagcatttttaggacaagaaattacattaaaaggatgggttaacaatcgtcgtgacctaggtggattgattttcgttgatttaagagatagagaaggaattgtacaagtcgtgtttaatcctgcattttcagaagaggcattgaaaattgctgaaacagtacgttctgaatatgttgtagaagttcaaggtacagttacgaagcgtgaccctgaaacagttaatcctaaaattaaaactggccaagttgaagtacaagttacaaatattaaagtgattaataaatctgagacaccaccattttctataaatgaagaaaatgttaacgttgatgaaaatattcgattaaaataccgttatttagatttacgtcgtcaagagttagcgcaaacatttaaaatgagacatcaaattacacgttctattcgtcaatatttggatgatgaagggttctttgacatcgaaacaccagtactaacgaagtcaacacctgagggtgcacgtgactatttagtaccatctcgtgttcatgatggtgaattttatgcattaccacaatcaccacaattatttaagcaattattgatgattagtggatttgacaaatactaccaaatcgtaaaatgcttccgtgacgaagatttacgtgcagatcgtcaacctgaattcacacaagtcgatattgaaatgagttttgtagatcaagaagatgtgatgcaaatgggtgaagaaatgcttaaaaaagttgttaaagaagttaaaggcgttgaaattaatggcgctttcccacggatgacatataaagaagcgatgcgtcgctatggttctgataaaccagatacacgttttgaaatggaattaattgacgtttctcaattaggacgtgatatggactttaaagtatttaaagatactgttgaaaatgatggtgaaattaaagcaattgtcgctaaaggtgcagctgaacaatatactcgtaaagatatggatgctttaacagaatttgtaaacatctatggtgctaaaggattagcgtgggttaaagttgtggaagatggtttgacaggtccaattggacgtttctttgaaacagaaaatgttgaaacattacttacattaactggtgctgaagctggtgacttagtaatgtttgttgcagacaaaccaaatgtcgttgcacaaagtttaggtgcattacgtgtcaaattagctaaagaattaggtttaatcgatgaaacaaaattaaacttcttatgggtgacagattggccattattagaatatgatgaagatgcgaaacgttacgttgcagcacatcatccatttacatctccaaaagaagctgatattgctaagcttggcactgcgccagaagaagctgaggcaaatgcttatgacatagtattaaatggttatgaattaggtggcggttcaatcagaattcatgatggtgagttacaagaaaaaatgttcgaagttcttggatttactaaagaacaagcacaagaacagttcggcttcttactagatgcatttaaatatggtgcaccaccacatggcggtattgcattaggattagaccgattagtcatgttattgactaatagaacaaacttgagagatacaatcgcattccctaaaacagcatctgctacatgtttattaacgaatgcgcctggtgaagtttctgataaacaattagaagaactttctttgcgaattcgtcactaa

SEQ ID NO: 7866 - DNA, 948 bp, Staphylococcus aureus
atttcttggcctctaaaacatggaaagggagcttatatgtcaaaagttcaaaatgaaagtaacaatgttgtcaaaaggggacttaaagatcgtcatatttctatgattgcgattgggggttgtattggtacaggtttatttgtaacttctggtggagcaattcatgatgcaggtgctttgggtgcattaataggatacgcaattatcggaataatggtatttttcttaatgacgtcacttggtgaaatggctacgtatttaccagtatcaggttcatttagtacatatgctacaagatttgttgatccatctttagggtttgcgcttggttggaactattggtttaactgggtagtaactgtagcagcagatattacgattgcagcacaagtcattcaatattggacaccattgcaaggcatacccgcttgggcatggagtgcgttgtttttagttataatttttagtctgaattcgttatcagttcgcgtctatggtgaaagtgaatactggttggcattgataaaagtgattacagttattgttttcattgcaattggtttattaacgattgtaggaatcatgggtggtcatgttgtaggatttgaaatatttaataaaggtgaaggtcctattcttggtggcaacttaggaggaagtttgttatcaattctaggtgtattcttaatcgctggtttctcattccaaggtactgagttaattggtattacggctggtgaatcagaaaatcctgaacgtgctgtgccgaaagcaattaaacaagtattctggagaattttattattttacattttagccatttttgttatcggtatgttaattccttatgatagtagtgcattaatgggtggtagtgataatgtagcaacgtctccattcacattagtgtttaaaaatgctggatttcgtttgcagcatcatttatga

SEQ ID NO: 7867 - DNA, 117 bp, Staphylococcus aureus
attccagtatttttagcattctttatttatcataagcttcgatataaaacgaaaaaaattccattagaacaagtagatttacgtcaagacgtgtcaatggatgaaataaaaggttaa

SEQ ID NO: 7868 - DNA, 279 bp, Staphylococcus aureus
atggctcgtagtattaaaaaaggacctttcgtcgatgagcatttaatgaaaaaagttgaagctcaagaaggaagcgaaaagaaacaagtaatcaaaacatggtcacgtcgttctacaattttccctaatttcatcggacatacttttgcagtatacgacggacgtaaacacgtacctgtatatgtaactgaagatatggtaggtcataaattaggtgagtttgctcctactcgtacattcaaaggacacgttgcagacgacaagaaaacaagaagataa

SEQ ID NO: 7869 - DNA, 2106 bp, Staphylococcus aureus
atgaataacggttttttcaatagcgactttgattcaatttttcgaagaatgatgcaagatatgcaaggttcaaatcaagtcggtaacaaaaagtactatattaatggtaaagaagtttcacctgaagaactagcgcaactcacacaacaaggtagcaatcaatctgctgaacaaagtgcgcaagcttttcaacaagcagcacaaagacaacaagggcaacaaggtggcaacggcaattatttagaacaaattggtcgtaaccttacgcaagaagcacgtgacggtttattagatccagtcattggtcgtgataaagaaattcaagaaactgctgaagtcttaagtagacgaactaaaaacaatcctatattagttggagaagctggtgttggtaaaactgcgattgttgaaggtttagcacaggcaatcgttgaaggaaatgtaccagcagcaatcaaagacaaagaaattatttctgtagatatttcatcattagaagctggaacgcaatatcgtggtgcttttgaagaaaatattcaaaaattaatcgaaggtgttaaatcttcacaaaatgccgtactattctttgatgaaatccatcaaattatcggttcaggtgccacaggaagtgattcaggtagcaaagggttatctgatattttgaaacctgcattaagtcgtggtgagatttctattattggtgcaacaacacaagatgaatatcgaaacaatattcttaaagatgctgcattaacgcgcagatttaatgaagtgcttgttaatgaaccaagcgctaaagatactgttgaaattttaaaaggtattcgcgaaaaattcgaagaacaccatcaagtaaaattaccagatgacgtattaaaagcatgtgttgacttatcaattcaatatattccacaacgattattaccagataaagcaatcgatgtgttagatattacagcagcacatttatctgcgcaaagtccagctgtcgataaagttgaaactgaaaaacgaatttctgaattagaaaatgataaacgtaaagcagtaagtgctgaagaatataaaaaagctgacgacattcaaaatgaaatcaaatcattacaagataaattagaaaacagtaatggtgaacatactgctgttgctacagttcatgatatttcagatactattcaacgattaactggcattccagtttctcaaatggatgataacgatattgaacgtttaaaaaatatttctaatcgtttaagaagtaaaatcataggtcaagatcaagctgtagaaatggtttcacgtgcaattcgccgtaatcgcgctgggtttgatgacggcaaccgtccaattggtagtttcttatttgtcggccctactggtgttggtaaaacagagcttgctaaacaattagcaattgatctatttggtaataaagatgcacttattcgacttgatatgagtgaatatagtgacacaacagctgtttcaaaaatgattggtacaactgctggttatgtcggttatgatgacaattcaaatacgttaactgaaaaagtacgccgtaatccatactcagtcattctatttgatgaaatcgaaaaagcaaatccacaaattttaacattgttattacaagtaatggatgatggtaatttgactgatggtcaaggtaatgtcatcaactttaaaaatacaattattatttgtacatcaaatgctggctttggcaatggcaatgacgctgaagaaaaagatattatgcacgaaatgaaaaaattcttccgccctgaattccttaaccgcttcaacggcatcgttgaattcttacatttagataaagatgcattgcaagatatcgtcaacttattattagacgatgtacaagttacattagataaaaaaggtattacgatggacgtttctcaagatgcgaaagattggttaattgaagaaggctatgatgaagaattaggtgcacgtccattaagacgtattgttgaacagcaagtacgtgacaaaattacagattattatctagatcatacagacgttaaacatgtggatatagatgttgaggataacgaattagtcgtaaaaggtaaataa

SEQ ID NO: 7870 - DNA, 333 bp, Staphylococcus aureus
atgaaaaagttagccaattatttatgggtagaaaaagtaggagatttgtatgtgtttagtatgacacctgaattgcaagatgatattgggacagtaggttatgttgaattcgtaagtccagatgaagttaaagtggatgatgaaattgtgagtatcgaagcatcgaaaacggtcattgatgtgcaaacgccattgtcaggaacgattattgagcgaaatacaaaagcggaagaagaaccgacaattttaaactctgaaaaaccagaagaaaattggttgttcaaattggatgatgtcgataaagaagcattcctagcattaccggaggcttaa

SEQ ID NO: 7871 - DNA, 1263 bp, Staphylococcus aureus
atgattaaaatacctagagggacgcaggatattttacctgaagattcaaagaaatggcgttacattgaaaatcaattagatgaattaatgacattttataattataaagaaataagaacaccaatttttgaaagtacagatctttttgcaagaggtgttggtgattcaaccgatgtcgtacaaaaagaaatgtatacatttaaagataaaggcgatagaagtattacattaagacctgagggaacagctgcagttgtgcgttcatatattgaacataaaatgcaaggtaatccaaaccaaccaattaaactttattacaatggaccgatgtttagatatgaacgtaagcaaaaagggcgctatcgtcaatttaatcaatttggtgtagaagctattggtgctgaaaatcctagcgtagatgcagaagtattagctatggttatgcatatttatcaatcatttggattaaaacatttaaagcttgttattaatagtgtaggggatatggcgtctcgaaaagaatataacgaagcgttagtgaaacactttgaaccagtaattcatgaattttgttcagattgtcaatcacgtttgcatacaaatccgatgcgaattttggattgtaaagttgaccgtgataaagaagcgattaagactgcacctagaatcactgatttcttaaatgaggaatctaaggcatattatgaacaagtaaaagcttatttagatgatttaggtattccatatattgaagatcctaacttagttcgtggattggattattatacacatacagcatttgaattaatgatggataatcctaactatgatggtgccattacaacgctttgtggtggtggccgttataatggtttattagaattgctagatggtccaagtgaaacaggtattggttttgcgctaagtatagaacgattattgcttgcacttgaagaagaaggtatcgaattagatattgaagaaaacttagatttattcattgttacaatgggtgatcaagcagatcgatatgctgtgaagttattaaatcatttgagacataatggtattaaagcagataaagactacttacagcgtaaaattaaaggacaaatgaaacaagcagaccgtttaggtgccaagtttacaatcgttattggtgatcaagaattagaaaataataaaatcgatgttaaaaatatgacaactggtgaatctgaaacaattgaattagacgcattagtcgaatattttaagaagtag

SEQ ID NO: 7872 - DNA, 417 bp, Staphylococcus aureus
atgcgtttaaaagtattgttccatttcattgctgctattttcatatcattcatgttgctatggatgaccatgttgtttgacttaataagcaatcaatcacatttaaaagctttattattgaatttagattttctaattccttctgacaatacaccatatattctagaaataatatgtcacttactaattggtagcgtcatttattttgtatttgtgttgctgtttcatacttctaaaaggctttactatctatgttatatccctttatttttcttatttatagcattgtatccctttttagtatttattgcgcaacgtccaatttttcaatttagtgtgacagaattaatcggttggattattacacatattttctttatgtcattaatggcgttagtcatacctagaataaaataa

SEQ ID NO: 7873 - DNA, 1353 bp, Staphylococcus aureus
atgcgaagacacgcgataattttggcagcaggtaaaggcacaagaatgaaatctaaaaagtataaagtgctacacgaggttgctgggaaacctatggtcgaacatgtattggaaagtgtgaaaggctctggtgtcgatcaagttgtaaccatcgtaggacatggtgctgaaagtgtaaaaggacatttaggcgagcgttctttatacagttttcaagagaaacaactcggtactgcgcatgcagtgcaaatggcgaaatcacacttagaagacaaggaaggtacgacaatcgttgtatgtggtgacacaccgctcatcacaaaggaaacattagaaacattgattgcgcatcatgaggatgctaatgctcaagcaactgtattatctgcatcgattcaacaaccatatggatacggaagaatcgttcgaaatgcgtcaggtcgtttagaacgcatagttgaagagaaagatgcaacgcaagctgaaaaggatattaatgaaattagttcaggtatttttgcgtttaataataaaacgttgtttgaaaaattaacacaagtgaaaaatgataatgcgcaaggtgaatattacctccctgatgtattgtcgttaattttaaatgatggcggcatcgtagaagtgtatcgtaccaatgatgttgaagaaatcatgggtgtaaatgatcgtgtaatgcttagtcaggctgagaaggcgatgcaacgtcgtacgaatcattatcacatgctaaatggtgtgacaatcatcgatcctgacagcacttttattggtccagacgttacaattggtagtgatacagtcattgaaccaggcgtacgaattaatggtcgtacagaaattggcgaagatgttgttattggtcagtactctgaaattaacaatagtacgattgaaaatggtgcatgtattcaacagtctgttgttaatgatgctagcgtaggagctaatactaaggtcggaccgtttgcgcaattgagaccaggcgcgcaattaggtgcagatgttaaggttggaaattttgtagaaattaaaaaagcagatcttaaagatggtgccaaggtttcacatttaagttatattggcgatgctgtaattggcgaacgtactaatattggttgcggaacgattacagttaactatgatggtgaaaataaatttaaaactatcgtcggcaaagattcatttgtaggttgcaatgttaatttagtagcacctgtaacaattggtgatgatgtattggtggcagctggttccacaatcacagatgacgtaccaaatgacagtttagctgtggcaagagcaagacaaacaacaaaagaaggatataggaaataa

SEQ ID NO: 7874 - DNA, 810 bp, Staphylococcus aureus
atgcgttatacaattttaactaaaggtgactccaagtctaatgccttaaagcataaaatgatgaactatatgaaagattttcgcatgattgaggatagtgaaaatcctgaaattgttatttcagttggtggtgatggtacattactacaagcattccatcagtatagccacatgttatcaaaagtggcatttgttggagttcatacaggtcatttaggattttatgcggattggttacctcatgaagttgaaaaattaatcatcgaaattaataattcagagtttcaggtcattgaatatccattgcttgaaattattatgagatacaacgacaacggctatgaaacaaggtatttagcattaaatgaagcaacgatgaaaactgaaaatggctcaacacttgttgtggatgttaacttaagagggaaacactttgagcgatttagaggcgatggattatgtgtatcaacaccttcgggttcaacggcttataacaaagcgctaggtggcgcactgatacatccttcacttgaagcaatgcaaattacagaaattgcctcaataaataatcgtgtgtttagaacggtaggatcaccacttgtattaccaaagcatcatacatgtttaatatcaccagttaatcatgataccattagaatgacgatagatcatgttagtatcaaacataaaaatgttaattcaatacaataccgtgtagcaaatgaaaaagtgaggtttgcacgttttagaccattcccgttctggaaacgtgtacacgattctttcatatcaagtgatgaagaacgatga

SEQ ID NO: 7875 - DNA, 855 bp, Staphylococcus aureus
atgaaatttaagtatcatatatcacaacaagaaactgttaaagcttttttagcacgacatgatttttctaagaagacagtgagcgccattaaaaataatggcgctttaattgttaatgatgaaccagtcacagtacgtaagcaattaatgccaaatgatatattagaaattcatttaccgcgagaaataccgagtgttaatttaataccttatgctcgtaagctagaagtattgtatgaagatgcttttatcatcatagttactaaaccaaacaatcaaaattgtacgccttcgagagaacatcctcatgaaagtttaatcgaacaagtactatatcattgtcaggaacatggtgaaaatattaacccacatattgttacgcgtctagatcgtaatacaactggtattgtgatattcgctaaatatggacatatccatcatttattttctaaagtaaacttgaaaaaaatatatacttgccttgtatatggcaaaacccatacatctggtattattgaagctaatattagacggtcaaaggatagtattataactagagaagttgcctcggatggtaaatacgctaaaacatcttatgaagtaataaatcagaatgataaatacagtttatgcaaagttcatttgcatacgggacgtacacatcaaattcgtgtacattttcaacatattgggcatccaattgtgggagattctttgtatgatggttttcatgacaaaattcatggtcaagtactgcaatgtacgcaaatatattttgttcatccaatcaataagaacaatatttatattacaattgattataagcaattacttaaattattcaatcaactctaa

SEQ ID NO: 7876 - DNA, 1185 bp, Staphylococcus aureus
atgaattcaatcattgaattaactgattattatagctctaataattatgcaccacttaagcttgtcatttctaaaggtaaaggtgtcaaagtttgggatactgatggcaaacaatatatagattgcatttcgggtttttcagttgcaaaccaaggccattgtcatccaacaattgttaaagcgatgacagaacaagcttcaaagttgtctatcatttcacgtgtcctttatagtgacaatctcgggaaatgggaagaaaaaatttgtcatcttgctaagaaagacaaagtactctcccttaactctggtactgaagctgttgaagcagccattaaaattgctagaaaatggggctctgaagttaaaggcattactgacggacaagttgaaatcatcgctatgaataacaattttcacggtcgtacacttggctcattatcactatctaaccacgacgcatataaagcaggatttcaccccctacttcaaggcactacaactgtagattttggagacattgaacaattaacacaagctatttcaccgaatacagcagcaattattttggaaccaattcaaggtgaaggtggcgttaatataccaccgaaaggatatattcaagctgtgcgtcaactatgtgataaacatcaaatattaatgattgcagatgaaattcaagttggtcttggtagaactgggaaatggtttgcgatggaatgggaacaagttgttccagacatttatattttaggtaaggcattgggtggcggcttataccctgtatctgctgtacttgcaaataatgatgtcatgcgtgttctaacaccaggtacacatggttcaacatttggtggtaaccctttagccattgcaatatcgacggcagcgcttgatgtacttaaagatgaacaactggttgaacgatcagaacgcttaggttcatttttattaaaagcgttgctacaacttaaacatcctagtattaaagaaattagaggtcgtggtttatttataggcatagagcttaacacagatgctgcaccttttgtggatcaactgattcaacgtggaatcttatgcaaagacacgcatcgtactatcattcgattgtctccacctctagttattgataaagaggaaatccatcaaattgttgcagcttttcaagacgtttttaaaaattaa

SEQ ID NO: 7877 - DNA, 1662 bp, Staphylococcus aureus
atgagaaaaattcaagcaaaaaaaggtttgagtattgagtgtaaaggttgggaacaagaagcagtacttagaatgttatacaacaatttagacccagaagttgctgaaagaccagaagatttagttgtttatggtggtattggaaaagcagcacgtaattgggaagcttttgaagcaatagagaaaacgttacgagaattagaatcagatgagacaatgttagtacaatcaggaaagccagttgctgtatttaaaacacatgaagaagcgccacgtgtattaatttcaaattcagtattagtgcctgaatgggcaaactgggatcattttaatgaattagataaaaaaggtttaatcatgtatggacagatgacagccggtagttggatatatattggttctcaaggtattgtgcaaggtacttatgagacatttgccgagctaggtaatcaacactttaatggagatttagcaggcactgttacactgacagcaggtttaggtggtatgggtggtgcgcaaccgttagcaattactatgaatcatggggtagcaatttgcgtggatgttgatgaaacacgtgttgataagcgaattgatacgaaatactgtgatgttaaaacagctgatttagatgaagcattaaaattagcagaagaggcgaaagaacgtggagaaggattatcaatcgggttagttggaaatgctgtagacatccatcaagcgattctagaaaaaggatttaaaattgacattattactgaccaaacaagtgcacatgatccgctaaatggatatgtgccacaaggatactctgtagaagaagcgaaagtattgcgtgaaaaagatccgaaaaaatatgttgaactgtcacaagcttcaatggcaaagcatgttgaattaatgcttgaattccaaaaacgtggcgctgtagcatttgattatggtaacaatattcgtcaagtagccttcaataacggagtgaaaaatgcttttgacttcccaggctttgtaccagcttacattagaccattattctgtgaaggtaaagggcaattccgctttgctgcgttgagtggtgatccaaaagatatcgagcgtgcggatgaagaaatgcgcaaacttttcccagaaaatgaaaagttattaagatggcttgatttagctgaagaaaaaatttcatatcaaggactaccatcacgtattgcttggttaggctatggagaaagagcgaaaatgggcttagctttaaatcgtcttgtacgtgacggtgaaatttcagcaccaattgttattggacgagaccatttagatgctggttcagttgctagtcctaaccgtgaaacagaaagtatgaaagatggcagtgacgcggttggtgattgggctgtattgaatgcactcattaacacagctgcaggtggttcatggatttcattccatcacggtggcggtgttggcatgggatattcacttcatgcgggtatggttgttgtagcagatggatcagagcgtgctgaaagaagattggaacgtgtattgacgactgatccaggtatgggtgttgcccgacatgttgatgctggctatgacatcgctattcaaacagctaaagaaaaaggtattcatattccaatgattgataaagcaggtgataaataa

SEQ ID NO: 7878 - DNA, 792 bp, Staphylococcus aureus
ttggagcagttttatcaattagggtggacacttgattcagcaggtggtgcatctggtgaagcatatatggctgaacaagatggacaaaagttgtttttaaaacgaaattcaaatccatttattgcggcattatcagcagaaggtattgtgcccaaattagtatggacgaaacgcatagaaacaggcgaggttgttacagcacaacattggaaaaatgggcgtgaactatcttcaaacgaaatgaagcaaacaagagttgcacatttattaaagaagatacacaattctagacctttattaagtatgttaaagcgtatggaaatggaacctattactcctgagattatgcttaataaaattaatgcctctttatcaagagaagttttaacacatcatattgtgagaaaatcattaacctatttagaagagcatataccgagtttagattcgcgttttttcactgttgtacatggtgatgtgaatcataataattggttattatccgatcgagatgaactatttttagttgattgggaaggtgcaatgattgcagacccggcaattgatatcggaatgctgctttacaactatgttccacaacaacaatggtctgaatggcttgaaacatatggtgttcaagagagcttgaatttaaataaacgtatgaaatggtatacggtaattcaatctataggtcttgttcaatggtatgaagagcaaaaaagatataaggatatgaacacttggcttaaattcctaaatgaagttatgaatagtaacatgtttatttaa

SEQ ID NO: 7879 - DNA, 699 bp, Staphylococcus aureus
atgagtgtcggtattctaatttttgtcatatcagtgatcatttctatcattactactatgcgcgaaaatagtcataaagatagacaaaatcaaaagccacctcaaaaaacatctaccgataatgaaccaaaaaaaggtggcttttttgaagaaattgagcgaacgtttaaagaaataagtgaagaattaaatgaagaagaaaagaaatcatcgaaacgaaaatatgatgatacgttaccacctttattcgatgaacttccaaaggaagagcctaaatcgaaacctgttgtagaacctatggcacctaaaaaacaaccagaaacaaaaccgatgacagagaaaccaattacagtgcctaaagcagaaccggtggagcagaaacatagaccttctagacaagataattctgacgaaattagacgtcaattagaaaaatcacttagagatgatattaaaacgattcgtactgacattgatagagaaaaagaaaagcaaattgctaaaatggaaaaacgtgctagagatattattgaggataaatacttatctgaacgtacaaaacgtttgaaattaaagcagttgcttaattctcaaaatgtcgaaaaagatttgactaaatcagcgttccaatttgataaagatgaagtaatcaatggtatgatatggtcagaaattttagctaaaccaaaacaattataa

SEQ ID NO: 7880 - DNA, 1368 bp, Staphylococcus aureus
atggcatttgaaggcttatcagaacgcctgcaagcgacgatgcaaaaaatgcgtggtaagggtaaacttactgaagctgatataaagataatgatgcgtgaagtaagattagcgttatttgaggctgacgtaaactttaaagtggtaaaagaatttattaaaacagtatcagaacgcgcattaggttccgatgtaatgcaatcattaacaccagggcaacaagttattaaaatagttcaagatgaattaacgaagttgatgggtggagaaaatacatcgattaatatgtcaaataaaccacctactgttgttatgatggttggtttacaaggtgctggtaaaacaacaactgcaggtaaattagcattattgatgcgtaaaaaatacaacaaaaaacctatgttagttgcagcagatatttatcgtccagcagcgataaatcaattacaaacagtagggaaacaaattgatattcctgtatacagtgaaggagatcaagtaaagccacaacaaattgtaactaatgcattaaaacatgctaaagaagaacatttagactttgtaatcattgatacagcaggtcgattacacatcgatgaagcattgatgaacgaattaaaagaagtaaaagaaattgctaaaccaaacgaaattatgttagttgtcgattcaatgacgggtcaagatgctgtcaatgttgcagaatcttttgacgatcaacttgatgtcacaggtgttaccttaactaaattagatggtgatacacgtggtggtgcagctttatctattcgttcggtgacacaaaaaccaattaaatttgttggtatgagtgaaaagttagatggtttagagctattccatcctgaacgtatggcatcacgtattttaggtatgggtgatgtgttaagtttaattgaaaaagcgcaacaagatgtggatcaagaaaaagcaaaagatttagagaaaaagatgcgtgagtcatcgtttactttagatgattttttagaacaacttgatcaggtgaaaaatctaggaccactggatgatattatgaaaatgattccaggtatgaataaaatgaaagggctagataagcttaatatgagtgaaaagcaaattgatcatattaaagcgattatccagtcaatgacgccggctgaaagaaacaatccagacacattgaatgtatcacgtaaaaagcgtattgctaaagggtctggtcgttcattacaagaagtcaatcgtttgatgaaacaatttaacgatatgaagaaaatgatgaaacaattcactggtggcggtaaaggtaaaaaaggtaaacgcaatcaaatgcaaaatatgttaaaaggtatgaatttaccgttttaa

SEQ ID NO: 7881 - DNA, 849 bp, Staphylococcus aureus
atgaatcatattgaaataagtaaagatgtaaagataccagtattaggtttcggagtatttcaaattcctcaagaacaaacagcagaagcggttaaagaagcaattaaagcgggttatagacatattgatacagcacaaagttatttaaatgaaactgaagtaggtcaaggtattgaagcttcaggtattgatagaagtgaactattcattacgactaaagtatggattgaaaatgttaactatgaagatactatcaaatcaatcgaacgatcattacaacgattaaatttggactatcttgatctagtgcttattcaccaaccttacaatgacgtatatggctcatggcgtgcattagaagagttaaaagaaaatggtaaaattaaagcaatcggtgtatctaacttcggcgttgatcgaattgtagatttaggtattcacaatcaaattcaaccacaagtgaaccaaatagaaattaatccattccatcaacaagaagaacaagttgcagcacttcaacaagaaaatgttgtggtagaagcttgggcaccatttgcagaaggtaaaaatcaattattccaaaatcaattgttgcaggccattgcagataaatacaacaaatcaattgcacaagttattttacgctggttagtagaacgtgacattgttgtactcgcaaaatcagtgaatccagaacgtatggctcaaaacttagatatatttgattttgaacttacagaagaagataaacaacaaattgcgacattagaagaaagtaatagccaatttttctcacatgctgatccagagatgattaaagcacttacaagcagagaattagatgtttaa

SEQ ID NO: 7882 - DNA, 606 bp, Staphylococcus aureus
atgtgctttgatataaataatttggatataaaaaagttgaattttagaaaggtaaaaaacgcaattcatttaagtttaagtggcgataaataccagtttttggaggacggtaaaactatcaataatacttattttttagctgtatatgataatgcaataaacatttttgaagatttgttttcgccttctgattctataaatttggttcatgtagtatatgtttatagtgaaccttataagaaaacaaatgttataaaaaaatttacatcgttaacaatagatgaattgtattactttaaagaatataaaaaggagaaggatgataatattttgtgcgaggagttttcatataagtgttccataaaagatataaaatataaaaaattattaaaagctatatccaatcaagactttaaagggttagttccaaatatcaatcagaatgataattattctgaaatatatataattaacaatactaaaaacttaatatatcatttatatgatgatagaggtctatggctagcttttaataataatgaagattatgcaagatattctgaaaaatataatgatttaatatcggaatttgataatgaagatatc

SEQ ID NO: 7883 - DNA, 291 bp, Staphylococcus aureus
atgtcggaaaatgccattattcatgacgattatttttacaatctaaaagcagtaaagactcataatatagccaaaaacgttaataaaagtttgttaaatgataagggggtgagtattggtaaatttattcaaaagcttaaagggaaaaatcctacctggagatatccaaaaattaaatggactatttccaaaaataaagggcaatcatatggtggttcttattggaagttaataaataacaaaggaaaaagaatagcttctttaactaaagaaggaaaaatcttaagggaa

SEQ ID NO: 7884 - DNA, 324 bp, Staphylococcus aureus
gaaaatgttgtggtagaagcttgggcaccatttgcagaaggtaaaaatcaattattccaaaatcaattgttgcaggccattgcagataaatacaacaaatcaattgcacaagttattttacgctggttagtagaacgtgacattgttgtactcgcaaaatcagtgaatccagaacgtatggctcaaaacttagatatatttgattttgaacttacagaagaagataaacaacaaattgcgacattagaagaaagtaatagccaatttttctcacatgctgatccagagatgattaaagcacttacaagcagagaattagatgtt

SEQ ID NO: 7885 - DNA, 204 bp, Staphylococcus aureus
atgaaatataaacattttgccattattactttaattacaggcatcgtcatgctcacggcaatgtactttgtaccatttggatatcataaaataccaatatttgcaggaatggcgattatttttacagtctattttagtaataaaaaatctattgatgaaacaaatatctttagtaagaaaaatcgcaataaaaataaacaataa

SEQ ID NO: 7886 - DNA, 546 bp, Staphylococcus aureus
atgagtaatacaacattacatgcaacaacaatttatgctgtaagacataatgggaaagcagctatggctggagatggacaagtaacgcttggtcaacaagtcatcatgaaacaaacggcaagaaaagtgcgacgtttatatgaaggtaaagtgttagctggtttcgcaggtagtgtagcagatgcgtttacgttatttgaaaaatttgaaacaaaattacaacagtttagtggtaacttagaaagagctgctgttgaattggcacaagaatggcgaggcgataaacaattacgtcaattagaagctatgctaattgtaatggataaagatgctattttagttgtcagtggaactggcgaagttattgccccagatgatgaccttatcgctattggatcagggggcaactacgcattaagcgcaggacgtgcattgaaacgccatgcatcgcatttgtctgctgaagaaatggcatatgagagcttgaaagtagcggctgatatttgtgtctttaccaacgataatattgttgttgaaacactataa

SEQ ID NO: 7887 - DNA, 318 bp, Staphylococcus aureus
atgcatatcaaaaaaggtgacaacgttaaagttatcgcaggtaaagacaaaggtaaagaaggtaaagtaattgctactctacctaaaaaagaccgtgtcgttgtggaaggtgttaacattatgaaaaaacaccaaaaaccaactcaattaaatcctgaaggtggaatcttagaaacagaggcagcaatccatgtttctaatgtacaattattggaccctaaaacaaacgaaccaactcgtgtaggttacaaatttgttgatggtaaaaaagttcgtatcgctaaaaaatctggcgaagaaattaaatctaataattaa

SEQ ID NO: 7888 - DNA, 1347 bp, Staphylococcus aureus
atggcaaaacatccattcgaacaatttaatctagaatctagtttaattgacgctgtgaaagaccttaattttgaaaaaccaactgaaattcagaatcgaattattccaagaatactaaagagaacaaatttaattggtcaatctcaaacgggtacagggaaatctcatgcatttttattaccattaatgcagttaattgatagtgaaataaaagaaccacaagcaatcgtagttgcaccaacaagagaacttgcacaacaactatacgatgcagcgaaccatttaagccaatttaaagctggtgtttcagttaaagtttttattggtggtacagatatagagaaagatagacaacgttgtaatgcacaaccacaattgattataggcacccctactagaattaatgacttagctaaaacgggacatttacatgtgcacttagcatcatatttagttattgatgaagcggatcttatgattgacttaggattaattgaagatgtagattacattgctgcaagattggaagataatgcaaatattgcggtgtttagtgctacaattccacaacagttacaaccatttttaaataaatatttaagtcatccagaatatgtagctgtcgacagtaaaaaacaaaataaaaagaacatcgaattctttttaatacctactaaaggtgcagctaaagttgaaaaaactttaaatttaattgatatactaaatccatacttatgtattattttctgtaatagtagagataatgcaaatgatttagcacgttcactaaatgaagctggtattaaagttggtatgattcatggtggtttaacgccacgtgaacgtaaacaacaaatgaaacgtatacgtaatttagaattccaatacgttattgccagcgatttagcatctcgtggtattgatattgaaggtgttagtcatgtcatcaattttgatgtgccaaatgatattgacttctttacgcatagagttggacgaactggtcgtgggaattataaaggtgtagcaattacgctttatagtcctgatgaagaacacaatatttcattaatagaagatcgcggttttgtattcaatactgttgatattaaagatggtgagttaaaagaagttaaagcgcacaatcagcgtcaagcaagaatgcgcaaagatgaccatttaactaatcaagtgaaggacaaagttcgaagtaaaattaaaaacaaagttaaaccaggttataagaagaaatttaaacaagaagttgaaaaaatgaaacgtcaagagcgtaaacaatttagtaagcagcaaaatagacaaaaacgtaagcaaaacaaaaaaggttag

SEQ ID NO: 7889 - DNA, 891 bp, Staphylococcus aureus
atgttattaggatcacatgtttcaatgagtggtaaaaagatgttagaaggttctgctatagaagcgtatgaatatggtgaaacaacatttatgatttatactggtgcacctcaaaacacgcgccgtaaaagtattgaagatttaaatataactaaaggtcatgaagtgatggaaaaatatggcttatctaatattgttgttcatgcaccatacatcattaatattgcaaatacaaccaaaccagaaacgtttaatcttggtgtagatttcttgcaacaagaaattgaaagaacgcaagctataggcgctaaagatattgtattacatccaggtgcgcatgttggagctggtgttgatgccggaattaataagattattgaaggattaaatgaagttttaacgaatgacaataatgtacgtattgcgcttgaaacgatggcaggtaaaggtacagagattggtcgctcgtttgaagagttagcacgtattattgatggagttcataataacgaacgtttatcagtatgttttgatacatgtcatacgcatgatgctggatataatgtgaaagaggactttgatggcgtattaaatgaatttgataaaattattggagtcgacagaatcaaagttgttcatgtcaatgattctaaaaatgaccgtggcgctcaaaaagaccgacatgaaaatattggcttcggttacattggttttgatgcattaaattacattgtgcatcatgatagttttaaagatattccgaaaatcttagaaacaccttatgttggtgaagataagaaaaataaaaaaccgccatataaacttgaaattgaaatgttaaaacaacagcaatttgacccagaattaaaaaataaggttatgcaacaataa

SEQ ID NO: 7890 - DNA, 732 bp, Staphylococcus aureus
gtgaatgggaatatcattgttgcacatggcatgaggcacggacgacagaatcaagcgttagaagcatttatttctgaattagtaaaagatgatatacatcactatgatattgcgtttttagaaagtgagcatcaggatttagagacggtaatgacgacgttgattcaaagtggggttgaccattttaaaattgtaccattgctaatctttagtgcaatgcattatctcaaggatataccgaatatcgttcatgaaatgaaacgacggtatccagacataaaggtagaagtaagcgagccacttggcacacatcctttaatgagacgattaattgaacaacgtatttgtgacgcattagcaggtgacgaacaacaagttggagttatggttgttgcacacggcaatattaatggaaattttactaaggcacacgaagagttacaaatatgcgctcaacatttgcagattaataaacctacttatgcgagaacgctatatggagagattagttttacacatgatttagaaagcatctcgaaacggtatcaaaaattgattgtcgtaccattatttttatatgacggaagacttgttaacaaagtgaagcagcaaatgaatgacatggttattaatacagatatacacttcacaccttcaattaacttcgacccaattttaaagcaaatcattaacgatagattagaaagcttaatgattccgatgaaaatataa

SEQ ID NO: 7891 - DNA, 114 bp, Staphylococcus aureus
ttgaatagaagcatttattttttaggaggacaattattatgcgtcaaacatttatggcaaatgaatcaaacattgagcgcaaatggtatgttatcgatgctgaaggccaaacat

SEQ ID NO: 7892 - DNA, 441 bp, Staphylococcus aureus
atgaaattacatgagttaaaaccggcagaaggttcacgtaaagaacgcaatcgtgttggacgtggtgttgcgacaggtaatggtaaaacaagtggtcgcggacacaaaggtcaaaaagctcgttcaggcggtggtgtaagaccaggatttgaaggtggtcaattaccattattccgtcgtttaccaaaacgtggttttactaacataaatcgtaaagaatatgctattgttaacttagaccaacttaataaatttgaagatggtactgaagtaactccagctttattagtagaatctggtgttgttaagaatgaaaaatctggtatcaaaatactaggtaatggttcacttgataagaaattgacagtgaaagctcataaattctcagcttcagcagcagaagctattgatgctaaaggtggagcacacgaggtgatctaa

SEQ ID NO: 7893 - DNA, 1041 bp, Staphylococcus aureus
atgacaaaattaaaagttggtgtgataggtgttggtggcattgcacaagaccgtcatattccagcattgctgaaactcaaagacacagtctcattagttgcagtacaagatattaatacagtgcagatgattgatgttgcgaagcgctttaatatacctcaggcagttgagacacctagcgagctgtttaaacttgttgatgcggtggtcatttgtacacccaataaattccatgctgatctttctatagaagcattgaaccatggtgtccatgtcttatgcgaaaagccaatggcaatgacgacggaagagtgtgatcgcatgattgaagcggctaataaaaatcacaaattattaactgtcgcttatcattatcgtcacacagatgtcgctatgactgctaaaaaagcaattgaagcaggtgtggttggtaaaccattagtagcacgtgtacaagcgatgcgtaggcgtaaagtacctgggtggggcgtttttaccaataaagcgttgcaaggtggcggtagtttaatcgattatggttgccacttgttagacttatctttgtggctattaggtaaagatatggtgccgcatgaagtgctaggaaaaacatataatcaattgagcaaacaaccgaatcaaattaatgattggggaacatttgatcacactaaatttgatgtcgatgatcatgttactagttatatgacatttgccaatcgagcaagcatgcagtttgaatgttcgtggtctgcaaatataaaggaagataaggtacacgttagtttatcaggagaagatggcggtatcaatttatttccatttgaaatatatgagccccgctttggaactatttttgaaagcaaagctaatgttgagcataacgaagacattgctggtgagagacaggcgcgtaactttgtcaatgcgtgtttaggtatagaagagattgtggtgaaaccggaagaagcacgcaatgtaaatgcccttatagaagcgatttatcgtagcgatcttgataacaagagcatacaactttaa

SEQ ID NO: 7894 - DNA, 969 bp, Staphylococcus aureus
atgaaaataggtgtattttcagtattattttacgataaaaattttgaagatatgttagattatgtcgcagaatctggattggatatgattgaagttggaacaggtggtaacccaggagataaattttgtaagttagatgagttgttagaaaatgaagacaagcgacaagcatttatgaagtcaatcacagacagaggcttacaaataagtggtttcagttgtcataacaatccaatttctccagatccgatagaagcgaaagaagccgatgaaacgttacgtaaaacaatccgtttagcaaatctattagacgtgccagttgttaatacattttctggcattgcagggtcagatgataccgctaaaaagcctaattggcctgttacaccttggccaacagcctactctgaaatttatgattatcagtggaatgaaaagttgataccatattggcaagatttagctgagtttgcaaaagagcaagatgtaaaaattgccatagagttacatgcaggatttttagttcatacaccatatacgatgttaaagttacgtgaggctacaaatgaatatatcggtgctaacttagatcctagtcatttatggtggcaaggtattgatccaattgctgcgattcgcatattaggccaagcaaatgcaattcatcacttccatgctaaagatacgtatattaatcaagaaaatgtaaatatgtatggtctaactgatatgcaaccatatggtaacgttgcgacaagagcatggacattccgtacagttggttatggacatagtccatatgtatgggcagatatcataagtcaacttattattaatggatatgattatgtattaagtattgaacatgaagatcctattatgtcagtagaagaaggtttccaaaaagcttgtcaaactttgaaatctgttaatatttacgacaagccagcagacatgtggtgggcataa

SEQ ID NO: 7895 - DNA, 759 bp, Staphylococcus aureus
atgacaatattatcagtgcaacatgtttcaaaaacatacggtaaaaagcacacatttcaagcacttaaagatattaactttgacatacaaaaaggcgaattcgttgcgattatggggccttctggatcaggtaagacaaccttattaaatgtactaagttcaattgaccaaatttctagcggtagcgtgattgctaacggacaagagcttaataaacttaatcaaaaagcacttgccaaattccgtaaagaatcattaggtttcatcttccaagattacagtattctgccgacattaactgtcaaagaaaacattatgttacctttatctgttcaaaaaatgtcgaaagcaacaatggaagaaaattataaagcgattactacagcattaggtatttatgacctaggaaataaataccctagcgaattatctggtggtcaacaacaaagaactgcagcagcgagagcatttgttcacaaaccacaaatcatatttgcagatgagccaacaggcgcactcgactcgaaaagtgcaaatgacctattacaacgtttggaagaaatgaataaatcgtttgatacaactattgtcatggttacacatgatccggttgcagcaagttttgcagaacgtgtcatcatgctaaaagatggccaaattcatacacaactttatcaggaaggacgttctaaacaggccttttatgaagacattgtacatcttcaatcagtattaggtggtgtctcaaatgacatttaa

SEQ ID NO: 7896 - DNA, 1107 bp, Staphylococcus aureus
atgaaagcagttcactttggtgctggtaacataggtcgtggtttcattggttatattcttgcagacaacaatgttaaagtaacatttgcagacgtcaatgaagaaatcattaatgctttagctcatgatcatcaatacgatgttattttagctgatgagtctaaaacaacgacgcgcgtgaataatgttgatgcaattaattcaatgcaaccttctgaagcgttgaaacaagcaattctagaagctgatattattacaacagctgttggtgttaacatactacctattattgctaaatcttttgcgcctttcttaaaagaaaaaacaaaccatgttaatattgttgcttgtgagaatgctattatggcaactgatacattgaaaaaagcagtacttgatattactggccctcttggtaacaatattcattttgctaactcagcagttgatagaattgtaccattacaaaagaatgaaaatatattagacgttatggttgagccattttacgaatgggttgttgaaaaagatgcatggtatggtccagaactaaaccatattaaatatgttgatgatttaacaccatatattgagcgtaaattattaactgtgaatacaggacatgcatatttagcgtatgctggtaaatttgcaggtaaagctaccgtattagacgctgtaaaagatagttcaattgaagctggcttacgccgtgttttagctgaaacaagtcaatatattactaatgaatttgattttactgaagcggaacaagctggttatgttgaaaaaataatagaccgtttcaacaattcttatttatctgatgaagtgacacgtgtcggacgaggtacgttacgtaaaattggccctaaagatagaattataaaaccattaacatatctttataataaagatttagaacgcactggtttattaaatacagctgcattgttattgaagtatgatgatacagcagaccaagaaactgttgagaaaaataattacattaaagaacacggtttaaaagcgtttttaagcgaatatgctaaagttgacgatggcttagccgatgaaataattgaagcgtacaattcactttcataa

SEQ ID NO: 7897 - DNA, 828 bp, Staphylococcus aureus
atgacagttgcagagaaaaaagaatggtacctagaatacgaaattgaaattaatagaccgggtcttttaggtgatgtatctagtttattaggtatgttaggtataagtattgttacaattaatggtgttgatcaaggtaaacgaggccttttaattaaaacagacaatcttgaaaaagttgaacgttttgagcaaatagctcgtggtataaatgaaattgaaataacaaagcttaaaaaaccagaattaagagaccgtcttgcagttagacatggtagatatattgagcaagatgcaaaagataagaaaacctttcgatttgagcgtgaagatttaggcttgttagtagactttttagctgaattgttcaaagaagaaggtcataagttgattggcattagaggtatgccacgggttggtaaaactgaatcaattgttgcgggaagtgtttgtgcacataagagatggttatttattagttctactttaataaaacaaactgtacgtagctctctaattaaaggggaatatgatgccaatcatgtatacattattgatggtgcagttactgccagagaatctaatccaaaacatcaagagcttgttaacgaagttatgacgttaccatcaatcaaagtcgttgaacatccagatttatttgttgaaacaagtacttgtacaatggaagattttgactatattatcgaattgagagaaaatgaaaatcaagaaatacattacgaagaaatgaagaaacagacagtccaaagtaagaataatttagattttggagatccgtttggtggtggttttggtttcttcgagtaa

SEQ ID NO: 7898 - DNA, 393 bp, Staphylococcus aureus
ttgaaaacggtcggtgaagcgctaaaaggtagacgtgaaaggttaggaatgactttaacagaattagagcaacgtactggaattaaacgtgaaatgctagtgcatattgaaaataatgaattcgatcaactaccgaataaaaattacagcgaaggatttattagaaaatatgcaagcgtagtaaatattgaacctaaccaattaattcaagctcatcaagatgaaattccatcgaaccaagccgaatgggacgaagtaattacagttttcaataataataaagacttagattataagagtaaatcaaaagagccaatacaattattagtaatcatgggtattacagttttaataactttattgttatggatcatgttagttttaatattttaa

SEQ ID NO: 7899 - DNA, 837 bp, Staphylococcus aureus
atggatttagcgagtaaatattttaatggcgtcaactggcgatatatcgaccattcttctggattagaacctatgcaatctttcgcattcgatgatacattttgcgaaagtgtgggcaaagatatatcagataatgttgtgcgtacttggattcatcaacatactgttattcttggtattcatgattcaagattgccgtttttaaaagatggcattgattatttaacgaatgagattggttataatgccattgttagaaattctggtggcttaggtgtcgttctagatcaaggtgtattaaatatatcgctgatgttcaaaggacaaacagaaacaacgattgatgaagcgtttactgtgatgtacctcttaattagcaaaatgttcgaagatgagaatgttgatattgatacgatggaaattgaacattcttattgcccaggaaaatttgacttaagtatcgatggtaagaaatttgcaggcatatcgcaacgaagagttagaggcggtattgctgtacaaatttatctttgtgttgaaggctctggttcagaacgtgcattgatgatgcaaacattttatgaacatgctttaaaaggtgaagtgactaaatttaaatatcctgaaattgaaccatcttgtatggcctcattagagacattgcttaacaaaacgattactgttcaagatgtaatgtttttactattatatgcaatcaaagatcttggcggtgtattaaatatgacgcccattactcaagaagaatggcaaagatacgatacgtattttgataaaatgattgaaagaaacaagaaaatgatagaccaaatgcaatag

SEQ ID NO: 7900 - DNA, 1134 bp, Staphylococcus aureus
atgatggaattcactattaaaagagattattttattacacaattaaatgacacattaaaagctatttcaccaagaacaacattacctatattaactggtatcaaaatcgatgcgaaagaacatgaagttatactaactggttcagactctgaaatttcaatagaaatcactattcctaaaactgtagatggcgaagatattgtcaatatttcagaaacaggctcagtagtacttcctggacgattctttgttgatattataaaaaaattacctggtaaagatgttaaattatctacaaatgaacaattccagacattaattacatcaggtcattctgaatttaatttaagtggcttagatccagatcaatatcctttattacctcaagtttctagagatgacgcaattcaattgtcggtaaaagtgcttaaaaacgtgattgcacaaacgaattttgcagtgtccacctcagaaacacgcccagtactaactggtgtgaactggcttatacaagaaaatgaattaatatgcacagcgactgactcacaccgcttggctgtaagaaagttgcagttagaagatgtttctgaaaacaaaaatgtcatcattccaggtaaggctttagctgaattaaataaaattatgtctgacaatgaagaagacattgatatcttctttgcttcaaaccaagttttatttaaagttggaaatgtgaactttatttctcgattattagaaggacattatcctgatacaacacgtttattccctgaaaactatgaaattaaattaagtatagacaatggggagttttatcatgcgattgatcgtgcctctttattagcacgtgaaggtggtaataacgttattaaattaagtacaggtgatgacgttgttgaattatcttctacatcaccagaaattggtactgtaaaagaagaagttgatgcaaacgatgttgaaggtggtagcctgaaaatttcattcaactctaaatatatgatggatgctttaaaagcaatcgataatgatgaggttgaagttgaattcttcggtacaatgaaaccatttattctaaaaccaaaaggtgacgactcggtaacgcaattaattttaccaatcagaacttactaa

SEQ ID NO: 7901 - DNA, 1104 bp, Staphylococcus aureus
atgaaggatacacagttagcccaaatcacattaactgatgattcaaccggtgctatagcgaatccaatccatttatctactgcctacaaacatccaaaactaggacaatcgacaggatttgattatacacgtactaaaaatcctacacgctcaacatttgaaacctgttttgccaaacttgagcatggtattgcatcattcgctacatcaagtggaatgtcagccattcaattaatatgtaatctatttaaacctcatgatgaaattttagtttcattcgatttatatggtggcacatttagattatttgaattttacgagcaacaatacgatatcaaatttaagtacgttgattttacagattatgaacaagttgaaaaagaaatcactgataaaacagttgcattattcattgaaccaatatctaacccacaaatgattgctattgatgtaaagccgtactatcaactttgtaaagctaaaggcttattgtcaattatcgacaatacttttttaacaccttatctttcaacaccattagcagaaggtgctgatatagtcttacattcagctacgaaatatattggtggacataacgatgtactagcaggtgtcgtaaccgtcaaagatgaatcactcgcgcaacagttgtttgattttcacaacatgactggcgcaacactttcaccaatagatagttatttgttgttacgtggacttaaaactttgcatttacgcattgagcgtgcgcaatcaaacgctagaaaacttgctaaaaaatgtcagtcacttcaagcaattgacgaagtactatatagcgggcaaactggcatgcttagtttaagacttaacaaggcctatagcgtcgctaaattattagaaaatttagacatttgtatttttgcagaaagtttaggaggtactgaaacattagtgaccttcccttacacccaaacacatgttgatatgccagatgctgaaaaagataaacgtggcattgatgagtatttaatccgcttatcactaggtgttgaaaattatgaagacatcgaacgcgatatcatccaagcattagataaagctcagattggagagattgtatga

SEQ ID NO: 7902 - DNA, 2079 bp, Staphylococcus aureus
atggcactattagaagcatttttaatttttatttttgctgtgattattagttcggttatcaataatcgattcccacaaattcctactgcctttattcaaattgcattaggtgtcgttattttcattattccaatacaagttgatttccaattcaattctgaagtgtttatgtttgccgttatcgcgccactactttttgtagaaggtacccacgtctctcgaacaaaattattagaatatcgtaaacctatactattaatgtcaatggcactagtgtttgcaactgtagtcggtgttggctattttatacattggatttggcctgccttaccaatgccagccgcttttgcaatagcagcaattttatgtcctactgatgcagtagcagtatctgctattacacgcggaaaattattacctaaaggttctatgacgattttagaaggtgaatctttactcaatgatgcagcaggtatcatttcatttaaaattgctgttactgcattagtaactggtaccttttcattattccaagctgttgaacaatttatcatttcaacaatactaggtgtacttattggtgcaattattggattcgttgtcgttagaatacgtatagacttaaccgctaataaaggtttaaaagataacaataccttaacttttattcaattattaactccttttgtcgtatactttttagcagaagaagttcatgcttcaggtatcattgcagttgtaatcgcaggtctaatccatggtttagaacgcgaccgtttaattagagcacaaacggaactacaaatgaattaccatcaaatttggaacacatttagttatgccttaaatggttttgtatttgttgtattaggttttatgattcctactgtagtcatagatattttccaaacagagcctgacaacttttcatttttaatagtgatcactatattaatcgctattgcaatttatgcatgtcgatttgtttgggtttatttctggtacaaagatttttatttcccgaaaaatatacaatcttatctagacgaagaacatgattcacatgaaacaccaccttctcgtgtgcgttacgcatttattatgacgatgtgtggtattcacggtacaatttcactttcaatggcacttacattaccatttatcattacaaaaggacaagcattcgaataccgtaatgatttattgtttattgcatctttcatggtattaattagtttaatcttagcgcaaattgttttacctttaattacaccatctgccgaagatactacttttaaaggtatgacttatcaatctgccaaaattttcattgttcaaaaagtgatacagcattttaaaaacgaaagtaaaaaagacaaaaacgatacaaattatcgcccagtattaaaccaatactatggagaattgttatttttattaaattcagaacctaataatcaaaatacaaaagaactcaaacgtttagaagatattgcaaaagtaatcgaaacatctacacttgagcgtttaattgataaaggtaaggcaacgtatcaggatattaataattaccgcaatattgtcgaattaacagagacacaccgtactgcatcatttgttgaaaaatttgcaaacttcttcaagatgttatggcttagacttaaagcgatgaagcactacaaagccttaaacaaagaatctaagaagcaagaatttgaaaattcattcaaagatgttcaaaaaattatgcgtattgtgaatcacaatattattttacgcttaaaagaagaacaaaatagtacaaatgtacttgaggttagcttagtcattaatcattactatgatatgagtcgctcattaaagtggcgtgcacaacgtcgaaaagaacgtcaagaaaacagcaatcaaatcataccgcaagctatgttccataaccacaaattggaagcattgtacttacaacgtcaccttttagatgaattaattcgcaaaaataaaatcaacaatatcgttgcagctcaaattcgagaaaatatcaattacaacgaaattgtcttgtctttacagtccaaacattaa

SEQ ID NO: 7903 - DNA, 675 bp, Staphylococcus aureus
ttgcgtgtgaaagataatttacaacaaatctcaacacaaattaatgacaaaagtgaaaaaaataatttttcaacaaaaccaaacgtgattgcagttacaaaatatgttacaatagagcgagctaaagaagcgtatgaggctggaataagacattttggtgagaatagattggaaggcttttttcaaaagaaagaagcattaccatcagatgcggtgattcattttataggatcattacaatctcgaaaagttaaggacgttataaacgacgtagattatttccatgctttagatcgattgagcttagccaaagaaattaacaaacgtgcagaacataaaattaaatgtttcttgcaagtgaacgtttcgggagaagcttctaaacatggtattgctttagaagatgttgatcagtttatagatgatcttaaaaaatatgacaaaatcgaaattgtaggtttaatgacgatggcaccattgacagatgatgaagcatatattagatcgttatttaaacagttacgtttgaaaaaagaagaaatacaacgactcaatttagaatatgcgccttgtgatgaattatcaatgggaatgagtaatgactatcttattgcagttgaagaaggtgcgacgtttgttagaattgggactaaacttgtaggagaagaggagtga

SEQ ID NO: 7904 - DNA, 564 bp, Staphylococcus aureus
gtgagccacttggctttaaaagatttatttagtggattttttgtaatagatgatgaagaggaagtagaagtacctgacaaacaacaacaggtcaatgaagcgccagcaaaagagcagtcacaacaaacaacaaaacaaaacgcaatcaaatcagtccctcaaaaatctgcatcaagatatacaacaacgtcagaagaaaggaataaccgtatgtctaattattcaaaaaataattcacgtaatgttgtaactatgaacaatgctacaccaaacaatgcatcacaagaaagttcaaaaatgtgtttattcgaaccacgtgttttttcagatacacaagatattgctgatgagcttaaaaaccgccgtgcgacacttgtcaatttacaacgtattgataaagtatcagcgaaaagaattattgattttttaagcggtactgtttatgcaatcggtggagatatccaacgtgtaggtactgatattttcttatgtacgcctgataatgtggaagtagctggaagcattacagaccatattgaaaatatggaacattcattcgactaa

SEQ ID NO: 7905 - DNA, 219 bp, Staphylococcus aureus
atggctaaacaagatgtaattgaattagaaggtactgtattagatactttaccgaacgcaatgtttaaagtagaattagaaaatggtcatgagattttagctcacgtaagtggtaaaatcagaatgaattacattcgtattctacctggcgacaaagtaactgttgagatgtctccgtacgatttaacacgcggaagaattacttatcgttataaataa

SEQ ID NO: 7906 - DNA, 114 bp, Staphylococcus aureus
atgaaagtaagaccatcagtaaaacctatttgcgaaaaatgtaaagtcattaaacgtaaaggtaaagtaatggtaatttgtgaaaatccaaaacacaaacaaagacaaggttaa

SEQ ID NO: 7907 - DNA, 1392 bp, Staphylococcus aureus
atggcaaaagatatggatacaattgtttcattagcaaaacacagaggttttgtgttccctggtagtgatatttacggtggtttatcaaacacatgggattatggtcctttaggtgttgaattaaagaataatgttaaaaaagcttggtggcaaaaattcattacacaatcaccgtttaacgttggtatcgacgctgcaatcttaatgaatccaaaagtatgggaagcttcaggacacttaaacaacttcaacgacccaatgattgataataaagatagtaaaattcgatatcgcgctgataaattaattgaagattatatgcaagatgttaaaggtgatgaaaacttcattgccgatggtttaagttttgaacaaatgaaaaaaattattgacgatgaaggtattgtttgtcctgtaagtaaaactgctaactggactgaaattcgccaattcaatttaatgtttaaaacattccaaggtgtaactgaagattctacaaatgaaattttcttacgtcctgaaacagcacaaggtatttttgtaaactataaaaacgtgcaacgttcaatgcgtaaaaaattaccatttggtatcggtcaaattggtaaatcattccgtaatgaaatcactccaggtaacttcattttcagaacaagagaatttgaacaaatggaacttgaattcttctgtaaacctggagaagaaatcgaatggcaaaattattggaaaacttttgcaagtgactggttaacaagcttaaatatgagcagtgaaaatatgcgtttacgtgatcatgatgaagatgaattatctcattactcaaatgcaacaactgatattgaatataaattcccatttggttggggtgagttatggggtatcgcaagtcgtacagacttcgacttacgtaaacatgctgaacactctggtgaagatttcagataccatgatccagaaacgaacgaaaaatatattccatattgtatcgagccatcacttggtgcagatcgtgtaacattagctttcttatgtgatgcatatgatgaagaaggcgttgaaggtagtaaagatgcacgtacagttttacacttccatcctgcattagcaccatataaagcagcgattttacctttaagtaagaaattatctggcgaagcgattaagatttttgagcaattaagttctaaattctcaatcgatttcgatgaatcacaatctatcggtaaaagataccgtcgtcaagatgaaatcggtacaccttattgtgtaacattcgactttgattcattagaagataatcaagttacagtacgtgacagagattcaatggaacaagttcgtatgccaatctcagagttagaagctttcttaactgaaaaaacaaaattctaa

SEQ ID NO: 7908 - DNA, 261 bp, Staphylococcus aureus
atggaaaactttgataaaacaatgaaattcgactatgaagaacttccaacgcaagatgtaagagatgttttaaataatgtttatcgaacattagatgaacgaggatataatgccgtaaaccaaattgtaggttatttattatcaggtgaccctgcgtatattccacgccagaatgaagcaagaaatcaaattcgtcatattgatagagatgttattatggaagaacttgtttcttactatttaaaagagcaaaataaataa

SEQ ID NO: 7909 - DNA, 1359 bp, Staphylococcus aureus
atgattaatgttacattaaagcaaattcaatcatggattccttgtgaaattgaagatcaatttttaaatcaagagataaatggagtcacaattgattcacgagcaatttctaaaaatatgttatttataccatttaaaggtgaaaatgttgacggtcatcgctttgtctctaaagcattacaagatggtgctggggctgctttttatcaaagagggacacctatagatgaaaatgtaagcgggcctattatatgggttgaagacacattaacggcattacaacaattggcacaagcttacttgagacatgtaaaccctaaagtaattgccgtcacagggtctaatggtaaaacaacgactaaagatatgattgaaagtgtattgcataccgaatttaaagttaagaaaacgcaaggtaattacaataatgaaattggtttacctttaactattttggaattagataatgatactgaaatatcaatattggagatggggatgtcaggtttccatgaaattgaatttctgtcaaacctcgctcaaccagatattgcagttataactaatattggtgagtcacatatgcaagatttaggttcgcgcgaggggattgctaaagctaaatctgaaattacaataggtctaaaagataatggtacgtttatatatgatggcgatgaaccattattgaaaccacatgttaaagaagttgaaaatgcaaaatgtattagtattggtgttgctactgataatgcattagtttgttctgttgatgatagagatactacaggtatttcatttacgattaataataaagaacattacgatctgccaatattaggaaagcataatatgaaaaatgcgacgattgccattgcggttggtcatgaattaggtttgacatataacacaatctatcaaaatttaaaaaatgtcagcttaactggtatgcgtatggagcaacatacattagaaaatgatattactgtgataaatgatgcctataatgcaagtcctacaagtatgagagcagctattgatacactgggtactttgacagggcgtcgcattctaattttaggagatgttttagaattaggtgaaaatagcaaagaaatgcatatcggtgtaggtaattatttagaagaaaagcatatagatgtgttgtatacgtttggtaatgaagcgaagtatatttatgattcgggccagcaacatgtcgaaaaagcacaacacttcaattctaaagacgatatgatagaagttttaacaagcgatttaaaagcgcatgaccgtgtattagttaaaggatcacgtggtatgaagttagaagaagttgtaaatgctttaatttcatag

SEQ ID NO: 7910 - DNA, 1296 bp, Staphylococcus aureus
atgcagttaaatagtaatggttggcatgttgatgaccatattgttgtcgctgtttctacaggtattgatagtatgtgtttattgtatcaactactaaatgattataaagatagttatagaaaactaacatgcttacatgtcaatcatggcgttaggtcagcttcaattgaggaagccagatttttagaagcatactgcgaacgtcatcacattgatttacatatcaaaaagttagatttgtcgcatagtctcgaccgaaataacagcattcagaatgaagctcgaattaaacgttacgaatggtttgatgaaatgatgaatgtattagaagcggatgtattgctaacggcgcatcatttggacgatcaattagaaactattatgtatcgtatttttaatgggaaatcaacgcgtaataaactaggatttgatgagttatcgaagcgaaaaggttatcagatttatcgaccacttttagctgtctctaaaaaagaaataaaacaattccaagagagatatcatattccatattttgaagatgaatctaataaagataacaaatatattagaaatgatattcgtaatagaattattccagctattgatgaaaataatcaacttaaagtatcgcatttattaaaattaaaacaatggcatgatgaacaatatgatattttgcaatattcagctaaacaatttattcaagaatttgtgaagtttgatgaacagtcaaaatatttagaggtttctagacaagcttttaataacttaccaaactcattaaagatggttgtgttggactgcctattatcaaagtattatgagttgtttaatattagtgctaaaacatacgaagagtggtttaaacaatttagtagtaagaaagcacaattcagtattaatctcacggataaatggataattcaaatcgcatatggtaaattaataataatggctaaaaataatggcgatacatattttagagttcaaacaattaaaaagccaggtaattatttttttaacaaatatcgattagagatacattctaatttaccaaaatgtttatttccgcttacagtgagaacacgacaaagtggcgatacatttaaactgaatgggcgcgatggttataagaaagtgaatcgcctgtttatagattgtaaagtgccacagtgggttcgggatcaaatgccaatcgtattggataaacaacagcgcattattgcggtaggagatttatatcaacaacaaacaataaaaaaatggattataattagtaaaaatggagatgaatag

SEQ ID NO: 7911 - DNA, 939 bp, Staphylococcus aureus
atggcattatttttacaacccgtttttaaagacagaatttggggcggtcatgcattaaaagcatttaactatgatatccctaatgaaacaactggtgaatgctgggcaatttctgcacatccaaatggtcctaatacaattatcaatggtccatacaaggatatgaccctagatcaactttggtcacaacatcgtgaattattcgataatgattcacgagatagtttccctctgctaactaaagtattagatgccaatgataaattatctgttcaagttcatccagatgatgactacgctttaaaacacgaaggcgaactaggtaaaacagaatgttggtatattttagatgcagccccaggtgctgaaattatatatggcgtacatgcacataataaacagacgttaatcgacatgattgataatcatgaatttgacagtcttttcaaacgtatacctgttaagcccggtgacttttattatgttcctgctggcactgtccatgccattggttcgggtattttaattttagagacacaacaatcatccgatacgacataccgtatttatgactatgatagacgagatcaaaatggtcaattgcgtgatttgcacttagagcaaagtaaagatgtgattgaattaggcaatcatgaaccaaatactactcctataacaactcacatcgacacacacactgtaactcaatttgtagataatcaatattttgcagtatataaatgggatattcatggagatttaaaattcaataaaccacatgcttattgcttagttactattatcgatggtactggtactttaacagtaaacgataagcactatgacatccaaaaaggttctagctttattttaactacggaagacgaggatattcactttgtcggtaatattagtgctatagtaagtcatcctggataa

SEQ ID NO: 7912 - DNA, 1953 bp, Staphylococcus aureus
atgaaaattgtagctattacctcatgcccaaatggcattgcacatacatatatggctcaagaaaagcttgagcaggtagcaaaagaaatgggtgtggatattaaagtagagacacagggcggtgttggtgctgaaaatgttttaactacgcaagacatcgaagaagctgacggtgtcataattgcagctgataaacaagttgatctatcccgatttgttggtaaacggttgattaatgaaaatgttcgcgaagggattcataatccgagaggtctaattcaacgtatcattaatcaagatgcgcctatttatcaatctgaaacaaattatcattcgaaagatcgcggtaagtctaaaagtggtattcaaatggtgtatcaacatttaatgaacggtgtatcgtttatggttccttttatcgtagttggtggactccttatcgccatcgcgctgactctaggcggtgaaacgacatcaaaaggattagtcatcccagatgattcattttggaaatccattgaaaacattggtagtttagcctttaaatttatggttccaatactagctggatatatcgctgttagtatcgctgacaagcccggtcttgttcctggtatgattggcggcgctatcgctgctgacggtagtttttatggcagtgatgcaggcgcaggatttttaggtggtattgttgctggtttcttagcaggttatatcgcaaagtggattaaagatattaaagttccaaaagcaatggcaccaattatgcctatcattattattcccattatttcatcggtcgttgtaggattgatatttatatttttaatcggtgcaccaatttctaatatttttgaggcattaacaacctggttaaaaagtatgcaaggtgctaatattattatacttgcgatgattataggtgcgatgatcgccttcgatatgggcggtccagtaaacaaggtagcatttttatttggctcagcacttattgctgaaggtaattacgccgttatgggtatggtcgcagttgctgtatgtacaccaccaatcggtttaggtttagcaacgtttgttcaaaagtataaattcaatcattccgaaagagaaatgggtaaggcttccttcactatgggactatttggtattactgaaggtgctattcctttcgcagcccaagatccattgcgcattatacctgcaaacatcattggtgcaatgattgcatcagtcattgcagccattggtggtgtcggcgatagagtcgcacatggaggtccaatcgtggctgtattaggtggtattgatcatgtattatggtttatctttgcagtgatagtaggtagtcttgtcacaatgactactgtactattattaaaacgcaatacaccagttatagcagtagatgcaccagcgcaacacacgcaacttcatgatacagatattacacaacatgatacagaggttgacaatgtagataaaaccgcgaaacattcacatctcaataaaccttctcatgtttttgatcaacaaactatgataattactgatcacgacatgtctcgaaacgaagcaattgatatgttgattcataaacttaaaatttgccgttatgtagagcacacatcgcatttaaaaaatgcaatactagaacgtgaaatggagtctacgacagctattggcatgaacgtggccattccacatgcaaagtctgatgttgtaaaacaaccgattgtagctgttatgaaaaataatcatggtgttaaatgggacagtctagatggtagtctacctcaattgatattcttaattgccgtaccaaacaacagtcaggatacacatttaaaaatacttcagcgcttatctaaagcgttaatgaatgatgagacacgccaatcactaattaatgcaaacagtactacagaaatttataacttattaatgaaaatatag

SEQ ID NO: 7913 - DNA, 2391 bp, Staphylococcus aureus
atgaaacataaactagatgttacgataaacgaattaagactaaagtcgattagaaaaatagtgaaacgcatcaatacatggagcgatgaagttaaatcatattctgatgatgcgttaaaacaaaagacaatagaatttaaagaacgtttagcatcaggagttgatacactagatacattgttacctgaagcttatgcagtggcacgtgaagcgagctggagagtattaggtatgtatcctaaagaagttcagttaatcggagcgattgtattgcatgaaggtaacattgcggagatgcaaacaggcgaaggtaaaacattaacggcaacgatgcctttatatttaaatgctctttcgggaaaaggaacatatttaattacaacgaatgattatttagcgaagcgagattttgaagagatgcaaccattatatgaatggttaggtttaactgcttcattaggttttgttgatattgtggattatgagtatcaaaaaggggaaaaacgtaatatatatgaacatgatattatatatacaactaatggacgtctcggttttgattatttaattgataatttggctgatagtgcggaagggaaatttttaccacaattaaattacggtattattgatgaagtggattcaatcattttagatgctgctcaaacaccattagttatttcgggtgcaccaagattacaatcaaatctatttcatattgtgaaagagtttgtagatacattgattgaagacgtgcattttaaaatgaagaagaccaaaaaagaaatatggctgttaaatcaaggtattgaagcggcacaatcatactttaatgttgaagatttatatagcgaacaagcgatggtcctagtgcgtaatattaatttagcactgcgcgcacaatatttgtttgaatctaatgtcgattactttgtatataatggtgatattgttttaattgaccgtattacaggtcgtatgttaccgggaactaagttgcaagctggacttcaccaagctattgaagcgaaagaaggtatggaggtttcaacagataaaagtgttatggcaacaattaccttccagaatttatttaaactttttgaatcattttcaggtatgacagctacaggaaaattaggcgaatcagagttctttgatttgtattcaaaaatagtcgtacaagcaccaactgataaagcgattcaacgtatcgatgaaccagataaagtgtttcgttcagttgatgagaaaaacatcgcgatgattcatgatatagttgaacttcatgaaacggggcgaccggttttactcataacgagaactgctgaagcggctgaatacttttcgaaagtattattccaaatggatattcctaataatttactcattgcgcaaaatgttgcaaaagaagcgcagatgatagctgaagcagggcaaattggttccatgactgttgcgactagtatggcaggtcgaggcacagatattaaacttggtgaaggtgtcgaagcattaggtggattagctgttattattcatgaacatatggaaaatagccgtgtagacaggcaattacgtggtcgttctggtagacaaggggatccgggatcatcttgtatatatatttcactagatgattatttagttaagcgatggagcgatagtaatttagcggaaaataatcaattatattcattagatgcacaacgattatcgcaaagtaatttgtttaatcgcaaagttaagcaaattgtagttaaagcgcagcgtatctcggaagaacaaggggttaaagctcgtgaaatggctaatgaatttgaaaaaagcattagtatacagcgagatcttgtatacgaggaacgcaatcgagttttagaaatagatgatgctgagaatcgagattttaaagcgttagctaaagatgtatttgaaatgtttgtaaatgaggaaaaggtgctaacaaaatcgcgtgttgtcgagtatatttatcaaaatttaagtttccaatttaataaagatgtggcttgtgttaattttaaagataagcaagcagtagtgacatttttattagagcaatttgaaaagcaattagctttgaatcgtaaaaacatgcaaagtgcatattattataatattttcgttcaaaaagtctttttgaaagcaattgattcatgttggttagaacaagtcgactatttacaacaattaaaagcaagcgttaatcaacgacaaaatgggcaacgtaacgctatttttgaataccatagagttgcattagattcatttgaagttatgacacgaaatatcaaaaaaagaatggtgaaaaatatttgtcaaagcatgattacatttgataaagagggtatgccagttatacattttccataa

SEQ ID NO: 7914 - DNA, 1776 bp, Staphylococcus aureus
atgtattacagttatggaaattatgaagcatttgcgcgccctaaaaaacctgaaaatgtagaaaacaaatctgcttacttaatcgggtctgggttagcttcacttgcggcagcttgtttcttaattagggatggtcaaatggaaggttcgaagattcatattttagaagagttacctaaagcaggtggtagtcttgatggtgaaaatatgcctttaaaaggctatgttgtccgcggtggtcgtgaaatggagaaccactttgaatgtttgtgggacttattcagatctatcccttcattagaaatcgataacgcgtctgtattagatgagttctattggctaaacaaagaagaccctaactattctcgctgtcgtgttattgagaaacagggtcaacgtttagtcacagacggagacttcactttgactaaaacggcgattaaagaaattttagatttatgcttaacgaatgaagaagatttagatgatgtcaaaataacagatgtattttccgatgacttctttaattcaaacttttggatttactggaaaacgatgtttgcatttgaaccgtggcattctgctatggaaatgcgtcgttatctaatgcgattcgttcatcatattggtggtctcgcagacttttcagctttaaaattcactaaatataatcaatatgaatctttagtattacctatggttgaatatttaaaatcgcatggggttcaatttgaatacgatgtaaaagtagaagatattaaagtagatgttacgacaagtcaaaaaattgcccgagaaatattaattcaccgacatggcaaagcagagtcaattaaactgactgtagatgatcttgtctttgtgacaaacggtagtattacggaaagctctacgtatggtgataatgatacaccagcaccaccaactgacgaattaggtggtagttggacactatggaaaaatttagcgcgacaaagtcctgaatttggtaatcctgataagttttgccaaaatattcctaaaaaaagttggtttgtttcagcaacttctacaacaaacaataaagagattatcgatacaatagaaagtatttgtaaacgtgacccacttgcaggcaaaacagttacaggcggtattattacaatcaatgattctgcatggcaaatgagttttacaatcaatcgtcagcaacagtttaaagaccaacctgaaaatgaaatatctacatggatttatgccttatattcagatgtaaacggcgattatattaaaaagccaattacagaatgtagtggtaatgaaatatgccaagaatggctgtatcacttaggtgtatcaactgacaaaattgaagacttagcaaaacatgtatctaatacgattcctgtttatatgccatatatcacctcttatttcatgacgcgtgctatcggcgacagacctttagtcgtcccgcatcaatcacaaaatttatcatttattggtaactttgcagaaacagagcgagatactgtatttacaacagaatattcggttcgtactgccatggaagctgtttatcaattactaaatatagatcgtggtattccagaggtcatcaatagtacatttgatcttcgcgtcttaatggatgccgtatacgaactgaatgaccatcaagatttgcgcgagattactaaagattcgaaaatgcagaaactcgcattagcaggattccttaaaaagataaaaggtacgtacattgagacattattaaaagaacacaaattgttataa

SEQ ID NO: 7915 - DNA, 2775 bp, Staphylococcus aureus
atgactaacgaaagaaaagaagtttcagaggctcctgtaaacttcggtgcgaatttaggtctaatgttagatctatatgatgactttttacaagatccatcatctgtaccagaagatttacaagtcttattcagcacaattaagaatgatgactcaattgtaccagctttaaaaagtacaagtagtcaaaatagcgacggcacaattaagcgtgtcatgcgtctaattgataatattcgccaatacgggcatcttaaagccgatatttatcctgtaaatcctccaaaaaggaaacatgtacctaaattagagattgaagactttgatttagatcaacagactttggaaggtatatcagcaggaattgtttcagatcactttgccgacatttatgataatgcttatgaagcaattttaagaatggaaaaacgttacaaaggaccaattgcatttgagtatacacatattaataacaataccgaacgtggttggttaaaaagaagaattgaaacgccatataaagtaacgttaaataataacgaaaaaagggcactattcaaacaattagcgtatgttgaagggtttgaaaaatatcttcataaaaacttcgttggtgcaaagcgtttttcaattgaaggggtagacgcacttgtaccgatgttacaacgtactattacgattgctgcgaaagaaggtattaaaaatatacaaataggcatggctcaccgtggacgtttaaacgttttaacgcatgtcttagaaaaaccgtacgaaatgatgatttcagaatttatgcatacagatccaatgaaattcttacctgaagatggtagcttgcagttaactgctggatggactggtgatgtgaaatatcaccttggtggcattaaaactactgattcatacggtacaatgcagcgtattgcactggctaacaatccaagtcacttggaaattgttgcacctgttgttgaggggcgtacgagagcagcacaagatgatacacaacgagctggggctccgacgactgatcatcataaagcaatgccaattattatacatggcgatgctgcttatcctggtcaaggaattaacttcgaaacaatgaacttaggaaacttgaaaggctattctacgggtggttcattgcatattattactaacaatagaattggatttactacagaaccaattgatgcacgttcaacaacttattctacagatgtggccaaaggttatgatgtgccaatattccatgtcaatgctgatgacgttgaagctactattgaagcaattgatattgcaatggaatttagaaaagagtttcataaagacgtcgttattgatttagtaggttatcgtcgtttcggacataacgaaatggatgaaccatcaattactaatccagttccttatcagaatattcgcaaacatgactctgttgaatatgtgtttggtaaaaagcttgttaatgaaggtgtcatttcagaagatgaaatgcattcatttatagaacaagtccaaaaggaactaagacaagctcatgataaaattaataaagctgataaaatggataatccagatatggaaaaacctgcagaacttgcattaccgttacaagcagacgaacaatcatttacgtttgatcatttgaaagaaataaatgatgcattgttaacatatccggatggctttaacattttgaaaaagttaaacaaagttcttgagaagcgtcatgagccgtttaataaagaagatggcttagttgattgggcacaagcagaacaacttgcatttgcgacaattttacaagatggtacaccgattcgcttaactggtcaagatagtgaacgtggtacattcagtcataggcatgccgtgttacatgatgagcaaacaggtgaaacatatacacctttacatcatgttcctgatcaaaaagcgacatttgatatacacaattctccgctttcagaagcagcagtagttggttttgaatacggctataatgtggaaaacaaaaaaagcttcaatatttgggaagcgcaatatggtgattttgcaaatatgtcacaaatgatttttgacaacttcttattcagttctcgctcaaaatggggagaacgttcaggattaacattattcttacctcatgcatatgagggtcaaggacctgaacattcatcagcaagattagagcgatttttacaattagctgctgaaaataattgcacagttgtcaacttatctagttcaagtaattatttccacttattgcgtgcacaagcagctagtttagattctgaacaaatgcgaccattggttgttatgtcaccaaaaagcttattgagaaataaaacagttgccaaaccaattgatgagtttacttctggtggatttgagccaattttgacagaatcatatcaagcggataaggttacaaaagttattttagcaactggtaaaatgttcattgatttaaaagaagcattagctaaaaatccagacgaatccgtgttactcgttgcgattgaaagattgtatccattcccagaggaagagattgaagcattactagcacaattgccaaaccttgaagaagtgtcatgggtacaagaagaacctaaaaatcaaggtgcatggttatatgtctatccatatgttaaagtgctagttgcagataaatatgatttaagttatcatggcagaattcaaaggctgctccagctgaaggcgatggagaaattcataaacttgttcaaaataaaattatag

SEQ ID NO: 7916 - DNA, 1554 bp, Staphylococcus aureus
atgaaatactttattccagcttggtacgatgaccaacgatggtggcaagacacgactgtgccgtattatcaactacaaaataagacggaatttgacgatatgattagtttaatgggaatgcaccttgaaaatgacttagattatcaactgattgttctcaatcatgcaccaaatttaagaacatttttacatcgatatgacttatatgaaacaaagtattcgtctgtgtttgatgaaattcaaggattcagtcaccatgcgccacaagcgattaattatcatcacttaaaatggccggatgatgttgagtttgtgtacacgccgtatttattaaaatgtgtgacgagtgaacagacctatacaaatatttattttagtcaagaagggtattcaatttggtttgaagaatttgaaagagatcagttacaacggcgttatatttttgatgacagaggttatttatcagcgatacgttattttgatgatcagggagaggcttcttaccaacaatatttaacgattaatggagattgtgtacttcatgaagatttgaaaaatggcagagtcactgtatcaaaaagatatcaacatcactatcaacaaacagaatataacaatatggctcaactaattgaagaaaaatttcaagcaatgattgcacaacaaatacatgaagatgatcatgtgattgtggcttcagatgctaggcacaatcgacaaatagccaatcatattccagcgaaattgttaagttattcattttttaaaaatagaaatgaaactgtgtcagatgaggaatatcaatctatcgtaaagaatgcccatttaattgttgatagtgtgcaactagaacgtgatttaattagtcatcaagagaagtatcagcgggagaatacaatgattcgaatcacaccatttgaaacgagacaatcacctaatataagtagtcaattgatggaaacatttataggtgtatggatagatggtatgagtgacgctgatttgcaacaaatgatgcaacgacttgtggattatatcgcacaggaagattattaccgtttaattttattatcgcgccatcaaaatgacataccgatgtggcttcgtgaatgtattacgtcggtaaatgaggaataccaagctaaacagaatgcggatgttaatgtttcagcattaatgacacctgaagatcaagatgacatcattgctgttaagacgatacatgctgaacatgatgttgtagaagcattgcggacgttgcgacttgtgatagatatgtcaaaagaacctgatttgtatttacaaattagtgcaattagcgctgggattccacaaattaatggtcaacaaacagattacgtctctgattatgacaatggccgtattataaatacagttgatgaattagatgatgcgttaaattattatttattttatttgaaaaattggaattatgcgtacgcctattctttaaaattaatagatgcatatgcttctaagaatattattaatcagctcgatgagttaatagaaggtgaaaatgatgccacgtaa

SEQ ID NO: 7917 - DNA, 1569 bp, Staphylococcus aureus
atgccacgtaaatttagagttttgcaaattggaggagacgatttagaacctatttttcaacacaaaaaaggtgtgagttgggattacttcgatattggattgtttgaatttgatagtggttatgtagaggctattgaagcgattgttgaagcagaagggcgctttgattttatctatattcaagcaccatactcggagacattaacgaatttattacaaatgataagcgaaccatacaatacgtatgttgatgaatcattttggtcagttgaatatgaacaagacgaaaatgtccaaaaatacgttgttcaaccattacattaccggaatattgaagaacgtaataataaattagaggcagttagcttctcaggacagtatggagataaagtttcccctaagttagcacttgtgcatccgaattttaaagtagatgtcgtataccaaggtaattcagagctcacgttgagtggagaatttggaaaagaatttaaacctatcgcatcttggcaaaataatctcgtttacgataaagataaagtcattcaaatatggccagaatttgatattgatggtgcggtcgagttgcaatatacatttagattgattcagactggcgctgatggtgcattaattgaacaaatcatattaactgatgatatgttagacagtcctttagagatacctgcgaaaccatttgatgcttatataagtgtaactgttaaggcgcgtgggaacgggacggtacatttaggacctatacacaaacgatggtctagattagacatgggtcaatttttacttggtggtagtcgtttcgtagatagtcaacgacaggaatttatttattatttccaccctggtgatatgaaaccgccactaaacgtatattttagtggttatcgaacagcggaaggtttcgaaggatattatatgatgaaacgtatgaatgcaccgtttttacttatcggcgatcctcgtgttgaaggtggtagcttttatatcggttcatctgaatatgaacaaggtattatcaatgttattgacgagacattagaaaagctgaattttaaatcacatgaattaatattatctggtttatctatgggttcatttggtgccttgtattatggtgctcagttaaatcctcaggcaattattgttggtaaaccacttgttaatattggaacgattgctgaacatatgcgattacttagaccagaagagttcggtacagcattagacgtcctggtgtctaatgaaggtgatacatctcaagcgtcgataaaggcattaaatcaaaaattttggcaaacatttcaaaagaaatcattgtcacaaactgtttttgccatagcatatatgcaacatgatgattatgatccacatgcatttcaagagctattacctgtattgacagcacaccaagcaagagtgatgaatcgcagtattcctgggcgacataatgatgattcacctaccattgcaagttggtttgttaatttttacaacattattttggaagacaagtttgggagagttcaacatgctgaaaaacaaaacatttaa

SEQ ID NO: 7918 - DNA, 114 bp, Staphylococcus aureus
ttgaaaaattggaattatgcgtacgcctattctttaaaattaatagatgcatatgcttctaagaatattattaatcagctcgatgagttaatagaaggtgaaaatgatgccacg

SEQ ID NO: 7919 - DNA, 1410 bp, Staphylococcus aureus
atgtggaaagaaaaagttcaacaatacgaagatcaaatcattaatgacttaaaaggattattagcaattgaaagtgtgagagatgatgcaaaagcatcagaagacgcaccagttggtccaggtcctcgtaaggcattagactacatgtatgaaattgcacatagagatggatttacaacacatgatgtggatcatattgcaggaagaattgaggcaggtaaaggaaatgacgtattaggtatcttatgtcatgttgacgttgttcctgctggtgatggatgggatagtaatccgttcgagccggttgtaacagaagatgctatcatagctagaggtacacttgatgacaaaggtccaacaattgctgcttattatgcaattaagatattagaagatatgaatgtggattggaagaaacgtattcatatgattattggtacggatgaagaatctgattggaaatgtacggatcgctattttaaaacagaagaaatgccaacattaggttttgcaccagatgcagaatttccatgtattcatggtgaaaaaggcattacaacatttgatttagttcaaaataaacttactgaagatcaagatgaacctgattatgaattaataacttttaaatctggtgaacgttacaacatggtacctgatcatgcagaagcaagagtgcttgttaaagaaaatatgacagatgttattcaagactttgagtactttttagaacaaaatcatttacaaggtgatagtactgttgatagtggcattctagttttaacagttgaaggtaaagcggttcatggtatggatccatctatcggtgtgaatgcgggtctttacttactaaaattcttagcatcattaaatcttgataataatgcacaagcgtttgtagcatttagtaatcgctacttatttaattcagattttggtgaaaagatgggaatgaaattccatacagatgtcatgggtgacgtgacaactaacattggtgttattacatatgataatgaaaacgcaggtcttttcggtatcaacttacgctacccagaaggatttgaatttgaaaaagctatggatcgttttgcaaatgagattcaacaatatggctttgaagtgaaattaggtaaagtccaaccaccacattatgttgataaaaatgatccttttgtacaaaagttagttactgcatatagaaatcaaacaaatgatatgactgaaccttatactataggtggcggtacttatgcgagaaacttagacaagggtgtagcatttggcgcaatgtttagtgattctgaagatttaatgcatcagaaaaatgaatatatcactaaaaaacagttatttaacgcaactagtatttacttagaagcaatttattcattatgcgtggaggaataa

SEQ ID NO: 7920 - DNA, 945 bp, Staphylococcus aureus
atgagctttgcatcagaaatgaaaaatgaattaactagaatagacgtcgatgaaatgaatgcaaaagcagagctcagtgcgctgattcgaatgaatggtgcacttagtctttcaaatcaacaatttgttataaatgttcaaacggaaaatgcaacaacggcaagacgtatttattcgttgattaaacgtgtctttaatgtggaagttgaaatattagtccgtaaaaaaatgaagcttaaaaaaaataatatttatatttgtcgtacaaagatgaaagcgaaagaaattcttgatgaattaggaattttaaaagacggcatttttacgcatgaaattgatcattcaatgattcaagatgatgaaatgagacgcagttacttgagaggagcttttctggcaggtggctcagtgaataaccctgaaacatcttcgtaccatttggaaattttttctcaaaatgagagtcatgcagaaggcttaacgaaactaatgaatagttatgagttgaatgccaaacatttagagcgaaaaaaaggaagtattacgtatttaaaagaagcggaaaagatttcggattttcttagtttgataggtggctatcaagcgttattaaaatttgaagacgtacgtattgtaagagatatgcgtaattctgttaaccgactcgttaattgtgaaacggcaaatctaaataaaacagttagtgctgcgatgaaacaagttgagagcattaaattgattgataaagaaattggtattgaaaatttaccagacaggttgagagagattgctagaattcgagtagaacatcaagaaatttcgttgaaagagcttggagaaatggtatcaactggtccaatttcaaaatcaggtgtaaatcaccgattaagaaaacttaatgatttagccgataagattagaaatggtgaacaaatagaattataa

SEQ ID NO: 7921 - DNA, 915 bp, Staphylococcus aureus
atgtataaaatcaatattattagatcagattccgtctataagaatatactcaaggcaccaataaacgaccgtgattcaattttcactaaagaaatattagtaccttttaaaaagaaatttgaggtacaacatatgcctatttataatgatgacaaacagacaatgagtgcgattcaatttttagatgcctttcaaatttctcccaaagatttacgcatgtctgaccaaatgtcaatacaatacctgaataatgatttctggagtaattgcgaaaaatatttaaaagttgctatagatcaattttcaaattatagtatctcatctcaagtttctaactatcatttcacagtattacttggagatagccaaaaaccacttatgtatctaaataaaaatcgcggtggtgatggtggcataccaggttatattatgatttatttagtgccgagtacaagtacaattaattctatgaaaagcttaattgcacatgaagtaaatcataatatgcgctatcaatatattgattgggatggcggaagtttgattgaattgattattgcagaaggattagctgaaaactatgtagaatcattgtatggtaaagcgcatattggaccgtgggtaacaaatactaattggagtcgtgataacgtaaaaattaaaaatactatttataatcatttacatttaaagcatatatttgaatcgatgccttatctctatggtgatgatattaataaacttcaaggtaggcctatcgttggcctatctcatgctgccgggtatgcatgtggctatcacttggtaaaatactttttacaaaaaacaaacatacctattgaagttgctacaacacttccagcacaaaaaataataaatgaggtgactgaattttggcatacacatacactttaa

SEQ ID NO: 7922 - DNA, 741 bp, Staphylococcus aureus
ttggcatacacatacactttaaaagatattattgaaattacaggtgtaactaaaagaactttacattattacgatgaaataggattattagttccagataaaaatgataaaaattatcgcgtttataaacagcaagacttagaaaaattacaaaagattttaatactcaagtcttttgattttgatatcgctaaaataaaacaatacatttcgtatgataatgaacaattgcgaaagttattatcagagcaaataagcaagttagataaaaagatttctgacttacaattaattagacgctctgtatgtgaatttattaaaggactctctctaatagataccagcattttaaacaagacactacagtcacaatatgataaagaagcatctataaaatatggtcatacgaaagcatatcaatcatttattagacgtaaagacagcttacaatcgcaggatatcagacataaattgacaactatcttcaataaatttaatcatatgtctttgagtcattatccaatccaagattgtagtgatctcgtatttgagtggaaggcatttatgaacactatcgctgattttgatgatgaaacattatgctgtattgctaaaacatatgaagatgatacgcgtttcaaagattactttaattcatatgataatcaaaatttagcatcatacatttcagaagctgttaattattttttgagcaatgtgaataagagcgacaatttttaa

SEQ ID NO: 7923 - DNA, 204 bp, Staphylococcus aureus
atgccttatctctatggtgatgatattaataaacttcaaggtaggcctatcgttggcttatctcatgctgccgggtatgcatgtggctatcacttggtaaaatactttttacaaaaaacaaacatacctattgaagttgctacaacacttccagcacaaaaaataataaatgaggtgactgaattttggcatacacatacactt

SEQ ID NO: 7924 - DNA, 621 bp, Staphylococcus aureus
atgaaaaaatggacaaatcgattaatgacaatcgctggtgtagtacttatcctagtggcagcatatttgtttgctaaaccacatatcgataattatcttcacgataaagataaagatgaaaagattgaacaatatgataaaaatgtaaaagaacaggcgagtaaagacaataagcagcaagctaaacctcaaattccgaaagataaatcaaaagtggcaggctatattgaaattccagatgctgatattaaagaaccagtatatccaggaccagcaacacctgaacaattaaatagaggtgtaagctttgcagaagaaaatgaatcactagatgatcaaaatatttcaattgcaggacacactttcattgaccgtccgaactatcaatttacaaatcttaaagcagccaaaaaaggtagtatggtgtactttaaagttggtaatgaaacacgtaagtataaaatgacaagtataagagatgttaagccaacagatgtagaagttctagatgaacaaaaaggtaaagataaacaattaacattaattacttgtgatgattacaatgaaaagacaggcgtttgggaaaaacgtaaaatctttgtagctacagaagtcaaataa

SEQ ID NO: 7925 - DNA, 1356 bp, Staphylococcus aureus
atgggaaaatattttggtacagacggagtaagaggtgtcgcaaaccaagaactaacacctgaattggcatttaaattaggaagatacggtggctatgttctagcacataataaaggtgaaaaacacccacgtgtacttgtaggtcgcgatactagagtttcaggtgaaatgttagaatcagcattaatagctggtttgatttcaattggtgcagaagtgatgcgattaggtattatttcaacaccaggtgttgcatatttaacacgcgatatgggtgcagagttaggtgtaatgatttcagcctctcataatccagttgcagataatggtattaaattctttggatcagatggttttaaactatcagatgaacaagaaaatgaaattgaagcattattggatcaagaaaatccagaattaccaagaccagttggcaatgatattgtacattattcagattactttgaaggggcacaaaaatatttgagctatttaaaatcaacagtagatgttaactttgaaggtttgaaaattgttttagatggtgcaaatggttcaacatcatcactagcgccattcttatttggtgatttagaagcagatactgaaacaattggatgtagtcctgatggatataatatcaatgagaaatgtggctctacacatcctgaaaaattagctgaaaaagtagttgaaactgaaagtgattttgggttagcatttgacggcgatggagacagaatcatagcagtagatgagaatggtcaaatcgttgacggtgaccaaattatgtttattattggtcaagaaatgcataaaaatcaagaattgaataatgacatgattgtttctactgttatgagtaatttaggtttttacaaagcgcttgaacaagaaggaattaaatctaataaaactaaagttggcgacagatatgtagtagaagaaatgcgtcgcggtaattataacttaggtggagaacaatctgggcatatcgttatgatggattacaatacaactggtgatggtttattaactggtattcaattagcttctgtaataaaaatgactggtaaatcactaagtgaattagctggacaaatgaaaaaatatccacaatcattaattaacgtacgcgtaacagataaatatcgtgttgaagaaaatgttgacgttaaagaagttatgactaaagtagaagtagaaatgaatggagaaggtcgaattttagtaagaccttctggaacagaaccattagttcgtgtcatggttgaagcagcaactgatgaagatgctgaaagatttgcacaacaaatagctgatgtggttcaagataaaatgggattagataaataa

SEQ ID NO: 7926 - DNA, 1176 bp, Staphylococcus aureus
atgactgaagaattcaatgaatcaatgattaacgatattaaagaaggtgacaaagtcactggcgaggtacaacaagttgaagacaagcaagttgttgttcatatcaacggtggtaaatttaatgggattattcctattagtcaactatctacgcatcatattgatagcccaagtgaagttgtaaaagagggcgacgaagttgaagcatatgtcactaaagttgagtttgatgaagaaaatgaaactggagcttacatcttatctagaagacaacttgaaactgagaagtcttatagttatttacaagaaaaattagataataatgaaatcatcgaagcgaaagtaacagaagtagttaaaggtggtttggttgttgatgtaggacaaagaggttttgttccggcttcactaatttcaacagacttcattgaggatttctctgtgtttgatggacaaacaattcgtattaaagttgaagaattggatcctgaaaataatagagtcattttaagccgtaaagcagttgaacaagaagaaaacgatgctaaaaaagatcaattattacaatctttaaatgaaggcgatgttattcatggtaaagtagcgcgtttaactcaatttggtgcatttatagacattggtggtgttgatggtttagtgcatgtatctgaactttctcacgaacatgttcaaacaccagaagaagtagtttcaattggtcaagatgttaaagttaaaattaaatctattgatagagatacagaacgtatttcattatcaatcaaagatacgttaccaacacctttcgaaaatattaaaggtcaattccacgaaaatgatgtcattgaaggtgtcgtagtaagattggcaaactttggtgcatttgttgaaattgcaccaggtgtacaaggacttgtacatatttctgaaattgcacacaaacacattggtacgccaggtgaagtgttagaacctggtcaacaagtaaatgttaaaatattaggtattgatgaagagaatgaaagagtatcactatctattaaagcaacattaccaaacgaagatgttgttgaaagtgatccttctacgactaaggcgtacttagaaaacgaagaagaagataatccaacaattggcgatatgattggtgataaacttaaaaatcttaaactataa

SEQ ID NO: 7927 - DNA, 399 bp, Staphylococcus aureus
atgacaatgacagatccaatcgcagatatgcttactcgtgtaagaaacgcaaacatggtgcgtcacgagaagttagaattacctgcatcaaatattaaaaaagaaattgctgaaatcttaaagagtgaaggtttcattaaaaatgttgaatacgtagaagatgataaacaaggtgtacttcgtttattcttaaaatatggtcaaaacgatgagcgtgttatcacaggattaaaacgtatttcaaaaccaggtttacgtgtttatgcaaaagctagcgaaatgcctaaagtattaaatggtttaggtattgcattagtatcaacttctgaaggtgtaatcactgacaaagaagcaagaaaacgtaatgttggtggagaaattatcgcatacgtttggtaa

SEQ ID NO: 7928 - DNA, 876 bp, Staphylococcus aureus
ataaaaaaaatagaggcatggttatctaaaaagggtcttaaaaataaacgtactctaatagtagtgattgcctttgtcttatttatcatctttttatttttattgctgaatagcaatagtgaagatagtgggaacatcacgataactgaaaatgctgaattacgtacaggtccaaacgctgcgtatccagtcatatataaagttgagaaaggtgaccattttaaaaagattggtaaagtaggtaaatggattgaagttgaagatacatccagtaatgaaaaaggttggatagctggatggcacacaaatttagatattgtcgcggataatacgaaggagaaaaatcctttgcaaggtaaaacaatagtgcttgatcctggtcatggaggtagtgaccagggtgcttcaagcaatactaaatataaaagtttagaaaaagactatacgttgaaaacagcaaaagaattgcagcgtactttagaaaaagaaggcgcaactgttaagatgacaagaacagacgatacatatgtttcactagaaaatcgtgatatcaaaggcgatgcctatttgagtatacataatgatgcattagaatcatctaatgcaaatggaatgacagtttattggtatcatgataatcaaagagctttagcagatacgttagacgctacgattcagaagaaaggtttactttctaatcgcggttcaagacaagaaaattatcaagtgttaagacaaacaaaagttcctgctgttttattagaattaggttatattagtaacccaactgatgaaacgatgattaaagatcaattacatagacaaattttagaacaagcaattgttgatggacttaaaatttatttttctgcgtag

SEQ ID NO: 7929 - DNA, 783 bp, Staphylococcus aureus
atgaaagttagaacgctgacagctattattgccttaatcgtattcttgcctatcttgttaaaaggcggccttgtgttaatgatatttgctaatatattagcattgattgcattaaaagaattgttgaatatgaatatgattaaatttgtttcagttcctggtttaattagtgcagttggtcttatcatcattatgttgccacaacatgcagggccatgggtacaagtaattcaattaaaaagtttaattgcaatgagctttattgtattaagttatactgtcttatctaaaaacagatttagttttatggatgctgcattttgcttaatgtctgtggcttatgtaggcattggttttatgttcttttatgaaacgagatcagaaggattacattacatattatatgcctttttaattgtttggcttacagatacaggggcttacttatttggtaaaatgatgggcaaacataagctttggccagtaataagtccgaataagacaatcgaaggattcataggtggcttgttctgtagtttgatagtgcctcttgcaatgttatattttgtagatttcaatatgaatgtatggatattacttggagtgacattgattttaagtttatttggtcaattaggtgatttagtggaatcaggatttaagcgtcatttcggcgttaaagactcaggtcgaatactacctggacacggtggtattttagaccgatttgacagctttatgtttgtgttaccattattaaatattttattaatacaatcttaa

SEQ ID NO: 7930 - DNA, 879 bp, Staphylococcus aureus
atgtcacaagatgtaaatgaattaagtaagcaaccaacgccagataaagcagaagataacgcatttttcccatcaccatattcccttagtcaatatacagcacctaaaacagattttgatggtgttgaacacaaaggtgcctataaagatggtaaatggaaagtattgatgattgctgctgaagagagatatgtattattggaaaatggaaaaatgttctctacgggtaatcatcctgttgaaatgttattacctttacatcatttaatggaagcaggttttgacgttgatgttgcgacattatctggttatccagttaaattagaattatgggctatgccaactgaagacgaggcagttataagtacttataataaattgaaagaaaaattaaaacagccaaaaaaattagcagatgtgattaaaaatgaattaggacctgattcagactatttatctgtctttatcccaggcggacatgctgcagttgttggtatttctgaaagtgaggacgttcaacaaacattagattgggcattagacaatgaccgctttatagttacattatgtcatggaccagcagcactactttcagcagggcttaacagagaaaaatctccattagaaggatactctgtttgtgtcttccctgactcattagatgaaggtgcaaatattgaaataggttatttacctggacgcttgaaatggttagttgctgatttattaactaaacaaggattaaaagtagttaacgacgatatgacaggaagaacgttaaaagatcgtaaattattaacaggtgacagtcctttagcttcaaatgagttaggaaaattagcagttaatgaaatgttaaatgcaatacaaaataaataa

SEQ ID NO: 7931 - DNA, 354 bp, Staphylococcus aureus
atggaagcaaaagcggttgctagaacaataagaatcgcacctcgtaaagtaagactagttcttgacttaatcagaggtaaaaatgctgctgaagctattgcaattttaaaattaacaaacaaagcttcatcaccagtaattgaaaaagtattaatgtccgctttagctaatgctgaacataactatgacatgaacacagatgaattagtagttaaagaagcatatgctaacgaaggaccaacattaaaacgtttccgtccacgtgcgcaaggtcgtgcaagtgcgattaacaaacgtacaagccacattacaatcgtcgtaagtgacggtaaagaagaagctaaagaagcttaa

SEQ ID NO: 7932 - DNA, 138 bp, Staphylococcus aureus
gtgaatggtcaagaaaacttataccgtatcgcaattcaatactacggttcaggttcaccggaaaatgttgaaaaaattagacgtgccaatggtttaagtggtaacaatattagaaacggtcaacaaatcgttattcca

SEQ ID NO: 7933 - DNA, 1710 bp, Staphylococcus aureus
atgagtaacaaaaataaatcatatgattatgtcatcattggaggaggcagtgcaggttctgtactaggtaatcgtctgagtgaagataaagataaagaagtcttagtattagaagcgggtcgcagtgattatttttgggatttatttatccaaatgcctgctgcgttaatgttcccttcaggcaataaattttacgattggatttattcaacagatgaagaaccacatatgggcggtcgtaaagtagcacatgcccgaggtaaagttttaggtggatcaagttcgattaatggcatgatttatcaacgtggtaatccaatggactatgaaggctgggcagaaccagaaggtatggaaacttgggattttgcgcactgtttaccgtattttaaaaaattagaaaaaacatacggtgcagcgccttatgataaatttagaggccatgatggaccaattaagttaaaacgagggccagcaacgaatcctttattccagtcattctttgatgcaggtgttgaagcaggttatcataaaacacctgatgtgaatggatttagacaagaaggttttggaccgttcgatagtcaagtacatcgtggtcgccgaatgtcagcttcaagagcatatttacatccagcgatgaagcgtaaaaacttaaccgttgaaacacgtgcctttgtaactgaaattcattatgaaggtagaagagcaactggtgttacgtataagaaaaatggcaaactacataccatcgatgctaatgaagtcattttgtctggtggggcattcaatacgccacaattactacaattatctggtatcggtgattcagagttcctaaaatcaaaaggcattgagccacgtgttcatttaccaggtgtgggtgaaaactttgaagatcacttagaggtatacattcaacataaatgtaaggaacctgtatcattacagccaagcttagatatcaagcgcatgccatttattggtttacaatggattttcacacgtacaggtgcagcagcatctaaccattttgaaggtggcggatttgtacgttcaaataacgaagttgattatcctaacttaatgttccatttcttaccaatagctgtaagatatgatggtcaaaaggcagcggtcgcacatggttatcaagttcacgtaggaccaatgtattcaaactctcgtggtagcttgaaaatcaaatctaaagatccattcgaaaaaccaagtatccgctttaattatttatcaacagaagaagataaaaaagaatgggtagaagcaattcgtgtagcaagaaatatcttatctcaaaaagcaatggatccattcaatggtggagaaatttcaccaggaccagaagtgcaaacagacgaagaaattcttgattgggttcgtagagatggtgaaacagcattacacccatcttgtagtgctaaaatgggtcctgcttcagatccaatggcagtagttgacccgttaacaatgaaagtccacggtatggaaaatttacgtgtagttgatgcatccgctatgccacgtacgacaaatggcaatatacacgcacctgttttaatgttagctgaaaaagcagcagacattatacgtggcagaaagcctttagagccacaatatattgattattataagcatggtgttcatgatgaaaatgaaggtgcaatcgaagtaaaaccatacgctaaataa

SEQ ID NO: 7934 - DNA, 2409 bp, Staphylococcus aureus
gtggctaatacgaaaaaaacaacattagatatcactggtatgacttgtgccgcatgttcaaatcgtatcgaaaagaaactgaataaacttgatgacgttaatgcccaagtgaatttaactacagagaaagcaactgttgagtataaccctgatcaacatgatgtccaagaatttattaatacgattcaacatttaggttacggtgtcactgtagaaactgtcgaattagacattacaggtatgacttgtgctgcatgctcaagccgtattgaaaaagtgttaaataaaatgaacggcgttcaaaatgcaacggtcaatttaacaacagagcaagctaaagttgactattatcctgaagaaacagatgctgataaacttgtcactcgcattcaaaaattaggttatgacgcgtctattaaagataacaataaagatcaaacgtcacgcaaagctgaagcgctacaacataaattgattaagcttatcatatcagcagtattatctttaccactattaatgttaatgtttgtgcatcttttcaatatgcatataccagcactatttacgaatccatggttccaatttattttagctacacctgtacaatttattattggatggcaattttatgtaggtgcttataaaaacttaagaaatggtggcgccaatatggatgtacttgttgctgttggtacaagtgcagcatatttttacagtatttatgaaatggttcgttggctaaatggctcaacaacgcaaccgcatttatactttgaaacaagcgccgtactacttaccttaatcttattcggtaagtatttagaagctagagcgaagtctcaaacaaccaatgcgcttggcgaattattaagtttacaagctaaagaagcacgcattttaaaagatggtaatgaagtgatgattcctctaaatgaagtacatgttggagatacacttatcgttaaaccaggtgaaaagatacctgttgatggcaaaattattaaaggtatgactgccatcgacgaatctatgttaacaggtgaatctatccctgttgagaagaatgttgatgatactgtaattggttcaacgatgaacaaaaacggtactattactatgacagcaacaaaagttggcggggacactgcgttggcaaatattattaaagttgtcgaagaagctcaaagttctaaagcgccgattcaacgattggcagatattatttctggttatttcgttcctatcgttgttggtatcgcactattaatatttatcgtgtggattactttagttacaccaggtacatttgaacctgcacttgttgcgagtatttccgttcttgtcattgcttgtccatgcgcattaggacttgctacaccaacttctattatggtaggtactggtcgcgctgctgaaaatggcattttatttaaaggtggcgagtttgttgaacgcacacatcaaattgataccatcgttttagataagacgggtaccattacaaatggtcgtccagtcgtgacagattatcatggtgacaatcaaacgctacaactgcttgctactgctgaaaaagattctgaacacccattggcagaagccattgtcaattatgcaaaagaaaagcaattaacattaactgagacaacaacatttaaagcagtacctggccatggtattgaagcaacgattgatcatcaccatatattggttggtaaccgtaaattaatggctgacaatgatattagcttgcctaagcatatttctgatgatttaacacattatgaacgagatggtaaaactgctatgctcatcgctgttaattattcattaactggtatcatcgcagtggcagatactgtcaaagatcatgccaaagatgctataaaacaattgcatgatatgggcattgaagttgccatgttaactggcgataataaaaacactgctcaagccattgcaaaacaagtaggcatagatactgttattgcagatattttaccagaagaaaaagctgcacaaattgcgaaactacagcaacaaggtaagaaggttgcgatggttggtgacggtgtaaatgatgcacctgcattagttaaagctgatatcggtatcgccattggtacaggtacagaagttgccattgaagcagctgatattactattcttggtggcgacttgatgcttattcctaaagccatttatgcaagtaaagcaaccattcgtaatattcgtcaaaatctattttgggcattcggctataatattgccggtatccctatagctgcattgggcttacttgcgccatgggttgctggtgctgcaatggcactaagttcagtaagtgttgtcacaaacgcacttagattgaaaaagatgcgattagaaccacgccgtaaagatgcctag

SEQ ID NO: 7935 - DNA, 981 bp, Staphylococcus aureus
atgtcaaaatctaatcaaaaaatcgcatcaattgaacaattaagtaataacgaaggtatcatttctgcattagcatttgaccaacgtggtgctttaaaacgaatgatggctaaacatcaaacggaagagccaactgtcgctcaaattgaacaattaaaagtattggttgcggaagaattaacacaatatgcgtcttcaattttattagatccagaatacggtttaccagcatctgatgcacgtaacaaagattgtggattattgctagcttatgaaaaaactggttatgacgtaaatgctaaaggtcgtttacctgactgtttagtagagtggtctgcaaaacgtttaaaagaacaaggtgcaaatgctgttaaattcttactttactatgatgttgatgatgctgaagaaattaacattcaaaagaaagcatacattgaaagaatcggttcagaatgtgttgcagaagacattcctttcttcttagaagtattaacatacgatgacaacattcctgataacggtagtgttgaattcgcaaaagttaagcctagaaaggttaacgaagcaatgaaattattctcagaaccacgctttaatgttgatgtattgaaagttgaagtaccagtaaacatgaagtatgtagaaggctttgctgaaggtgaagtggtttatacaaaagaggaagcggcacaacactttaaagatcaagatgcagcaactcatttaccatacatttacttaagtgctggtgtttctgcggaattattccaagaaactttaaaatttgctcacgaagctggtgctaaattcaacggtgtactttgtggccgtgctacatggtctggtgctgttcaagtatacattgaacaaggtgaagatgctgctcgtgaatggttacgtacaactggtttcaaaaatattgatgacttaaataaagtattaaaagatactgcgacatcttggaaacaaagaaaataa

SEQ ID NO: 7936 - DNA, 1359 bp, Staphylococcus aureus
atgaattacacacaacaacttaaacaaaaagactcagaatatgtttggcatccatttacacaaatgggtgtatatagcaaagaagaagcaatcatcattgaaaaaggaaagggtagttacctttacgatacgaatggcaataaatatttagatggttatgcatcgttgtgggtcaatgtgcatggtcataataacaaatacttgaataaggtaattaaaaagcaactcaataaaattgcccattctacgctgctaggatcatcaaatattccgtcaatagaacttgcggaaaaattaatcgaaatcacgccaagtaatctaagaaaagtattttattctgatacaggcagtgcgtctgttgaaatcgcaataaagatggcatatcagtattggaaaaatattgatagagaaaaatatgccaagaaaaacaagtttataacgctaaatcacggttatcatggggatacgattggtgcggtaagtgttggtggtatcaagacctttcataaaatatttaaagacttaatatttgagaatattcaagtagaaagcccatctttctatcgcagtaattacgatactgaaaatgaaattatgacagctattttaacgaatatagagcaaattctaattgaaagaaatgatgaaatcgcagggtttatattggaaccgttgattcaaggtgcgacaggcttgtttgttcatcctaaaggctttttgaaagaagtcgagaaattgtgcaaaaaatacgatgtcttattaatttgtgatgaggtagcagttggttttgggagaactggaaagatgtttgcatgcaatcatgaagatgttcaaccggatattatgtgtttaggtaaggcgattactggtggctacttaccacttgcagctacattgacatctcaaaaaatatacaatacatttttaagtgattcgcatggtgttaatacctttttccatggtcatacatacaccggaaatcaaatcgtttgtacggttgcattagaaaatataagactttatgaaaaacgtaagttattgtcacatattgaaacgacatcatcaacacttgagaaacagttacatgcgctgaagcgtcatcgaaatgttggtgatgtaagaggacgaggcttaatgtttggagttgaattagttacagataaagatagtaaaacgccgttagaaattgaaaaagttgaacgtattgtacgtaaatgtaaagaaaacgggctaatgattagaaatttagaaaatgtcattacgtttgtgccagtgttaagtatgtcaaataaagaagtgaaaacgatggtacgtatttttaaaaaggcagtacataacattttagataggaagtgttaa

SEQ ID NO: 7937 - DNA, 180 bp, Staphylococcus aureus
atggctaaattacaaattaccctcactcgtagtgttattggtcgtcctgaaacacaacgtaaaactgttgaagctttaggtcttaaaaagactaacagttcagtagttgttgaagataaccctgctattcgtgggcaaatcaacaaagttaagcacttagtaacagtagaagaaaaataa

SEQ ID NO: 7938 - DNA, 114 bp, Staphylococcus aureus
ttggtattactaaagcatcacttgaaacagaaagtttcttatctgcagcatcattccaagaaacaacaagagttcttacagatgcagcaattaaaggtaagcgtgatgacttat

SEQ ID NO: 7939 - DNA, 1755 bp, Staphylococcus aureus
gtgctatcgctaacaatgttattacttgagcgtgtaggtttaattattattttggcctatgtgttgatgaatattccatattttaaaaacttaatgaatcgtcgacgtacatggaaagcacgttggcaattatgtattattttcagtttgtttgccttaatgtctaatttaactggtatcgtcatcgatcatcaacatagtttgtcaggaagtgtgtacttccgtttagatgatgatgtatctttagctaacacacgtgtattaacgataggtgtcgcaggattagttggtggcccttttgtaggtctatttgttggcgttatttcaggtattttcagagtgtatatgggtggggcggatgcacaagtttatcttatctcatctatatttatcggtataattgctggttattttggcttacaagctcaaagacgcaagcgttacccgagtattgcgaaaagtgccatgattggaattgttatggaaatgattcaaatgttgagcattttaacattttcccacgacaaagcatatgcggttgacctcatatcattaattgcactaccaatgattattgttaatagcgttggtacggcgatttttatgtctattatcatttcaacattaaagcaagaagagcaaatgaaggctgttcaaacacatgacgtactgcaattgatgaaccagacattgccgtattttaaagaaggattgaatagagaatcggcacagcaaattgcgatgattattaaaaatttaatgaaagtatctgccgtagcaattacaagcaaaaatgaaatcttatcgcatgtaggtgcaggtagtgatcatcacataccaacaaatgaaatattaacaagtctgtctaaagatgtattgaaatcaggaaagttgaaagaagtgcatactaaagaagagattggttgtagtcatccgaattgcccgcttagagcagctatcgtgataccacttgagatgcatggttctatcgtcggtacattgaagatgtattttacaaaccctaatgatttaacttttgtggaacgtcaacttgcagaaggattggcaaatatttttagtagccaaattgaacttggtgaagccgaaacgcaaagtaagttattgaaagatgctgagattaagtcattacaggcacaagtgagtccacattttttcttcaattcaattaacacgatttcagctttagttagaataaatagcgaaaaggcacgagagttactattagaattgagttattttttcagagcgaatttacaaggctcaaagcaacatacgattactttagataaagagttaagtcaagtgcgtgcatacttatcactcgaacaagcacgttatccaggaagatttaatatcaatattaatgttgaagacaaatatcgcgatgtgcttgtaccaccatttttaattcaaattttagttgaaaatgccatcaaacatgcgtttacgaatcgaaagcaaggtaacgatattgacgtgtcagtgattaaagaaactgcaacacatgtacgtattattgtacaagataatggtcagggtatttctaaagataaaatgcatttgttgggagaaacatctgtagaatcagaatctggaactggtagtgctttagaaaatttaaacttacgcctaaaaggattatttggaaaatccgcagcattacaatttgaatcgacatcgagcggtaccactttttggtgtgtacttccttatgaaagacaagaggaggaataa

SEQ ID NO: 7940 - DNA, 741 bp, Staphylococcus aureus
atgaaagcattaatcatagatgatgagccattagcacgtaatgaattaacatatttattaaatgaaattggtggttttgaagaaattaatgaggcagaaaatgtaaaagaaacattggaagcactactgatcaatcaatatgacattatatttttagatgtcaatttaatggatgaaaatgggatcgaattaggagctaagattcaaaagatgaaagagccacctgcgattatttttgcaactgcacatgaccaatacgcagtacaggcatttgaattaaatgcgacagactatattttgaaaccgtttggtcaaaaacgtattgaacaagcagtcaataaagtgcgtgcgactaaagccaaagatgataataacgcaagtgcaattgcgaatgatatgtcggcgaattttgatcaaagcttacctgttgaaattgacgataaaattcacatgttaaagcaacaaaatattattgggattggcacacataatggtattacaaccatacatacaacgaatcataaatacgaaacaacagagccattgaatcgttatgaaaaacgattgaatcccacttattttatacgtattcatcgttcatatattattaacacgaaacacattaaagaagtgcaacaatggtttaactacacttatatggtaatattgacaaatggtgtcaagatgcaagttggacgttcatttatgaaagattttaaagcgtcgataggattactttaa

SEQ ID NO: 7941 - DNA, 1458 bp, Staphylococcus aureus
atgacagatattattaacaagctgcaagcgtttgcggatgcaaatccacaaagcattgctgttagacacacaactgatgaattaacttatcaacagttaatggatgagtctagtaaattagcacatcgattacaaggtagtaagaaaccgatgattttattcggtcacatgtcaccatatatgattgttgggatgattggtgccattaaagcaggatgtggatatgtacctgtagacacttcaattcctgaagaccgtattaaaatgattattaacaaggttcaaccagagtttgtatttaatacgactgatgaatcatttgaaagtttagaaggcgaagtatttacaattgaagatattaaaacatctcaagacccagtaatttttgatagtcagattaaagataacgacacagtatacacaatctttacatctggttctactggggaacctaaaggtgttcaaattgaatatgcaagtttagttcaatttactgagtggatgttagaacttaataaatcaggaaataaacaacaatggcttaaccaagcgccattttcatttgatttatctgtaatggctatttatccatgtttagcatcaggcggtacattaaatcttgtagataaaaacatgattaataaacctaaattattaaatgaaatgctaacagcaacaccgattaacatttgggtatcaacaccatcatttatggaaatgtgtttattattaccaacgcttaatgaagaacaatatggtagtcttaacgaattcttcttctgtggtgaaattctacctcacagagcagcaaaagcgttagtgagccgtttcccaagtgcgacgatttacaacacatatggtccaactgaagctacggtagcagttacaagtattcaaattacacaagaaatcttagatcaatatccgacattacctgttggcgttgaaagactaggcgcaagattatctactacagatgacggtgaacttgttattgaaggtcaaagtgtaagtttaggatacttaaaaaatgaccaaaaaacagctgaagtatttaatttcgatgacggtattcgtacatatcacactggtgataaagcgaagtttgaaaatggtcaatggttcattcaaggtcgtattgatttccaaatcaaattgaatggctacagaatggaattagaagaaattgaaacacaattacgccagtctgagttcgtaaaagaagcgattgttgtacctgtatataaaaatgataaagttattcatttaattggtgcaattgtgccaacgactgaagttacggacaatgcagaaatgactaaaaatattaaaaatgacttgaaatcacgcttaccagagtatatgattcctagaaagtttgaatggatggaacaattgccattgacttcaaatggtaaaattgacagaaagaaaattgcagaggtaattaacggatga

SEQ ID NO: 7942 - DNA, 153 bp, Staphylococcus aureus
atgaaatctaaaagtaaacagccacctaataaatatgttgaagcattcaaaccatatttattaacactattgtatttggcaatatttattactttatatttaatttatggcagtggcgacacacacaataacttcatttataatgagttctaa

SEQ ID NO: 7943 - DNA, 435 bp, Staphylococcus aureus
atggatcgaacgaaacaatcgctcaatgtctttgtcggaatgaatagggcgttagacacattagagcaaattacaaaagaagacgtaaagcgatatggcttaaatattactgaatttgcagtgctcgagttgctttataataaaggtccgcaaccaattcaacgtattagagaccgcgtattaattgcaagtagcagcatttcatatgttgtaagtcaattagaggacaaaggttggattacacgtgaaaaggataaagatgataaacgtgtatatatggcttgtttaactgaaaaaggtcaaagtcaaatggcagatattttccctaagcatgctgagacattaacaaaagcgtttgatgtgttaacaaaggatgaattaacaatcttacaacaagcgtttaagaaactaagtgcacaatctacagaagtgtaa

SEQ ID NO: 7944 - DNA, 1308 bp, Staphylococcus aureus
atgactcaaactgtaaatgtaataggtgctggtcttgccggttcagaagcggcatatcaattagctgaaagaggaattaaagttaatctaatagagatgagacctgttaaacaaacaccagcgcaccatactgataaatttgcggaacttgtatgttccaattcattacgcggaaatgctttaactaatggtgtgggtgttttaaaagaagaaatgagaagattgaattctataattattgaagcggctgataaggcacgagttccagctggtggtgcattagcagttgatagacacgatttttcaggttatattactgaaacacttaaaaatcatgaaaatatcacagttattaatgaagaaattaatgccattccagatggatacacaattatcgcaacaggaccacttactacagaaacccttgcgcaagaaatagtggacattactggtaaagatcaactttatttctatgatgcagctgctccaattattgaaaaagaatctattgatatggataaagtttacttaaagtcccgttatgataaaggtgaagctgcatatttaaactgtcctatgactgaggatgaatttaatcgcttttatgatgcagtattagaagctgaagttgcacctgtaaattcatttgaaaaagaaaaatatttcgagggttgtatgccttttgaagtaatggcagaacgcgggcgcaagacattactatttggaccaatgaaaccagtaggattagaagatccaaagactgggaaacgtccttatgcagtggttcaattaagacaagatgacgctgctggcacactctacaatattgtcggcttccaaacacatttaaaatggggagctcaaaaagaagtcattaaattaattccaggtttagagaatgttgatattgttagatatggtgtgatgcatagaaataccttcattaactcaccggacgtattaaacgaaaaatatgaattgatttcacaaccaaacatacagtttgcgggacaaatgactggtgttgaaggttatgtagaaagcgcagctagcggcttagttgcaggtatcaatcttgcgcataaaatattaggcaaaggtgaggtagtatttccgagagaaactatgattggaagtatggcttactatatttctcatgctaaaaacaataagaatttccaacctatgaatgctaacttcgggttattaccatctttagaaactagaattaaagataaaaaagaacgctatgaagcacaagctaatagagctttggattacttagaaaatttcaaaaaaactttataa

SEQ ID NO: 7945 - DNA, 1578 bp, Staphylococcus aureus
atgacgtttcttacagtcatgcaatttatagttaacattatcgttgtaggcttcctgcttacggttattgttatcgggcttatttggttaattaaagataaaagacaatcacaacatagtgtattaaggaattatcctttactagcacgtattagatatatttcagaaaaaatgggaccggaattacgtcagtatttattttctggggataatgaagggaaacctttttcacgtaatgattataaaaatatcgttttggctggaaaatataactctcgtatgaccagcttcggtactactaaagattatcaagacggcttttacatacagaacacaatgtttccgatgcaacgtaatgagatttcagtagataatacaacattgttatcaacattcatttataaaatcgcgaatgagcgtttatttagtcgtgaagaatatcgtgtaccgacaaagattgatccgtattacttaagtgatgaccatgcaataaaattaggtgaacatttaaaacatccatttattttaaaacgtatcgtaggacaatctggtatgagttatggcgctttaggaaaaaatgccattacagctttatctaaaggtctagctaaagcgggcacttggatgaatacaggtgaaggtggcttatcagaatatcatttaaaaggtaatggggatatcattttccaaattggtcccggtttatttggtgttcgtgataaagaaggtaattttagtgaaggtttatttaaagaggtcgcacagttatctaacgtacgcgcatttgagctgaagttggcacaaggtgctaagactcgtggtggtcatatggaagctgaaaaggtaaacgaagaaattgctaaaatccgaaatgttgaaccttataaaacaatcaattcacctaaccgttacgaatttattcataatgctgaagatttgattcgtttcgtcgatcagttgcagcaattaggtcaaaaaccagtaggattcaaaattgtagtaagcaaagtttcagaaattgaaacacttgtacgtacgatggtggaactagataagtatccaagctttattacgattgatggtggtgaaggtggtactggtgcaacattccaagaattacaagatggtgttggcttaccgctatttacagctctacctattgtgtctggcatgttagaaaaatatggtattcgagataaagtgaaattggcggcatctggtaagttagtgacaccagataaaattgcgattgcactaggtttaggtgcagattttgtaaatatcgcacgtggcatgatgattagtgtcggttgtattatgagtcaacaatgccatatgaatacatgtcctgtaggtgttgcaacgacagatgcgaaaaaagaaaaagcattgattgttggagaaaagcaatatcgtgtcacaaactatgtaacaagtttgcatgaaggcttattcaatattgcagcagctgttggcgtatccagtcctacagaaattactgctgatcatattgtatatcgaaaagtcgatggtgagttacaaacgatacatgattataaattgaaattgattagttga

SEQ ID NO: 7946 - DNA, 543 bp, Staphylococcus aureus
atgacatttcttacagtcatgcaatttatagttaacattatcgttgtaggattcatgcttacggttattgttatcgggcttatttggttaattaaagataaaagacaatcacaacatagtgtattaaggaattatcctttactagcacgtattagatatatttcagaaaaaatgggaccggaattacgtcagtatttattttctggggataatgaagggaaacccttttcacgtaatgattataaaaatatcgttttggctggaaaatataactctcgtatgaccagcttcggtactactaaagattatcaagacggcttttacatacagaacacaatgtttccgatgcaacgtaatgagatttcagtagataatacaacattgttatcaacattcatttataaaatcgcgaatgagcgtttatttagtcgtgaagaatatcgtgtaccgacaaagattgatccgtattacttaagtgatgatcatgcaataaaattaggtgaacatttaaaacatccatttgttttaaaacgtatcgtagga

SEQ ID NO: 7947 - DNA, 1206 bp, Staphylococcus aureus
atgagtgaaaaaaagattttgattttatgtcagtatttttatccggaatatgtatcttctgcgacgttaccaactcaattggcggaagatttaattgcgaatcacattaatgtcgatgtcatgtgtggatggccatatgaatatagtaatcataaacaggtttctaaaaccgagatgcatcgtggaattcgcattcgacgtctcaagtattcgaggtttaataacaaaagtaaggttggaaggatcatcaatttctttagtttattttcaaaattcgtgattaatatacctaaaatgttgaaatatgatcagattcttgtttactctaatccaccaatcttgccattaataccagacgttttacacagactgcttaagaaaaaatattcttttgtggtgtatgatatagcacctgataatgcgattaagacaggtgcaactcgtccaggtagcatgattgataagctgatgcgttacattaatagacatgtctacaagaatgctgaaaatgtcattgtccttggtacggaaatgaaaaactacttactaaatcatcaaatttctaaaaatgctgacaatatccatgtgattcctaactggtatgacatgcgtcaattacaagacaatcgtatctataatgacacatttaaagcttaccgtgagcaatacgacaaaattttattgtatagcggtaatatggggcagttacaggatatggagacacttatctcatttttaaaattaaataaggatcagcctcaaacgttaacaatactttgtggtcatggtaagaaatttgcagatgtcaaaacggcaatagaagaccatcgtattgaaaatgttaaaatgtttgagtttttaacaggtacagactatgctgacgtattaaaaattgcggatgtatgtattgcatcgctgattaaagaaggcgtcggtttaggcgttccgagcaagaattatggctaccttgcagctaagaaaccgttggtactcatcatggataagcaatctgatatcgttcaacatgttgaacaatatgatgcgggtatccaaattgataatggcgatgcacatgccatttataacttcatcaacactcactcgagtaaggaattgcacgagatgggtgagcgcgcacatcaactgtttaaagataaatatacgagagaaattaatactatgaagtattacaatctgttgaagtga

SEQ ID NO: 7948 - DNA, 2403 bp, Staphylococcus aureus
gtgagtgaaataattcaagatttatcacttgaagatgttttaggtgatcgctttggaagatatagtaaatatattattcaagagcgtgcattgccagatgttcgtgatggtttaaaaccagtacaacgtcgtattttatatgcaatgtattcaagtggtaatacacacgataaaaatttccgtaaaagtgcgaaaacagtcggtgatgttattggtcaatatcatccacatggagacttctcagtgtacgaagcaatggtccgtttaagtcaagactggaagttacgacatgtcttaatagaaatgcatggtaataatggtagtatcgataatgatccgccagcggcaatgcgttacactgaagctaagttaagcttactagctgaagagttattacgtgatattaataaagagacagtttctttcattccaaactatgatgatacgacactcgaaccaatggtattgccatcaagatttcctaacttactagtgaatggttctacaggtatatctgcaggttacgcgacagatataccaccacataatttagctgaagtgattcaagcaacacttaaatatattgataatccggatattacagtcaatcaattaatgaaatatattaaaggtcctgattttccaactggtggtattattcaaggtattgatggtattaaaaaagcttatgaatcaggtaaaggtagaattatagttcgttctaaagttgaagaagaaactttacgcaatggacgtaaacagttaattattactgaaattccatatgaagtgaacaaaagtagcttagtaaaacgtatcgatgaattacgtgctgacaaaaaagtcgatggtatcgttgaagtacgtgatgaaactgatagaactggtttacgaatagcaattgaattgaaaaaagatgtgaacagtgaatcaatcaaaaattatctttataaaaactctgatttacagatttcatataatttcaacatggtcgctattagtgatggtcgtccaaaattgatgggtattcgtcaaattatagatagttatttgaatcatcaaattgaggttgttgcaaatagaacgaagtttgaattagataatgctgaaaaacgtatgcatatcgttgaaggtttgattaaagcgttgtcaattttagataaagtaattgaattgattcgtagctctaaaaacaagcgtgacgctaaagaaaaccttatcgaagtattcgagttcacagaagaacaggctgaagcaattgtaatgttacagttatatcgtttaacaaacactgacatagttgcgcttgaaggtgaacataaagaacttgaagcattaatcaaacaattacgtcatattcttgataaccatgatgcattattgaatgtcataaaagaagaattgaatgaaattaaaaagaaattcaaatctgaacgactgtctttaattgaagcagaaattgaagaaattaaaattgacaaagaagttatggtgcctagtgaagaagttattttaagtatgacacgtcatggatatattaaacgtacttctattcgtagctttaatgctagcggtgttgaggatattggtttaaaagatggtgacagtttacttaaacatcaagaagtaaatacgcaagataccgtactagtatttacaaataaaggtcgttatctatttataccggttcataaattagcagatattcgttggaaagaattggggcaacatgtatcacaaatagttcctatcgaagaagatgaagtggttattaatgtctttaatgaaaaggactttaatacagatgcattttatgtttttgcgactcaaaatggcatgattaagaaaagtacagtgcctctatttaaaacaacgcgttttaataaacctttaattgctactaaagttaaagaaaatgatgatttgattagtgttatgcgctttgaaaaagatcaattaattaccgtcattactaataaaggtatgtcattaacgtataatacaagtgaactatcagataccggattaagggcagctggtgttaaatcaataaatcttaaagctgaagatttcgttgttatgacagaaggtgtttctgaaaatgatactatattgatggccacacaacgcggctcgttaaaacgtattagttttaaaatcttacaagttgctaaaagagcacaacgtggaataactttattaaaagaattaaagaaaaatccacatcgtattgtagctgcacatgtagtgacaggtgaacatagtcaatatacattatattcaaaatcaaatgaagaacatggtttaattaatgatattcataaatctgaacaatatacaaatggctcattcattgtagatacagatgattttggtgaagtaatagacatgtatattagctaa

SEQ ID NO: 7949 - DNA, 960 bp, Staphylococcus aureus
gtgaataggaatatcgttaaattagttgtgtttatgctaatcttagttgtagcagtagcgggttgtggtcaaaaagatactgaagagaaaactgaaatgacgacaataaaagatgaattaggaactgaaaaaattaagaaaaatcctaaacgtgttgttgtattagaatatagttttgctgattatttagcagcattagatatgaaacctgttggtattgcagatgatggcagcactaaaaatataacaaagtcagtaagagataagattggggcatatgaatcggttggatctagaccgcaaccgaatatggaagtgataagtaaattaaaaccggatttgatcattgcagatgttagcagacataagaaaatcaaatcagaattgagcaaaattgctccgacaatcatgttagttagcggtacgggagattataatgcaaatattgaagcatttaaaacagtcgctaaagcagtaggcaaagagaaagaaggcgagaagcgtctggaaaagcatgataaaatattagcggagattagaaagaaaattgaacagagtacgttaaaatctgcatttgcattcggtatctcaagagcaggtatgtttattaataatgaagatacatttatgggacaattcttaattaaaatgggtattcaacctgaagtcacaaaagacaaaactacgcatgttggtgaacgcaagggtggtccttatatatatttaaataatgaagaacttgccaatatcaatccaaaagttatgattttagccactgacggaaaaacggacaaaaatagaacgaaattcattgatcctgcagtttggaaatcattaaaagctgtgaaagataacaaagtttatgacgttgaccgaaataagtggttgaaatcaagggggattatcgcaagtgaaagtatggcagaagatttagaaaaaattgcagaaaaagcaaaataa

SEQ ID NO: 7950 - DNA, 927 bp, Staphylococcus aureus
atgacttcatctactaatgttaaagctttaatcgaaaaaaatattaataaaaaagggaagcataatgacaaaattataccagttattttagccgcaatttcagcgatttccattttaacaacactaggtatattaatcacattgcttttagaaaccatcacttttttcaccagaattccaataactgaatttctattttctactacttggaatcctaccggttcagaccctaagtttggtatctgggcattgataatagggactttaaaaatcacagttattgcgactatatttgcagttccagtcgggcttggtgcagcaatttatttaagtgaatatgcaagtgaccgtgcacgacgcataattaaaccgatattagaaattttagcaggaataccaacaattgtgtttggtttctttgcattaacctatgttacaccagtattaagatctttcatatcaggtcttggagagtttaatgctataagtcccggcttagttgtcggtattatgattgtccctctcatcacaagtttgagtgaggatgcaatggcatctgtaccaaataaaattcgagaaggtgcctatggacttggagcaactaaattagaagtagcaactaaagtcgtacttcccgcagcaacatcaggtattgtagcttcaatcgttctcgcgatttcaagagcaattggagaaacgatgattgtatcattagcggcaggtagttcgccaacagcttcattaagtttaacaagttcgattcaaacaatgactggatatattgttgagatagcgacaggtgatgcaacatttggatcaaatatttattacagtatttatgctgtagggttcacactatttatctttaccttaatcatgaatttactttctcagtggatttctaagcgttttagggaggagtattaa

SEQ ID NO: 7951 - DNA, 1737 bp, Staphylococcus aureus
gtgcaaaataaagaattaatacaacatgcagcgtatgcggctatcgaacgcattttaaatgaatattttagagaagaaaatttatatcaagtaccacctcaaaatcatcaatggtctatacaattatcagagctcgaaactttaacgggtgaatttcgctattggtctgcgatggggcatcatatgtatcatccagaggtatggcttatcgatggaaaaagtaaaaaaataacaacttataaagaagcaattgcgcgtattttgcaacatatggctcaaagtgcagataatcaaacggcagtgcaacaacatatggcgcaaattatgtctgacatcgataatagcattcatcgcacggcgcgttatttgcaaagtaacacaatagactacgtagaggatcgttatatcgtttcagaacaatctttatacttaggtcatccatttcatccgactcctaagagtgcaagtgggttttcagaagcagatttagagaaatatgcacccgaatgtcatacatcattccaattgcattatttagctgtgcatcaagatgttctgctcacgcgctatgtagaaggtaaagaagatcaggttgagaaagtgttgtatcaattagcagacatagatatatcagagatacccaaagattttattttattaccaacacatccttatcaaatcaatgtgttgcgacagcatccacagtatatgcaatatagtgaacaaggtttaataaaagaccttggcgtttccggtgatttagtgtacccgacgtcttcggttagaactgtattttcaaaagcattaaacatttatttaaaattaccgatacacgttaaaattactaattttatacgtacgaatgatcttgaacaaattgaacggacaattgatgccgcgcaagttatcgcatcagtcaaagatgaggttgaaacaccccattttaaattgatgtttgaagaaggatatcgtgcattgttaccgaatccattagggcaaacagttgaacctgaaatggatttattaacaaatagtgccatgattgttcgtgaagggataccgaattaccatgctgataaagatattcatgtattggcgtcattatttgaaacgatgcctgattcaccgatctctaagttagcacaagtgattgagcaaagtggtttagcaccagaagcatggcttgaatgttatttggatcgtacattattgccgatattaaagttgtttagtaacacaggcattagtctagaagcacatgtacaaaatacattaattgaattaaaagatggcatacccgacgtatgctttgtcagagatcttgaaggcatttgtctatctagaacgattgctactgaaaaacagcttgtgccaaatgttgtggcagcatcaagccctgttgtatatgcacatgatgaagcatggcatcgtcttaaatattatgttgtagtaaatcacttaggacatttagtatcaactattggtaaagcaactagaaatgaagttgtgttatggcaacttgtagcgcatcgtcttatgacttggaaaaaagaatacgcgaataacgcagtatttgttgactgtgtagaagatttatatcaaacgccgaccattgcggctaaagcgaatttgatgagtaaattgaatgattgtggtgcaaaccctatttatacacatataccaaatccaatttgttataacaaggaggtatcgtattgtgaatcaaacaattcttaa

SEQ ID NO: 7952 - DNA, 1080 bp, Staphylococcus aureus
atgatgacgattaaagttggaatcattgggtgtggtggtattgcgaatggcaagcacatgccaagtttacaaaaagttgaaaatgttgaaatgatcgcattttgtgacgtagacatttcgaaagcagcgagtgcggcagaagcatacggaactgacaatgcaaaggtttatgatgattacaaagcattgttaaaagatgacacgattgatgttatccatgtttgtacgccaaatgactcgcattgtgaaattactgtagcagggttgcatgccggtaagcatgtgatgtgtgaaaaaccaatggctaaaacgacagcagaagctcaaaaaatgatagatacagctaaatcaacaggtaaaaaattaacaataggttatcaaaatcgcttcagaccagatagtcaatttttacatcaagcagcgcaacgtggcgacttaggagacatttacttcggaaaggcacatgccattcgtcgtcgtgcagtaccgacatggggtgtctttctaaacgaagaagcccaaggtggaggacctttaatcgatattggtacgcacgcattagatttaacgttatggatgatggataattatgaaccagaatcagtgatgagttcaacattccataaattaaataagcagcatgatgcggcaaacgcttggggttcatggaatccagatgaatttacagttgaagactctgcgtttggctttattaaaatgaagaacggagcgacgatcattttagaatccgcttgggcgattaattctttagaagtggatgaggcaaaatgttcattatcaggaacgaaagcaggtgctgatatgaaagatggtctacgtattcatggtgaagatatgggcacactttataccaaacacgttgaattggaaaacaaaggcgtcgacttttatgaaggtaatgaagtggatgaagctgaagaagaagcaaaagcttggattgatgcagttgtaaatgatactgaaccagttgtgaaaccggaacaagcaatggtagttacaaaaattcttgaagcgatttatcagtctgcaaaatcaggcaaagcaatttactttgaataa

SEQ ID NO: 7953 - DNA, 882 bp, Staphylococcus aureus
atggcaactcaagatcctagaacaaaatttaaaacaacggaatatgaaaaacaagaacaagaggtaccgggtttacaatctgaaatgacgccagcacctgattgtggcgaaacgtcttaccaaggtcatcaacgcttacaaggctataaaatgttagtcacaggtggtgactcagcaatagggcgtgcagcagcaattgcgtatgctaaagaaggtgcagatgtagcgattaactatcttccgagtgaagaacaagatgcacaagaagtacgccaagtaattgaagaaagtggtcaaaaggcagtgttaattcctggtgatataagagatgagcagttcaactatgaccttgttgaacaagcatatcaacaattaggtggcttagataatgttactttagttgctggacatcaacagtatcatgatgatattcatggatttacaactgaggcatttacagaaacatttgaaacgaatgtctatccgctattttggacagttcaaaaagcattggaatatttaaaaccgggtgcgtcaattacaacgacatcatctgtacaaggttataatcctagtcctattcttcatgattatgccgcttcaaaagcagcaattatttcattaactaaaagtttttcagaagaattaggaccaaaaggaattagagtgaactgtgtagcacctggtccattctggtcaccattacaaatttctggtgggcaacctcaaagtaaaatcccaacatttggtcaaaaaacacctttaggtcgtgcaggtcaacctgttgagttatgtggaacttatgtgctattagcgtcagaggaatcaagttatacaactggacaagtgttcggtgttagcggtggagtgcaaatagattag

SEQ ID NO: 7954 - DNA, 1455 bp, Staphylococcus aureus
atgaccaaagaacaacaacttgcagaacgaattattgctgcagtaggtggtatggataatatagatagtgtcatgaactgcatgacacgtgtgcgtattaaagtattagatgaaaataaagtagatgaccaagaactaaggcatattgatggtgtcatgggtgttatacacgatgaacgcattcaagttgtggttggacctggtacagtcaataaagtggctaatcatatggcggaattaagtggtgttaaactaggtgacccaataccacaccatcacaatgatagtgaaaaaatggactataaatcatatgcagctgataaagcaaaggcgaataaagaagcacataaagcaaaacaaaagaatggtaagttgaataaagtattgaaatcaattgccaatatctttataccgttgattcctgcatttattggagctggattaattggtggtattgcagcagtactgagtaacttaatggtggcaggctatatttcaggtgcttggattacgcaacttataacagtattcaatgtcattaaagacggtatgttagcatacttagctatttttactggtattaatgcggctaaagaatttggtgcaacaccaggacttggtggcgtgattggtggtacaacgttattaacgggtattgctggtaaaaatattttaatgaatgtcttcactggagaaccattgcaacctggacaaggtggaattattggcgttatttttgccgtttggattttaagtattgtcgaaaagagattgcataaaattgtgccaaatgcgattgatattattgtaacgccgactattgcattgttgattgtaggactattaactatctttatctttatgccattagcaggttttgtttcagacagtttagtttcagtagttaacggaattattagtattggtggcgtatttagtggatttatcattggagcaagcttcctaccgttagttatgttagggcttcatcatatttttacgccaattcatatagaaatgattaaccaatctggtgctacttacttattgccaattgcagcgatggctggtgctggacaagtaggtgccgcattagcactttgggtaagatgtaaacgcaacacaacattacgtaatactttaaaaggtgcattgccagttggtttcctaggtatcggagaaccattaatctatggtgtgactttgccattaggtcgacctttcttaactgcttgtattggtggtggtattggtggcgctgtaataggtggaattggacatattggtgccaaagcaataggcccaagtggtgtgtcactcttaccattaatctcagataatatgtatttaggttatattgcaggattacttgctgcatatgctggtggattcgtttgtacatatttatttggaacgacaaaggcgatgcgacagacagatttgttgggtgattaa

SEQ ID NO: 7955 - DNA, 822 bp, Staphylococcus aureus
atgaaaaaattatttggtcttattttagtattaacatttgcagttgtattagcagcttgcggtaatggaaacaaaagtggcagtgacgataagaaaataacagtaggtgcttcaccagcaccacatgctgaaattttagaaaaagcaaaaccattattagagaaaaaaggttatgacctagatattaaaacaattaacgattacactacgcctaataaattactagataaaggtgaaattgacgcaaactatttccaacatacaccatatttaaacacagagaaaaaggataaaggttacaaaatcgtaagtgccggtgatgttcacttagaacctatggctgtatactctaaaaagtataaaagtttaaaagaattaccaaaaggtgcgacagtttatgtgtctaataatccagctgaacaaggacgcttcttaaaattcttcgttgatgcaggtttaattaagatcaaaaaaggcgtaaaaattgaagatgctaagtttagtgatattacagagaataaaaaagatattaagtttaataataaacaatcagcagaattcttacctaaaatttatcaaaatgaagacgctgatgctgttatcattaattcaaactttgcaatcgaacaaaaactaaatcctaaaaaagattctattgctgtagaaagtgcgaaagataatccttatgcaaacttaattgctgttaaagaaggacatcaagatgataagaaaatcaaagcattaattgaagtattacaatctaaagatattcaagacttcattaatgaaaaatacaacggtgcagttattcctgctaaataa

SEQ ID NO: 7956 - DNA, 1365 bp, Staphylococcus aureus
ttggccaagaaaaaagtgatttttgaatgtatggcttgtggttatcaatctcctaaatggatggggaaatgtcctaattgtggcgcttggaatcaaatggaggaaattgttgaaaaagcagccaatcctaaacatggagttaaaaccaaggaattagcaggtaaagtacaaaaattaaatagtattaaacatgaaacaacgccgagagtgttaacagattcagcagaattcaaccgtgtattaggtggaggtattgtgagcggatcgttagtacttattggtggggatccaggtattggtaagtcaacgttacttttacaaatttgtgcatcgttatctcaaaagaaaaaagtactatatattactggagaagaatcgcttagtcagactaaattacgtgcagagcgattagatgaagattcaagtgaattgcaagtattagctgaaacagatcttgaagttatttatcaaacagtaaaagaagaacaacctgatttattagtagtggattcgattcaaacaatatatcatcctgaaatcagctctgcgccaggttctgtttcacaagttcgtgaaagtacacaaagtttaatgaatattgctaaacaaatgaacattgcaacttttatagtgggtcatgtaacgaaagaaggtcaaattgctggcccaagattgctagaacacatggttgatactgtgctttattttgaaggcgatgaacaccacgcatatcgaattttgcgagctgttaaaaaccgttttggttcaacgaatgaaatgggaatcttcgaaatgaagcaaagtggattaaaaggtgtaaataatccatctgaaatgtttttagaagaacgttcaacaaatgttccaggttcaacaattgttgcaaccatggagggaaccagaccacttttaatagaagttcaagcgctggtaactccaacgacttttaacaatccgagacgaatggcaacagggattgatcataatcgattaagtttgttgatggctgttttggaaaagaaagaaaattatctattacaacaacaagatgcttatatcaaagtagctggcggtgtaaagttaacggagccagcagttgatttaagtgtaattgtagcaactgcatctagctttaaagataaagctgtcgacggattagattgctatattggagaagttggtttaacgggtgaggtacgtcgtgtatctcggatagaacaacgcgtgcaagaggctgcaaaactaggtttcaaacgtgtaattattcctaaaaataatataggcggatggacatatcctgaaggtatacaagtaataggtgtaactactgtacatgaagcattgtcatttgctcttcattcataa

SEQ ID NO: 7957 - DNA, 1245 bp, Staphylococcus aureus
atgagtcaaaataaaagagtagttattacaggtatgggagccctttctccaatcggtaatgatgtcaaaacaacatgggagaatgctctaaaaggcgtaaatggtatcgataaaattacacgtatcgatactgaaccttatagcgttcacttagcaggagaacttaaaaactttaatattgaagatcatatcgacaaaaaagaagcgcgtcgtatggatagatttactcaatatgcaattgtagcagctagagaggctgttaaagatgcgcaattagatatcaatgataatactgcagatcgaatcggtgtatggattggttctggtatcggtggtatggaaacatttgaaattgcacataaacaattaatggataaaggcccaagacgtgtgagtccatttttcgtaccaatgttaattcctgatatggcaactgggcaagtatcaattgacttaggtgcaaaaggaccaaatggtgcaacagttacagcatgtgcaacaggtacaaactcaatcggagaagcatttaaaattgtgcaacgcggtgatgcagatgcaatgattactggtggtacggaagctccaatcactcatatggcaattgcaggtttcagtgcaagtcgagcgctttctacaaatgatgacattgaaacagcatgtcgtccattccaagaaggtagagacggttttgttatgggtgaaggtgctggtattttagtaatcgaatctttagaatcagcacaagctcgaggtgccaatatttatgctgagatagttggctatggtactacaggtgatgcttatcatattacagcgccagctccagaaggtgaaggcggttctagagcaatgcaagcagctatggatgatgctggtattgaacctaaagatgtacaatacttaaatgcccatggtacaagtactcctgttggtgacttaaatgaagttaaagctattaaaaatacatttggtgaagcagctaaacacttaaaagttagctcaacaaaatcaatgactggtcacttacttggtgcaacaggtggaattgaagcaatcttctcagcgctttcaattaaagactctaaagtcgcaccgacaatacatgcggtaacaccagacccagaatgtgatttggatattgttccaaatgaagcgcaagaccttgatattacttatgcaatgagtaatagcttaggattcggtggacataacgcagtattagtattcaagaaatttgaagcataa

SEQ ID NO: 7958 - DNA, 927 bp, Staphylococcus aureus
atgcgtaaattagtcgttggctccagaagaagtaaattagctttaacacaaagccagcaatttattaataaattaaaagctgtcgagccaaatctagaaattgaaattaaagaaattgtcacgaaaggcgatcgtatagtagataaacaattgtctaaagtcggaggcaaaggcttatttgttaaagaaatacaacatgaactttttgaaaaaaatatcgatatggcaatacactcgcttaaagacgtaccaagtgtaattccggaaggtttaacattaggttgtatccctgatagagaattaccttttgatgcgtatatttctaaaacacatacaccactatcccaattgccagaaggcagtattattggtactagttcattacgtcgtggtgcacaaatattatctaagtatcctaatttagagattaaatggattagaggtaatatagatacacgattagaaaagttacaaactgaagattatgatgcgattattttagctgcagctggtttaagaagaatgggctggtcagatgatattgtaacatcttatcttgatagagatacattgttacctgcaatcggacaaggtgctttagggatagaatgtcgtagtgacgatgaagaactattaacattattaagcaaagtacataatgatgaggttgcaaaatgtgtgactgctgaacgaacgtttttagcagaaatggatggtagttgtcaggtgccaatcgcaggatatgctacaatctcagatcaaaaagaaatcgaatttacaggtttaattatgaccccagatggtaaagaacgatttgaatatacaatgaacggaacagatccggttgagttaggcaaaacagtgagtaacaaattaaaagagcaaggtgcttatgaaattataaaacgcttaaatgaacaacattaa

SEQ ID NO: 7959 - DNA, 816 bp, Staphylococcus aureus
atgcaagaaaacctgtttattcgattcaatgaaattatattattaatatacttaatcagtatcatttgctatttttatgattttgtccaaaaaagtcataagattagaagtttaggcatatatttattggggattgtttgggttttacaaacaatctctttatctatttttattatacaaactagacatattccattagggtctatttcagatgtattctatactttaagttggctgattatttcaatctctttaattcttaaccttatcaaagtattgaatttctctgtgtttttcttgaatttaatagggttaacacttttagggatgaatacatttcaaccgacacattatactaataaggttcagaaaattgctgttgtagacgagttactgttagtccatatcggtctagctgtgttaagttatgtcttctttgccttagcttttgtcaatgcattactgtatatcatgcaataccgtaatttgaaggaaaaacgttttgatcaaaaatactttagaataggtagcgttgctacacttgaatcaattgtgttttactcaacgttaagtgggtggataattctcatatttagtattattttaggtacacagtggggtgtaatttcagttggtgaacgtatattcattgacccgaaggtaatactctcttcaattattacagtattatatggaagttatatattgcttagaatcaacaaatggttgaattcaaggtatttaatatactataacattattttattttgcttaaatatgattaatttattttttgcaacacattttgtgaattga

SEQ ID NO: 7960 - DNA, 993 bp, Staphylococcus aureus
atgtgcacaggattcacaatacaaactttaaataatcaagtacttcttggacgcacgatggattatgattatccattagatggttcgccagcagtgacgcctagaaattatcgttggacatctcgcactggcacgacaggccaaacgcaatatggctttattggtacaggaacagatatggaaggttttatttatggtgatggtgttaatgaacatggcgttgctatttcgacacaatatttccgaggttatagttcatatggctcaacacacaaagcggacgcgatgaatattacgcaaaatgaaattgtgacatggattttgggatatacaacaagcattgaagatatgaaacaacaagcatcccaaatacatgttgtagcggtatatttaaatgacatcggtgaagttccgccattgcattatcatgtttccgatgcaactggacattcagtcgaagtttcatttaaagagggggaagtggttataaaagataaccctattggtgtcttaacaaatcatccagacttagattggcattatagtaatttaagacaatatatcaatatttctccttatccagcaacagcaaagttattggaaggtgtaacgattgaacctttaggcaatgaagcaggtacatttggattgccaggtggatttacttcaactgagcgctttgtgagaatggcatttatgaaagcaaacattgctcaaaacaatgataaagaaatggatttaatgaatgcattttatttattagatgcggtaaatataccgattggaattgtacgtccgcatgatgctgacaatcactatacgatgtatcagaccgtaataaatttaactacaagaacgttatatattaagtattatggcagcaatgaaatagtagcattaaagctcacagatgatttaattaatagaaaagatatgacgatttttaagcctgagaagcatatcactattagaaagttgaatgacaatcaatag

SEQ ID NO: 7961 - DNA, 537 bp, Staphylococcus aureus
atgaaaatcaatgagtttatagttgtagaaggacgagatgatactgagcgtgttaaacgagctgttgaatgtgatacgattgaaacgaatggtagtgccatcaacgaacaaactttagaagtaattagaaatgctcaacaaagtcgaggcgttattgtattaacagatccagatttcccaggagataaaattagaagtacaattactgaacatgtcaaaggtgttaaacatgcgtatattgatagagaaaaagctaaaaataaaaaagggaaaattggtgttgaacatgccgacttaattgatattaaagaagcgttaatgcatgttagttcaccctttgatgaagcttatgaatcaattgataaatctgtgctaatagagttggggttaatcgttgggaaagatgcaaggcgccgtagagaaattttaagtagaaaattgcgaatcggccattccaatggtaagcagttattgaaaaagttaaatgcatttggttataccgaagcggatgtaaggcaagctttagaagatgaatga

SEQ ID NO: 7962 - DNA, 891 bp, Staphylococcus aureus
gtgaaaatgttggataataaagatattgcaacaccatcaagaacgcgagcgttgttagataaatatggctttaattttaaaaaaagtttaggacagaactttttgatagatgtgaatatcattaataatatcattgatgcaagtgatattgatgcacaaactggggtgattgaaattggtccaggtatggggtcgttgacagaacaattggccagacatgctaaaagagtattggcatttgaaattgatcaacgtttaatacctgtattaaatgatactctatcaccttatgataatgtgacggtgattaatgaagatattttaaaagcgaatattaaagaagctgttgaaaatcatttacaagattgcgaaaaaataatggttgttgcaaacctgccgtactatattacgacgccaattttattaaatttaatgcaacaagatataccaattgatggctacgtggtgatgatgcaaaaagaagtgggcgaacgcttaaatgctgaagtaggttcaaaagcatatggttcattatcaattgtcgtacaatactatacagagactagtaaagtattaacggtacctaaatctgtatttatgccaccacctaatgttgattcaatagttgtaaaactgatgcagagaactgaaccgttagtaacagtagataacgaggaagcattctttaagttagcaaaagcagcatttgcacaaagaagaaagacaattaacaataactatcaaaattattttaaagatggtaaacaacacaaagaagtgattttacaatggttggaacaagcaggtattgatccaagacgtcgcggtgaaacgctatctattcaagattttgctaaattgtatgaagaaaagaaaaattccctcaattag

SEQ ID NO: 7963 - DNA, 429 bp, Staphylococcus aureus
atggcgattattattggttcagatgaagctggcaaacgattaaaagaagtcatcaaatcatacttattagacaataaatatgatgttgttgacgtaacagaaggacaggaagttgactttgttgatgcaactttggctgtagcaaaagatgttcaaagtcaagaaggtaacttaggtattgttatcgatgcatttggtgcaggtagctttatggttgctacaaaaatcaaaggcatgattgctgctgaagtatcagatgaacgctctggatatatgactagaggccataacaattcaagaatgatcactatgggatctgaaattgttggagacacattagcgaaaaatgtcgttaaaggttttgttgaaggtaaatacgatggtggtagacaccaaatccgcgtagatatgcttaataaaatgtgctaa

SEQ ID NO: 7964 - DNA, 516 bp, Staphylococcus aureus
atgaagattgcattaggatgcgaccatattgttacagatacaaaaatgcgtgtatctgaatttttaaaatcaaaaggacatgaagtcattgacgtaggaacatacgattttacaagaacacattatccaatttttggtaaaaaagttggcgaacaagttgttagcggtaatgcagacttaggtgtttgtatttgtggaacaggtgttggtattaacaatgctgtaaataaagtacctggcgttcgttcagcactagtacgtgatatgacatcagcgttatatgctaaagaagaattaaatgcgaacgttattggctttggtggacgtattataggtgagttattaatgtgcgatattatcgatgcatttattaacgctgaatataaagcaactgaagagaacaaaaaattaatcgctaaaattaaacatttagaaacaagcaatgcagatcaagctgatccacatttctttgatgaattcttagaaaaatgggacagaggcgaataccacgattaa

SEQ ID NO: 7965 - DNA, 276 bp, Staphylococcus aureus
atgagtacagttcaaagtgatattttcaagactaatagtgcatcatcatctattaaaagtgccgttgaaacatgtaataatgtgtcgaaaccggataaagatgaaagtacaacagtaagtggaaataataatgctcatagtgtgatagacgatttgattagtaagaatcaatctgttgctgaagcaataagaaatgcgagcgatagtatacaaaaagttggcgaagaatttaatcaaacagacgtaatgattggtaatgaaattggtaaaaattaa

SEQ ID NO: 7966 - DNA, 1197 bp, Staphylococcus aureus
atggttaaatttattcattgttcggatttacatttagatagtcctttcaaatctaagagtcatataagccctaaaatttttgaggatgttcaaaaaagtgcttatgaaagttttaaaaatattgtagatattgcattacaacaagatgttgattttgtaattatcgcgggtgatttatttgatagtgaaaacagaacattacgtgctgaaattttcttaaaacagcaatttgaacgtttacaaaatgaacaaatctttgtttatgtttgtcatggtaatcacgatcctttatcatcaaagatttcatcaaactggccagataatgtttctgtattttcaaataaagttgagacgtatgaagcaattactaaatctggtgaaacaatttatattcacggatttagttatgaaaatagagcaagttatgagaacaagattgatgaatatccatcaagtcaaggccaaaaaggcatacatattggtgtcttgcatggtacgtatagtaaatcttcagttaacgaaagatataccgagttcattttagaagatttaaacagtaaattgtatcattattgggctttaggtcatatacatgaacgtcaacaattaagtgatatgcctgtaattaactattcaggtaatattcaaggtagacattttaatgagcaaggtgaaaaaggttgcttattaatcgagggtgaccacttaaaattaaagactaaattttatcctacacagtatattagatttgaagaagcaactattgaaacggataagacatctaagcaaggtttatacgaggtcattcaaaactttaaagaacaagtgagagaagaaggaaaagccttttatcgtttaacgcttgttattaatagtgagacattaatttcacctcaagatttattacaagttgaagaaatgattacagattatgaagaaaacgaaaatcaatttgtatatattgatgagttaaaaatacaatatgcacaaaatgatgagtcacctttagttaatgaattttcagcggaattattagtcgatcaaactgtttttgataaagcgatgtcagatttatatttaaatccaagggcatctaagttcctagacgattatggaacattcgaccatacagcattagttaatcgtgctgaagaaatattaaaagctgaaatgagaggtgaacaaaatgataattaa

SEQ ID NO: 7967 - DNA, 2937 bp, Staphylococcus aureus
atgataattaaatcacttgaaatttatggttacggtcaatttgttcaacgtaaaattgaatttaataaaaacttcactgaaatttttggtgaaaatgaagcgggtaaatcgacgattcaagcattcatccattcgatattatttggttttccaactaaaaagtctaaagagccaagactagaaccacgtctaggtaaccaatacggtggtaaattagtacttattcttgatgatggcttagagattgaagttgaacgaattaaaggcagtgctcaaggtgatgtgaaagtatatttacctaatggtgctgtgcgtgatgatgcttggttacaaaagaaacttaattatatttctaaaaagacatatcaaggtatcttttcatttgatgtactagggcttcaagacattcatagaaatctaaatgaaaaacaattgcaagattatttattacaagcaggggctttaggatcaactgaattcacgtcaatgcgcgaagtgattaatcgtaaaaaagatgaattatataaaaaatcaggtaaaaatccgatcattaatcaacaaattgagcaattaaaacaactagaaagtcaaattcgtgaagaagaagcaaagctagaaacatatcatcgcttagtagatgatcgagataaatcatcacgtcgattagagaatttaaagcataatttaaatcaattatcaaaaatgcatgaagaaaaacaaaaagaggttgctttacatgatcattcacaagaatggaagtctctagaacaacagttaaatattgagccaatcacattcccagaaaaaggtgtggatcgttacgaaaaagcgcgagcgcataagcaatcgttagaaagagatattggtttaagaaatgagcgtttagctcaacttaaagaagaagcgactcaattagagccagttaaacaatctgatattgacgccttcattagtttgaatcaacaagaaaatgaaattaaaaataaagaatttgaacttactgcaatcgaaaaggatattgcgaataaacaacgtgataaagatgaattgcaagcaaatattggttggtctgaaacgcatcatgacgtagatagttcagaggcaatgaaaagttatgtcagtgagcaaatcaagaataaacaagaacaagctgcatacattaaacaattagaacgtagtttagaagaaaataaaatcgaagataatgcggttcatagcgaactagattctgttgaagaaaaaatagttcctgaagagacttttgaaaagaaaaaagaatactcacaacaagtcattgaattaaacgaaaaagagaacttgtatagcaaattgaaagaacgtttcgaaattgagcaacaagaaaaacaaaaacgtcaaaaattgttacgaacaacgtttattcttttaacattagtaggtattggtttaactgccttctcatttatttcaaacaacatgttgtttggtattattttcgcagtattaactttagtatttgttatcggtatcatcatgtctaaatcaaaagaagtagattatagcgaggccatcacagatgaaatcgaagaaattaaagcacaactagccattttagatgaaaattatgacttagattttgatcttgatgagcaatatcgcattcgtgatcactggcaacaagctttgaaaaataaagatattttagaagagaaacgtcagtatattgaaggtcgtttaaatgatgcgaaagggcgtcatgatgaattacaatcgacagttgagaacgttaaggatgaattatacttatcatctaaaatttcaaatgatttaattgttgatagtatttctacaatggcgaatattaaagcattagatcaacatatcagtgatttaaatcaacaacgccagcaattggttcaagaattagatacattctacaatcatgctgaagctgttacaaaatcacaatttgtttatttcaacaaattatctttattccacgatgtgcaacaatggttgaaatcagctgaagacacgaatgaaaaatggcgtattaatgctgaaaataccaaacttgttacaaatgaattaaatcatttaaatgctcaattagaagaaaataataaagaaattacagcactattcgattttatcaatgttggtactgaagaagatttttaccaacatcatgaagattaccaaacttatactagtaatttgagtcgttttaatgatttaactaaatatcttgagaaccaaaactattcttatgaattaagttctagtttaagtgaaaaaacaactgcacaacttgaagaagaagatcatttattggctactcaagttgacgaatataatgagcaatatcttgaaatgcaagcacaagtcagtgatttaagtgcacaaatcaatcacatggaaactgatacaacgcttgctaatttaagacatgaatatcacagtcttaaaaatcaacttaatgatatcgcaaaagattgggcaagtttaagttatttacaaagtttagttgatgaacacattaaacaaattaaagataaacgtttgcctcaagttattaatgaagcggtagaaatattgaagcatttaacagatggcagatatacgatgattaactataatgaagattcaattacggttaaacatgttaatggtcaattatatgatcctgttgaactaagtcaatctacaaaagaattactttatgtagctttacgtatcagtttaattaaggtactaagaccatattatccgttcccattaattgttgatgatgcatttgttcattttgataaaaagcgtactgaaaaaatgttgaattatttacgatcattatcagaacactatcaagtactatactttacatgtgtaaaagataatattgttccatcaaaagaagtgattacattaaacaaaatagaggaaggcgggaaacgatga

SEQ ID NO: 7968 - DNA, 696 bp, Staphylococcus aureus
atgagaatagataaatttttagcaaatatgggcgtcggtacacgcaatgaggtcaaacagttacttaaaaaaggccttgtaaatgtcaacgaacaagtaattaaatcaccaaaaacacatatagaaccagaaaacgataagataacagttcgtggagaattaatagaatacattgaaaatgtctatattatgttaaataagccaaaaggttatatatcagcaactgaagatcatcattcaaaaaccgttattgatttaatacctgaataccaacatctaaatatttttccggttggtcgtcttgataaagatacagaagggcttttattgataacgaatgatggtgattttaatcatgaattaatgagtccaaacaaacatgtttctaaaaaatatgaagttatttcagcaaatcctatcactgaagacgacattcaagcttttaaagagggtgtaacactgactgatggcaaggttaagcctgcaatattaacttatattgataatcaaacgtcacacgtaacaatttatgaaggaaaatatcatcaagttaaacgaatgtttcatagcattcaaaatgaggtattacatttaagacgtatcaaaattgctgatttagaattggacagcaatttagattcaggagaatatcgtttattaactgaaaatgattttgacaaattaaattataaataa

SEQ ID NO: 7969 - DNA, 1662 bp, Staphylococcus aureus
atgagtgaaagtaaagaaatggtgcgtggaacctttttaattaccattagtatattaattaccaaggtattgggcgtactttttatcattccattcaactatttaattggtggacaagaaaatatggcgccgttcacatacgcttatgcaccatataatattgcaattgcagttgcgacagcaggtgtaccattagcagcttcgaaatatgttgcgaaatataatgctattggggcatataaagtaagtcagaaattttataaatcgagttttattgtaatgagtattaccggtgttttaggtttcttggtactgtatttcttagcaccttatatttctgaattaacattagctagaaacattcatgataaaaacggttggtcagtcgatgatattacttggattataagaatcattagtatggttgttatctttattcctgtattagcgacatggagagggatattccaaggttataaatctatggggccaacagcagtgtcagaagtaactgagcaaattgcacgcgtgattttcatattaatcggaagttatttagtactaaatgtctttgatggctctattttattagccaatggtattgctacttttgcagcagcagttggtgcgattattggtatattcacactctggtattactggagaaagcgtaagcataatattgatcgtatggtcgaatctgattacacagatatagatgtgtcatatggcaagatgtataaagaaattattgcttatagtataccgttcgttattgtaagtttgaattatccattatttaacttagtagatcaatttacacataacggtgctttatctttagttggtataccttcacagttacaagatatattctttaatatgctaaatatgtcaactaataaaattgtaatgattccgacatcattaagtgctggttttgcagtgagtttaattccttatattacaaaaacatttgcagaaggtcgcttacatgaaatgcatcatcaaattagaacatctattggtgtattaatgtttataactgttccagctagtattggaattatggccttggcacaaccattattcacagttttctatggttacgatccaattgttttaggtcatgaccctaaccatgatggtagtcgcttattattctattatgcgcctgtagcaatactaatttcactattaagtgtaacggcatcaatgttacaaggtatagataaacagaaattaacagtttatgttattttagcttctgtagttatcaagttagcgttaaactatccattaattatgttattccatacacctggtgcaattttaagtactagtatcgcattattatttgcaattggatgtaatttctatattcttaaaaaatatgcgaagtttaaattcagctatagttggattcattttgcaaaaatattcttgtattcatttattatgatgctaggtgtagaattagtatttttccttgcaaatctattcttagaacctactaaacttggttacttaatcattattattttaggtgttacagtaggtattctaatttacggtacaatcacaattaaaacgcgtcttgcggacgaattcttaggtgaaattcctgaaaaattaagacgtagagttaggtttttacgatga

SEQ ID NO: 7970 - DNA, 810 bp, Staphylococcus aureus
gtggaggataagaattcagttattgtatttaaaaatgtttcatttcaatatcaaagtgatgcatccttcacattgaaagatgtttcttttaatatacctaaaggtcagtggacatctattgttggtcataacggttctggaaaatctacaattgccaagttaatgattggcatagagaaagttaaatctggagaaattttttataataatcaagctataactgatgataattttgaaaagttaagaaaagacataggaattgtatttcagaatccggataatcaatttgttggttcaattgtaaaatacgatgtggcatttggactcgaaaatcatgcggttccacatgacgaaatgcatagaagagtcagcgaagcacttaaacaagttgatatgttagaacgtgcagattatgaacctaatgcattatcggggggacagaagcagcgtgtggctatagcaagtgtattagcacttaacccctctgtcattatattagatgaggcgacttctatgttagatcctgatgcacgtcaaaatttattggatttagtgagaaaagttaaatcagaacataatattacaatcatttctattacgcatgatttatctgaggcgatggaagcagatcatgttatcgttatgaataaagggactgtctataaagaaggcacagcgactgaaattttcgaccatgcagaagagttaacaagaataggtctagatttgccattcccaatcaaaataaatcaaatgctgggacaccaaacatcattcttaacttatgaagggctggtggatcaactatga

SEQ ID NO: 7971 - DNA, 1011 bp, Staphylococcus aureus
atgagagcagcagttgtaacgaaagatcacaaagtaagtattgaggacaaaaagttaagagctttaaaacctggtgaagcattggtacaaacggaatattgtggtgtttgtcataccgatttacatgttaagaatgctgattttggtgatgttacaggcgttactttaggtcatgaaggtattggtaaagtcatcgaagttgcagaagatgtagaatcattaaaaattggagaccgtgtgtctatcgcttggatgttcgaaagctgtggaagatgtgaatattgtacaacaggtcgtgaaacactttgccgtagtgtgaaaaatgctggttatacagtagatggtgcaatggctgaacaagttattgttactgcagactatgctgtgaaagtacctgaaaaattagatccagcagcagcgtcttctattacatgcgcaggtgtgacaacttataaagctgtaaaagtaagtaatgtaaaacctggtcaatggttaggtgtttttggtataggtggtttaggtaacctagctttacaatatgctaaaaacgttatgggggctaaaattgttgccttcgacattaatgatgataaattagcattcgcgaaagaattaggtgcagatgctattattaattctaaagatgttgatccagttgcagaagttatgaaattaactgataacaaaggattagatgcaacagtggtaacttcagttgctaagacgccatttaaccaagcggttgatgttgtaaaagctggtgcaagagttgttgccgttggtttacctgttgataaaatgaacttagatatcccaagattagtgcttgacggtattgaagtagtaggttcacttgttggtacaagacaagacttacgtgaagcgtttgaatttgctgctgaaaataaagtaacacctaaagttcaattaagaaaattagaagaaatcaatgatatttttgaagaaatggaaaagggtactataactggtagaatggttattaaattttaa

SEQ ID NO: 7972 - DNA, 411 bp, Staphylococcus aureus
atgaatacaaatgatgctattaaaattttaaaagagaacggtttaaaatatacagataaacgtaaagatatgttagatatttttgtcgaagaagataagtatataaacgcaaagtatatacaacaagttatggatgaaaattatcctggaatttcattcgacacaatatatagaaacctgcacttatttaaagatttagggattattgaaaatacagaacttgatggtgaaatgaagtttagaatcgcttgtacaaaccatcatcatcatcattttatctgtgaaaagtgtggagatacaaaggtaatagattattgtccaatagatcagataaagttatcactacctggtgttaatattcacaaacacaaacttgaagtttatggtgtatgtgagtcttgccaagattaa

SEQ ID NO: 7973 - DNA, 975 bp, Staphylococcus aureus
atgaaatttgatagacatagaagattgagatcatcagcgacaatgagagatatggttagagagaatcatgtaagaaaagaagatttaatatatccaatttttgtagttgaaaaagacgatgtgaaaaaagaaattaagtcattgccaggtgtataccaaatcagtttgaatttacttgaaagtgaattaaaagaagcttatgacttaggcatacgtgccattatgtttttcggtgttccaaactcaaaagatgatataggtactggtgcatacattcacgatggtgttattcaacaggcaacacgtattgctaaaaaaatgtatgatgacttattaattgttgcagacacttgtttatgtgaatatactgatcatggtcattgtggcgtgattgatgaccatacacatgacgttgacaatgataaatcattgccactacttgttaaaacagcaatttctcaagtggaagctggtgctgatattattgcgccaagtaatatgatggatggttttgttgctgaaattcgtcgtggattagatgaagccggctattacaatattcctataatgagttatggtgtcaagtatgcatcaagtttctttggaccttttagagatgcagcagattcagcgccatcatttggggatagaaaaacgtatcagatggaccctgctaaccgtttggaagcacttcgtgaattagaaagtgatcttaaagaagggtgcgacatgatgattgttaaacctgctctaagttatttagacatagttcgagatgttaaaaatcatacgaatgttccagttgttgcatataatgtgagtggagaatatagtatgactaaagcagcggcacaaaatggttggatagatgaagaacgtgtcgttatggaacaaatggtttcaatgaaacgtgcaggtgctgatatgattattacgtattttgcaaaggacatttgtcgctatttagataaataa

SEQ ID NO: 7974 - DNA, 1026 bp, Staphylococcus aureus
atgactaaagatatattaatactagctgttgaaacaagttgtgatgaaacaagcgttagtgttataaaaaatggcagagatattttatcaaatacagttttaagtcagattgaaagtcataaacgatttggcggtgtcgttcccgaagtggcaagtagacatcacgttgaaggtataacaacaacaataaacgaggctctagtggatgccgatgtatcaatggaagatattgatgccatagcggttacagaaggccctggactaattggtgcgttactaataggtgttaatgcagccaaagcattggcatttgcttacgataagccacttattcctgttcatcatattgcaggacatatatatgctaatcacatagaagagccattaacattcccgctaattgcacttattgtttcaggtggacatactgaattagtttatatgaaagatcatttatcatttgaagtcattggtgaaacacgagatgacgcagtaggtgaggcttatgataaagtggcacgaacaattggtttaaattatccaggtggtccacaagttgatcggttggctgctgaaggtgaagatacttattcattccctcgtgtttggttggataaagatagttatgattttagttttagtgggttgaaaagtgccgtgatcaatcaacttcacaatcaacgacaaaaaaatattccaatcattgaagctaacgtagcaacgagctttcaaaatagtgttgtagaggtgcttacgtttaaagctattcaagcttgtaaagaatatagtgttcagcgattaattgttgctggtggcgtggcgagtaataaaggattacgtcaatctttagcggatcaatgcaaagtcaatgacattcaattaactatcccaagtcctaaattatgcacagataatgctgcaatgataggcgttgccggccactctttgtatcagcaaggtcgatttgctgatttagcattaaatgggcacagcaatatagatttagaagagtattctgcagaataa

SEQ ID NO: 7975 - DNA, 1125 bp, Staphylococcus aureus
atgcataaaaaatatttattgctattttttctgttattatcagttgcattgctatatagctgttccaagcaaaatgagaaagctcaaaataaatctgttaatccaaatgagtatgcaaagcataaatcgaaaatggatgaacattgggaaacatatcacggccaagtttatcatgtgttttatcacccattaattacagacccaaaagttgcgtttacaggagatacacaccaagctaagggcaacaatgattggatgattactgtaagtgaatttaaaaaatcattgaacgaattatataaaaataattacatcatcgttaatccacatgatgtatacgacttatcatctcatcatgtaaaagccaaaaaaataaaattgccgaaaggtaaaaagccactaatcatctcaattgatgatatgaattactatagttacatgagacaccatggttatgctgaccgtttagtactcgataaaaataaacatgttgtttctgaaactacagacaaaaaaggtcatgctacttattctgatgacaatgatatcgtgccaattttaaataaatttgtaaaagagcatccagatttttctttaaatggtgaaaaaggtgttgttgctttaaccggttatgagggcgtattaggttatcgcacgaatgaattaacgagtaaagattatacaaagaataaaaaggcagctgaggaagttgttcgcgcaatgaaacgggatggatggtcatttgcgagtcattcatatggtcacattaattttgaaaaaacatctttagaaggtattaaacgtgatactaaaagatggaaagatgaagttgaaccaattgtaggtaaaacagatatgtttgtatttccacatggcgcacaggatagacatacacaagcgtatgattatttggtagatgaagcagagtttaagtttattgcaggtgtcggtccaaacaattttacagatatatcagcaacgaacgtttaccaagatagggttgcgattgatggtctaaacttatttgaatttaaatataaactcaaaccgttttttaatcctgaaaatgtatatagtaaacaagatagacaattctttaaaggtaatcgggattatgaagaatag

SEQ ID NO: 7976 - DNA, 1977 bp, Staphylococcus aureus
atgaacttgaacttaatttttaaagaacagacattaaaatttaacaaagaagaacaagaaacatatttatttttacaacaacataatagcgattgggctaatatttttaaagagatgattttacaaggaagagataaagtcactcagagattagtcacatcaatgcatcgcgaaaacttagttaaagcgcgcactcaaagtaagaaaatattgagtcgtgatttgattatgttagatatctcaacgactcatatactagaaatccagttcccacaagctaagcaaacattatatgctcctatcactggagaacacgcctttgatcgaattgatgttgaaggccctttctacattaaagatgacattacaaatacgattacacgagtacaccatccaaatgaaattcttgagtgtattttaattgaagcaccagatttaaaaaatgctgctagtgatcaatttcagcaagatttaataaacagtgcaactaatatgacatttgcaattagctatcaagcactgtcaatgcaacatgattctgcacctttatttaatattatcgaaaatagcgaagatagttacttgcgttcagagcaagccgttattgaaggtcatccgctacatcctggggctaaattacgtaaaggtttaaatgcattacaaacattcctatattcttcagaatttaatcaacctattaagttgaaaatagtactgattcacagtaaattaagtcgtactatgtcactgtctaaagattatgatacaactgttcatcagctatttccggacttaattaaacaattagaaaatgaatttacgccaaactttaactttaatgattatcacattatgattgtacatccatggcaattagatgacgtattacattctgattatcaagcagaagtagataaagaattaatcattgaagcaaaacatacgttggattattatgccggtttatctttcagaacattagttcctaaatacccagctatgtcgccacacatcaaattgtcgacaaacgttcatattacaggtgaaattcgtacattatcagaacaaacgacgcacaatggtccactaatgacacgtattttaaatgatattttggagaaagatgtcatatttaagtcctatgcatcaacaattattgatgaagttgctggtattcatttttataatgagcaagacgaagtagactatcaaactgaacgaagtgaacaattaggtacattatttagaaaaaacatataccaaatgattccacaagaagtcacaccaatgattccttcaagcttagttgcaacctacccatttaacaatgaatcacctatcgtgacattgattaaacgttatcaatcagctgcatcattgtctgattttgaatcatcggcgaaatcgtggattgaaacttatagtaaagcattgcttggtctcgtaatcccactagttactaaatatggcattgcattagaggctcacttgcaaaatgctattgcaacatttcggaaagatggtctattggacacgatgtatattagagactttgaaggtttaagaattgataaagcacaactaaatgaaatgggatacagtacatctcatttccatgaaaaatcaagaattcttactgattcaaaaacgtctgtgtttaacaaagccttttattctaccgttcaaaaccatttaggcgaattaattcttacaatctctaaagcatcaaatgattcaaacttagaaagacatatgtggtatatcgttcgtgatgtactagataacatttttgatcaacttgtactttcgacacacaaatctaatcaagtaaatgagaatcgcataaatgaaattaaagataccatgttcgcgccatttatagattataagtgtgttacaacaatgcgtcttgaagatgaggcacatcattatacttatattaaagttaataatcctttgtatcgagaaaataattaa

SEQ ID NO: 7977 - DNA, 339 bp, Staphylococcus aureus
atgattactgttgatattacagttaatgatgaaggcaaagtaacagacgttattatggatggccatgctgaccatggtgaatatggtcatgatatcgtttgtgctggagcttcagctgtattgtttggtagtgttaatgcgattataggattgacatctgagagaccagatatcaattatgacgacaatggtggtcattttcatataagaagcgttgatacaaataacgatgaagcgcaactaattcttcaaacaatgcttgtgtctttacacactattgaagaagaatataatgagaatattagattaaattataagtgtggtgcatcacgatggtga

SEQ ID NO: 7978 - DNA, 567 bp, Staphylococcus aureus
atgaaacgaatcgcagtttattgtggtgcaagcaaaggtcatgacccttcatatgtacaaaaagcatacgatttaggtaaatattttgctgaacaaggttatgaattagtatttggtgcagggtcaattggcattatgggtgccattcaagatggtgtattaaatcatggcggcaaagctattggcgtcatgcctaaaatgttagatgaacatgaaatcacaagccaacgtttaactgaattaattttagttgattctatgcatgaacgtaaaaataaaatggcagaacttgcagatgcatttgtcatggctcctggtggcgcaggttcactagaagaatttttcgaaatgtatagttgggctcaaataggtatccatgaaaagcctattgccatttataatattaatggctttttcaatccactacaaacaatgattgaccatatgattgaggaaggttttattgatcctaagtatcgtgctcttgcaccgttatgcgacactaaggaatcattaatagaatcaatattaaatttcaaacctctgggtactcgttcatacgattaa

SEQ ID NO: 7979 - DNA, 465 bp, Staphylococcus aureus
atggctaagaagaaatcaccaggtacattagcggaaaatcgtaaagcaagacatgattataatattgaagatacgattgaagcgggaatcgtattacaaggtacagaaataaaatcgattcgccgaggtagtgctaaccttaaagatagttacgcgcaagttaaaaacggtgaaatgtatttgaataatatgcatatagcaccatacgaagaagggaatcgttttaatcacgatcctcttcgttctcgaaaattattattgcataaacgtgaaatctttaaattaggtgaacaaactcgagaaattggttattcgattgtgccgttaaagctttatttgaagcatggacattgtaaagtattacttggtgttgcacgaggtaagaaaaaatatgataaacgtcaagctttgaaagaaaaagcagtcaaacgagatgttgcgcgcgatatgaaagcccgttattaa

SEQ ID NO: 7980 - DNA, 723 bp, Staphylococcus aureus
atgaacaaaaacgtagtcatcaagagtttagcaactttaacaattttaacatctgtaacaggtattggaacaacattggttgaggaagttcaacaaactgccaaagcagaaaataatgtcacaaaaattcaagatactaatatttttccatatactggtgtagttgcttttaaaagtgcaactggatttgtagttggaaagaatactattttaacaaataaacatgtgtcgaaaaattacaaagtgggcgatcgtattactgcacatccaaatagtgataaaggtaatggtggtatttattcgattaaaaagattattaattatccaggtaaagaagatgtatcagtcattcaagttgaagagcgtgcaatagaacgtggaccaaaaggctttaattttaatgataatgtaacgccattcaaatatgcggcaggggctaaagctggtgagcgaattaaagtgattggttatccacacccatacaaaaataaatatgttttatatgagtcaactggccctgtgatgtcagtagaaggtagcagtattgtatattcagcgcatactgaaagcggaaactctggatcacctgtattaaacagcaacaacgaattagttggtattcattttgcttctgatgtaaaaaatgatgataacagaaatgcatatggcgtctactttacaccagaaattaaaaaattcattgcagaaaacatagataaataa

SEQ ID NO: 7981 - DNA, 1539 bp, Staphylococcus aureus
atgacatcaaaacatcaacaaaaggggtctatcgtcaatcgtttcttgaatagtgttgaaaaaattggaaataaattgccagatcctagcgtcttattctttttaatgtgtgtgggcttagccattatgacgtgggttatctcattatttaatgtatctgttaagcatccaggtacgcatcaaaccatttatattaaaaatataattagccatgatggatttacgatgataatgaatgatacgattaaaaatttctcagagttcccagcattaggcttagtactagcagtgatgattggtattggtgttgcagagaaaacaggatacttcgataagttaatgatttctgttgtgaatcgcgcaccacgatttttaattttaccgactattatattaattggtattttaggtagtacagccggcgatgctgcgacaattatcttgccgccgcttgcagcaatgctttttattaaaattggctatcaccctattgctggtttaacgatggcatatgcttccgctgttggaggatttgcagcaaatatagttgttggtatgcaagatgctttggtctattcatttacagaaccggcaacacgtatcgtttcagattctattaaaacaaacgttgctatgaactggtactttatcgcagcgagtgtcgttgtattacttcctacgatattgctagttacaactaagctcattattcctagattaggaaaatatgatgacagtttaatgcatgatgaccatgaagaagcatcttcacatattactgacaaagaagcacatgctttaaaatgggcaaatatcagtttcatagtcacaattattttattaattattacagctattcctgaacatagttttttaagaaatgctaaaacaggcagcttactagacgatgcgccattaattaacggtgtcggattaattattcttgtcgtatttttagtacctggattagtttatgggattttaagcaaagaaattaaaaatacaaaagacttaggtaaaatgttcggcgatgctgtaggatcaatgggaacatttatcgttattgtgttttttgcagcacagctacttgcgtatttaaagtggagtaatttaggaattatcgctgctgttaaaggtgccaaattattagaacatcaaaacggtattgtattgatactaggtattattgtactgagtgcaatggtcaacatgttaatcggaagcgcatcggctaaatggggtattttaggaccgatattcgtaccaatgttaatccttatcggctttcatcccgcatttacgcaagtcatttaccgtgtaggcgattcaattaccaatccaattacaccgatgatgccgtacttacctttattattaacttatgcacaaaaatacgataaacgcatgaaactcggagccttactttctagtttaatgccgtattcaatcgcgctaagcattgtatggacagtatttgtcatcatttggttcttattaggtatccctgttggaccaggtggaccgatattcgttaaataa

SEQ ID NO: 7982 - DNA, 753 bp, Staphylococcus aureus
atgcgagttgatttgaattgtgatttaggcgaagcatttggaaattattcctttggtggtgatcatcaaattattccgttaattacaagtgcgaatgttgcttgtggttttcacgctggtgatgaaaatgtaatgaatgaaacggtaaaacttgccaaagcacataatgttgcagtaggtgcacatcctggtttacctgatttgaaaggctttggcagacgaaatatagatatctctaacgacgagatttataatttgatgatttatcaattaggtgcattacaagggttttgtcgcattcatcaacttaaaattaatcatgttaaaccgcatggtgcattgtatcagatgggtgcaaaagacagagaaatagcaaacgttatagcacaagctgtttatgactttgatccatcactagtgttagtaggattagcaaattcatatctaatttcagaagcaaagaatgtcggattaattacagcttctgaagtgtttgctgatagacgatacgaagatgatgggcagctcgttagtagaaaagaaagtgatgctgtgattactgatactgacgaagcacttaagcaggttttaaagatggtgaaggaaaataaagttatttcaaaaaacaataaggaagtaacgttacaagcagatacaatttgtgtgcatggtgatggagaacatgcattattatttgtttcgaaaattagagaaattttaatgaaagaaggcattgatattcaatccttatag

SEQ ID NO: 7983 - DNA, 264 bp, Staphylococcus aureus
gtgagcgaaagaaacgatcgtaaagtttatgtaggtaaagttgtttcagacaaaatggacaagactattacagtacttgttgaaacttacaaaacacacaaattatacggtaaacgagtaaaatactctaaaaaatacaaaactcatgatgaaaacaattcagctaaattaggagacattgttaaaattcaagaaactcgtcctttatcagcaacaaaacgttttcgtatagtagagattgttgaagagtcagtaattatttaa

SEQ ID NO: 7984 - DNA, 852 bp, Staphylococcus aureus
atgagtaaaatttttgtaactggtgcaacgggccttattggcattaaattagttcaaagactaaaagaagaggggcatgaggttgctggttttactacatctgagaatggtcaacaaaagctagctgctattaatgtaaaagcatatattggtgatatattaaaagctgatactattgatcaagcgttagcagattttaaaccagaaatcattatcaaccaaattacggatttaaaaaatgttgatatggcagcaaatacgaaagtacgtattgaaggttctaaaaacttaattgatgcggcgaaaaagcatgacgttaagaaagtaattgcccaaagtattgcctttatgtatgaacctggcgaaggattagcaaatgaggaaacttcacttgattttaactcaactggtgatagaaaagtaacggttgatggtgtggttggtctagaagaagaaacggctcgtatggatgaatacgttgttttacgttttggttggttatatggcccaggtacttggtacggaaaagatggcatgatttataatcaatttatggatggtcaagtgacactttcagatggcgtaacatcatttgtgcatcttgatgatgcagttgaaacatctattcaagctattcattttgaaaatggtatctataatgtagcagatgatgcacctgttaaaggttctgaatttgcagaatggtataaagaacaacttggtgttgaaccaaatattgatattcaacctgcacaaccatttgaacgtggcgtaagcaatgagaagtttaaagcgcaaggtggtactctgatttataaaacttggaaagacggcatgaatccaattaaataa

SEQ ID NO: 7985 - DNA, 1203 bp, Staphylococcus aureus
atgcgtatagttcaacctgttattgaacaattaaaagcacaatctcatccagtttgtcattatatctatgatttagtcggactggaacatcatttgcaacatattacatcgtcattgccgagtaattgtcaaatgtactatgcaatgaaagcaaatagtgaacgaacaatcctagatacaattagtcagtatgttgaaggattcgaagttgcatctcaaggtgaaatagcaaaaggtcttgcttttaaaccagcaaatcatattatttttggtggccctggtaagacagacgaggaactaagatatgcagtaagtgaaggtgttcagcgtattcatgttgaaagtatgcatgaattacaacggctaaatgccatcttagaagatgaagataagacacaacacattttattgcgtgttaatttagcaggaccatttcccaatgcaacgttgcatatggcaggacgcccaacacaatttggtatttctgaagacgaagttgatgatgtcattgaagctgcgctagtaatgccaaatattcatctagatggctttcattttcattctatttctaacaatttagactcgaatttacatgtcgatgtagtgaaactttattttaaaaaagcaaaatcatggtctgaaaaacatcgatttccactcaaacatatcaatcttggtggtggcataggcgttaactatgcagatttaactagccaatttgagtgggataattttgtagaaaattttaaaacacttatcgttgagcaagaaatggaagatgtgacattgaactttgaatgtgggcgctttattgtggcacatattggttactatgtgacagaagtgctagatattaagaaagtgcatggtgcttggtatgccattttaagaggaggtacgcaacaatttagactgccggtatcttggcagcataaccatccttttgaaatttatcgttataaggacaatccatattcatttgaaaaagtttcaatttcgagacaggacacaacgttagtcggtcaattatgtacaccgaaagatgtctttgctagagaagtacagatagacgcaatcagtacaggcgacgttattgttttcaaatatgcaggtgcatacggatggtctatttcacatcacgatttcttaagccatccacatcctgaatttatttatttaacgcaaacaaaggaggatgaataa

SEQ ID NO: 7986 - DNA, 738 bp, Staphylococcus aureus
atgaaaattgattatttaactttatttcctgaaatgtttgatggtgttttaaatcattcaattatgaaacgtgcccaagaaaacaataaattacaaatcaatacggttaattttagagattatgcaattaacaagcacaaccaagtagatgattatccgtatggtggcggacaaggtatggtgttaaagcctgaacctgtttttaatgcgatggaagacttagatgtcacagaacaaacacgcgttattttaatgtgtccacaaggcgagccattttcacatcagaaagctgttgaattaagcaaggctgaccacatcgttttcatatgcggacattatgaaggttacgatgaacgtatccgaacacatcttgtcacagatgaaatatcaatgggtgactatgtgttaactggcggtgagttaccggcaatgacaatgactgatgctattgttagactgattccaggtgttttaggtaatgaacagtcacatcaagacgattcattttcagatgggttattagagtttccgcaatatacacgtccgcgtgaatttaagggtctaacagttccagatgttttattgtctggaaatcatgccaatattgatgcatggagacatgagcaaaagttgatccgcacatataataaaagacctgacttaattgaaaaatatccattaactaatgaagataagcaaatattagaaagatataaaataggattgaaaaaaggttag

SEQ ID NO: 7987 - DNA, 684 bp, Staphylococcus aureus
ttgaaaaatattttaaaagtttttaatacaacgattttagcgttaattatcatcatcgcgacattcagtaattctgcaaatgccgcagatagcggtactttgaattatgaggtttacaaatacaataccaatgacacgtcaattgctaatgactattttaataaaccggcaaagtacattaagaaaaatggtaaattgtatgttcaaataactgtcaaccacagtcattggattactggaatgagtatcgaaggacataaagaaaatattattagtaaaaacactgccaaagatgaacgcacttctgaatttgaagtaagtaagttgaacggtaaaatagatggaaaaattgacgtttatatcgatgaaaaagtaaatggaaagccattcaaatatgaccatcattacaacattacatataaatttaatggaccaactgatgtagcaggtgctaatgcaccaggtaaagatgataaaaattctgcttcaggtagtgacaaaggatctgatggaacgactactggtcaaagtgaatctaatagttcgaataaagacaaagtagaaaatccacaaacaaatgctggtacacctgcatatatatatgcaataccagttgcatccttagcattattaatcgcaatcacattgtttgttagaaaaaaatctaaaggcaatgtggaataa

SEQ ID NO: 7988 - DNA, 1077 bp, Staphylococcus aureus
atgagaaatgttaaacaaattgctacaaaatctattatagctattattagcttatgtatacttacatatacaacaatgattggtagcgtgttggctgatgagataaaatatccatcagccaaatttaatcaacctgaagcaaaagataaaacagaattaactacatcaatttttgatgaaaagataaaagagaataaagcgttagagttactaatttttaatcaagaaaataaaaatgtaactgaggaacaacaactagttgacgaaaaggcgcaattgatttcagatatgactggtaaaatttacttgcaagtaaagctaaaaggtcaaatagataaagaacaacttgtttttcaaaatgacaaaaatgaagaatttccttttgttataaaagatgaaaaggatgacacaatagtaagaattttaattgaacagcatatggataaaatcaatatgcatgttaaaacgttggctgaaaagaaaaatctagataacaaagaaatggtgtattctattcattttaaagagaaaaaagtacaacatgatgatgcaaaagaagtgccttcaaaacatcaaaatcaagaaaataatcaagatcagcttaaaaaagatattgatgacaaaaaagatagtcaaaaatcagatactaaggaaagacgtactagcctttttactgaaaaaggattaaatgatattcctgtacaaaaagataaagtgcaacaagacagtaataaaaagattgaaaatgagcgacctaaagcatcaggtacattaaaagttgaaaatagccctccaacaataaaaaaggttgaaaataatcacaaagagcaaccgaaacataaagatgaaaaatcaaaaaaggaaaagaaaaaagtagttgaaaaagaaaaagcgttaccagcttttaatagagatgatgatagcaagaatagtagtcaattatctagtgatattaaagaacttgatgaaccaaatcataaaaagcaatatatgttatttgcagctggcattgtgttagcaactattttacttatttcggcacatttatacagcagaaagagaggtaaccaagtttga

SEQ ID NO: 7989 - DNA, 618 bp, Staphylococcus aureus
atgtattcagtgattagtaagattttgaatttcattttagttaaaatgtcaaaatcattatacgtaatcggtaaagataatattcctaaggatagtaaatatgtcgtaacttgtacgcatgaaagttataacgaagttattatgctaggtatggcattatatcctaatcaaattcattatatggctaaaaaagaattattcaaaaataaatggattggtaaatttttaacgtctttaaatgcatttcctgtagatcgtgaaaatccaggacctagtactttaaaacgcccaatcaatttgttgaaagataataagacagttggtatcttcccaacaggttctcgcacatcgcaagaaggtgcaccattgaaacgtggtgcttcaacaattgcaatgttaagtaagtcaccaatattacctgttgcttatgttggtcctactaagattcatggtcttttaacaggacaagcatacataaatattggtaaaccaatcgatattaacgatttacctaaagatttaaaacgaaacgagcgtatcgattacattacaaaagagattgaaacacgaacagcaaagttacaacaagaattgcatgaaattgtaaaaagtttataa

SEQ ID NO: 7990 - DNA, 1467 bp, Staphylococcus aureus
atgtataaatttttccaaaatttagggcgttcgttaatgttaccagttgccattttaccggctgcagcaattattgccggaattggtaatacgttaaatgcacttcatgcgacgccgaaaatcgcaatgttctttactacggtaggtactacgattttagagcaattaggtattttatttgcaattggtgtagctataggaatggcaaagaaaaatgatggtgcagtcgcgcttgcagctacgttaggatattttttagttacagttgtattatcaccaatgaaattagcgcctttattaggaatgaaagcttcggaaataaattcagcttttgaaaagatgaataatggcaatgtctttgttggtattgtaataggtttaatagcagcctatgcatacaataagtttagtgaaacagaattaccattagcattatcattttttagtggtaaacgtctagttccaattatgactgcattttactgtacatttttagttgtcatattgttattcttatggccactactttattcatggattgtaaaatttggtgaatctatagtcggtttaggatcgtttggagctttcatatatggtgttgccaatagattattaattcctacaggattacatcatgcactgaatagtgtgttctggtttgatacgattggtattaatgatattggtaaattccaaagtggcaaagatgctataaaaggtattacaggacgctatcaagcgggattcttcccaatcatgatgttcggtattccagcggctgcgttagcaatgtatcatacagctaaaacgactcagaaaaaacaagtttacggttggttcctagcgagttcagttgcagcatttttcgttggtgttacagagccgattgagtttgcatttatgtttgttgcgccaatcttatatgttgttcatgcgttattaacaggattatctttatttatcgcagctacattccattggacagctggattttcatttagtgcaggtttgatagattatgtgttatcactaattaatccagtatcaaatcatccattgatgttgcttgttcaaggtgttgtatttttcatcttatactatgtgattttccgtgtagtaatccaagtatttaacttgaatacgattggtagaggtgaaaatgaattagttgatccaacagttgtaaaagataatattgctcctggtgaaaatgatattaaacaaagtaaatatcatcaacatgctatacaaatattagaaggtttaggcggtcaagagaatattgttaatttaaccaattgtgcaacaaggttgcgtctagagttaaaagacacatctattattgatcaacagaagattaaaaacgccggtgcagttggtgttactgttaatggcaaacattcaactcaagttattgtcggtacacacgtacagcaggttgctgatgaaattgaaaaacatttataa

SEQ ID NO: 7991 - DNA, 1335 bp, Staphylococcus aureus
atggttaaaaatcataaccctaaaaatgaaatgcaagatatgttaacgcctttagatgctgaagaagcagctaaaacaaaattacgcttagatatgagagagattcctaagtcttcaattaaaccagaacattttcatttaatgtacttattagaacaacattctccatattttatagatgctgaattaactgaactacgtgacagtttccaaatacattatgacattaatgacaatcatacaccttttgataatattaaatcatttactaaaaatgaaaaattacgatacttactcaatatcaaaaatttagaagaagtaaatcgtacacgttacacatttgttttggcaccagatgagttatttttcacaagagatggattaccaattgctaaaacaagaggtttacaaaatgttgttgatccattaccggtgtcagaagctgaatttttaacaagatataaagcactggttatctgtgcattcaatgagaaacaatcatttgatgctttagttgaaggaaacttagaactacataaaggaacgccatttgaaactaaagttattgaagcggcaacgttagatttactaacggcatttttagatgaacagtatcagaaacaagaacaagattatagtcaaaattatgcatatgtacgcaaagtagggcataccgttttcaaatgggttgctatcggcatgacaacgttaagtgtgttattaattgcatttttagcctttttatatttttcagtaatgaagcataatgagcgcattgaaaaaggataccaagcatttgtaaaggatgattatacgcaagtactaaatacgtatgatgatttagatggaaaaaaattagataaagaggcactttacatttatgccaaaagttatatccaaacaaataaacaaggtttagaaaaagataagaaagaaaatttacttaataacgtgacaccaaattcaaacaaagactacttattatattggatggaattaggacaaggacatcttgatgaagcgattaatattgccacttatttagatgataacgatattacaaagttagcgttgattaataaattaaatgagattaaaaataacggagatttatcgaatgataaacgttctgaagaaacgaaaaagtataacgataaattgcaagatattttagacaaagaaaaacaagttaaagatgaaaaagcgaaatctgaagaagagaaagcaaaagcgaaagatgagaaattaaagcaacaagaagagaacgaaaagaaacaaaaagaacaagcacaaaaagataaagaaaaacgccaagaagctgaaagaaaaaaatag

SEQ ID NO: 7992 - DNA, 549 bp, Staphylococcus aureus
atgtctgaagaagttggcgcaaagcgttggtatgcagtgcatacatattctggatatgaaaataaagttaaaaagaatttagaaaaaagagtagaatctatgaatatgactgaacaaatctttagagtagtcataccggaagaagaagaaactcaagtaaaagatggcaaagctaaaacgactgttaaaaaaacattccctggatatgttttagtggaattaatcatgacagatgaatcatggtatgtggtaagaaatacaccaggcgttactggttttgtaggttctgcaggtgcagggtctaagccaaatccattgttaccagaagaagttcgcttcatcttaaaacaaatgggtcttaaagaaaagactatcgatgttgaactcgaagttggcgagcaagttcgtattaaatcaggtccatttgcgaatcaagttggtgaagttcaagaaattgaaacagataagtttaagctaacagtattagtagatatgtttggccgagaaacaccagtagaagttgaattcgatcaaatagaaaagctttaa

SEQ ID NO: 7993 - DNA, 201 bp, Staphylococcus aureus
atgccaaaaatgaaaactcaccgcggagcagctaaacgtgttaaaagaactgcttcaggtcaattaaaacgttcaagagctttcacatctcacttattcgcaaacaagagcactaaacaaaaacgtcaattacgtaaagctagattagtgtctaagagcgatatgaaacgtgtaaaacaattattagcatacaaaaaataa

SEQ ID NO: 7994 - DNA, 366 bp, Staphylococcus aureus
atggcacgtattgcaggagtagatattccacgtgaaaaacgcgtagttatctcattaacttatatatacggtatcggtacgtcaactgctcaaaaaattcttgaagaagctaacgtatcagctgatactcgtgtgaaagatttaactgatgacgaattaggtcgcatccgtgaagttgtagacggttataaagtcgaaggtgacttacgtcgtgaaactaacttaaatatcaaacgtttaatggaaatttcatcataccgtggtatccgtcaccgtcgtggtttaccagttcgtggtcaaaaaacgaaaaacaacgcgcgtactcgtaaaggaccagttaaaacggtagctaacaagaaaaaataa

SEQ ID NO: 7995 - DNA, 849 bp, Staphylococcus aureus
atgggaaattatttggttttgcaatcagattttggacttagtgatggcgctgtaagtgcaatgtatggagttgcatatactgtaagtgatgatatacgtgtcgaaaacttaacgcatgatataccaccgtatgacatttgggtagcgtcatatcgtttatatcaaactgtaaaatactggcctaaaggcacagtttttgtatcagtggtagacccgggtgtaggtagtgataggcggagcattgcttgcttaacatattcaggtcattacattattacacctgataatggttctttaagtcatattaaacattacgaaggtattaaaaaagttatcgaaattgatgaagtgaaaagccgattgcctcattcggaagaaagtcatacttttcatggtagagatgtttatgcatacaatggtgcgagattagctgcaaataagatagcgtttgaacgtctcggtcaggcaattaatgttgatagtattgaggcattagaaataagagaagcgacaaaaaatgaggattctgttacaggaagcattgatattttagatatcagatttgggtcattatggacaaatattccattggcattcttaaaatccttggaaattgttcatggtaataatttggtggtaacaatttatcatcaagataagaaagtctatcaaaatattattaaatttgcgcgatcgtttgcagatgttaatgtgggtgaacctcttgtgtatgttaactcgctagtaaatattggtgtagcagtcaatcaagactcattttcagatttatatcatattggtactggaaatgattggacgattcatttatctaaagcaccatcaatttaa

SEQ ID NO: 7996 - DNA, 915 bp, Staphylococcus aureus
atgactgaaaaacaatttaaattaactgtacaagataatacgaatattgaagttaaagtgaattttacagatgtagattcaaaaggaattattcatatatttcatggtatggctgaacatatggaacgttacgataaattagcacatgcactttcaaagcatggcttcgatgtgatacgtcataatcatcgaggacatggtattaatattgatgaatcaacaagagggcattacgatgatatgaaacgagttatcggtgatgcctttgaagtagcgcaaacagtgagaggcaatgttgataaaccatacattataatcggacattcaatgggatccgttatagctagattgtttgtagaaacatatccgcaatatgttgatggtctaattttaagtggtactggtatgtattcattatggaaaggtttaccaaccgttaaagtgttacaactgattacaaaaatttatggtgctgagaaacgagttgaatgggttaaccagttagtatcaaatagttttaataaaaaaatacgtccattacgtacacaaagtgattggatttctagtaatccaattgaagtagataactttattaaagatccatatagtggatttaatgtgtcaaatcaattattatatcaaacagcctattatatgctacatacatcacaattaaaaaatatgaaaatgttaaatcatgccatgcctatattattagtttcaggatatgacgattctttaggtgattatggtaaagggattttaaaattggcgaatatatatagaaaagctggcattaaaaatgttaaagtgaatctttatcatcataaacgtcatgaagtgttatttgaaaaagatcatgacaaaatttgggaagacttgtttaaatggttgaatcaattttataaaaaataa

SEQ ID NO: 7997 - DNA, 987 bp, Staphylococcus aureus
atgaaagaaaatttttggagtgaattaccacgtccattttttattttggcgccaatggaagacgttacagatatcgtctttcgacacgttgtaagtgaagcagctagaccggatgtgtttttcactgaatttacaaatactgaaagcttttgccaccctgaaggcatacatagtgtgcgcggacgcttaacttttagcgaagatgaacacccgatggtcgctcatatatggggagataagccagaacagttccgtgaaacgagtattcaactagctaaaatgggctttaaaggcattgacttaaatatgggatgtcctgtagcaaatgttgctaaaaagggtaagggttccggcttaatcttaagaccggatgtcgctgccgaaattattcaagcaactaaagcaggtgggcttccggtaagtgttaaaacacgccttggctactatgaaatcgatgaatggaaagattggttgaagcacgtcttcgaacaagatattgccaatttatctattcatcttcgtacacgtaaagaaatgagtaaagtagatgcacattgggaattaatcgaagctattaaaaatttacgtgacgaaattgcaccaaatacattgttaacaattaacggtgatattcccgatagaaaaacaggacttgaactggcagaaaaatatggcatcgatggtgtcatgattggtagaggcattttccataatccattcgcttttgaaaaagaaccacgcgaacacacaagcaaggaactattagatctattgagattgcatttatcattgtttaacaaatatgaaaaagatgaaatacgacaattcaagagcttgcgtagattctttaaaatctatgtgcgtggcataagaggcgctagcgaacttcgccatcaattgatgaacacacaatcaattgcagaagcacgagcacttctagatgaatttgaagcccaaatggacgaagacgttaaaatagaattatag

SEQ ID NO: 7998 - DNA, 801 bp, Staphylococcus aureus
atggaaacgttaaaatcaaataaagcgagacttgaatatttaatcaatgatatgcgtcgagagagaaatgacaatgacgtattggtaatgccatcttcatttgaagatttgtgggaattatatcgaggcttggcaaatgtcagaccggcattacctgtaagtgatgaatatttagctgtacaagatgctatgttaagtgatttgaatcatcaacatgttacggatttgaaggatttgaagccgataaaaggtgacaatatctttgtttggcaaggtgatatcacgacgttaaaaatcgatgctattgttaatgctgcaaatagtcgttttctaggatgtatgcaagctaatcatgactgcattgataatattattcatacaaaagcgggtgttcaagttcgacttgattgtgcagagatcattcgacaacaagggcgcaatgaaggtgtaggtaaagccaaaaaaacacgtggatataatttgccagcaaagtatataattcatacggttggtccgcaaatacgtcgattgcctgtttcaaagatgaatcaggacttgttagctaaatgttatcttagctgtcttaaattggctgatcaacatagtttaaatcatgtcgctttttgctgtatatctacaggtgtatttgcttttcctcaagatgaagcagcagaaattgctgttcgaacagtagaaagctatctcaaagaaacaaattcaacattgaaagtcgtgttcaatgtatttacagataaggatttacaactgtataaggaggcattgaaccgtgatgcagagtag

SEQ ID NO: 7999 - DNA, 1287 bp, Staphylococcus aureus
atgaaagagcgttattatgaattaatagacgaaagagtattcgaacaagaattagaaaatggtttacgattatttattatccccaaaccaggttttcaaaagacatttgtcacttacactacacaatttggttcattagataatcaattcaaaccccttggacaagaccaatttgttactgtacctgatggagttgctcactttttagaacataaattatttgaaaaagaagaagaagacttatttactgcgtttgctgaagataatgcacaagcaaatgcgtttacaagctttgatcgtacaagctacttgttcagtgcaactgataatattgaaaacaacattaaacgtttacttacaatggttgaaacgccttattttacaaaagaaactgttgataaagaaaaaggtattattgcagaagaaataaaaatgtatcaagaacaacctggatataaattaatgtttaatacattgcgtgcaatgtatcaacgacatccaatacgtgttgatattgccggtagtgtagaaagtatatacgatattacaaaagatgatttgtatctatgttatgaaacgttttatcatccatcaaatatggttttatttgttgttggtgatgtgaatccagaagaaatatgtcgaatagtaaaacaacacgaggatgctcgtaataaagttaaccaacccaaaatcgaacgaggacttgttgatgaaccggaggatgttaaagaagcatttgttactgaatctatgaaaattcaatcaccaagactaatgcttggttttaaaaataaaccattacaagaagcgcctcaaaaatatgtacaacgtgatttagaaatgtcattattctttgagttaatttttggggaagaaacagatttttatcagaatttattaaacgaaggacttatcgatgatacatttggttatcaatttgtactagagccgacgtatagtttttcaatcgtgacaagcgctactgaagaaccagataaattaaaaaaattattattagatgagttgcgtgataaaaaaggcaatttccaagatgcagaagcatttgaacttttgaaaaagcaatttataggtgaattcatatcaagtttaaactcacctgaatatattgctaatcaatatactaaattgtattttgaaggtgttagcgtgtttgacatgttagacattgttgaaaatatcacgttagatagtattaacgaaacgtcatcgttatatttaaatttagatcagcaagtcgatagtcgtttggagattaaaaagtaa

SEQ ID NO: 8000 - DNA, 1767 bp, Staphylococcus aureus
ttgaggttaaatctaatgatgagccggctaaatagtgtcgtaattaaactgtggttaactattattttaatagtgacgacagttttaattttattaagtattgctttaattacctttatgcaatactatttcacacaagaaaccgaaaatgccataagagaagatgctagacgtataagttcactggtcgaacaatcacataataaagaagaagcaataaaatatagtcaaacattaattgaaaatcctggtgggttgatgattataaataataaacatcgtcaatcaacggcttcactttctaatattaaaaagcaaatgttgaatgaagtagtcaacaacgaccattttgacgatgtgtttgataaaggtaaatctgttactcgaaatgtaacgattaaagaaaagggttcatctcaaacatatattttgttaggctatccaacaaaagcacagaagaatagtcatagcaaatatagtggagtctttatatataaagacttgaaatcaatcgaagatacaaataatgctattacgattatcactataattacggctgttattttcttaacaattacaacagtctttgcgtttttcttatcgtcaagaattacaaaacctttaagacgtttaagagaccaagctacacgtgtatctgaaggggattactcttataaaccttctgtcacaacgaaagatgaaattggtcaattatcgcaggcatttaatcagatgagtacagaaatcgaagagcatgtcgacgcattatccacatctaaaaatattagagacagcttaattaactctatggtagaaggtgtcctaggtattaatgagagtcgacaaattatcttatctaataagatggcgaatgatattatggacaatattgatgaagatgctaaagctttcttattaagacaaattgaagatacttttaaatcaaaacaaacggaaatgcgtgatttagaaatgaatgcacgattctttgttgtgaccacaagctatatcgataagattgaacagggaggtaaaagtggtgttgttgtgacagttcgtgatatgactaatgagcacaatctagatcaaatgaagaaagatttcattgctaatgtatcacatgaattacgaacacctatatcattactacaaggttatactgaatcaattgtagatggtattgttacagaaccggatgaaataaaagaatcgctcgccgttgtccttgatgaatcgaaacgtttaaatcgattagttaatgaattgttaaatgtcgcacgcatggatgctgaagggttatccgtaaataaagaagttcagcctattgcagcgttactagataagatgaaaattaagtatcgccaacaagctgatgatttaggtctaaatatgacttttaattattgtaagaagcgtgtttggagttatgatatggatcgcatggaccaagtactaacgaacttaattgataatgcatcacgttatacgaaacctggagatgaaattgcaattacttgtgatgaaaatgaaagcgaagatattttatacattaaagatacaggcacaggcattgcaccagaacatttacaacaagtatttgatcgtttttataaagttgatgcagcgagaacgcgaggtaaacaaggtaccggtttaggtttgttcatttgtaaaatgattatcgaagagcatggtggttccattgatgttaaaagcgaattaggaaaaggcacaacatttattattaaactaccaaaaccagaataa

SEQ ID NO: 8001 - DNA, 243 bp, Staphylococcus aureus
atggcaggtggaccaagaagaggcggacgtcgtcgtaaaaaagtatgctatttcacagcaaatggtattacacatatcgactacaaagacactgaattattaaaacgttttatctcagaacgcggtaaaattttaccacgtcgtgtaactggtacttcagctaaatatcaacgtatgttgactacagctatcaaacgttctcgtcatatggcattattaccatatgttaaagaagaacaataa

SEQ ID NO: 8002 - DNA, 2262 bp, Staphylococcus aureus
atgacaattaataaagtaaccgttcttggcgcaggcacgatgggcgctcaactggcagcactctttgtgaatgctggacttaaagtaaaactattagatattgtagtggacaaaaacgatccaaatctcattgcgaaaaaatcttacgataaaattacagataagaaacggccgctactattcgacttaaatctagtgagtcatttaacatatggtaattttgatgatgacttggtaaatgatgatgctgatttatatatcgaagcagtcaaagaagatattgaaattaagcatgctgtttggcaacaagttctacaacatgctaaagaagatgctttatttgctacaaatacatcaggtattccaattaatgcgattgctcaagcatttaacgagaaggatcaagaacgattctttggtctacatttctttaacccaccacgtattatgaaattagtggagttaatacctacgtcacacacgaaggaatctatcatattagatgtaaaaaatttcgcgcaaaatgtattaggtaaaggtgtcattgtcgtcaatgatgtgcctggctttgtcgcaaatagagtcggcacgcaaacaatgaatgatattatgtatcgcgccgagcaacacaagttaagcattgtagatgtggatgctttaactgggcaagcgattggtcgtcctaaaacaggtacatatgccctatccgacctagtcggtttagatattgcagtgtctgtaattaaaggcatgcaacaagtacctgaagaaacgccttattttcatgatgtcaaaattgtaaatacgttgtttgacaatggcgcactcggacgtaaaacgaaacaaggattttacaaaaaggataaagaaactaaagctcgacttgtttacgatgttgaaaaacaagattatgtacctgtatcgcaaccacaattaccaattttaaatgaatttaataaagacttagtgcataaccttgatgtcatattcaatgcgcaagacgaagcgggactatttttatgggagacattacgtaataatttctattactctgctatcaatgtacctaaagctaccgatgatttccgagacatagaccgtgcgcttgtctgggggttcaactggaaacttggtccattccaattatgggatgcaatgggatacgaacgtgttaaaacacgtatggaagacgaacttggagacttaccacaatggattagtgatttagatggtggcttttataaacaagatgagaccattgaatatgcaacacctgtttctcacttcgtaaaagatgaactttgggataaaggtgatgccaaactttccgtaactcatgatgatcaactgttactgaaattacaaagtaaaaataatgtcattaccgatgaattcaacgatgcgttagttgatgccattgatttactggaaaatgaccattacacaagtatggtcatttatgcagatggtaataatttcagtgtgggtgctaaccttttcttaatgaaaaaggcgcatgaagacggtcttgtagatgatgtcgttgcacaatcaattgataaattacattatagctttaatcgtttgaagtatagtttgaaaccagtagtcacagctgttcaaggtcgtgccttaggcggtggctgtgagcttgtactttactcacctattgttgtcgctgcaagtgaaacatatataggtcttgttgaagcaggcgttggcttattaccgagtggcggtggccttgcagaaatggctgatcgcatattacgcacatcgcataagtttgatgacaaacaagcttccatgacaaaagtactgacgaatatcgcatttgcgaaagtctctacaaatgcctttgaggcacgtcgttatggttatttacgtgatacagatacgattattttcaatacagcacaacgtgtcgaagttgcgctcaaacgtgcgaaatatgaagcagaaacaaactatattccgaatcctagacatcaatatatcgctttaggtgaagacttcaaagcattgatccaaggacaattagatgcgcaaagacgggggcattttattagcgaccatgattatcatatcgccttaaatatcgccacaattttagcgggtggtgatttaccaagaaatacatttataaatcaacgttacattcaatcgttggagaaaattggctttattgacttactaaaatctaaaaaatcatatgaaagaattgcacatatgttaaaaactggtaagccattacgtaattaa

SEQ ID NO: 8003 - DNA, 402 bp, Staphylococcus aureus
atggctgtagaaaaagtgtaccaaccatatgacgaacaagtttataatagtataccgaagcaacaaccacaaactaagcccgaaaagaagactgtttcgagaaaagtggttgtacaattaactaaatttgaaaaagttttatacataactttgattactgtaattgctatgttaagtatttatatgctatctttaaaaatggatgcgtatgatacgcgaggaaagattgcagatttagattataaaatagataaacaatcaagtgaaaacagtgctttacaatctgaaatcaaaaagaattcttcttatgaacgcatatacgaaaaggctaagaaacaggggatgagccttgagaacgataatgtaaaggtagtgcgtagtaatggcgaagcaaaaaattaa

SEQ ID NO: 8004 - DNA, 933 bp, Staphylococcus aureus
atggcgaaaatagtagtagcattaggtggtaatgctttaggaaaatcacctcaagaacaactcgagcttgttaaaaatactgcgaaatcattagtaggattaataacaaaaggacatgagattgttattagtcatggtaatggaccacaggttggaagcattaatttgggacttaactatgctgcagaacataaccaaggtccggcatttccatttgctgaatgtggcgcaatgagtcaagcttacatcggctatcaattacaagaaagcttacaaaatgaattgcattctattggaatggataaacaagtggtaacactagtgacacaagttgaagttgatgaaaatgatccggcatttaacaatccttcaaaaccaattgggttattttacaacaaagaagaagctgaacaaattcaaaaagaaaaaggatttatatttgttgaagatgctggaagaggatatagacgcgttgttccttcaccacaacccatctctattattgaattagagagtattaaaacacttattaaaaatgatacactcgttattgctgctggtggtggaggtataccagtaattagagagcaacatgatggttttaaaggtattgatgcagttatagacaaagataaaacaagtgcgttgttgggtgctaatattcaatgcgatcaattgattattttaacagcaattgattatgtatatattaattttaacactgaaaaccaacagcctttgaaaacaacaaatgttgatgaattaaaacgatatatagacgaaaatcaatttgcaaaaggaagtatgttaccaaaaattgaagcagccatatcatttattgaaaacaatccaaaaggaagtgtgcttataacatcattaaatgaattagatgctgccttagagggtaaagtaggtactgtgattaaaaagtaa

SEQ ID NO: 8005 - DNA, 396 bp, Staphylococcus aureus
atgattaaatgtgtctgtttagttgaagaaacagctgataaaatattgcttgttcaagtaaggaatcgcgaaaagtattatttcccaggtggtaaaatagaagaaggagaatcacaagtacacgcgctgttaagagaagtaaaagaagaattaaatttaacattaacaatggatgaaattgaatatatcgggacaattgtaggtcctgcatatccacaacaggatatgttaactgagttaaatggatttcgcgcattaaccaaaatcgattgggaaaacgtaactatcaataatgaaattacggatatacgctggattgataaagataatgatgcgttgattgcgcctgctgtcaaagtttggattgaaacgtatggtggtaaacatgacaaataa

SEQ ID NO: 8006 - DNA, 558 bp, Staphylococcus aureus
atgaagcgattattcgatgtagtgagttcaatatatggtttagtagttttaagtccgattctgttaattacagcattactaattaaaatggaatcacctggaccagccattttcaaacaaaaaagaccgacgattaataatgaattgtttaatatttataagtttagatcaatgaaaatagacacacctaatgttgcaactgatttaatggattcaacatcgtatataacaaagacagggaaggtcattcgtaagacctctattgatgaattgccacaattattgaatgttttaaaaggagaaatgtcaattgtaggtcctagaccagcgctttataatcaatacgaattaatcgaaaaacgtacaaaagcgaacgtgcatacgattagaccaggtgtgacaggactagctcaagtgatggggagagatgatattactgatgatcaaaaagtagcgtatgatcattattacttaacacatcaatctatgatgcttgatatgtatatcatatataaaacaattaaaaatatcgttacttcagaaggtgtgcatcactaa

SEQ ID NO: 8007 - DNA, 1929 bp, Staphylococcus aureus
atgatacttttacaactcaatcatatatcaaaatcgttcgatggtgaagatatatttactgatgttgattttgaagtaaaaactggtgaacgaattggtatcgtaggaagaaatggcgccggtaaatcaacattgatgaaaattatagctggtgtagaaaactatgattctggaaatgtgtcaaaaattaaaaacttaaaactaggttatttaactcaacaaatgactttaaattctaatgcaacagtttttgaagaaatgtcaaaaccatttgaacatattaaacgaatggaaagcttaatcaaagaagaaacagattggttatcaaaacatgcaaatgattacgatagtgatacatataaaacacatatgtcccgttatgaatctttatcgaatcaatttgaacaattagaaggatatcaatatgaaagtaaaattaaaacagtacttcacgggttaaattttagtgaagaagatttcaataaacctatcaatgattttagcggcggccaaaaaacacgtttatctttagctcaaatgctattaaacgaacctgatttattacttttagatgaacctactaaccacttagatttagaaacgacaaagtggcttgaagattatctacgttattttaaaggtgcaatcgtcatcatcagccatgatcgttactttttagataaaatagttactcaaatttatgatgtggctttaggtgatgtcaaacgctatgttggtaattacgaggaatttatacagcaacgggatttatattatcaaaaacgaatgcaagaatatgaaagtcaacaagcagaaataaaacgattagaaacttttgttgagaaaaatattacccgtgcttcaacaagtggaatggcaaaaagtagacgtaagattttagaaaaaatggaacgcattgataaaccaatgttagatgccaaaagtgcaaatattcaatttggctttgaccggaatacaggtaatgacgtcatgcatgtaaaaaatttagaaatcggttatcaaactgcaattaccaaacctatcagtatagaggtctctaaaggcgatcatatagcaatcattgggccaaatggtattggaaaatcgaccttaattaaaactattgctaatcaacaaaaagcgcttaatggcgatattactttcggcgcaaatttacaaattggttattatgatcaaaagcaagcagaatttaaatctagtaaaacgattttagattatgtgtgggatcaatatccgttaatgaatgaaaaagatattcgagcagttcttggacgtttcttatttgtacaagacgatgttaaaaagataattaatgatttatctggtggtgaaaaagcacgtttacaactagcactacttatgttgcaacgtgacaatgtacttattttagatgaacctaccaaccacctcgatatagattcaaaagaaatgttagagcaagcactccaacattttgaaggaacaatactatttgtttcccatgatcgttactttattaaccaattagcaaacaaggtatttgatttaacaattgatggcggaaagatgtatttaggagattatcaatattacattgaaaaagttgaggaagccgaagcgttgaaagcgcaccaagaagaacagtcagttaacgtacaagcacataaaaagtctatggaacaatcgtcgtatcataaccaaaaagaacaaagacgtgaacaacgcaaacttgaacgacaaatatccgagtgtgaaaatgaaatagaaactttagagactactatcttacaaatagacgagcaattaacccaaccagaagtgtataacaatccacaaaaagcaaacgaattagctatccaaaaacaagatagcgaacaaaaattagaacacgctatgtctaaatgggaagaattacaacaaaaactataa

SEQ ID NO: 8008 - DNA, 738 bp, Staphylococcus aureus
atgactaaagaattagaacgattacaaaaacgtatagctaatagcggttatacttcaagacgtaaggcagaaactttaatttctgaaggaaaagtgaaagtgaatggtacgactgtcactgaattaggaacaaaagtgaagccatcagatacgattgaagttgaaggtattaaaatagaactagaagacaaaatttacattttattccataaaccaactcaagtgataacaagtgtatctgatgatagaggacgtacagtggttacagattactttaaagatatagaagcacgtatttatcctgttggtcgtttagactatgatacttctggattgttattacttacaaatgatggtgaatttactaatttaatgacacatccaagatatcaaattaagaagaaatatgtagcaaaattaaaaggttacttaatgagagaagaagtgaaagccctagaaaaaggtattgaattagaagatggtatgacgcaaccggctgaagtgaaagttaagaaacaagataaagataaaaacacaacattggttgaaattacaattacagaaggtcgtaatcgccaagtcagaagaatgttcgaacattttggtcatcaagtgacgaaactgtctcgtattgaatatgggcctttaaatgttgtcggtttgaatgctggtgaaggacgtgtattgacgcctcatgaagtaaaagtgatgcgtcatttagcagaacatgggaaataa

SEQ ID NO: 8009 - DNA, 1302 bp, Staphylococcus aureus
atgtctaaattattaatgataggcactggtccggtcgcaatccaattagcgaatatttgctatttaaaatcagattatgagattgatatggttggacgtgcctcaacatcagaaaaatcaaaacgcttatatcaagcgtataaaaaagagaaacaatttgaagtcaaaatacaaaacgaggcgcatcaacatctggaaggtaagtttgaaattaatcgtttgtataaagatgttaaaaacgttaagggtgaatacgaaacggttgtcatggcatgcacagcagatgcttattatgacacactacagcaattgtcgttagaaactttgcaaagtgtcaaacatgtcattttaatttcaccgacatttggatcgcaaatgattgtggaacaatttatgtctaagttcagtcaggatatcgaagtgatttcattttcaacttatcttggcgatacacgtattgttgataaagaagcacctaatcatgtgttgacaacaggtgtaaaaaagaaattgtacatgggatcgacacattcaaactcaacaatgtgtcaacgaatctctgctttagctgagcaattgaagattcaattagaagtcgttgaatcgccactgcatgctgaaacacgtaacagttcgctttatgtgcacccgccactatttatgaatgacttttcattgaaagccattttcgaaggaacggatgtaccggtttatgtgtataagttatttcctgaaggaccgataacgatgacattaatccgtgaaatgcgtttaatgtggaaggaaatgatggctattttacaagcatttagagtgccgtcagtcaacctgcttcaatttatggtgaaggaaaattatccagtacgtcctgaaactttggatgaaggtgatattgagcatttcgaaatcttgccagatatcttacaagaatatctgctttatgtaagatacaccgcaatcctcattgatccattttcacagccagacgaaaacggacattactttgatttttcagctgtaccatttaagcaagtctataaaaatgaacaggatgttgttcaaattccaagaatgccaagtgaagattattacagaacggcgatgattcagcatattgggaaaatgttaggtatcaaaacgccaatgattgatcagttcctaactcgctatgaagcaagttgccaggcgtacaaggatatgcaccaagatcaacaactatcttctcaatttaatacaaatctatttgaaggagataaggcactcgtcacaaaatttttggaaatcaatagaacgctttcataa

SEQ ID NO: 8010 - DNA, 948 bp, Staphylococcus aureus
atgaggaaacgtgctagaatcatttataacccgacatcaggtaaagagctatttaaaagagaattacctgatgccttaataaaattagaaaaagcgggatatgaaacgagtgcatatgcaaccgagaaaataggtgatgccacacttgaagcagaaagagctatgcatgaaaattatgatgtattaatcgctgcaggtggtgatggaacattaaatgaagtagttaatggtatcgcagaaaagcctaatcgtcctaagctaggtgtcattcctatgggtactgttaatgactttggacgtgcattgcatatacctaatgacatcatgggggcacttgatgtcatcattgaaggtcattctactaaagtagatattggtaaaatgaataatcgatactttattaatttagctgcaggcggacaattgacgcaagtctcttatgaaacaccgagtaaattgaaatctattgttggtccatttgcttattacatcaaaggtttcgaaatgttacctcaaatgaaagctgtagatttaagaattgaatatgatggtaatgttttccaaggagaagcattattattctttttaggtttaacaaattcaatggcaggatttgaaaaattagtgccggacgctaagttagatgacggctattttacgttaattatagttgaaaaatcaaaccttgcagaacttggtcatattatgactttagcttcaagaggagaacatactaagcatcctaaagttatttatgaaaaagcaaaggcaattaatatttcatcattcacagacttacaactaaatgtagatggagaatatggtggtaaattaccagcgaatttcttaaatctagaacgtcatatagatgtctttgcacctaatgatattgtaaatgaagagttaataaataatgatcatgttgatgacaatttaatcgaagaataa

SEQ ID NO: 8011 - DNA, 1353 bp, Staphylococcus aureus
ttgaaaaagaaaaacatttattcaattcgtaaactaggtgtaggtattgcatctgtaactttaggtacattacttatatctggtggcgtaacacctgctgcaaatgctgcgcaacacgatgaagctcaacaaaatgctttttatcaagtgttaaatatgcctaacttaaacgctgatcaacgtaatggttttatccaaagccttaaagatgatccaagccaaagtgctaacgttttaggtgaagctcaaaaacttaatgactctcaagctccaaaagctgatgcgcaacaaaataacttcaacaaagatcaacaaagcgccttctatgaaatcttgaacatgcctaacttaaacgaagcgcaacgtaacggcttcattcaaagtcttaaagacgacccaagccaaagcactaatgttttaggtgaagctaaaaaattaaacgaatctcaagcaccgaaagctgataacaatttcaacaaagaacaacaaaatgctttctatgaaatcttgaatatgcctaacttaaacgaagaacaacgcaatggtttcatccaaagcttaaaagatgacccaagccaaagtgctaacctattgtcagaagctaaaaagttaaatgaatctcaagcaccgaaagcggataacaaattcaacaaagaacaacaaaatgctttctatgaaatcttacatttacctaacttaaacgaagaacaacgtaacggcttcatccaaagccttaaagacgatccttcagtgagcaaagaaattttagcagaagctaaaaagctaaacgatgctcaagcaccaaaagaggaagacaacaaaaaacctggtaaagaagacggcaacaaacctggcaaagaagacggcaacaagcctggtaaagaagacaacaaaaaacctggtaaagaagacggcaacaagcctggtaaagaagacaacaacaaacctggcaaagaagacggcaacaagcctggtaaagaagacaacaacaagcctggtaaagaagacggcaacaagcctggtaaagaagacggcaacaaacctggtaaagaagacggcaacggagtacatgtcgttaaacctggtgatacagtaaatgacattgcaaaagcaaacggcactactgctgacaaaattgctgcagataacaaattagctgataaaaacatgatcaaacctggtcaagaacttgttgttgataagaagcaaccagcaaaccatgcagatgctaacaaagctcaagcattaccagaaactggtgaagaaaatccattcatcggtacaactgtatttggtggattatcattagccttaggtgcagcgttattagctggacgtcgtcgcgaactataa

SEQ ID NO: 8012 - DNA, 360 bp, Staphylococcus aureus
atgatacatggaattggtgtagatttaatcgaaatcgatcgaataaaagtgttatatagtaagcagccaaaattggttgagcggattttaactaaaaatgaacagcacaaattcaacaatttcacacatgagcaacgtaaaattgaatttttagctggcaggtttgctacaaaagaagcgttcagtaaagcattaggcacaggcttaggaaaacatgtagcttttaacgatatagactgttacaacgacgaacttggcaaaccaaagattgattacgaagggttcatcgtacatgttagtatctcacacactgagcattatgcgatgagccaagttgttttagaaaagtcagcattttaa

SEQ ID NO: 8013 - DNA, 1149 bp, Staphylococcus aureus
atgtcggataaatattatagatctgcgtatatgaatgtagatttaaacgctgttgcatcaaatttcaaagtattcagtacattgcatccaaataaaacagtgatggctgtcgttaaagccaatgcctatggactaggtagtgttaaagtagcacgtcatttaatggaaaatggcgccacattttttgctgtagcaacgttagatgaagcgatagaacttagaatgcatgggattactgctaaaattttagtcttaggtgtgttaccagctaaagatattgataaagcgatacaacacagagttgccttaacggttccgtctaaacagtggttgaaagaagcaattaaaaacatttctggtgagcaagagaaaaagttatggttgcacattaaattagatacaggaatgggacgtttaggtattaaagatactaatacgtatcaagaagtgattgaaatcattcaacaatatgagcaacttgtatttgaaggcgtgtttacacactttgcctgtgctgacgaaccaggagatatgacaactgaacaatatcaacgttttaaagatatggtcaatgaagcaattaaacctgaatatatacattgtcagaactcagcaggctctctattaatggattgccaattctgtaatgcaataagaccaggaatttccctttatggatattatccatcagagtatgtacagcaaaaagttaaagtacaccttaaaccaagtgtgcaattaattgctaatgtagttcaaacaaagacgctacaagcgggtgagtctgtaagttatggtgcaacttatacagctactgacccaactacaatagctttgttacctattggatatgcagatggctatttacgcataatgcaaggtagctttgtaaatgtaaatggtcatcaatgcgaagttattggtcgcgtatgtatggatcagacaattgttaaagtgccagatcaagttaaagctggagattcggtgattttaatagataatcatagagaaagtccacagtcggtagaggtggtagctgaaaagcaacatactattaattatgaagtgctttgtaacttgtcgagacgtttgccgcgaatctatcatgatggtgatcaacgttttgtaacaaatgaattgttaaaataa

SEQ ID NO: 8014 - DNA, 972 bp, Staphylococcus aureus
atgatagctgttaattggaacacacaagaagatatgacgaatatgttttggagacaaaatatatctcaaatgtgggttgaaacagaatttaaagtatcaaaagacattgcaagttggaagactttatctgaagctgaacaagacacatttaaaaaagcattagctggtttaacaggcttagatacacatcaagcagatgatggcatgcctttagttatgctacatacgactgacttaaggaaaaaagcagtttattcatttatggcgatgatggagcaaatacacgcgaaaagctattcacatattttcacaacactattaccatctagtgaaacaaactacctattagatgaatgggttttagaggaaccccatttaaaatataaatctgataaaattgttgctaattatcacaaactttggggtaaagaagcttcgatatacgaccaatatatggccagagttacgagtgtatttttagaaacattcttattcttctcaggtttctattatccactatatcttgctggtcaagggaaaatgacgacatcaggtgaaatcattcgtaaaattcttttagatgaatctattcatggtgtatttaccggtttagatgcacagcatttacgaaatgaactatctgaaagtgagaaacaaaaagcagatcaagaaatgtataaattgctaaatgacttgtatttaaatgaagagtcatacacaaaaatgttatacgatgatcttggaatcactgaagatgtgctaaactatgttaaatataatggaaacaaagcactttcaaacttaggctttgaaccttattttgaggaacgtgaatttaacccaatcattgagaatgccttagatacaacaactaaaaaccatgacttcttctcagtaaaaggtgatggttatgtattagcattaaacgtagaagcattacaagatgatgactttgtatttgacaacaaataa

SEQ ID NO: 8015 - DNA, 537 bp, Staphylococcus aureus
atgagtcgtgttggtaagaaaattattgacatccctagtgacgtaacagtaacttttgatggaaatcatgtaactgttaaaggtcctaaaggtgaattatcaagaactttaaatgaaagaatgacattcaaacaagaagaaaacacaattgaagttgtaagaccatctgattctaaagaagatagaacaaaccatggtacaactcgtgctttattaaacaatatggtacaaggtgtttctcaaggatacgtaaaagtacttgaacttgttggtgtaggttaccgtgctcaaatgcaaggtaaagacttaatccttaacgttggttattctcacccagtagaaattaaagctgaagaaaacattactttctcagttgagaaaaacacagtcgttaaagttgaaggtatttcaaaagaacaagttggagcattagcatctaacatccgttcagtaagacctccagagccttacaaaggtaaaggtattcgttaccaaggtgaatacgttcgccgtaaagaaggtaaaactggtaaataa

SEQ ID NO: 8016 - DNA, 879 bp, Staphylococcus aureus
atgactgaatttgatttatcgacacgagaaggtcgttggaaacactttggttccgtagatcctattgaaggcacgaaacctactactaagaacgaaatgacagatttacaaagtacacataaagattttttatttgaaatagaagaagttggtattaaaaacttagtgtaccctgtacttgttgaccagtatcaaacagctggcacatttagtttttcaacaagtttaacaaaagacgaaaaaggtattaatatgagccgtataattgaaagtgttgaaaagcactatgataatggtattgaacttgaatttaatacactttatcaggtgttacgcactttacaaacgaatatgaaacaaaatgcggcaggcgttgatgtttctgggaaatggttctttgaccgctatagtccaaccacaaatattaaagcagttggtaatgccgatgtcacttatggattagcaattgacggtgataaagttacacgtaaagaacttactattgaagcaactgtcacaacgctatgcccttgttcaaaagaaataagtgagtattcagcgcacaaccaacgtggtgttgtcactgttaaaacatatattaataaagatcaaaacatagttgatgactataaaaacaaaattttagatgcaatggaagctaatgcaagttcaattctataccctattttaaaacgtcctgatgaaaaacgtgtgacagagcgtgcatatgaaaatccacgttttgtcgaagacttaattcgtttaattgccgcggacttagttgaatttgattggttagacggtttcgatatcgaatgtcgtaatgaagagtctatccatcaacatgatgctttcgctaaattaaagtatcgcaaataa

SEQ ID NO: 8017 - DNA, 1200 bp, Staphylococcus aureus
atgcataaattgattataaaatataacaaacaattgaagatgctcaatttgcgagatggtaagacatatactattagcgaagacgagcgtgcagatattacgttgaaatcgttaggcgaagtcattcatttagaacaaaataatcaaggtacttggcaagcgaatcatacttctattaataaggtgcttgttagaaaaggtgaccttgatgacattacattacagctttatacagaagctgattatgcatcatttgcgtatccttcaattcaagatacgatgacaattgggccaaatgcgtatgatgatatggttattcaaagcttgatgaatgccatcattattaaagattttcaatcaatacaagaatcacaatacgtacgcattgtgcacgataaaaatacagatgtgtatattaactatgaactacaagagcaattaacaaacaaagcttacattggtgatcatatttatgttgaagggatatggctcgaagtacaagctgatggtttaaatgtattgagtcagaatacagtggcatcgtcattaattcgcttaacacaagagatgccacatgcacaggcagatgattacaatacgtaccatcgttcgccaaggattattcaccgtgaaccgaccgatgatattaagattgaaagaccgccacagccaatacagaagaacaatacagtgatatggcgttccattataccgccattagtaatgattgctttaactgttgtcatctttttagtgagaccaattggtatttatattttaatgatgattggtatgagtacagtaacgatagtatttggtattacaacgtatttctctgaaaagaaaaagtataacaaagatgttgaaaaacgagagaaagattacaaagcttatttggataataaatctaaagaaattaataaagcgattaaagcacaacgttttagtttgaattaccattatccaacggttgctgaaattaaagatatcgttgaaacgaaagcaccaagaatatatgaaaaaacatcgcatcatcacgatttcttacattataagttaggtattgcgaatgtagaaaagtcattcaaattagattaccaagaagaagaatttaaccaacgtcgtgatgaactattcgacgatgctaaagaattgtatgaattttacacagatgtagaacaaagcaccattaatcaatga

SEQ ID NO: 8018 - DNA, 1066 bp, Staphylococcus aureus
atgaaagaacttgtatcaactggcacgtattggacgttcgttaggtattcatttaatacttgcgacacaaaaaccatcgggtgttgttgatgaccaaatttggtctaactctaaatttaagttggcattaaaagtacaagatagacaagacagtaatgaaattttaaaaacaccagatgcagcagacattacattaccaggtcgtgcgtatttacaagttggtaataatgaaatttatgaattattccaatctgcatggagtggtgcaacatatgacatcgaaggcgataaattagaagttgaagataagacgatttacatgattaatgactatggtcaacttcaagcaatcaacaaagacttgagtggacttgaagatgaagaaacgaaagaaaatcaaactgagttagaagcggtcatagatcatatcgaatctattacaacacgattagaaatcgaagaagttaagcgtccatggctaccaccattgccagaaaatgtatatcaagaagatttagtagaaacagatttcagaaaattatggtcagatgatgcaaaagaagtggaattaacattaggacttaaagacgtaccagaagaacaatatcaaggaccgatggtattgcaattgaaaaaagctgggcacatcgcgttaatcggaagtccaggatatggtagaacaacgttcttacacaacattattttcgatgttgcaagacaccatcgtcctgatcaagcacacatgtacttgttcgatttcggtaccaatggtttgatgccagttacagacataccacatgtcgctgattactttacagtagatcaagaagacaagattgctaaggcgatacgtatatttaatgatgaaattgatcgtcgtaagaagattttaagtcagtatcgtgtcactagtatttctgaatatcgaaaattaactggtgaaacaattccgcatgtctttattcttattgataactttgacgcagtaaaagattcacctttccaagaagtttttgaaaatatgatgattaaaatgacgcgtgaagggctagcattagacatgcaa

SEQ ID NO: 8019 - DNA, 941 bp, Staphylococcus aureus
ttacaaggagtaaaacaaaagtggttgagaaagcctgaaacagagttgacgattgatcgtgagtttgaccgaacatcagacttacctgttggatttactgagcaagagcaaattgatttcgcgttacaagcgttgaaattgatggatttaaccgaagcatttgcgccgttcgttgtgttagcaggtcatgctagtcattctcacaataatccacatcatgcatcacttgaatgtggggcttgtggtggcgcatcaagcggttttaatgctaagttattagcgatgatatgtaatcgtccaaatgtcagacaaggattaaaacaatcaggtgtgtatattccagagacaactgtttttgcggtagcagaacatcatacgtctactgatacgttggcatgggtatatgtgccagacacattatcttctattgctttagatgcatatgaatcattgaatgacgcgatgccgatgatttctgaacacgcgaatcgcgaacgtttggacaaactgccaacgattggtcgtgtgaatcatccagtggaagaagcgcagcggtttgcgagtgattggagtgaggtacgtccagaatggggattggctaaaaatgcatcatttataattggacgacgccaattaacaaaaggcattgatttagaagggcggacatttttacacaattatgattggcgtaaagataaagatggcacattattaaataccatcatttctggtccggcacttgtggcacaatggattaatttacaatattatgcgtcgacagttgcgccgcatttttacggaagtgggaataaagcgacacaaaccgtcacgtcaggtgttggtgtcatgcaaggtaatgcgagtgatctgatgtatggcttatcatggcaatctgttatggctgctgatcggacgatgtatcattcgccaattcgtttact

SEQ ID NO: 8020 - DNA, 1908 bp, Staphylococcus aureus
atggctaaatatcgagggaaaccgtttcaattatatgtaaagttatcgtgttcgacaatgatggcgtcaagtatcattttaacgaatatcttgccgtacgatgcccaagctgcatctgaaaaggatactgaaatttcaaaagagatattatctaagcaagatttattagacaaagttgacaaagcaattcgtcaaattgagcaattaaaacagttatcggcttcatctaaagcacattataaagcacaactaaatgaagcgaaaacagcatcgcaaatagatgaaatcataaaacgagctaatgagttggatagcaaagaaaataaaagttctcacactgaaatgaacggtcaaagtgatatagacagtaaattagatcaattgcttaaagatttaaatgaggtttcttcaaatgttgataggggtcaacaaagtggcgaggacgatcttaatgcaatgaaaaatgatatgtcacaaacggctacaacaaaatatggagaaaaagatgataaaaatgatgaagcaatggtaaataaggcgttagaagacctagaccatttgaatcagcaaatacacaaatcgaaagatgcattgaaagatgcatcgaaagatccggcagtgtctacaacagatagtaatcatgaagtagctaaaacgccaaataatgatggttctggacatgttgtgttaaataaatttctttcaaatgaagagaatcaaagccatagtaatcaactcactgataaattacaaggaagcgataaaattaatcatgctatgattgaaaaattggctaaaagtaatgcctcaacgcaacattacacatatcataaactgaatacgttacaatctttagatcaacgtattgcaaatacgcaacttcctaaaaatcaaaaatcagacttaatgagcgaagtaaataagacgaaagagcgtataaaaagtcaacgaaatattattttggaagaacttgcacgtactgatgataaaaagtatgctacacaaagcattttagaaagtatatttaataaagacgaggcagataaaattctaaaagatatacgtgttgatggtaaaacagatcaacaaattgcagatcaaattactcgtcatattgatcaactatctctgacaacgagtgatgatttattaacgtcattgattgatcaatcacaagataagtcgctattgatttctcaaatcttacaaacgaaattaggaaaagctgaagcagataaattggctaaagattggacgaataaaggattatcaaatcgccaaatcgttgaccaattgaagaaacattttgcatcaactggcgacacgtcttcagatgatatattaaaagcaattttgaataatgccaaagataaaaagcaagcaattgaaacgattttagcaacacgtatagaaagacaaaaggcaaaattactggcagatttaattactaaaatagaaacagatcaaaataaaatttttaatttagttaaatcggcattgaatggtaaagcggatgatttattgaatttacaaaagagactcaatcaaacgaaaaaagatatagactatattttatcaccaatagtaaatcgtccaagtttactagatcgattgaataaaaatgggaaaacaacggatttaaataagttagcaaatttaatgaatcaaggatcaaatttattagacagtattccagatatacccacaccaaagccagaaaagacgttaacacttggtaaaggtaatggattgttaagtggattattaaatgctgatggtaatgtatctttgcctaaagcgggggaaacgataaaagaacattggttgccgatatctgtaattgttggtgcaatgggtgtactaatgatttggttatcacgacgcaataagttgaaaaataaagcataa

SEQ ID NO: 8021 - DNA, 804 bp, Staphylococcus aureus
atgactaaaacaaaaattatgggcatattaaacgtcacacctgattcattctcagatggtggaaaatttaataatgttgaaacagctataaatagagtgaaagccatgatagatgaaggtgctgacattatagatgttggaggtgtttcaacgagacccggtcatgaaatggttacattagaagaagagctgaacagagtattacctgttgttgaagctattgtcggttttgatgtaaaaatttcagtcgatacatttcgaagtgaggttgctgaagcatgtttaaaattaggcgttgatatgattaatgatcaatgggcgggtctgtatgatcatcgtatgttccaaattgtagctaaatatgacgcggaaattattttaatgcataatggaaatggtaatcgtgatgaaccggttgtcgaagaaatgttaacatctttgttagcacaagcacatcaagctaaaatagctggtataccttcaaataaaatttggctagatccaggtataggtttcgctaaaactagaaatgaagaagccgaagttatggcaagactggatgaacttgttgcaacagaatatccagttttattagcgacaagccggaaacgtttcactaaagagatgatgggttatgatacaacaccggttgaaagagatgaagtaactgcagctacgactgcatatggtattatgaaaggcgttagagcagtacgcgttcataatgtcgagttgaatgctaaattagctaaaggtatagattttttaaaggagaatgaaaatgcaagacacaatctttcttaa

SEQ ID NO: 8022 - DNA, 1941 bp, Staphylococcus aureus
atgagttcacaaaaaaagaaaattagtctttttgcgttcttcttattaaccgtaataacgattaccttgaagacgtatttttcttattatgttgatttttctttaggtgttaaaggtttagtacaaaacttaatattattgatgaatccttatagtttagtagcactggttttaagtgtgttcctattctttaaaggcaaaaaagcattttggttcatgttcataggcggcttcttattgacgttcctattatatgccaatgttgtgtactttagattcttctctgattttttaacgtttagtactttaaaccaagtaggtaacgtagaatctatgggtggtgcggttagtgcatcattcaaatggtatgactttgtttatttcattgatacgttagtttacttattcattttaatatttaaaacaaaatggttagacacaaaagcatttagtaagaaatttgttcctgtcgtaatggcagcttcagtagcattattcttcttaaacttagcttttgctgaaactgacagaccagaattattaacacgtacatttgaccataaatatttagtgaaatatttaggaccttataactttacagtatacgatggtgttaaaactatcgaaaataatcaacaaaaagcgttagcatctgaagatgacttaacaaaagtattaaattatacgaaacaacgtcaaacagagcctaacccagaatattatggggtggcaaagaagaaaaatattattaagattcatttagaaagtttccaaaccttcttaattaataaaaaggttaatggtaaagaagtaacaccgtttttaaacaaattatcaagtgggaaagagcaattcacatacttccctaactttttccatcaaacaggtcaaggtaaaacatctgactctgaatttacaatggataacagtttatacggtttaccgcaaggttctgccttttcattaaaaggagataatacgtatcagtcattaccagcaattttagatcaaaagcaaggctacaaatctgatgtcatgcacggtgactataaaacattctggaacagagaccaagtatataaacactttggtatcgataaattctatgatgcaacatactatgacatgtcagataaaaacgttgtaaacttaggcttgaaagacaaaattttctttaaagattctgctaattatcaagctaagatgaaatcaccattctattctcatttaattacattgactaaccactatccattcacattagatgaaaaggatgcgactattgagaagtcaaacacaggtgatgcaacagttgatggttatattcaaacagcgcgttatttagacgaagcattagaagaatatattaatgacttgaagaaaaaaggattatatgacaattcagtgattatgatttatggtgaccactatggtatctctgaaaaccataacaatgccatggaaaaactattaggtgaaaaaatcacaccagctaaatttacagatttaaacagaactggtttctggattaaaatccctggtaaatctggtggtatcaataatgaatatgctggtcaagtcgatgtaatgccaacaattttacatttggctggtatagatacgaagaattatttaatgttcggtactgatttattctctaaaggtcataatcaagtagttccattcagaaatggtgactttataacaaaagattataaatatgttaatggtaagatttattctaataaaaataatgaactcataactactcaaccagctgatttcgaaaagaataaaaagcaagttgaaaaggatctcgaaatgagtgacaacgtgcttaatggtgatttgtttagattctacaaaaatccagacttcaaaaaggtaaatccttcgaagtataaatatgaaacaggacctaaagcaaactctaaaaaataa

SEQ ID NO: 8023 - DNA, 1119 bp, Staphylococcus aureus
atgttagttgcagtagtcaaagaattaaaacaaggtgaaggacgtgtagcttgcacacccgaaaatgtgcgtaagttaacggatgcaggacataaagtaattgttgaaaaaaatgctggcattggttcaggattttctaacgatatgtatgaaaaagaaggcgctaagatcgtaactcacgaacaagcatgggaagctgatcttgttatcaaagtaaaagaacctcatgaaagcgaatatcaatatttcaaaaagaatcaaattatctggggatttttacatctagcatcttcaaaagaaatagtagaaaaaatgcaagaagttggtgtaactgcgattagtggtgaaaccattataaaaaatggaaaagcagaattattagcgccaatgagtgctatagcaggtcaacgctcagcaattatgggagcttactactctgaagcacaacatggtggtcaaggtactttagtgactggtgtacatgaaaatgtggatatacctggtagtacatatgtgattttcggtggtggcgtagcagcaacaaatgcagcaaatgttgccttgggactaaatgctaaagtaatcattatcgagttaaacgatgaccgcattaaatatcttgaagatatgtatgcagaaaaagatgtcacagtagtcaaatcaacaccagaaaatttagcagaacaaattaagaaagcagatgtatttatttctacaattttaattccaggtgcgaaaccgccaaaattggttactcgtgagatggttaaatcaatgaaaaaaggttcagtattaatcgatatagctattgaccaaggtggaactattgaaacaattagaccaactacaatttctgatccagtgtatgaagaagaaggtgtgattcattatggtgtaccaaatcaaccaggagcagtcccaagaacttcaacaatggcattagcacaaggaaatattgattatatattagaaatttgtgacaaaggcttagaacaagcaattaaagataatgaagccttaagtactggtgtaaacatttaccaaggacaagtgacaaatcaaggattagcttcatcacatgacctagattataaagaaatattaaatgttatcgaatag

SEQ ID NO: 8024 - DNA, 2631 bp, Staphylococcus aureus
atggaaatgaaaccaaaatatgatcctcgtgaagttgaagcgggacgttatgaagaatgggtaaagaatggttattttaaaccgtcagaagataaatcaaaagaaacatatacaattgttatcccgccaccaaatgtaactggtaaattacatttaggacatgcatgggatacgactttacaagatatcattacacgtatgaaacgtatgcaaggatacgatacgttatacttaccaggtatggatcatgctggtattgcgacacaggcaaaggtagaagctaaattaaatgaacaaggaataactagatatgatcttggtcgtgaaaagtttttagaacaggcatgggattggaaagaagagtatgcgtcatttattcgtgcgcaatgggctaaattaggtctaggtttagattatagtagagaacgttttactttagatgaaggtttaagtaaagcagttaaaaaagtttttgttgatttatacaataaaggaattatttatcgtggcgaacgtattataaattgggatcctaaagcacgtacagctttatctgatattgaagtaatacatgaagatgttcaaggtgcgttttatcattttaaatatccttacgctgatggtgaaggttttattgaaattgcaacaacaagaccagaaacgatgttaggtgatacagcgattgttgttaaccctaatgacgaacgatacaaagatgtaatcggtaaaactgttatattaccaatcgtaggacgcgaactgcctattttagcagatgagtatgttgatatagacttcggttctggtgctatgaaagtgacaccagcacatgaccctaatgattttgaaattggtcaaagacatcaattagaaaatattatcgttatggatgaaaatggtaaaatgaacgacaaagcgggtaaatatgaaggtatggaccgttttgattgtcgtaaacagctagttaaagatttaaaagaacaagatttagttatcaagattgaagatcattttcattctgtaggtcattcagaacgatctggcgctgttgttgaaccatatttatcaacacaatggtttgtgcgcatggaagacttagcgaaacgttcattagataaccaaaaaacagatgatcgtattgatttttatccgcaacgtttcgaacatacatttaaccaatggatggaaaatattagagattggacgatttcaagacaattatggtggggtcatcaaattccggcttggtatcataaagaaacaggcgaaatatatgttggagaagaagcgccaactgatattgaaaattggcaacaagatgaagatgtattagatacgtggttctcaagtgctttatggcctttctctacgttaggttggcctgatttagaaagtgaagactttaaacgatactacccaacaaatgccttagttacaggttacgatattatctttttctgggtcgcacgcatgatattccaaggcttagaatttacagatcgtcgtccatttaatgatgtattattacacggtttagttcgtgctgaagacgggcgtaagatgagtaaatcattaggtaatggtgtggatccaatggatgttattgacgaatacggtgctgatagcttgcgttacttcttagcaacaggttcatctccaggacatgatttaagatactcaactgaaaaagttgagtcagtgtggaactttatcaataaaatctggaatggggcacgtttcagtttaatgaatatcggtgaagactttaaagttgaagatatcgatttaagtggtaacttatcattagcagataaatggattctaacacgtttaaatgaaacgattgcaacagttactgatttaagtgacaaatatgaattcggcgaagttggacgtgcattatataatttcatttgggatgatttctgtgattggtacattgaaatgagtaaaattccaatgaatagtaatgatgaagaacaaaaacaagttacacgttcagtattgagttatactttagacaatattatgagaatgctacatccattcatgccatttgtaacagagaaaatatggcaaagtttaccacatgaaggtgacacaattgttaaagcttcatggccagaagtgcgtgaatcattgatttttgaagaaagtaaacaaacaatgcaacaacttgttgaaatcattaaatctgtaagacaatcacgtgtagaagtaaatacgccattgtctaaagaaatacctattttaattcaagctaaagataaagaaattgaaacaactttatcacaaaacaaagattatttaatcaaattctgtaatcctagtaccttaaatattagcactgacgtggaaattcctgagaaagcaatgacatcagttgtaattgcaggtaaagtggtattaccattagaagggctaattgatatggataaggaaatcagccgtttggaaaaagaattagctaaacttcaaagcgaattagatagagtagataaaaagctctctaatgaaaactttgtaagtaaagcacctgaaaaggttataaatgaagaaaaacgtaaaaaacaagattatcaagaaaaatatgatggtgtgaaggcaagaattgaacaattaaaagcatag

SEQ ID NO: 8025 - DNA, 504 bp, Staphylococcus aureus
atgctaaatagagttgtattagtaggtcgtttaacgaaagatccggaatacagaaccactccctcaggtgtgagtgtagcgacattcactcttgcagtaaatcgtacgttcacgaatgctcaaggggagcgcgaagcagattttattaactgtgttgtttttagaagacaagcagataatgtaaataactatttatctaaaggtagtttagctggtgtagatggtcgcttacaatcccgtaattatgaaaatcaagaaggtcgtcgtgtgtttgttactgaagttgtgtgtgatagcgttcaattccttgaacctaaaaatgcgcaacaaaatggtggccaacgtcaacaaaatgaattccaagattacggtcaaggattcggtggtcaacaatcaggacaaaacaattcgtacaataattcatcaaacacgaaacaatctgataatccatttgcaaatgcaaacggaccgattgatataagtgatgatgacttaccattctaa

SEQ ID NO: 8026 - DNA, 1719 bp, Staphylococcus aureus
atgtctaaattaattaaaggtattgctgcatctgatggtgtcgcaattgctaaagcttatttattagttgagccagacttaacattcgacaaaaatgaaaaagtcactgatgttgaaggagaagttgcaaagttcaatagcgctatcgaagcttctaaagttgagttaactaaaattagaaataatgcagaggttcaactaggtgctgataaagctgctatctttgatgcacatttattagttttagatgaccctgaattaattcaaccaatccaagataagattaaaaatgaaaacgctaatgctgctacagcattaacggatgtaacaacacaatttgttacaatttttgaatctatggataacgaatacatgaaagaacgtgcggctgatattcgcgacgtttctaaacgtgtgttatcacatattttaggtgtagaattaccgaatccgagtatgattgatgaaagcgttgttattgtagggaatgacttaacgccatctgatactgctcaattaaataaagaattcgtacaaggttttgctacaaacattggcggaagaacaagtcactctgcaattatgagtcgttctttagaaattccagcaattgttggtacaaaatcaattactcaagaagttaaacaaggcgacattattatcgtagatggattaaatggtgatgtaatcgttaatccaactgaagatgagttaatcgcttatcaagataaacgtgagtgttattttgctgacaagaaagaattacaaaaactacgtgatgctgatactgttacagttgatggtgttcacgcagagcttgctgcaaatattggtacacctaatgatttgccaggtgttattgaaaatggtgcacaaggtatcggcttatatagaactgagtttttatatatgggtcgtgaccaaatgcctacagaagaagaacaatttgaagcttataaagaagtattagaagcaatggacggtaaacgtgttgttgtacgtactttagatataggtggagataaagaattatcatacttaaacttgcctgaagaaatgaatccattcttaggttaccgtgcgattcgtttatgccttgcgcaacaagatattttcagaccacagctacgtgcattattacgtgcatcagtttatggtaagttaaatatcatgttcccaatggttgcaacaattaacgaatttagagaagcaaaagctatattattagaagaaaaagaaaaccttaaaaatgaaggtcatgacatttcggatgatatagaattaggaatcatggtagagatacctgcaacagcagcattagctgatgtctttgctaaagaagtagatttcttcagtatcggtacaaatgatttaattcaatacacattagctgctgaccgtatgtcagagcgtgtatcatatctataccaaccatataacccttcaatcttacgtttagttaaacaagttattgaagcgtcacataaagaaggtaaatggacaggtatgtgtggtgaaatggctggagatgaaacagctattccattattgcttggtttaggtttagatgagttctctatgagtgcaacgtctattctgaaagcaagaagacaaattaatggtttaagtaaaaatgaaatgactgaacttgctaaccgtgcagtcgactgtgcaacgcaagaagaagttattgaattagttaacaactacgtaaaataa

SEQ ID NO: 8027 - DNA, 2235 bp, Staphylococcus aureus
atggcgaagcaaaaaattaaaattaaaaaaaataaaataggggcagtcctacttgttggtttattcggactgctcttttttatattggttttaagaatttcatatatcatgattactggacattctaatggtcaagatttagtcatgaaggcaaatgaaaagtatttagttaagaatgcacaacaaccagaacgaggaaagatatatgatcgtaatggtaaagtgctagcagaagatgtagaaagatataaacttgttgcagtaatagataaaaaggcgagtgccaattctaaaaaacctaggcatgtagttgataaaaaagagactgcaaagaaattatctacagtcattgatatgaagccagaggaaattgaaaagagacttagtcaaaagaaagctttccaaattgaatttggacgcaaaggaacaaatttaacgtatcaggacaaattgaaaatagagaaaatgaatttgcctggtatttctttattgcctgaaacagaacgcttttatccaaatggcaattttgcatcacacttaattggtagagctcagaaaaatccggatactggtgaacttaaaggtgcacttggagttgaaaagatttttgatagttatttaagtggatctaaaggatcattgagatatattcatgatatttggggatatatcgcaccaaatactaaaaaagagaagcagcctaaacgtggtgatgatgtccatttaacaatcgattcaaatattcaagtatttgttgaagaagctttagatggcatggttgaaagataccagccgaaagatttatttgcggttgtcatggatgccaaaactggagaaattttagcatacagtcagcgaccaacatttaatcctgaaactggtaaagactttggtaaaaagtgggcaaatgacctttatcaaaacacatacgagcctggatcaacatttaaatcatatgggttagcagctgctattcaagaaggtgcttttgatcctgataagaaatataaatctggacatagagatattatgggttcacgtatttcagactggaatagagtcggttggggtgaaatcccaatgtcactcggatttacttattcatctaatacattgatgatgcatttacaagatttagttggtgcagacaaaatgaaatcttggtatgaacgatttggatttggaaaatcaactaaaggtatgtttgatggagaagcacctggtcaaattggatggagtaatgagttgcaacaaaaaacgtcatcatttggtcaatcgacaacagtaacacctgttcaaatgttacaggcgcaatcagcgttctttaatgatggtaatatgttaaaaccatggtttgtgaatagcgttgaaaatcctgttagtaaaagacaattttataaaggtcaaaaacaaatcgcaggcaaaccaataacaaaagatactgctgaaaaagttgaaaagcaattggatttagttgtgaatagtaagaagagtcacgctgcaaactatcgtattgatggttatgaggtcgaaggtaagactggtacagcacaagtcgctgcacctaatggtggtggatacgttaaaggtccaaacccatattttgtaagttttatgggtgacgcaccgaagaaaaatcctaaagttattgtatacgctggtatgagcttggcacaaaaaaatgaccaagaagcttatgaattaggtgttagtaaagcgtttaaaccaataatggaaaatactttgaaatatttaaatgtaggtaaatcaaaagatgacacatctaatgcagagtatagtaaagtgccagatgttgaaggtcaagacaaacaaaaagctattgataatgtgagtgcaaaatcattagaaccagttactatcggttctggcacacaaataaaagcacaatctataaaagcagggaataaagtcttacctcatagtaaagtactgttattaacagacggagacttaactatgcctgacatgtcaggatggacgaaagaagatgtcattgcttttgaaaacctaacaaatattaaagtaaatttaaaaggtagcggttttgtgtcccaccaatcaattagtaagggacaaaaacttactgaaaaagataaaatagacgtagaattttcatcagagaatgtagacagcaattcgacgaataattctgattcaaattcagatgataagaagaaatctgacagtaaaactgacaaggataagtcggactaa

SEQ ID NO: 8028 - DNA, 774 bp, Staphylococcus aureus
atgttaatcgatacacatgtccatttaaatgatgagcaatacgatgatgatttgagtgaagtgattacacgtgctagagaagcaggtgttgatcgtatgtttgtagttggttttaacaaatcgacaattgaacgcgcgatgaaattaatcgatgagtatgattttttatatggcattatcggttggcatccagttgacgcaattgattttacagaagaacacctggaatggattgaatctttagctcagcatccaaaagtgattggtattggtgaaatgggattagattatcactgggataaatctcctgcagatgttcaaaaggaagtttttagaaagcaaattgctttagctaagcgtttgaagttaccaattatcattcataaccgtgaagcaactcaagactgtatcgatatcttattggaggagcatgctgaagaggtaggcgggattatgcatagctttagtggttctccagaaattgcagatattgtaactaataagctgaatttttatatttcattaggtggacctgtgacatttaaaaatgctaaacagcctaaagaagttgctaagcatgtgtcaatggagcgtttgctagttgaaaccgatgcaccgtatctctcgccacatccgtatagagggaagcgaaatgaaccggcgagagtaactttagtagctgaacaaattgctgaattaaaaggcttatcttatgaagaagtgtgcgaacaaacaactaaaaatgcagagaaattgtttaatttaaattcataa

SEQ ID NO: 8029 - DNA, 1827 bp, Staphylococcus aureus
ttgaaaagactaggaatggagagattcaagatgattacattatataatacgcttacacgtcaaaaagaagtgttcaagcctatagaaccagggaaagtaaaaatgtatgtatgtggtcctactgtatataactacattcatattggtaacgcaagaccagcaattaattatgacgtagtgagacgttactttgaataccaaggatataatgtagaatatgtatcaaattttacagacgtagatgataaattaattaaacgttctcaagaattaaatcagtctgttcccgaaattgcagaaaaatatatcgctgcttttcatgaagatgttggtgcgttaaatgttagaaaagcgacttcaaatccaagggtaatggaccatatggatgacattattcaatttattaaagatttggtggatcaaggttatgcatatgaaagtggtggcgatgtttactttagaacacgtaaatttgaaggttatggtaaattaagtcatcaatccatagatgacttaaaagtgggtgctcgtatagatgcaggagagcataaagaagatgcacttgattttacattgtggaaaaaagcgaagcctggcgagattagttggaatagcccatttggtgaaggtagaccaggatggcatatagaatgttctgtaatggcatttcatgagctaggacctacaattgatatacatgcgggtggttcagatttacaatttccacatcatgaaaatgaaatagcacaatcagaagcacataatcatgcgccatttgctaattattggatgcataatggtttcattaatattgataatgaaaaaatgagtaaatcactaggcaactttattttagttcacgatattattaaagaagttgatccagatgtactaagattctttatgattagcgtacattatagaagcccaattaactataatctagaattggtagaatcagcacgtagtggactagagcgtattcgcaatagttatcaattaattgaagagcgcgcacaaattgctactaatattgaaaatcaacagacatatattgatcaaattgatgcgattttaaatcgttttgaaacagttatgaatgatgattttaatacagctaatgcaattacagcttggtatgatttagcaaaacttgcgaataaatatgtactagagaacacaacatcaacagaagtaattgataaatttaaagcagtttatcaaattttcagcgatgttttaggtgtaccgttaaaatctaaaaatgcagatgaattattggatgaagatgttgaaaaattaatcgaagagcgtaatgaagcaaggaaaaacaaagattttgcacgagcagatgagattcgagacatgctgaaatcacaaaacattatattagaagacacacctcaaggggttagatttaaacgtggatatcaacaagataatcacattaaattattgaatccattgaccttagcatatatgggagacgcagtcttagatcaatatgtacgtacctatatcgttttaaagcttaaaagtaagcctaataaactacatcaaatgtctaaaaaatatgtatctgccaaaagtcaggcgcaaacgttagaatatttaatggagcaagaatggtttacagacgaagaaatggatattttgaagcgagggcgtaacgcgaaaagtcatactaaagctaaaaacactgatgttcaaacatatcgtaaaagttcagcgatagaagcagtgataggttttctttatttagaaaaaagagaagaacgattagaggcattattaaataaaataataacaatagtaaacgaaaggtag

SEQ ID NO: 8030 - DNA, 1356 bp, Staphylococcus aureus
atgaaaaaggttttaattgcaaaccgcggtgaaatcgcagttaggattattcgcgcttgtcgtgatttaggcatccaaactgttgcaatctattctgaaggggataaagatgcgctacatactcaaattgctgatgaagcatattgcgtaggtcccactttgtctaaagattcatatttaaatattccgaacatcttatctattgcaacttctacaggttgtgatggcgttcatccgggttatggctttttagctgaaaatgctgactttgcagaattatgcgaagcatgccaattgaagttcattggaccaagttatcaatctatccaaaaaatgggtatcaaagatgttgctaaggcagaaatgatcaaagccaatgttccagttgttcctggtagtgacggtttaatgaaagacgtctcagaagctaagaaaatcgctaagaaaattggctatccggtcatcattaaagctactgctggtggtggcggaaaaggtatccgtgttgctcgtgatgaaaaagaacttgaaactggcttccgaatgacagaacaagaagctcaaactgcatttggtaatggtggactttatatggagaaattcatcgaaaacttccgccatattgaaatccaaattgttggggacagctatggtaatgtaattcatttaggagaacgtgattgtacaattcaaagacgtatgcagaaattagtggaagaagcaccttccccaattttagatgatgaaacacgtcgtgaaatgggaaatgccgcagttcgtgcagcgaaagctgtaaattatgaaaatgcgggaacaattgagtttatatatgatttaaatgataataaattttattttatggaaatgaatacacgtattcaagtagaacatcctgtaactgaaatggtaacaggaattgatttagttaaattacaattacaagttgctatgggtgacgtgttaccgtataaacaagaagatattaaattaacaggacacgcaattgaatttagaattaatgctgaaaatccttacaagaactttatgccatcaccaggtaaaattgagcaatatcttgcaccaggtggatatggtgttcgaatagagtcagcatgttatactaattatacgataccgccatattatgattcgatggtagcgaaattaatcatacatgaaccgacacgagatgaagcgattatggctggcattcgtgcattaagtgaatttgtggttcttggtattgatacaactattccattccatattaaattattgaataacgatatatttagaagcggtaaatttaatacaaactttttagagcaaaatagcattatgaatgatgaaggttaa

SEQ ID NO: 8031 - DNA, 1071 bp, Staphylococcus aureus
atgacaaaagaaaatatttgtatcgtttttggagggaaaagtgcagaacacgaagtatcgattctgacagcacaaaatgtattaaatgcaatagataaagacaaatatcatgttgatatcatttatattaccaatgatggtgattggagaaagcaaaataatattacagctgaaattaaatctactgatgagcttcatttagaaaatggagaggcgcttgagatttcacagctattgaaagaaagtagttcaggacaaccatacgatgcagtattcccattattacatggtcctaatggtgaagatggcacgattcaagggctttttgaagttttggatgtaccatatgtaggaaatggtgtattgtcagctgcaagttctatggacaaacttgtaatgaaacaattatttgaacatcgagggttaccacagttaccttatattagtttcttacgttctgaatatgaaaaatatgaacataacattttaaaattagtaaatgataaattaaattacccagtctttgttaaacctgctaacttagggtcaagtgtaggtatcagtaaatgtaataatgaagcggaacttaaagaaggtattaaagaagcattccaatttgaccgtaagcttgttatagaacaaggcgttaacgcacgtgaaattgaagtagcagttttaggaaatgactatcctgaagcgacatggccaggtgaagtcgtaaaagatgtcgcgttttacgattacaaatcaaaatataaagatggtaaggttcaattacaaattccagctgacttagacgaagatgttcaattaacgcttagaaatatggcattagaggcattcaaagcgacagattgttctggtttagtccgtgctgatttctttgtaacagaagacaaccaaatatatattaatgaaacaaatgcaatgcctggatttacggctttcagtatgtatccaaagttatgggaaaatatgggcttatcttatccagaattgattacaaaacttatcgagcttgctaaagaacgtcaccaggataaacagaaaaataaatacaaaattgactaa

SEQ ID NO: 8032 - DNA, 1314 bp, Staphylococcus aureus
atgagacagtggacggcaatccatctagcgaaattggcgcgtaaagcaagtagagcagtaggtaaaagaggaacagatttacctggacaaatcgctagaaaagtggatacagatgtattaagaaaattagcagagcaagttgatgatattgtatttatcagtggaacaaatggtaaaacaacgacttcaaacttaattggacatactttaaaagcaaataatattcaaattatacacaataatgaaggtgctaatatggctgcaggtataacttctgcattcatcatgcaatcaacacctaagactaaaattgcggtaatcgaaattgatgaaggttcgattccacgtgtgttaaaagaagttacaccttcaatgatggtatttactaatttctttagagatcaaatggatcgcttcggtgaaattgatattatggttaataacattgcagagacaattagtaataaaggcatcaaattattgctaaatgctgatgatccatttgtgagtcgtttgaaaatcgcaagtgatacgattgtgtactatggtatgaaagcacatgcccatgaatttgaacaaagtacgatgaatgaaagtagatattgtccaaactgtggtcgcttattgcaatacgattatattcattataatcaaattggtcattatcactgtcagtgtggtttcaaacgagagcaagcaaaatatgaaatatcaagttttgatgtggcaccgtttttatatttaaatatcaatgatgaaaaatatgatatgaaaattgcaggtgactttaacgcttataacgcgttagcagcatatactgttttaagagagctagggttaaatgaacaaacaattaaaaatggctttgaaacgtatacatcagacaatggtcgtatgcagtactttaaaaaagaacgaaaagaagcgatgatcaatttagctaaaaatcctgcaggaatgaatgcaagtttatcagttggtgaacaattagaaggcgaaaaagtgtatgttatttcgctaaatgataacgctgcagatggtcgagatacttcatggatttatgatgcagattttgaaaaattatctaagcaacaaattgaagctatcatcgtgacaggtacacgagcagaagaacttcaattgcgattgaagttagcagaggttgaagtaccaattatagttgagcgtgatatttataaagcaacggcaaagactatggattataaaggtttcacagttgcaataccaaactatacatcattagcgcctatgcttgaacaattaaaccgttcgtttgaaggaggtcaatcataa

SEQ ID NO: 8033 - DNA, 732 bp, Staphylococcus aureus
atgcatgaattgactatttatcattttatgtcagataaattgaatttatacagtgatataggaaatattattgctttaagacaacgtgctaaaaaacgaaatattaaagttaatgtcgtagaaatcaatgaaacagaaggtattacctttgatgaatgtgatattttctttatcggtggtggaagtgatagagaacaagcattagcaacaaaagaattaagtaaaattaagacaccacttaaagaagcgattgaagatggtatgccgggattaacaatttgtggaggctatcaatttttaggaaaaaaatatatcacgcctgatggtacagaattagaagggttaggtattttagatttttatactgaatcaaagacaaaccgattaacaggagatattgttatcgaaagtgatacttttggaactattgtaggttttgaaaatcacggtggtagaacatatcatgatttcggtacacttggtcatgttacttttggttatggtaataatgatgaagataaaaaagaaggcattcattataaaaatttattaggtacttatttacacggaccaattttacctaaaaattacgaaatcactgattatctgttagaaaaagcttgtgaacgtaaggggattccgtttgagcctaaagaaatagataatgaagcggaaatacaagcgaaacaagtattaatagacagagcaaatagacagaagaaatctcgttaa

SEQ ID NO: 8034 - DNA, 381 bp, Staphylococcus aureus
atgaaaataattttaaaaaacaatagtgattttccgatttatgaacagattaagcaacaagtaaaacaaaatattttaaagggacatgttgctcctggagagcatttgccgtcaatgagagaacttgccaaagatcttcaagtaagtttgattactaccaaacgtgcttatgaagatttagagaaagacggttttgttacaacaattagaggaaaagggacctttgttaaggagcaagatagttctattttaaaagagaaacaattttttaccattgaaaatttggttaaagaattggttaatgaagcgcaagccatcgaaatgtcacttgaggaacttcaagatattttaacgttcatttatgaggaggaatcatcatga

SEQ ID NO: 8035 - DNA, 897 bp, Staphylococcus aureus
atgaatgccatagaattaagtaatgttaattattcaagtgatcagtttaatttaaagaatatctctttcaaagttcctcaaggattcgtcactggttttattggtagaaatggcgctggtaaaaccacaataataaggttaattatggatttgtatcaaccacaaactggtgttattagagtattagaagaggatatggctctcaatccgatagagttaaagaatagtatagggtttgtttactctgaaaattattttaatgagagatggactacgaagcaacttgaaaaaatgattgcccctttttatcgtaaatgggaccatcaagtatttgaattttatcttgaaaagttcgatttaccaatcaataaatcaataaaaacattttcgactgggatgaaaatgaaattatcactagcagttgcattttcacatcatgctgaattgtatatttttgatgagcctacttcaggtcttgatcccttagctagaaatgagctattggagataattcagcaagaattaattgatgaaaataaaacaatattcatgtcgacacacattatctcagatttagaaaaaatagctgattatatcattcacttaagtgacggtgaagttatcttaaatggttcaaaagaacaactgttacaaagatatcaagttgtgagtggtgcaactgaggaccttgatgatgaattagcatctctacttatttatgaagaacataagcgtacgggatttataggattaacagaacatgcgcaagtatttaaagaaattttaggtcataaagtgaatatcactacaccttctattgagaacttaatggtttatcttgaaaagagaaaacctaaatatcatgaaaacatcaaattgatggaagaaggtttttaa

SEQ ID NO: 8036 - DNA, 1101 bp, Staphylococcus aureus
ttgtctgacattttaaaatgtatcggttgtggtgcgccacttcaatctgaagataaaaataaacctggttttgtaccagagcataatatgtttcgtgatgacgtgatttgcagacgttgtttccgcttgaaaaattataacgaagttcaagatgtaggattagaaagtgaagactttttaaaattattatcaggacttgcggataaaaagggtattgtcgtcaatgtcgtggatgtatttgactttgaaggatcatttattaatgcagttaaacgtattgtcggaaacaaaaaaatcattttagcagcaaataaattggatttattgccgaaacaaattaataaacgtcgagttaaagaatggttaaaacgaacagcaagaaaatatggtttggaagctgacgatgtcgtattaatttcagctgaaaaaggctggggcatagacgacttattatcatcaattgcgaatattcgagaaaatgaagatgtgtatattgtagggacaacgaatgttgggaaatctacattgattaataaactgattgaagctagtgttggtgaaaaagatgtagtaacaacttcaagattccctggaacaactttagatatgatagatattcctttagatgaatcatcatttatgtatgatacaccaggtattattcaagatcatcaaatgacgcatttagttagtgaaaaagaattgaaaattattatgcctaagaaagaaataaaacaacgcgtatatcaattaaatgaggcgcagacattattcttcggcggtctagcgcgcatagattatgtatcaggtggtaaacgtccgttagtttgtttcttttctaatgacttgaatatacatcgtactaaaacggagaaggctaatgatttatggcgtaatcaacttggcgatttattaacgccacctggaaatccacaaaattttgatcttaatgagttaaaggctgttagacttgaaacaggcaaagagaaacgtgatgttatgatctctggtctaggctttataactataggaccaggagctaaagtaatcgttcgtgttcctaaaaatgttgatgttgtattaagaaattctattttataa

SEQ ID NO: 8037 - DNA, 105 bp, Staphylococcus aureus
atgtataaatttttccaaaatttagggcgttcgttaatgttaccagttgccattttaccggctgcagcaattattgccggaattggtaatacgttaaatgcactt

SEQ ID NO: 8038 - DNA, 1707 bp, Staphylococcus aureus
atgaaagtcgaagtttataaaggagcgcaaggtaaacataaccttaaagattatgaagaaacatataatacttttgattggaaagacgtagaacaagcattttcttggagtgaaactggaaaaatgaacatggcatatgaatgtatagatcgccatgtagatcaaagattaggggataaaatagcgttaaattacaaagatgagtacagaaaagaatcgtatacttataaagatatgcaacggttatctaataaagcagcgaatgttttgtctgaacatgcagaagttgacaaaggtgacagagtatttatatttatgtcgcgtacacctgaactatattttgcgttgttaggtgttttaaaaattggtgcaattgttgggccgttatttgaagcatttatggaaaaggcagttgcggatagattagagaacagtgaagctaaagtgttaattactaataaggcattgttacctcgagtacctgtagataaattaccgaacttgaaaaaaattgttgtcgtagatgaggatgtagaagacaattacatagacttcattagtttgatggaaactgctagcgatgaatttgacattgaatggttaaagtcggatgatggtttgattttacattatacatcaggttctactgggcaacctaaaggtgtattgcatgttcaacaagcaatgttagtgcactatatttctggaaaatatgtattagatttacaagaagatgatgtttattggtgtacagcagatccaggttgggttacaggaacatcttatggtatttttgcaccatggttaaatggcgctacaaattgtatagctggtggtcgcttttcaccagaacagtggtatagtatgattgaagattttaaagtgacgatttggtatacggcaccaacagctttaagaatgttaatgagtgctggtgacgatattgttgagaaatatgacttgtcatcgttacgttcgattctatcagtaggtgagcctttaaatcctgaagttataaaatgggcgaaaaaagtatacggtttaacggtgttagatacttggtggatgacagaaacaggtggacatatgattgttaactatccaacgatggacgtcaagcttggctcaatgggcaaaccattacctggtattcaagctgcaattatcgatgatgcaggtaatgaattaccaccaaatcgaatgggcaaccttgctataaaaaaaggctggccatcaatgatgtatcgtatctggaagaatccagaaaaatataaatcatattttattggagactggtatgtatctggtgattcggcatataaagatgaagatggttacttctggttccaaggacgtgttgatgatgtaattatgacagctggtgaacgagttggaccatttgaggttgagtctaaattggttgaacacgaagcagttgccgaagcaggaattattggtaaacctgatccggttcgcggtgaaataattaaggcgtttgttgcactgagaaaaggatatgaaccaacagacgaattaaaagaagaaattcgtttatttgttaaagaaggtttgtcggcacatgcagcaccacgtgaaatcgaatttaaagataaattacctaaaacacggtcaggtaaaattatgagacgtgtattaaaagcttgggaattaaatttagatgctggggatttaagtacaatggaataa

SEQ ID NO: 8039 - DNA, 399 bp, Staphylococcus aureus
atggaaaaatcgatcaaaataatgacaataataggaattgttattcagggtttagcaacggtatttagtttactattgatggttttagcagcatcaggtgtaatgactacagatgtgtcaacaacagttaatggtgaggttgacccagttgatgcagaaacagcagcagcaattttcactgtattattcttatccctattcatatttggaatcatttcaattattttaggtgcaatcggtatgtttaaagcatctaaaaacaaaaaaatgagtggtatattgttgattattggagctgtaataagtggtaacataattacatttgctttatggttagtcagtggtattaaactacttactaataacaagcctaaagatgaaataagcgacttatcataa

SEQ ID NO: 8040 - DNA, 99 bp, Staphylococcus aureus
atgttaatcgatacacatgtccatttaaatgatgagcaatacgatgatgatttgagtgaagtgattacacgtgctagagaagcaggtgttgatcgtatg

SEQ ID NO: 8041 - DNA, 2406 bp, Staphylococcus aureus
gtgagtttgttacatattgcggtgatattaccgttaatattcgcactcattattcctatcctgtatagattttttaaacgtatacatttaggatggttcgtattacctgtccctatcgtcatatttatttatatgcttacattaattaaaacgacgatgtcaggtaatactgtaatgaaaaccttaaattggatgcctcattttggtatgaactttgatttatatcttgatggcttaggtttactctttagtttgcttatttcaggaatcggcagtttagtagtattatattcaatcggctacttaagtaagtcagaacaactagggaatttttattgttatttattactatttatgggtgcaatgttaggtgtcgtactttcagataatgttattattctatatttattctgggagctaacgtcattttctagttttttacttatttcattctggcgcgaacgacaagcatctatatatggtgctcaaaaatcgctcataatcacagtatttggtggtctatcattattaggtggtatcatcttactcgctataccaacacaatcatttagcattcagtacatgattcaacatgcttctgaaattcaaaatagcccattcttcatttttgcgatgattttaatcatgattggtgcttttacaaaatctgctcagtttccattttatatttggctaccagatgcaatggaagcacctacaccagtcagtgcttatcttcattcagcaacaatggttaaagcagggttatatttaatcgctcgaatgacaccaatcttcgcagcatcgcaaggttgggtatggactgtcacactcgttggtttaattacgttattctgggcttcgctaaacgcaacaaaacaacaagacttgaaaggtatactggcattttcaacagtatcccaattaggtatgattatggcgatgcttggaatcggtgccattagttatcactatcaaggcgatgatagcaaaatatatgctgctgcatttacggctgcaatattccatttaatcaaccatgcaacatttaaaggtgccctatttatgattacaggtgcagtggatcattctactggtacacgtgatgttaagaaattaggtggcttactaacaattatgcctatttcatttacaatcactgttattacagcattaagtatggctggtgtaccaccgttcaatggtttcttatcaaaagaatcatttttagaaacaacatttacagcaagccaagcaaatttattcagtgttgatacattaggctacctattcccaatcattggtatagtgggcagtgtcttcacatttgtatattcaattaaatttataatgcatatatttttcggacaatataaacctgaacaattacctaaaaaagcacacgaagtatcaatattaatgcttttatcaccagctattttagctacattagtaattgtattgggtttattccctggcattttaactaattcgattattgaaccagctacatcttcgattaatcatacggtaattgatgatgttgaattccatatgttccatggattaacgcctgcctttttatcaacattagtgatttatattttaggtatcttactaattgtgacatttagttattgggtgaaattgttgcaacgacaacctggtaaactaacattcaattattggtacaacagaagtgcaaatgttattccaaactactctgaaaagatgacgaatagctatgttaccgattattcacgtaataatttagttatcatttttggtgcattaattttattaacatttgtcactatattctcagtgcctttcaacattaattttaaagacgttagtccgattagaattttcgaagtttgtatcgtaattttattattaagtgctgcctttttaattcttttcgctaaatcaagattatttagcattattatgttaagtgcagttggatatgctgtgtctgtattgtttatattctttaaagcacccgacttagcattgacacagtttgtcgttgaatctatttcaacagcattgttcttattatgcttctaccacttaccaaatttaaatcgttataatgaaaagcgctcattccagcttactaatgctttaattgctggtggtgttggtttgtccgtcattattatcggtttaattgcatacggaaatagacattttgaatcgatatctaagttttatcaagagcacgtttatgatttagctcacggtaaaaacatggtaaacgtcatacttgttgatttccgtggtatggatactttattcgagtcatctgtgcttggtatcgcaggattagctgtatatacaatgattaaattacgtaaaaagcgtcaaacgcaaggtaacgaggtgaaaaatcatgaatag

SEQ ID NO: 8042 - DNA, 429 bp, Staphylococcus aureus
atgaatagacaacaaaatgatctaattttgcaatttgctgcagttattatctttttcatggtaatggtctttggtttttcacttttcttagcaggacattatacacctggtggcggtttcgtcggcggattattattcgcaagttcacttgttatcattacgattgcatttgatatagaaacaatgcgtaaaattttcccattagattttaaaatcttgataggtatcggattagttttttgtattgcgacgcctatcgcaagttggtttttaggcaaaaatttctttacgcatgtcacatttgatataccgttatttatattagaacctgttcatatgacaacagcagtattctttgatttcggtgttttatgtgcagtagttggtactgtcatgacaattattatttcgattggagagaacgaatag

SEQ ID NO: 8043 - DNA, 480 bp, Staphylococcus aureus
atgactttatccattctagttgcacatgacttgcaacgagtaattggttttgaaaatcaattaccttggcacctaccaaatgatttgaaacatgttaaaaaattatcaacaggtcatactttagtaatgggtcgtaagacatttgaatcgattggtaaaccactaccgaatcgtcgaaatgttgtacttacttcagatacaagtttcaacgtagagggcgttgatgtaattcactctattgaagatatttaccaactaccgggccatgttttcatatttggagggcaaacattatttgaagaaatgattgataaagtggacgacatgtatattactgttattgaaggtaaattccgtggtgatacgttctttccaccttatacatttgaagactgggaagttgcctcttcagttgaaggtaaactagatgagaaaaatacaattccacatacctttctacatttaattcgtaaaaaataa

SEQ ID NO: 8044 - DNA, 663 bp, Staphylococcus aureus
atgaccaaaggaatcttaggaagaaaaattgggatgacacaagtattcggagaaaacggtgaattaatccctgtaacagtagtagaagctaaagaaaatgttgtattacaaaagaaaactgtagaagttgatggatacaacgcaatccaagttggatttgaagacaaaaaagcatacaaaaaagatgcaaaatctaataaatatgctaataaaccagctgaaggtcacgctaaaaaagctgacgcagcacctaagcgcttcattcgtgaattccgcaatgtagacgtggatgcttacgaagtaggtcaagaagtctcagtagatacttttgtagctggcgacgttattgacgtaacaggcgtatcaaaaggtaaaggtttccaaggtgcaattaaacgccacggacaatctcgtggacctatgtcacacggttctcatttccacagagcaccaggttctgtaggtatggcttcagatgcttctagagtatttaaaggccaaaaaatgccaggacgtatgggtggaaacactgtaactgttcaaaacttagaagtagttcaagttgacacagaaaacaaagttatcttagtaaaaggtaacgtacctggacctaaaaaaggtttagtagaaatcagaacttcaattaaaaaaggtaataaataa

SEQ ID NO: 8045 - DNA, 1275 bp, Staphylococcus aureus
atgaaattaattaaaaacggtaaagtattacaaaatggagaattacaacaagcagatattttaattgatggtaaggtaattaaacaaattgcacctgcaattgaaccaagcaatggtgttgacatcatagatgcgaaaggtcactttgtgtcacctggatttgtcgatgttcatgttcatttacgtgaacctggtggtgaatataaagagacaattgaaactggtactaaagctgctgctagaggcggatttacaactgtatgtccaatgcctaacacaagaccggtaccagattctgtagaacattttgaagctttacaaaaattaatcgatgacaatgctcaagtacgtgtattaccttatgcttcaattacaacacgtcaattaggtaaagaattggttgatttcccagcactagtaaaagaaggtgcctttgcgtttacagatgacggtgtaggagtacaaactgcaagcatgatgtatgaaggcatgattgaagctgcaaaagtaaacaaagccatcgtagcacactgtgaagataattcattaatctatggtggtgcaatgcatgaagggaaacgcagtaaagagttaggtataccaggtattccaaacatttgtgaatctgttcaaatcgcaagagatgtactattagctgaagcagcaggttgtcattatcatgtatgtcatgtttctactaaagaaagtgttagagtcattcgtgacgctaaacgcgcaggcattcatgttacagctgaagttacaccacaccatttattgttaacagaagatgatattcctggtaataatgccatttataaaatgaatccaccattgagaagtactgaagatagagaggctttgttagaagggttactagacggtacaattgactgtatcgcaacagaccatgcaccacatgcacgtgatgaaaaagcacaaccaatggaaaaagcaccattcggaattgttggtagtgaaacagcattcccattattatatacgcattttgtaaaaaatggtgattggacattacaacaattagtagattacttaacaattaaaccatgtgagacatttaatttagaatacggcacattaaaagaaaatggttatgcagatttaacaatcattgatttagatagtgaacaagaaattaaaggagaagatttcttatcaaaagcagataatacaccatttatcggctataaagtttatggaaatccgatcttaacaatggttgaaggcgaagttaaatttgagggggataaataa

SEQ ID NO: 8046 - DNA, 561 bp, Staphylococcus aureus
atgaatacgataagaaatagtatttgtttaacgataataactatggtattatgtggatttttattcccgttagctatcacgttaattggtcaaatatttttttatcaacaagcaaatggcagtttaattacgtatgacaatcgtatagttggatcaaaattgattggacagcactggacagagacacgatattttcacgggagaccgagtgcagttgattataatatgaatcctgaaaaattatataaaaacggcgtatcttcaggtggaagtaatgaatcgaatggaaacaccgaattaatagcacgcatgaaacatcatgttaaatttgggaattcaaatgtaacaatagatgctgcaacaagttctgggtcgggcttagatccgcatattacggtcgaaaatgcattgaagcaagcacctcgtattgctgatgctcgtcatgtatctacttcaagagtggccgacttgattcaacatcgtaagcagcgtggtgtgttaacaaatgattatgtgaatgtgcttgaactaaatatcgctcttgataagatgaaagattga

SEQ ID NO: 8047 - DNA, 1260 bp, Staphylococcus aureus
atggtagtagaaaaaagaaacccaatcccagttaaagaagcaattcaacgtatcgttaatcagcagagttcaatgccggcaattacggtagcacttgaaaaaagtctaaatcatatcttagcagaagatattgtagctacttatgatataccaaggtttgataaatcaccttatgatggttttgcaattcgcagtgttgattcacaaggggcaagtggtcagaatcgcattgagtttaaagtgattgatcatattggtgcaggttcagtttctgataaattagttggggatcacgaagcggtgcgtattatgactggagcacaaataccaaatggcgcagatgctgttgttatgtttgaacaaacgattgaactagaagatacatttacaattcgtaaaccattttcaaaaaatgaaaatatatctttaaaaggtgaagaaacaaagacaggcgatgttgttctaaaaaaaggacaagtaattaacccaggggctatcgcggtccttgcaacatatggctatgcagaggttaaagttattaagcaaccgagtgtcgctgttattgcaacaggaagcgaattattagatgttaatgatgtattagaagatggaaaaattcgtaactctaatggcccaatgattcgtgccttagcagaaaaattaggtcttgaagttggtatttacaaaacacaaaaagatgatttagatagtggcatccaagtcgttaaagaagctatggaaaaacacgatatcgttattacaacgggtggagtttctgttggagactttgactatttacctgagatttataaggctgtaaaggcggaagtgttatttaataaagtagcaatgcgtcctggtagcgtaacaacggttgcatttgcagatggaaagtatttgtttggattatctggaaatccatcagcttgttttacaggatttgaactatttgtgaaaccagctgttaaacatatgtgtggcgcactagaagtcttcccgcaaataattaaagcaacattaatggaagattttaccaaggcaaacccattcacacgatttatacgtgctaaagcaacgttaacaagtgctggagctactgtagtaccttcaggattcaataaatcaggtgcggttgtagcgattgcacatgctaactgtatggtcatgttaccaggagggtcacgtggttttaaagcggggcatacagtagatattatattgactgaatctgacgctgctgaagaggaacttcttttatga

SEQ ID NO: 8048 - DNA, 1278 bp, Staphylococcus aureus
atgcaaagtttagataagaatttccgacatttatctcgtcaacaaaagttacaacaattggtagataagcaatggttatcagaagatcaattcgacattttattgaatcatccattaattgatgaggaagtagcaaatagtttaattgaaaatgtcatcgcgcaaggtgcattacccgttggattattaccgaatatcattgtggacgataaggcatatgttgtacctatgatggtggaagagccttcagttgtcgctgcagctagttatggtgcaaagctagtgaatcagactggcggatttaaaacggtatcttctgaacgtattatgataggtcaaatcgtctttgatggcgttgacgatactgaaaaattatcagcagacattaaagctttagaaaagcaaattcataaaattgcggatgaggcatatccttctattaaagcgcgtggtggtggttaccaacgtatagctattgatacatttcctgagcaacagttactatctttaaaagtatttgttgatacgaaagatgctatgggcgctaatatgcttaatacgattttagaggccataactgcatttttaaaaaatgaatctccacaaagcgacattttaatgagtattttatccaatcatgcaacagcgtccgttgttaaagttcaaggcgaaattgacgttaaagatttagcaaggggcgagagaactggagaagaggttgccaaacgaatggaacgtgcttctgtattggcacaagttgatattcatcgtgctgcaacacataataaaggtgttatgaatggcatacatgccgttgttttagcaacaggaaatgatacgcgtggtgcagaagcaagtgcgcatgcatacgcgagtcgtgacggacagtatcgtggtattgcaacatggagatacgatcaaaaacgtcaacgtttaattggtacaatagaagtgcctatgacattggcaatcgttggcggtggtacaaaagtattaccaattgctaaagcttctttagaattgctaaatgtagattcagcacaagaattaggtcatgtagttgctgccgttggtttagcacagaactttgcagcatgtcgcgcgctcgtttccgaaggtatccagcaaggccatatgagcttgcaatataaatctttagctattgttgtaggtgcaaaaggtgatgaaattgcgcaagtagctgaagcattgaagcaagaaccccgtgcgaatacacaagtagctgaacgcattttacaagaaattagacaacaatag

SEQ ID NO: 8049 - DNA, 300 bp, Staphylococcus aureus
gtgtggtgcatcacgatggtgaaaatagacttacaattcttcgcatctaaaaaaggggtaagttctacaaaaaacggacgtgactctgaatcaaaacgcttaggtgctaaacgtgctgacggtcaattcgtaacaggtggttcaattttatatcgccaacgtggtactaaaatttaccctggtgaaaatgtaggtcgtggtggcgatgatacattattcgctaaaatcgacggcgttgttaaattcgaacgtaaaggtcgcgacaaaaaacaagtttctgtatatgcagtagctgaataa

SEQ ID NO: 8050 - DNA, 804 bp, Staphylococcus aureus
atgaaagttggcattgacgctggcggtacactaattaaaatcgttcaagagcaagataaccaacgtacttttaaaactgaattaactaaaaatattgatcaagttgtggaatggttaaaccaacagcaaattgaaaaattatgcttaactggaggtaatgcaggtgtcattgctgaaaacatcaacattcctgcacaaatttttgtagagtttgatgctgcatctcaaggactaggtattttgttaaaagagcaaggccatgacttagcagattatatttttgcaaatgttggtaccggtacgtcactacattatttcgacggccaatcacaacgtcgtgtaggcggtatcggtacaggtggaggcatgattcaaggactcggttatttactaagtcaaatcactgattataaacagttaactgacatggcacaacacggtgatcgtaacactatcgatttaaaggttagacatatttataaagataccgaaccacccattcccggtgatttaacagcagctaattttggtcatgtactacatcatttagatgctgattttacacctagcaataaattagcagccgttattggtgtcgttggcgaagttgttacgacaatggccattactgttgcacgtgaatttaaaactgaaaatatcgtttatatcggttcttcattccataataacgctttattacgcaaagttgtggaagattatactgtgttacgcggttgcaaaccgtactatgttgaaaacggcgcattttcaggtgctattggtgcattatatttaggtaaatag

SEQ ID NO: 8051 - DNA, 1125 bp, Staphylococcus aureus
atgaaagtattagtagccatggatgagtttcatggaattatttcgagttatcaagctaatagatatgttgaagaggcagttgcaagccaaattgaaactgcagatgtagttcaagtaccattgtttaatggaagacatgaattattagattctgtatttttatggcaatctgggcaaaagtatcgtataccagtacatgatgcagatatgaatgaagttgaaggtgtttacggacaaactgatacagggatgaccgttatcgaggggaatttatttttaaaaggtaaaaaaccaattgttgaacgaacaagttatggtttaggagaaatgattaaacatgcattagataatgacgcaaaacatgttgtaatttcactaggtgggattgatagttttgatgctggtgcaggtatgttacaagcattaggtgctcaattctatgatgacgaagggcgtgtcgtagatatgagacaaggtgctggtgtaattaaatatattcgtcgtatggatatgtcgaacttacaccctaaaatggaaacagcaagaattcaagtaatgtcggatttttcaagtcgattatatggtaagcaaagtgaaatcatgcaaacttatgatgcgcatcagttgcatcataatcaagcagcagaaatcgataatttaatttggtattttagtgagttatttaaaagtgaattgaaaattgcaattggtccagttgaacgtggtggtgctggtggtggaattgcagcagtcttgaatggactgtatcaagctgaaatattaaccagtcatgcattagtagaccaactaacacatttagaaaatttagttgaacaagcggatttaattatttttggagaaggattaaatgaaaatgatcagttgctagaaacgacaacattgcgtattgcagaactttgtcataaacatcaaaaggttgccattgcaatttgtgcaactgctgaaaagtttgatttatttgaatcacaaggggttacagcaatgtttaatacatttatcgatatgccagaaacttatactgactttaaaatgggattacaaattaggcattatacggttcagtctttaaaactgttgaaaacacattttaatgttgaggtttag

SEQ ID NO: 8052 - DNA, 303 bp, Staphylococcus aureus
atgacaaaagtaacacgtgaagaagttgagcatatcgcgaatcttgcaagacttcaaatttctcctgaagaaacggaagaaatggccaacacattagaaagcattttagattttgcaaaacaaaatgatagcgctgatacagaaggcgttgaacctacatatcacgttttagatttacaaaacgttttacgtgaagataaagcaattaaaggtattccgcaagaattagctttgaaaaatgccaaagaaacagaagatggacaatttaaagtgcctacaatcatgaatgaggaggacgcgtaa

SEQ ID NO: 8053 - DNA, 1332 bp, Staphylococcus aureus
atgactcatattcaattagattttagtaaaacgttagaatttttcggtgaacacgaattaaaacaacaacaagaaattgttaaatcaattcacaaaacaattcatgaaggtactggtgcaggtagtgacttcttaggctgggttgatttaccagttgattacgacaaagaagaattttcaagaattgttgaagcatcaaaacgcattaaagaaaattctgatgttttagtagtcatcggtattggtggttcttacttaggtgcacgtgcagcaatcgaaatgttaacgtcatcatttagaaacagcaatgaataccctgaaattgtatttgttggtaatcacttatcatcaacatatacgaaagagttagttgattatttagcagacaaagatttctctgtaaacgttatttctaaatctggtacaactacagaaccagcagttgcatttagattgttcaaacaattagttgaagaaagatacggtaaagaagaagcacaaaaacgtatatttgcaacaacggataaagaaaaaggtgctttaaaacagttggctacaaacgaaggttatgaaacgtttatcgtacctgatgatgtaggtggaagatattctgttttaacagcagtaggattattaccaattgcaacagctggaattaacatcgaagctatgatgattggtgctgcaaaagcacgtgaagaattatcttcagataaattagaagacaacattgcataccaatatgcgacaattcgaaacattttatatgcaaaaggttatacaacagaaatgttgattaactatgaaccatctatgcaatactttaatgaatggtggaaacaattatttggtgaatcagaaggtaaagacttcaaaggtatctatccttcaagtgccaactacacaactgatttacattctttaggtcaatatgtacaagaaggccgtcgtttcttattcgaaacagtggtaaaagtaaatcatcctaaatatgatattactattgaaaaagatagtgatgatctagacggattaaattatttggctggtaaaacaatcgacgaagttaacacaaaagcattcgaaggtacattattagcgcatactgatggtggtgttcctaacatggtagtgaacattccacaattagatgaagaaactttcggttatgtcgtatacttcttcgaacttgcttgtgcaatgagtggataccaattaggtgtaaatccatttaaccaacctggtgtagaagcatataaacaaaacatgttcgcattattaggtaaacctggttttgaagacttgaaaaaagaattagaagagcgtttataa

SEQ ID NO: 8054 - DNA, 921 bp, Staphylococcus aureus
atgatttatacagtgactttcaatccttcaattgactatgtcatttttacgaatgattttaaaattgatggtttgaacagagcaacagcaacatataaattcgctggggggaaaggtattaatgtctcgcgcgtcttaaagacattagatgttgagtcaactgccttgggatttgcaggtggatttcctgggaaattcattatagatacattaaataacagtgcaattcaatcgaattttattgaagttgatgaagatacacgtattaatgtgaaattaaaaacaggacaagaaacagaaatcaatgcaccgggtcctcatataacgtcaacacaatttgaacaactgttacaacaaattaaaaatacaacaagcgaagatatagttattgttgctggaagtgtaccaagtagtattccaagcgatgcgtatgcgcaaattgcacaaattacagcacagacaggtgctaaattagtagtcgacgctgaaaaagaattggctgaaagcgttttaccatttcatccactatttattaaacctaataaagatgaattagaagtgatgtttaatacaacagtgaactcagacacagatgttattaaatatggtcgtttgttagttgataaaggtgcgcaatctgttattgtctcgcttggcggtgatggtgctatttatattgataaagaaatcagtattaaagcagttaatccacaagggaaagtggttaatacagttggctctggtgatagtacagttgcaggcatggtggctggaattgcttcaggtttaacgattgaaaaagcattccaacaagcagtcgcatgcggtactgccacggcatttgatgaggacttagcaacacgggacgctatagaaaaaataaaatcacaagttacgattagcgtacttgatggggagtga

SEQ ID NO: 8055 - DNA, 357 bp, Staphylococcus aureus
atgccacgagttaaaggtggaacagtaacaagagcgcgtcgtaaaaaaacgattaaattagctaaaggttacttcggttcaaaacatacattatacaaagtagctaagcaacaagtaatgaaatcaggtcaatatgctttccgtgaccgtcgtcaacgtaaacgtgacttccgtaaattatggattacacgtatcaacgcagcagctcgtcaacatgaaatgagctactcacgtttaatgaacggtttgaaaaaagctggtatcgacattaaccgtaaaatgttatcagaaatcgcaatttctgacgaaaaagcatttgctcaattagtaactaaagctaaagatgctttaaaataa

SEQ ID NO: 8056 - DNA, 900 bp, Staphylococcus aureus
atgacagaacataaatcaggatttgtttcaattataggtagaccaaatgtagggaagtcaacatttgttaatagagtgattggccataaaatagcaatcatgtccgataaagctcaaacaactagaaataaaattcaaggtgttatgacaagagatgacgcgcaaattatattcattgatacgccaggtattcataaacctaaacacaaattaggtgactatatgatgaaagtcgctaaaaatacattatctgaaatagatgcaatcatgtttatggttaatgccaatgaggaaattggacgaggcgatgaatatattatagaaatgttgaaaaatgttaagacaccagtatttttagtattaaataaaatagatttagtgcatccagatgaattaatgccaaagattgaagaatatcaaagttatatggactttacagagattgtacctatttcagcattagaagggctaaatgtagatcattttattgatgttttaaagacgtatttacccgaaggacctaaatattatccagatgatcaaatttcagaccatcctgaacaatttgtagtgggtgaaatcattcgtgaaaaaatccttcatcttacaagtgaagaaatccctcatgcgattggtgttaatgtggaccgtatggttaaagaaagcgaagatcgtgttcatatcgaagcaactatatatgttgaaagagattcgcaaaaaggaattgtcattggaaaaggcggtaaaaagttaaaagaagtaggaaaacgtgcgagacgtgatatagaaatgcttctaggctctaaagtatacttagaattatgggtcaaagttcaaagagactggcgaaacaaagttaactttattcgccaaattggttatgttgaagaccaagattaa

SEQ ID NO: 8057 - DNA, 1173 bp, Staphylococcus aureus
atgaaaatagcaactctgaacaaaggcaaagaaacaaaatattttaatggatatcctttaattgaagaagaggatatctattcacaagatcatttaaaagaaggagatatttttcaaattgtgactgataaatcacaatatgttgcaacggcttatgttggtcgccaacataaaggattaggttgggttctaacatacgataaagctcaagaaatcaacacagctttctttgtgaaattgtttaatactgcattagcagaacgtgattattattttaatatagatggaacaaatgcttttagattatttaatgctgaaggtgatggtgttgggggattaacaatcgacaattacgatggtcatttgttgattcaatggtactcaaaaggtatttataaatttaaatatgccattcttgaagcggttagaaaagtatttgattataaatctatttacgaaaaagtaagatttaaagacagcgaatatagtggtggttttgttgaaggcgatgcacctgagtttccaattgttatcgaagaaaacttcacattttataatgtagaccttgaagatggtttgatgacaggtatctttttagatcaaaaagaagtgcgcaagaaattaaggggtcaatatgccaaagaacgccatgttttaaacttatttagttatacaggtgctttttctgtaatagcagcaagtgaggcatcttcaacaacaagtgtagatttggctaatcgttctcgtagtttaactgaagaaaattttggattaaatgctattgatcctaaatcccaatatatttatgtcatggacacttttgatttctataaatatgctgcacgacatggacatagttatgacacgatcgtgattgatccacctagctttgcacgcaacaaaaaacgtacattttcagtgcaaaaagattatgacaaattaattaatggcgccttaaatattttatcatctgaaggaacattattgttatgtacaaatgcaagtgtatatccattaaagcaatttaaaaatactattaaaaagacgcttgaagagagtggcgttgattatgaattaactgaagttatgggtttaccaaaagattttaaaacgcatccacattataagccatctaaatatttaaaagctgtttttgtaaatattagacattaa

SEQ ID NO: 8058 - DNA, 399 bp, Staphylococcus aureus
atgaaacgtgtaataacatatggcacatatgacttacttcactatggtcatatcgaattgcttcgtcgtgcaagagagatgggcgattatttaatagtagcattatcaacagatgaatttaatcaaattaaacataaaaaatcttattatgattatgaacaacgaaaaatgatgcttgaatcaatacgctatgtcgatttagtcattccagaaaagggctggggacaaaaagaagacgatgtcgaaaaatttgatgtagatgtttttgttatgggacatgactgggaaggtgaattcgacttcttaaaggataaatgtgaagtcatttatttaaaacgtacagaaggcatttcgacgactaaaatcaaacaagaattatatggtaaagatgctaaataa

SEQ ID NO: 8059 - DNA, 1887 bp, Staphylococcus aureus
atgagtgatcgtttcataaaatttaacgacgaacagttagatgccaagcaagtaatgatgttgcaagacttagctcgactcttattaaaaaatgaacaaacacaagttaaaatccaaaaattcccttactataatcctgttcaaaatgttttgattacgagttggttttggtcacatcgaccaagccatatcgaaatggctggtttaaaaacagatgttatgttagctgcttacggttatcatatgatggatgtacaaattgtaaatgaagtagtacaagataaaacttttaaacaccctaaattttatcaacaactttttaaattattagaagatatgcgcgtattaaattctattaaagttgagcgcccaagtactgctaaattaattgatcttcgcttagatacacgggtatcatatacggaatctcaaattaaagtgtatcgtactaaaacacaatatacagatttattatttttgtatttagaacatgcatttttaagtcaagatttctttgatataccatctatacattcagatttagatgatattttagtaaatatgttcttatatttacctaattttttccaaaatcaaaattctgaagataatatgtatctggctcaaagaattatgtatcaagtagatgatattttaaaagaagatatgctaaacgaatattattacttacctaaaacactatataatacattagctagtccagagtttgatgatttaaagagaactgatgcaagtcaagtcgatgggcaagatgatacttcagaagatgatgataacgaaagtgaaaaagctgactctaaatctgcagatagtgagtcaaaaggtggcgcctatttagaaatggagcttcacgaaggacaaaatagtgaaacattaggtaatgatgaagcacgtgaaggcgatgctacagatgatatgactgatatgatgaccaaaaagggcaaaggatcaaacgatacgctaaatcgtgaagaaggcgatgctgttggtcaaagccaagcatttcaacttgatggtgtgaacaaaaatgtagaaataaaatggcaaattcctgaaattgagccacaatatgttttagaatatcaagaatcgaaacaagacgtacaatatgaaatcaaagacttaattcaaattataaagaaaacgattgaacgagaacaacgagatgcacgttttaatttaacaaaagggcgattacaaaaggatttaattaattggtttatcgacgatcaatataaattgttttacaaaaaacaagatttaagtaaatcatttgatgcgacgtttacattgttaattgatgcgtcagcaagtatgcatgataaaatggctgaaacgaagaaaggtgtagtgttattccacgagacgttaaaagcattgaacattaaacatgaaattttatcattcagtgaggatgcctttgattcagacgatcatgcacaaccaaatatcattaatgaaattattaactatgattactcaacctttgaaaaagatggcccacgtattatggcacttgaacctcaagatgataatcgtgatggtgttgctattagagttgcaagtgaacgattaatgcgtcgaaatcaacatcaacgatttttaatcgtattttcagacggcgaaccgtctgcatttaattatagtcaagatggtattattgatacgtatgaagctgtagaaatgtcacgtaaatttggtattgaagtatttaatgtatttttgagtcaagatccaataactgaagatgttgaacaaacaattcataatatttatggtcaatatgctattttcgttgaaggtgttgcgcatttacctggacatctctctccattattaaaaaaattactacttaaatctttataa

SEQ ID NO: 8060 - DNA, 1008 bp, Staphylococcus aureus
atgacgcataatattcatgataatatcagccaatggatgaaaagtaatgaagaaacaccaattgttatgtcttctagaattcggttagcgcgtaatttagaaaatcatgtgcatccactaatgtatgctactgaaaatgatggatttagagttataaatgaggtacaagatgccttgccaaattttgaattaatgcgtcttgatcaaatggatcaacaaagtaaaatgaaaatggttgcaaagcatttgattagtcctgaactaataaaacaaccagcagccgcagtattagtgaatgatgatgaatctttaagtgtcatgataaatgaagaggaccatattcgtattcaagctatgggaactgacacgacattacaggctttatataatcaagcttcatcaattgatgatgaattagatcgaagccttgatataagttatgatgaacaacttggttatttaactacatgtcctaccaatataggtactggtatgagagcaagcgtgatgctacatttaccaggtctatctattatgaaaagaatgacacggattgctcaaaccattaatcgttttggatatacaatcagaggtatttacggtgaaggttcgcaagtttatggacatacttatcaagtatccaaccaacttacacttggtaaatctgagttagaaatcatagaaacattaacagaagttgttaatcaaatcattcatgatgaaaaacaaatacgacaaaagttagacacttataatcaattagaaacacaagaccgtgtttttcgctcgctaggtattttacaaaactgtagaatgataactatggaagaggcttcttatagattaagcgaagttaaacttggtatagatttaaattacattgaattacaaaactttaaatttaatgaattgatggtagctatacagtcaccatttttattagatgaagaagatgacaaatctgtaaaagaaaaacgagcagatatactaagagaacatataaagtag

SEQ ID NO: 8061 - DNA, 567 bp, Staphylococcus aureus
gtgctttgtgaaaattgtcaacttaatgaagcggaattaaaagttaaagttacaagtaaaaataaaacagaagaaaaaatggtgtgtcaaacttgtgctgaggggcaccatccgtggaatcaagctaatgaacagcctgaatatcaagaacatcaagataatttcgaagaagcatttgttgttaagcaaattttacaacatttagctacgaaacatggcattaattttcaagaagtagcgtttaaagaagaaaaacgttgcccatcatgtcatatgactttgaaagatattgcacatgttggtaaatttgggtgtgctaattgttatgcaacatttaaagatgacatcattgatatcgtccgcagagttcaaggtggacaatttgagcacgttggaaagacaccacattcttcacataaaaagatagctttaaagcgaaaaatcgaagaaaagaatgaatatttgaaaaaacttattgaaatccaagattttgaggaagcagccattgttagagatgaaattaaagcactaaaagctgagagtgaggtgcaacatgatgacgcataa

SEQ ID NO: 8062 - DNA, 354 bp, Staphylococcus aureus
atgacgcataatattcatgataatatcagccaatggatgaaaagtaatgaagaaacaccaattgttatgtcttctagaattcggttagcgcgtaatttagaaaatcatgtgcatccactaatgtatgctactgaaaatgatggatttagagttataaatgaggtacaagatgccttgccaaactttgaattaatgcgtcttgatcaaatggatcaacaaagtaaaatgaaaatggttgcaaagcatttgattagtcctgaactaataaaacaaccagcagccgcagtattagtgaatgacgatgaatctttaagtgtcatgataaatgaagaggaccatattcgtattcaagct

SEQ ID NO: 8063 - DNA, 2193 bp, Staphylococcus aureus
atgaatgcgttattaaatcatatgaatacagagcaaagtgaagctgtaaagacaacagaaggaccattgttaattatggcaggtgctggttcagggaagacacgtgttttaacacatagaattgcttatttattagacgaaaaagatgtctcaccatacaatgttttggctattacttttacaaataaagctgcaagagaaatgaaagaacgtgttcaaaaattagtaggtgatcaagcagaagttatttggatgtcaacattccactcaatgtgtgttcgtattttacgtcgtgatgcagatcgaataggtatagaacgcaattttacgataattgatcctacagaccaaaaatctgttattaaagacgtcttaaaaaatgaaaatattgatagtaaaaagtttgaacctcgtatgtttatcggtgcgatcagtaatttgaaaaatgaacttaaaacacctgcagatgctcaaaaagaagccacagattatcactcgcaaatggtagcaacggtttatagtggatatcaacgccaattgtcgcgtaatgaagcgttagattttgatgaccttattatgacaacgattaacttatttgagcgtgtaccagaagttctagaatattatcagaacaaattccaatatattcatgtagatgagtatcaagatactaataaagcacaatatacattagttaaattattagcaagtaagtttaaaaacttatgtgttgtaggtgactcagatcagtcaatttatggttggcgtggtgctgatattcaaaatatcttatcatttgaaaaagactacccagaagcgaatacaatctttttagagcaaaattatcgttcgacgaaaacgattttaaatgcggctaacgaagtgattaaaaataattctgaacgtaagccaaaaggactgtggactgcaaatacgaatggtgagaaaattcattactatgaagcaatgacagaacgtgatgaagcggaatttgtaatacgagaaattatgaagcatcaacgtaatggtaagaaatatcaagatatggcaattttatatagaacaaatgcacaatcacgtgtacttgaggaaacattcatgaaatctaatatgccatacacaatggttggtggccaaaagttctatgaccgtaaagaaatcaaagatttattaagttatttgcgtataattgccaatagtaatgatgacattagtttgcaacgtattattaatgttccaaaaagaggtgtaggtccttcatctgttgaaaaagttcaaaactatgcacttcaaaacaatatcagtatgtttgatgcacttggagaagctgattttatcggattgtcaaaaaaggtgacacaagagtgtcttaatttttacgagttaatccaaagcttgataaaagaacaagaatttttagaaattcatgaaatagttgatgaagtattacaaaagtctggctaccgagaaatgcttgaacgtgaaaatacactagaatctcgaagtagattagaaaacatcgatgaatttatgtcagtaccaaaagactatgaggaaaataccccattagaagaacagtcattaattaactttttaacggatttatcgttagtagctgatattgatgaggcagatactgaaaatggcgtaacactaatgacgatgcactcggctaagggccttgaatttccaatcgtctttataatggggatggaagaatctttattcccacatattagagcgattaagagtgaagatgatcacgaaatgcaagaagaacgtcgtatttgttatgtagcaattacaagggctgaagaggtgttatatatcactcatgcgacatcaagaatgttatttggtcgccctcagtcgaatatgccatctagatttttaaaggaaattccagaatcactattagaaaatcattcaagtggcaaacgacaaacgatacaacctaaggcaaaaccttttgctaaacgcggatttagtcaacgaacaacgtcaacgaaaaaacaagtatcgtcatctgattggaatgtaggtgacaaagtgatgcataaagcctggggagaaggcatggtgagtaatgtaaacgagaaaaatggctcaatcgaactagatattatctttaaatcacaagggccaaaacgtttgttagcgcaatttgcaccaattgaaaaaaaggaggattaa

SEQ ID NO: 8064 - DNA, 1068 bp, Staphylococcus aureus
atgtggaataagaatcgacttactcaaatgttaagtattgaatatccaattatacaagcaggtatggcaggaagtacgacaccgaaattagttgcatcagtaagtaacagtggtgggttaggcacaataggcgcaggttactttaatacgcagcaattggaagatgaaatagattatgtacgccaattaacgtcaaattcttttggcgtaaatgtctttgtaccaagtcaacaatcatataccagtagtcaaattgaaaatatgaatgcatggttaaaaccttatcgacgcgcattacatttagaagagccggttgtaaaaattatcgaagaacaacaatttaagtgtcatattgatacgataattaaaaagcaagtgcctgtatgttgttttacttttggaattcaaaatgaatctattatagaaagattgaaagaagcaaacattaagctaataggtacagcaacaagtgttgatgaagctattgcgaatgaaaaagcgggtatggatgctatcgttgctcaaggtagtgaagcaggtggacatcgtggttcatttttaaaacctaaaaatcaattacctatggttggaacaatatctttagtgccacaaattgtagatgtcgtttcaattccggtcattgccgctggtggaattatggacggtagaggagttttggcaagtattgtcttaggtgcagaaggggtacaaatgggcactgcatttttaacatcacaagatagtaatgcatcagaactactacgagacgcaattataaatagtaaagaaacagatacagtcgttacaaaagcgtttagtggaaagcttgcacgcggtatcaacaataggtttatcgaagaaatgtcccaatacgaaggcgatatcccagattatccaatacaaaatgagctaacaagtagcataagaaaagccgcagcaaacatcggcgacaaagagttaacacatatgtggagtggacaaagcccgcgactagcaacaacgcatcccgccaacaccatcatgtccaatataatcaatcaaattaatcaaatcatgcaatataaataa

SEQ ID NO: 8065 - DNA, 729 bp, Staphylococcus aureus
atggatcacaaatccccgctcgtgagttggaatttattcggttttgatatcgttttcaatttatcaagtatattgatgatacttgttacggcgtttcttgtttttctacttgctatcatttgtacgcgtaatttgaaaaaaagaccaactggcaaacaaaatttcgttgaatggatttttgatttcgtgaggggaatcattgaaggtaacatggcttggaaaaaaggtggtcaattccacttcttagcagtaacgctgattctgtacatttttatagctaatatgttaggtcttccgttttctatagtaacgaaagatcacacattgtggtggaaatcaccgacagctgatgcaacagtgactttaacgttgtctacaacgataatactgttaactcacttttatggaattaaaatgcgtggtacgaaacaatatcttaaaggttatgtacagccgttttggccattggcaattattaatgtttttgaagagttcacttcaacattaacgcttggtctgcgtttgtacggtaacatatttgcaggtgagatactattaacattacttgctggcttattctttaacgaaccagcatggggttggattattagtatcccaggattaattgtttggcaagcattttcaatatttgtaggaacaatccaagcatatatctttattatgctttcgatggtttatatgtcacataaagtggcagatgaacactaa

SEQ ID NO: 8066 - DNA, 267 bp, Staphylococcus aureus
atggaacaaaattcatatgtaatcatcgacgagactggtattcacgctagaccagcaacaatgttagtacaaacagcttcaaaattcgattctgatattcaattagaatataacggtaagaaagtaaacttaaaatcaatcatgggtgttatgagccttggtgttggtaaagatgctgaaattacaatttatgctgacggtagtgatgaatctgacgccattcaagcaatcagtgacgtcttatcaaaagaaggattgactaaataa

SEQ ID NO: 8067 - DNA, 1557 bp, Staphylococcus aureus
atgtctattactgaaaaacaacgtcagcaacaagctgaattacataaaaaattatggtcgattgcgaatgatttaagagggaatatggatgcgagtgaattccgtaattacattttaggcttgattttctatcgcttcttatctgaaaaagcggaacaagaatatgcagatgccttgtcaggtgaagatattacgtatcaagaagcatgggcagatgaagaatatcgtgaagacttaaaagctgaattaattgatcaagtcggttacttcattgaaccacaagatttattcagtgcgatgattcgtgaaattgaaacgcaagatttcgatatcgaacatctcgcaacggcgattcgtaaagttgaaacatcaacactaggtgaagaaagtgaaaatgactttatcggactgttcagcgatatggacttaagttcaacgcgactaggtaacaatgtcaaagaacgtactgcactaatttccaaagttatggttaaccttgacgacttaccattcgttcacagtgatatggaaattgatatgttaggtgatgcatacgaatttcttatcgggcgctttgcggcgacagcaggtaaaaaagcaggcgagttctatacaccacaacaagtatctaagatactggcgaagattgtcacagacggtaaagataaattacgtcacgtgtatgacccaacatgtggttcaggttcattattgttacgtgttggtaaagaaacgcaagtgtatcgttatttcggtcaagaacgtaacaataccacttacaacttagcgcgcatgaacatgttattacatgatgtgcgctatgaaaactttgatatccgtaatgatgatacgttggaaaatccagctttcttaggcaatacatttgatgcggttatagcgaacccaccatacagtgcgaaatggactgcagattcaaaatttgaaaatgatgaacgcttcagtggttacggcaagcttgcgccaaaatccaaagcagactttgcctttattcaacatatggtacattacctagacgatgaaggtaccatggcagttgtactcccacatggtgtcttattccgtggtgccgcagaaggcgtcattcgtcgttatttaattgaagaaaagaactacttagaagccgtgattggcttaccagtgaatattttctatgggacaagtattccaacatgtatcttagtatttaaaaaatgttgccaacaagacgacaacgtattatttatcgatgcatccaatgattttgaaaaaggaaaaaatcaaaaccatttaagcgatgcccaagtcgaacgtattattgacacatacaagcgtaaagaaacaattgataaatacagttacagtgcgacattacaagagattgccgataacgattacaacctaaacataccgaggtatgtcgatacattcgaagaagaagcgccaattgatttagatcaagtccaacaagatttgaaaaatatcgacaaagaaatcgcagaaattgaacaagaaatcaatgcatacctgaaagaacttggggtgttgaaagatgagtaa

SEQ ID NO: 8068 - DNA, 1554 bp, Staphylococcus aureus
atgtctattactgaaaaacaacgtcagcaacaagctgaattacataaaaaattatggtcgattgcgaatgatttaagagggaatatggatgcgagtgaattccgtaattacattttaggcttgattttctatcgcttcttatctgaaaaagcggaacaagaatacgcagatgccttgtcaggtgaagatatcacgtatcaagaagcatgggcagatgaagaatatcgtgaagacttaaaagcagaattaattgatcaagtcggttacttcattgaaccgcaagatttattcagtgcgatgattcgtgaaattgaaacgcaagatttcgatatcgaacatctggcgacggcaattcgtaaagttgaaacatcaacactaggtgaagaaagtgaaaatgactttatcggactgttcagcgatatggatttgagttcaacgcgactaggtaacaatgtcaaagaacgtactgcgttaatttccaaagtcatggttaaccttgacgacttaccattcgttcacagtgacatggaaattgatatgttaggtgatgcatacgaatttcttatcgggcgctttgcggcgacagcaggtaaaaaagcaggcgagttctatacaccacaacaagtatctaagatactggcgaagattgtcacagacggtaaagataaattacgtcatgtgtacgacccaacatgtggttccggttcattattgttacgtgttggtaaagaaacacaagtgtatcgttatttcggacaagaacgtaacaataccacatacaacttggcgcgtatgaatatgttattacatgatgtgcgttatgagaacttcgatatccgtaatgatgacacgttggaaaatccagcctttttaggccatacatttgatgcggttattgcaaacccaccatacagtgcgaaatggacagcagattcaaaatttgaaaatgacgaacgcttcagtggatacggcaagcttgcgccaaaatccaaagcagactttgcctttattcaacacatggtacattacctagacgatgaaggtaccatggtagtcgtactcccacatggtgtcttattccgtggtgccgcagaaggtatcattcgtcgttatttaattgaagaaaagaactacttagaagccgtgattggcttaccagcgaatattttctatgggacaagtattccaacatgtatcttagtatttaaaaaatgtcgccaacaagacgacaacgtattatttatcgatgcatccaatgattttgaaaaaggaaaaaatcaaaaccatttaagcgatgcccaagtcgaacgtattatagccacatataagcgtaaagaaacgattgataaatatagctacagcgcgacattacaagagattgccgataacgattacaacttaaatataccgagatatgttgatacattcgaagaagaagcaccgattgatttagatcaagtccaacaagatttgaaaaatatcgataaagaaatcgcagaaattgagcaagaaatcaatgcatacctgaaagaacttggggtgttgaaagatgag

SEQ ID NO: 8069 - DNA, 1554 bp, Staphylococcus aureus
atgtctattactgaaaaacaacgtcagcaacaagctgaattacataaaaaattatggtcgattgcgaatgatttaagagggaacatggatgcgagtgaattccgtaattacattttaggcttgattttctatcgcttcttatctgaaaaagcggaacaagaatacgcagatgctttggcaggtgaagacatcacgtatcaagaagcatgggcagatgaagaatatcgtgaagatttaaaagcagaattaattgatcaagtcggttacttcattgagccacaagatttattcagtgcgatgattcgtgaaattgaaacgcaagatttcgatatcgaacatctggcgacggcaattcgtaaagttgaaacatcaacactaggtgaagaaagtgaaaatgactttatcggactgttcagcgatatggatttgagttcaacgcgtttaggtaacaatgtcaaagaacgtactgcgttaatttccaaagtcatggttaaccttgacgatttaccattcgttcacagtgacatggaaattgatatgttaggtgatgcatacgaatttcttatcgggcgctttgcggcgacagcgggtaaaaaagcaggcgagttctatacaccacaacaagtatctaagatactggcgaagattgtcacagatggtaaagataaattacgtcacgtgtatgacccaacatgtggttcaggttcattactgttacgtgtaggtaaagaaacgcaagtgtatcgttatttcggacaagaacgtaataataccacatacaacttagcacgcatgaacatgttattacatgatgtacgttatgaaaatttcgatatccgtaatgatgacacgttggaaaatccagcctttttaggccatacatttgatgcggttattgcgaacccgccatacagtgcgaaatggacagcagattcaaaatttgaaaatgatgaacgatttagtggttacggcaagcttgcgcctaagtctaaagcagactttgcctttattcaacacatggtacattacctagacgatgaaggtaccatggcagtcgtactcccacatggtgtcttattccgtggggctgcagaaggcgtcattcgtcgttatttaatcgaagaaaagaactacttagaagccgtgattggtttgccagcgaacattttctatgggacaagtattccaacatgtattttagtatttaaaaaatgtcgccaacaagacgacaacgtactatttatcgatgcatccaatgattttgaaaaagggaaaaatcaaaaccatttaagcgacgcccaagtcgaacgcattattaacacatataaacgtaaagaaacgattgataaatatagctacagtgcgacattacaagagattaccgataacgattacaacttaaatataccgagatatgtcgatacattcgaagaagaagcgcggattgatttagatcaagtccaacaagatttgaaaaatatcgataaagaaatcgcagaaattgaacaagaaatcaatgcatacctgaaagaacttggggtgttgaaagatgag

SEQ ID NO: 8070 - DNA, 1017 bp, Staphylococcus aureus
atgtctattactgaaaaacaacgtcagcaacaagctgaattacataaaaaattatggtcgattgcgaatgatttaagagggaatatggatgcgagtgaattccgtaattacattttaggcttgattttctatcgcttcttatctgaaaaagcggaacaagaatatgcagatgccttgtcaggtgaagacatcacgtatcaagaagcatgggcagacgaagaataccgtgaagacttaaaagcagaattaattgaccaagtcggttacttcattgagccagaagatttattcagtgcgatgattcgtgaaattgaaacgcaagatttcgatatcgaacacctggcgacggcaattcgtaaagttgaaacatcaacattaggtgaagaaagtgaaaatgactttatcggtctgttcagcgatatggatttgatttcaacgcgactaggtaacaatgtcaaagaacgtactgctttaatctctaaagtcatggttaatcttgacgacttaccattcgttcacagtgacatggaaattgatatgttaggtgatgcatatgaattcctaattgggcgctttgcggcgacagcgggtaaaaaagcaggcgagttctatacaccacaacaagtatctaagatactggcgaagattgtcacagacggtaaagataaattacgtcacgtgtatgacccaacatgtggttcaggttcactgttgttacgtgttggtaaagaaacacaagtgtatcgttatttcggtcaagaacgtaacaatactacatacaacttagcacgcatgaatatgttattacatgatgtgcgttatgagaacttcgatatccgtaatgatgacacattggaaaacccagcctttttaggcaatacatttgatgcggttattgcgaacccaccgtatagtgcgaaatggactgcagattcaaagtttgaaaatgacgaacgattcagtggttacggcaaacttgcgcctaagtctaaagcagactttgcctttattcaacac

SEQ ID NO: 8071 - DNA, 1554 bp, Staphylococcus aureus
atgtctattactgaaaaacaacgtcagcaacaagctgaattacataaaaaattatggtcgattgcgaatgatttaagagggaacatggatgcgagtgaattccgtaattacattttaggcttgattttctattgcttcttatctgaaaaagccgaacaagaatatgcagatgccttgtcaggtgaagacatcacgtatcaagaagcatgggcagatgaagaataccgtgaagacttaaaagtagaattaattgaccaagtcggttacttcattgagccacaagatttattcagcgcgatgattcatgaaattgaaacgcaagatttcgatatcgaacatctggcgacggcaattcgtaaagttgaaacatcaacactaggtgaagaaagtgaaaatgactttatcggactgttcagcgatatggacttaagttcaacgcgtttaggtaacaatgtcaaagaacgtactgcgttaatttccaaagttatggttaatcttgacgatttaccattcgttcacagtgatatggaaattgatatgttaggtgatgcatatgaattccttatcgggcgctttgcggcgacagcgggtaaaaaagctggcgagttctatacaccacaacaagtatctaagatactggcaaagattgtcacagacggtaaagataaattacgtcacgtgtatgacccaacatgtggttcaggttcattactgttgcgtgttggtaaagagacacaagtatatcgttatttcggacaagaacgtaacaataccacatacaacttagcacgcatgaacatgttgttacatgatgtacgttatgagaactttgatatccgtaatgatgatacgttggaaaatccagcctttttaggcaatacatttgatgcggttattgcgaacccaccatacagtgcgaaatggacagcagattcaaaatttgaaaatgatgaacgttttagtggttacggcaaacttgcgccaaaatccaaagcagactttgcctttattcaacacatggtacattacttagacgatgaaggtaccatggccgttgtactcccacatggtgtcttattccgtggtgccgcagaaggtatcattcgtcgttatttaattgaagaaaagaactacttagaagccgtgattggtttgccagcgaatattttctatgggacaagtattccaacatgtattttagtatttaaaaaatgtcgccaacaagacgacaacgtattatttatcgatgcatccaatgattttgaaaaaggaaaaaatcaaaaccatttaagcgatgcccaagtcgaacgtattatagacacatataagcgtaaaaaaacgattgataaatatagctacagcgcgacattacaagagattgccgataacgattacaacttaaacataccgcgatatgtcgatacattcgaagaagaagcgccaattgatttagatcaagtccaacaagatttgaaaaatatcgataaagaaatcgcagaaattgaacaagaaatcaatgcatacctgaaagaacttggggtgttgaaagatgag

SEQ ID NO: 8072 - DNA, 933 bp, Staphylococcus aureus
atgttaacgacagaaaaactagttgaaacattaaagttagatttaatcgctggtgaagaaggactatcgaagccaattaaaaatgctgatatatcaagaccaggcttagagatggcaggttatttttcacattatgcgtcagatagaatacaactattaggaacaacggaactatcgttttacaatttattaccagataaggatcgcgcaggtcgtatgcgtaaactatgcagaccagaaacgcctgcaattattgtgacacgtggattgcagccaccagaagaattagttgaagctgcaaaagaattaaataccccacttatagttgctaaagatgcgactacaagtttaatgagtcgcttaacaacgtttttagagcatgcacttgcaaagacgacatctttacatggtgttttagtagatgtttacggtgttggtgtactaattaccggtgattcaggaataggtaaaagtgagactgcgttggaattagttaaacgtgggcatagattagtagcagatgataatgtagaaatacgtcaaattaataaagatgaactaatagggaaaccaccaaagttaatagaacatctattagaaatacgtggactaggtattatcaatgttatgactttatttggcgcgggttcaatattaactgaaaaacgaattagattaaatattaatttggaaaactggaacaagcaaaagttatatgaccgcgtaggtcttaatgaagagacgctaagtattttagatactgaaatcactaaaaaaacaatacctgtaagacctggtagaaatgttgcggtaattattgaggtcgctgcaatgaactatcgattaaatatcatgggcattaacactgccgaagaatttagtgaaagattaaatgaagaaattatcaagaacagtcataagagtgaggagtag

SEQ ID NO: 8073 - DNA, 966 bp, Staphylococcus aureus
atgatttttgtatatgcgttattagcgctagtgattacatttgttttggtacctgttttaatacctacattaaaaaggatgaaatttggtcaaagtattcgagaagaaggtccacaaagccatatgaagaagactggtacaccaacgatgggtggactaacatttctattaagtattgtgataacgtctttggtggctattatatttgtagatcaagctaatccaatcatactgttattatttgtgacgattggttttgggttaattggttttatagatgattatattattgttgttaaaaagaataaccaaggtttaacaagtaaacagaagtttttggcgcaaattggtattgcgattattttctttgttttaagtaatgtgtttcatttggtgaatttttctacgagcatacatattccatttacgaatgtagcaatcccactatcatttgcatatgttattttcattgttttttggcaagtaggtttttctaatgcggtaaatttaacagatggtttagatggattagcaactggactgtcaattatcggatttacaatgtatgccatcatgagctttgtgttaggagaaacggcaattggtattttctgtatcattatgttgtttgcacttttaggatttttaccatataacattaaccctgctaaagtgtttatgggagatacaggtagcttagctttaggtggtatatttgctacgatttcaatcatgcttaatcaggaattatcattaatttttataggtttagtattcgtaattgaaacattatctgttatgttacaagtcgctagctttaaattgactggaaagcgtatatttaaaatgagtccgattcatcatcattttgaattgataggatggagcgaatggaaagtagttacagtattttgggctgttggtctgatttcaggtttaatcggtttatggattggagtgcattaa

SEQ ID NO: 8074 - DNA, 1218 bp, Staphylococcus aureus
attgaaccacaaacattgaagttatttaaagtttgtaaaatgcgtggtattccaatctttacattcattaataaattagaccgagtaggtaaagaaccatttgaattattagatgaaatcgaagagacattaaatattgaaacataccctatgaattggccaattggtatgggacaaagtttctttggcatcattgatagaaagtctaaaacaattgaaccatttagagatgaagaaaatatattacatttgaatgatgattttgagttggaagaagatcatgcaattacaaatgatagtgcttttgaacaagcgattgaagaattaatgttggttgaagaagcgggtgaagcctttgataatgacgcgctgttgagtggagacttaacacctgtatttttcggttcagctttagctaactttggtgtacaaaatttcttaaatgcatatgttgattttgcgccaatgccaaatgcgagacaaacaaaagaagacgttgaagtaagcccgtttgatgattcattttcaggatttatctttaaaattcaagccaacatggaccctaaacaccgtgatagaattgcctttatgcgtgtcgttagtggtgcatttgaacgtggtatggatgttactttgcaacgtactaataaaaagcaaaagatcacacgttcaacgtcatttatggcagacgataaagaaactgtgaatcatgctgtagcaggcgatatcattggactatatgatactggtaattatcaaattggagatactttagttggtggaaaacaaacctacagtttccaagatttaccacaatttacgccagaaatttttatgaaagtttctgctaaaaacgtcatgaaacagaagcatttccataaaggtattgaacaattagtacaagaaggtgcgattcaatactataaaacattacacacaaaccaaattattttaggtgctgttggtcagttacaatttgaagttttcgaacatagaatgaaaaacgaatataatgttgatgttgttatggagccagtaggccgtaaaattgcacgttggattgaaaatgaagaccaaattacagataagatgaacacatcaagatcgattttagtgaaagatagatatgacgatttagtattcttatttgaaaatgaatttgcaacaagatggtttgaagagaaattccttgaaattaaattgtatagtttactttaa

SEQ ID NO: 8075 - DNA, 252 bp, Staphylococcus aureus
ttgatcaataaaagatttattgatgaaggtaaaactattgatgtttatttattcgaagcattaaataaccagataatcattgctataccagattggttttggtcatatcagatggcaatgacattagatgaagaaacttgttttgaagcaatactcatgcaattgtttgtttttaaagaagaggaagaggcagaatcgattgcatcacaactaacagattggatagaaacatataaaaaggagaaagactaa

SEQ ID NO: 8076 - DNA, 177 bp, Staphylococcus aureus
attatttcacatcccgatgcagggaaaacaacgttaactgaaaaactattgtacttcagtggtgctattcgtgaagcgggtacagttaaagggaagaagactggtaaatttggcgaccaagtgactgggaatgaaagtttgaaccaaagaggcgttggttatttcctgtatacttag

SEQ ID NO: 8077 - DNA, 1056 bp, Staphylococcus aureus
gtgaaagctttagtaaaaacaagagaaggacatggcaacttagaacttcttgataaagaagttgcaacaccgctagatgataaagtaaagattaaagtacattatgcaggaatttgtggcacagacattcatacttatgaagggcattataaagttaattttccagtgacattaggtcatgaattttctggtgaaatcgttgaagttggagcagacgttaaagattttaaagttggtgaccgtgtcacttctgaaactacattctatgtttgtaatgagtgtgaatactgtaaatcaaaagactataatttatgcaaccatcgaaaaggtattggaacacaagttgatggcgtatttactaattatgtcattgcacgtgaagaaagtttgcatcatattccagacgaagtatcgtatcagtctgcagctatgacagaaccattagcatgtgcacatcatggcgtttctaagattcaagtgaactctggcgatgtagcagttgtaatgggacctgggccaatcggattacttgtagcacaagtgttgaaaagtaaaggcgcaactgttgtggtaactggattggacaatgacaaagtcagattagataaagcagaagcattgcacatggattatgtagtcaatttacaacaaacagacttaaaaacgtatatcaatggaattacagacggttacggtgcagatgttgttgttgaatgttcaggtgcagttccagcagcacgacaaggtttagatattatacgcaaaaaaggtttctacagtcaaataggtatttttaaggatgctgaaattccatttgatatggaaaaagtgattcaaaaagaaataacagttgttggtagtagaagtcaaaagccagcagattgggaaccttcattgcaacttatggcggatggtttagtaaatgctgaagctttggtgacaaaaatatatgatatttcgaaatgggacgaggcgtatcaacatttaaaatctggcgaaggtattaaagcattacttaagccgctcgatttagatgaaaatgaaggagagaattaa

SEQ ID NO: 8078 - DNA, 1044 bp, Staphylococcus aureus
gtgaaagcattgaaattatatggcgtagaagatttacggtatgaggataatgaaaagccagtcattgaaagtgcgaatgacgttattgttaaagtacgagcgactggcatatgtggttcagacacgtcacgatacaaaaaaatggggccatacattaaaggtatgccatttggtcatgaattttcaggtgtagtagatgccattggaagtgatgttacgcatgttaatgtgggcgacaaagtgacaggttgcccagcaataccttgttatcaatgcgagtattgtttgaaaggtgaatatgcacgatgtgaaaagttattcgtcattggctcatatgaacctggatcgttcgcggaatatgtcaaattgccagcgcaaaatgttttaaaggttccagacaatgttgattacattgaagcagcaatggttgagccatcagccgttgttgcgcatgggttttataaatcgaatatacaacctggtatgactgttgcagtaatggggtgtggcagtataggtttgttagctattcaatgggcacgaatatttggtgctgcacatatcatcgctatagatatagatgcgcataaactagatattgcaacatcattgggcgcacatcaaacaatcaattcaaaagaagaaaatcttgagaaattcatcgaaaatcattacgccaatcaaatcgatttagctatagaatcatcaggtgctaaagttacgattggtcaaatattgacgctacctaaaaaaggtggcgaggtggtattactcggaataccatatgatgatattgagattgatcgcgttcattttgaaaaaattctgcgtaacgagttgacagtatgtggctcttggaactgtttgtccagtaattttccgggcaaagagtggacggcaaccttacattatatgaagacgaaagatattaatgtaaagcctattatttctcattttttaccgttagaaaaaggcccggagacatttgataaattagttaacaagaaagaacgatttgataaagtcatgtttacgatttattag

SEQ ID NO: 8079 - DNA, 147 bp, Staphylococcus aureus
atggtagaatcaatgctaacttttatgcttgggccattaagacaaatcactgatttttatatggaacatttactcgtaagtaattccatcgtcattgcaggttattttgcgacaggtatttttaaaaagaaaaaagttgtgaattaa

SEQ ID NO: 8080 - DNA, 1092 bp, Staphylococcus aureus
atgaaatttttaaaagatacttcaattgctgaaatatcgtctatactttatctgatttttcctattgccggtatattttttaatgaagtatatggtcccaaatggttgtatattatatcagtcattgtcttttcgttgtcgtatcttatattagttatagtaaataatagacttaatacattaatgttttacattttgttgattattcattattttattatttgttattttgttttcagtgtacatccaatgctaagtttgtttttcttttatagtgcttttgccgttccatttacttttaaaaataatgttaaaaaaacggcaactaatcttttcatactaacaatgattatatgtacaataataacgtacttattgtataacaactattttgttgcaatgatggtttattatgtcgttatatcgttaataatgctagataattttaaaaaaatgaaaaaccgtgaatatcaaaaagaaatagcagaaaaaaatagacatattaatacattaattgctgaacaagagcgacatagaattggtcaagacttacatgatacgttagggcatgtgtttgcaagtttatcattaaaatcagaattagcttataaactaatagatactgatgtagaaaaagtaaaagctgaattattagcaattaataaattatctcgtgaatcattgaacaaagttcgagaaattattgatgatgtaaaattaccatcatttattgaagagattgatagtatacgtaaagttttaaaagatgctgatattgattttacatttgaaaataaagaattagcgcaagtattaagtcctactaaacaatctatgttagttatgattacgcgtgaagcgataaataatgttattaaacatgcaaatgcttcaaaagttcatggtaaattaaaaactgtaaacaatcataaattactgcttatgattgaagatgatggcaaaggtatcgatagtgattgtgaggtgaaaagtatttcacagcgtgtacaacatttaaatggaactttagcagtcgactcaacaaatggaactaaaataatcattgaaatctcaacaggaggaatagcatga

SEQ ID NO: 8081 - DNA, 603 bp, Staphylococcus aureus
atgacatctttaattattgcagaagatcaaaatatgttacgacaggcaatggttcaattaattaaactacatggtgattttgaaattttagcagatactgataatggtctcgatgcaatgaaacttattgaagaatataatcctaacgttgttattttagatatagaaatgccaggcatgactggacttgaagttttagcggaaattagaaaaaagcatttgaatattaaagtgattattgtaacaacttttaaaagaccgggatactttgaaaaagcagttgtgaatgatgtggatgcatatgttttaaaagaacgttctatagaagaattggtggaaaccattaataaagtaaataacggagagaaagaatatagcgccacattgatgacttcattttttgtagataaaaacccattaacgcccaaagaacaaattgtattaagggaaattggcaatggtttaagtagtaaagaaataagtgaaaaattatttttgacagatggaacagttagaaattatacatctgttataattgataaattatttgcagataatcgttttgatgcttggaaaaaggcaaatgaaaaaggctggatctaa

SEQ ID NO: 8082 - DNA, 972 bp, Staphylococcus aureus
atgaagtatttattaaagggaaatattttgcttctattactaatattgttgacaattatttcgttgttcataggtgtgagtgaactatcaattaaagatttactacatttaactgaatcacagcggaatattttattctcaagccgaataccaaggacgatgagtattttaattgctggaagttcgttggctttagcaggcttgataatgcaacaaatgatgcaaaataagtttgttagtccgactacagctggaacgatggaatgggctaaactaggtattttaattgctttattgttctttccaaccggtcatattttattaaaactagtatttgctgttatttgcagtatttgcggtacgtttttatttgttaaaatcattgattttataaaagtgaaagatgtcatttttgtaccgcttttaggaattatgatgggtgggattgttgcaagtttcacaaccttcatctcattgcgcacgaatgctgttcaaagcattggtaactggcttaacgggaactttgccattatcacaagtggacgctatgaaattttatatttaagtattcctcttttagcattgacatatctttttgctaatcatttcacgattgtaggaatgggtaaagactttactaataatttaggtttgagttacgaaaaattaattaacatcgcattgtttattactgcaactattacagcattggtagtggtgactgttggaacattaccgttcttaggactagtaataccaaatattatttcaatttatcgaggtgatcatttgaaaaatgctatccctcatacgatgatgttaggtgccatctttgtattattttctgatatagttggcagaattgttgtttatccatatgaaataaatattggtttaacaataggtgtatttggaacaatcattttccttatcttgcttatgaaaggtaggaaaaattatgcgcaacaataa

SEQ ID NO: 8083 - DNA, 102 bp, Staphylococcus aureus
atgtacaatgctatttatattggcagtagttggcggggccccaacacagaagcaggcggaaagtcagctaacaatattgtgcaagttggcggggccccaaca

SEQ ID NO: 8084 - DNA, 216 bp, Staphylococcus aureus
cttggacacgatgatccaacaatgattcgtatgcttcaagatttatcaggaattgatccaaaaacaatacctgtagatgataaagaagtaatgcagatttttagtacacctgaaagtttgggtgttactgaagatgaaattttatgtaaaacaggtacatttggggtaccagaattcggtacaggatttgtgcgtcaaatgttagaagatacaaag

SEQ ID NO: 8085 - DNA, 1017 bp, Staphylococcus aureus
atgattaaacaattatacaaaaacatcacaatttgtagtttagcaatatctactgcattaactgtatttccggcaacttcttatgcaaaaattaattctgaaattaaagctgtttctgagaagaatcttgatggtgatactaaaatgtatacacgtacagctacaacaagtgatagtcaaaaaaatattactcaaagcttacaatttaatttcttaactgaacctaattatgataaagaaacagtatttattaaagcaaaaggtacaattggtagtggtttgagaattttagacccaaatggttattggaatagtacattaagatggcctggatcttattcagtttcaattcaaaatgttgatgacaacaacaatacaaatgtgactgactttgcaccaaaaaatcaggatgaatcaagagaagttaaatatacgtatggttataaaacaggtggagatttttcgattaatcgtggaggcttaactggaaatattacaaaagagagtaattattcagagacgattagttatcaacaaccatcatatcgtacattacttgatcaatctacgtcacataaaggtgtaggttggaaagtagaagcacatttgataaataatatgggacatgaccatacgagacaattaactaatgatagtgataatagaactaaaagtgaaatcttttctttaacacgaaatggaaatttatgggcgaaagataatttcacacctaaagacaaaatgcctgtaactgtgtctgaagggtttaatccagaatttttagctgttatgtcacatgataaaaaagacaaaggtaaatcacaatttgttgttcattataaaagatcaatggatgagtttaaaatagattggaatcgccatggtttctggggctattggtctggtgaaaaccatgtagataaaaaagaagaaaaattatcagcattatatgaagttgattggaagacacatgatgtgaagtttgtaaaagtacttaatgataatgaaaagaaataa

SEQ ID NO: 8086 - DNA, 1188 bp, Staphylococcus aureus
atgctagataaaaatcaattagctaaatataaacaagatcatttgtgtgaatatgaaaaaataatgagtaacaatgaaaaagaagcacttgaagagaaggtagcgtcattagatttagattttattgccaaattatataacgatttatacatcaataagaaaacaatagatgatgtatctgcagtttctgaagtgaaatatgatattaaatcacaaatgagtgatgatgagattaagcgtttagaggaacaaggacttcaagctattaaagaaggacaatttgcagtacttttgatggcaggtggtcaaggaacaagacttggttacaagggccctaaaggttcgtttgaaattgaaggtgtaagtttatttgaacttcaagctaaccaattaaaaacattgaatcatcaatctggacatacgattcaatggtatattatgacaagtgatatcaatcatgaagaaactttagcttatttcgaagcacatagttattttggatatgatcaagaagcaatccatttctttaaacaagataatattgtggcgcttagtgaagaagggaagttaattttaaatcaacagggtcgtattatggaaacgccgaatggtaatggtggcgtgtttaaatctttagacaaggcaggatacttagaagaaatgtctaataatggcgttaagtatattttcttgaataatatcgacaatgttttagtaaaagtgttggatccactatttgcaggatttacggtagaacatgattacgatattacttctaaaacgattcaaccaaaaccaggagaaagtgttggacgtttagttaatgtcgattgtaaagatacagtactggagtattcagaattagatccagaagttgcaaatcaatttaacaatgctaatatcggtattcatgcatttaaacttggttttattttaaacgctgtaaatcgtgagttaccttatcatttagctattaagaatttgaaacaattagatgagaactttggggttattgaacaaccaactttaaaattcgaattgttctattttgacatatttacttatggaactagttttgtcacgttacaagttcctagagaagaagaattttcacctcttaaaaataaagaaggtaaagatagtgttgcaactgcaacagaagatttacgtagaatgggtttaatttaa

SEQ ID NO: 8087 - DNA, 687 bp, Staphylococcus aureus
atgatgtccaaatcaactaaaaaaagtaatgacacaatcgtagaaacatttaaggatatcatccctttatcatttggagaagaaattggtaatgcggcatctcatggtgttgcagctttgttaacattattagtgttaccctatgcggctgtgcacagttatattgcacatggtacgcttgcgtctgtgagtatgtctatttatgttatttctatctttatgatgtttatttcatctactatttatcattctatgcaaaatgaaacacctcataaatatattttaaggattatcgatcacagtatgatttacgtagcaatttctggtacatatacgcctattttgttaacagttgtaggtggttggataggttggacagtatttattttattatggggaacgacactttgggggattttatataaatccatagctgtcaaagttaaccaaaagttaagcttaattgtctatttagtgatgggctgggtaggtattatcttgttaccaattatttttattcgcacatcatggatattcatattattcattttcttaggtggtgtgtcttatacaattggtgcatggttttatgcacaaaagaatagaccatattttcatatgatttggcatatttttattgtaatagcatcactattgcatttaattgcgatcttatattttatgtag

SEQ ID NO: 8088 - DNA, 1407 bp, Staphylococcus aureus
atggtagttggagatttcccaattgaaacagatactatagtaatcggagcaggtcctggtggatacgttgcagcaattcgtgcagctcaattaggacaaaaagtaacaatcgttgagaaaggtaatcttggtggtgtttgcttaaacgtaggatgtattccttcaaaagcattactacatgcttctcaccgttttgttgaagcacaacattctgaaaacttaggtgttattgctgaaagtgtttctttaaacttccaaaaagttcaagaattcaaatcatcagttgttaataaattaactggtggtgttgaaggcttacttaaaggtaacaaagttaacatcgttaaaggtgaagcatatttcgtagataacaatagcttacgtgttatggacgaaaagagcgcacaaacatacaactttaaaaatgcaatcattgcaacaggttcaagaccaattgaaattcctaatttcaaattcggtaaacgtgttatcgactcaacaggtgctttaaacttacaagaagtaccaggtaaattagttgtagttggtggaggatacattggatcagaattaggtacagcatttgctaactttggttcagaagtaaccatccttgaaggtgctaaagatatcttaggtggcttcgaaaaacaaatgacacaacctgttaaaaaaggtatgaaagaaaaaggtgttgaaatcgttactgaagctatggctaaatcagctgaagaaacagataacggagttaaagttacttatgaagctaaaggcgaagagaaaacaatcgaagctgattatgtattagtaactgtaggtcgtcgtccaaacacagacgaattaggcctagaagaattaggtgttaaattcgctgaccgtggattattagaagttgataaacaaagccgtacgtctatcagcaatatctatgcaattggtgatatcgttccaggtttaccacttgctcacaaagctagctatgaagctaaagttgctgctgaagcaattgatggtcaagctgctgaagttgattacattggtatgccagcagtatgctttactgaaccagaattagctacagttggttattcagaagcgcaagctaaagaagaaggtttagcaattaaagcttctaaattcccatatgcagcaaatggtcgtgcattatcattagatgatactaacggatttgttaaacttattacacttaaagaagatgatactttaatcggtgctcaagtagttggtactggtgcatcagatattatctctgaattaggtttagcaattgaagctggtatgaatgctgaagatatcgcattaacaatccatgcacatccaacattaggtgagatgactatggaagcagcagaaaaagctatcggatacccaatccatacaatgtaa

SEQ ID NO: 8089 - DNA, 381 bp, Staphylococcus aureus
gatatcgacttaaactttagtggtgaatatcaaccgaatgcccataactacacaaaagtattatttggtgaggataaagtattccgtgcaggtacaattggtactgttgctgaaaagactgcttttggttatgttaaaggctatttgaatgatcaaggcatccacaaaagaggcgctgaaatagatcgactcgttaaaggatgtacaggtgttaaacgtacaactggacagcatccagggggtattattgtagtacctgattacatggatatttatgattttacgccgatacaatatcctgccgatgatcaaaattcagcatggatgacgacacattttgatttccattctattcatgataatgtattaaaacttgatata

SEQ ID NO: 8090 - DNA, 858 bp, Staphylococcus aureus
atgtttaaagatttttttaatcgaacaaagaaaaagaaatatcttacagtacaagactctaaaaataatgatgtgcctgcaggtattatgactaagtgtccaaagtgtaagaaaattatgtacacaaaagaattagctgaaaatttaaatgtgtgctttaattgtgatcatcatattgctttaactgcgtataaacgtatagaagcaatttctgatgaaggatcatttacagaattcgataagggaatgacctctgcgaatccattagattttccaagttatttagaaaaaattgaaaaggaccaacaaaagacaggtcttaaagaagcagttgtgactggtacagcgcaactagatggtatgaaatttggcgttgctgtcatggattcacgttttagaatgggaagtatgggatcggttatcggtgaaaagatatgtcgcatcattgattactgcactgagaaccgtttaccatttattcttttctctgcaagtggtggtgcacgtatgcaagaaggtattatttccttgatgcaaatgggtaaaaccagtgtatctttaaaacgtcattctgacgctggactattatatatatcatatttaacacatccaactactggtggtgtatctgcaagttttgcatcagttggtgatataaatttaagtgagccaaaagcgttgataggttttgcaggtcgtcgagttattgaacagacaataaacgaaaaattgccagatgatttccaaactgcagaatttttattagagcatggacaattggataaagttgtacatcgtaatgatatgcgtcaaacattgtctgaaattctaaaaatccatcaagaggtgactaaataa

SEQ ID NO: 8091 - DNA, 945 bp, Staphylococcus aureus
atgttagattttgaaaaaccactttttgaaattcgaaataaaattgaatctttaaaagaatctcaagataaaaatgatgtggatttacaagaagaaattgacatgcttgaagcgtcattggaacgagaaactaaaaaaatatatacaaatctaaaaccatgggatcgtgtgcaaattgcgcgtttgcaagaaagacctacgaccctagattatattccatatatctttgattcgtttatggaactacatggtgatcgtaattttagagatgatccagcaatgattggtggtattggctttttaaatggtcgtgctgttacagttattggacaacaacgtggaaaagatacaaaagataatatttatcgaaattttggtatggcgcatccagaaggttatcgaaaagcattacgtttaatgaaacaagctgaaaaattcaatcgtcctatctttacatttatagatacaaaaggtgcatatcctggtaaagctgctgaagaacgtggacaaagtgaatctatcgcaacaaatttgattgagatggcttcattaaaagtaccagttattgcgatagtcattggtgaaggtggcagtggaggtgctctaggtattggtattgccaataaagtattgatgttagagaatagtacttactctgttatatctcctgaaggtgcagcggcattattatggaaagacagtaatttggctaaaattgcagctgaaacaatgaaaattactgcccatgatattaagcaattaggtattatagatgatgtcatttctgaaccacttggcggtgcacataaagatgttgaacagcaagctttagctattaaatcagcgtttgttgcacagttagattcacttgagtcattatcacgtgatgaaattgctaatgatcgctttgaaaaattcagaaatatcggttcttatatagaataa

SEQ ID NO: 8092 - DNA, 1602 bp, Staphylococcus aureus
atgttacaagtaactgatgtgagtttacgttttggagatcgtaaactatttgaagatgtaaatattaaatttacagaaggtaattgttatggattaattggtgcgaatggtgcaggtaaatcaacattcttaaaaatattatctggtgaattagattctcaaacaggacatgtttcattaggtaaaaatgaacgtctagctgttttaaaacaggaccactatgcttatgaagatgaacgcgtgcttgatgttgtaattaaaggtcacgaacgtctttatgaggttatgaaagaaaaagatgaaatctatatgaagccagatttcagtgatgaagatggtatccgtgctgctgaacttgaaggtgaatttgcagaaatgaatggttggaatgctgaagctgatgctgctaaccttttatctggtttaggtatcgatccaactttacacgataaaaaaatggctgaattagaaaacaaccaaaaaattaaagtattattagcgcaaagtttattcggtgaaccagacgtactattactggatgagcctactaacggtctcgatattccagcaatcagttggttagaagatttcttaattaactttgataatactgttatcgtagtatcgcatgaccgtcatttcttaaataatgtatgtactcatatcgctgatttagacttcggtaaaattaaagtttatgttggtaactatgatttttggtatcaatctagtcagttagctcaaaagatggctcaagaacaaaacaagaaaaaagaagaaaaaatgaaagagttacaggactttattgcacgtttctcagctaacgcttctaaatctaaacaagcaacaagtcgtaaaaaacaacttgagaaaattgaattagatgatattcaaccatcatcaagaagatatcctttcgttaaattcacgcctgagcgtgagattggtaacgacttattaatcgttcaaaatctttctaaaacaattgacggcgaaaaagtattagataatgtatcattcacaatgaatccaaatgataaagcgattttaattggagatagtgaaattgcaaaaacaacattacttaaaatattagctggcgaaatggaaccagacgaaggttcatttaaatggggtgttactacatcattaagttacttccctaaagataactcagagttctttgagggtgtaaatatgaatctcgttgattggttaagacaatatgctcctgaagatgaacaaacagaaacatttttacgtggtttcttaggtcgtatgttatttagtggtgaagaagttaagaaaaaagctagtgtgctttcaggtggagaaaaagtacgttgtatgctaagtaaaatgatgttatcaagtgcgaatgtacttttacttgacgaacctactaaccacttagacttagaaagtattactgctgtcaatgatggtcttaaatcatttaaaggttctatcatctttacttcttatgacttcgaatttatcaacacgattgcaaaccgtgttatcgatttaaataaacaaggcggcgtttcaaaagaaattccatatgaagaatacttgcaagaaatcggcgttttaaaataa

SEQ ID NO: 8093 - DNA, 708 bp, Staphylococcus aureus
atgcaaatggctagaaaagttgttgtagttgatgatgaaaaaccgattgctgatattttagaatttaacttaaaaaaagaaggatacgatgtgtactgtgcatacgatggtaatgatgcagtcgacttaatttatgaagaagaaccagacatcgtattactagatatcatgttacctggtcgtgatggtatggaagtatgtcgtgaagtgcgcaaaaaatacgaaatgccaataataatgcttactgctaaagattcagaaattgataaagtgcttggtttagaactaggtgcagatgactatgtaacgaaaccgtttagtacgcgtgaattaatcgcacgtgtgaaagcgaacttacgtcgtcattactcacaaccagcacaagacactggaaatgtaacgaatgaaatcacaattaaagatattgtgatttatccagacgcatattctattaaaaaacgtggcgaagatattgaattaacacatcgtgaatttgaattgttccattatttatcaaaacatatgggacaagtaatgacacgtgaacatttattacaaacagtatggggctatgattactttggcgatgtacgtacggtcgatgtaacgattcgtcgtttacgtgaaaagattgaagatgatccgtcacatcctgaatatattgtgacgcgtagaggcgttggatatttcctccaacaacatgagtag

SEQ ID NO: 8094 - DNA, 2457 bp, Staphylococcus aureus
atgttatttggtagattaactgaacgtgcacagcgcgtattagcacatgcacaagaagaagcaattcgtttaaatcattcaaatataggaacagaacacctattattggggttaatgaaagaacctgaaggaattgctgcaaaagtattagaaagttttaatatcactgaagataaagtaattgaagaagttgaaaaattaatcggacatggtcaagatcatgttggtacattgcattatacacctagagctaaaaaagtcattgaattatcgatggatgaagctagaaaattacatcacaattttgttggaacggaacatattttattaggcttgattcgtgaaaatgaaggtgttgcagcaagagtttttgcaaatctagatttaaatattactaaagcacgtgcacaagttgtgaaagctttaggaaaccctgaaatgagtaataaaaatgcacaagctagtaagtcaaataatactccaactttagatagtttagctcgtgacttaacagtcattgccaaagacggtacattagatcctgttataggacgtgataaagaaattacacgtgtaattgaagtattaagtagacgtacgaaaaacaatcctgtacttattggagagccaggtgttggtaaaactgctattgctgaaggtttagcgcaagccatagtgaataatgaggtaccagagacattaaaagataagcgtgttatgtctttagatatgggaacagtagttgcaggtactaaatatcgtggtgaatttgaagagcgtctgaaaaaggttatggaagaaatccaacaagcaggtaatgtcatcctatttattgatgagttgcatactttagttggtgctggtggtgctgaaggtgctatcgatgcttcgaatattttgaaaccggcattagcacgtggtgaattacaatgtattggtgctactacattagatgaatatcgcaaaaatattgaaaaagacgcggctttagaacgtcgtttccaacctgtacaagttgatgaaccttcagtagtagatacagttgctattttaaaaggattaagagatcgttacgaagcacaccatcgtattaatatttcagacgaagctattgaagcagctgttaaattaagtaacagatacgtttcagatcgtttcttaccagataaagcaattgatttaattgatgaagcaagttctaaagtaagacttaagagtcatacgacacctaataatttaaaagaaattgaacaagaaattgaaaaagttaaaaatgaaaaagatgccgcagtacatgctcaagagtttgaaaatgctgctaacctgcgtgataaacaaacaaaacttgaaaagcaatatgaagaagctaaaaatgaatggaagaatgcacaaaatggcatgtcaacttcattgtcagaagaagatattgctgaagttattgcaggatggacaggtatcccattaactaaaatcaatgaaacagaatctgaaaaacttcttagtctagaagatacattacatgagagagttattgggcaaaaagatgctgttaattcaatcagtaaagcggttagacgtgcccgtgcagggttaaaagatcctaaacgaccaattggtagctttatcttccttggaccaactggtgttggtaaaactgaattagctagagctttagctgaatcaatgtttggcgatgatgatgcgatgatccgtgtagacatgagtgaatttatggaaaaacacgcagtgagccgattagttggtgctcctccaggatatgttggtcatgatgatggtggacaattaactgaaaaagttagacgtaaaccatattctgtaattttatttgatgaaattgaaaaagctcatccagatgtatttaatattctattacaagttttagatgatggacatttgacagatacaaaaggacgtacagttgatttcagaaatacaattatcataatgacatcaaacgttggggcacaagaattacaagatcaacgatttgctggattcggtggttcaagtgatggacaagattatgaaacaattcgaaaaacgatgttaaaagaattaaaaaattcattccgtccagaatttttaaaccgtgtagatgatatcattgtattccataaactaacaaaagaagaattaaaagaaattgtaacaatgatggttaataaattaacaaatcgattatctgaacaaaacataaatattattgttactgataaagcgaaagacaaaatcgcagaagaaggatatgatccagaatatggtgcaagaccattaattagagcgatacaaaaaactatcgaagataatttaagtgaattaatattagatggtaatcaaattgaaggtaagaaagttacagtagatcatgatggtaaagagtttaaatatgacattgctgaacaaacttcagaaactaaaacaccatcgcaagcataa

SEQ ID NO: 8095 - DNA, 204 bp, Staphylococcus aureus
atggataaagaatctgtcgtagcaagtttagctagaaacaaaaagattgctgtagaaacaatggccggtcaaagatacatcatagaacgcattttacatacaaatgatgaaaaacatattcatattttgaaacctaaagatgtcgtgttagatgtagatagcatcaaagaaattgacgaaaatcatttaaatgatgcaacataa

SEQ ID NO: 8096 - DNA, 1251 bp, Staphylococcus aureus
atgagcttttttaaacgcttaaaagataagtttgcaacaaataaagaaaatgaagaagttaaatccttaagagaagaacaaggtcaagacaaattagaagatacacattctgaaggttcaacgcaggacgtaaatgatttagcagaaaatgctgaagtgaaaaagaagccacgcaagttgagtgaagcggattttgatgacgatggcttaatatcaattgaagattttgaagaaattgaagctcaaaaaatgggtgctaaatttaaagcaggactcgaaaaatctcgtcaaaatttccaagaacaattaaataatttgatagcgagatatcgtaaagtagatgaagacttttttgaagctttagaagaaatgttaatcactgcagacgtcggttttaatacagtgatgacgttaactgaagaattacgtatggaagcacaacgacgtaatattcaagatactgaagatttgcgtgaagtcattgttgaaaaaatcgtagagatttaccatcaagaagatgataattcagaagctatgaacatagaagatggtcgtttaaatgtcattttaatggtcggtgtgaatggtgttggtaaaacaacaacaattggaaaattagcttaccgatataaaatggaaggtaaaaaagtaatgttagctgcgggcgatacttttagagcgggtgctattgatcaattgaaagtttggggcgaacgtgttggtgtagatgtaattagccaaagtgaaggttctgatccagctgctgttatgtatgatgcgattaatgccgctaaaaacaaaggtgttgatattttaatctgtgataccgctggacgtttacaaaataaaacaaatctaatgcaagaattagaaaaagttaagcgtgtaattaatcgagcagtgccagatgcgcctcatgaagcattactatgtttagatgctacaactggtcagaatgcgttgtcacaagctagaaactttaaagaagtaacaaatgttacaggtattgtattaacgaaattagatggtacagccaaaggtggtatcgtattagccattcgtaatgaattgcacattccagttaaatatgtaggtttaggtgagcaattagatgacttacaaccatttaaccctgaaagttatgtctacggcttattcgctgatatgattgaacaaaatgacgaaataacaacagttgaaaatgatcaaattgtaacagaagaaaaggacgataatcatggggcaaaatga

SEQ ID NO: 8097 - DNA, 333 bp, Staphylococcus aureus
atggggcaaaatgatttagttaaaacgttacgaatgaattatttgtttgatttttatcaatccttattgacgaataaacaacgtaattatttggaattattttatctcgaagattattctttaagtgaaatcgcagatacttttaatgtgagtagacaagcagtttatgataatataagaagaactggcgatttagttgaagattatgaaaagaaattggaattataccagaaatttgagcaacgccgagaaatatatgatgaaatgaaacaacatttaagtaatccagaacaaatacaacgttatattcaacaattagaagacttagaatag

SEQ ID NO: 8098 - DNA, 1200 bp, Staphylococcus aureus
atgtaccgatacaaaccacttttacaatcaatccacttacctaatggcatcaaaatttcgaatcgctttgtattatcaccaatgaccgtaaacgcatcaacaaaagaaggctatattacaaaagcagacttggcttatgctgcacgtcgctctaattcagctggaatgcaagtcaccggcgctgcttacattgaaccttatggtaaattgtttgaatatggctttaatattgatcatgatgcttgtatccctggattaactaacatggcatctacgatgaaacaacatggtagcctcgctattatccagctagcgcatgctggtcgtttttcaaatcaagccattttaaattttggaaaggtgtatggaccaagtcctatgactttgcattcaccgattgaacacgttgttatcgccatgtctcatgagaaaatcaatagcatcattcagcagtatcgcgatgctacattacgcgcgattaaagcaggttttgatggtgtggaaatttcgattgcacaacgtttgctgattcaaacatttttctcaactttttcaaatagacgtacagaccattacggtgccgactcattaaaaaatcgtgcaagattatgtttagaagttatgcgtgcggtacaagaagtgattgataaagaagcacctgacaattttattttaggatttcgagcaacgccagaagaaaccagaggcagtgatttaggatataccattgacgagttcaaccaattaatcgattgggtcatggacgtttcaaacatccaatacttagcaatcgctagctggggtcgacatatttatcaaaatacgtctcgtacaccaggtgatcatttcggtcgaccagttaaccaaattgtctatgaacatttagcaggtcgtatccctttaattgcaagtggcgggattaattctccagagtctgctttagatgctttacaacatgcagatatggtcggcatgtcttcgccttttgtcacagaacctgactttgtgcataaacttgctgaacagcgaccacatgatatcaatcttgaattttctatggcagatttagaagatttagccattccacatgctgcttttaaagatattgttaaaatgatggattatggggaaggtctaaagaagcatacccgtgacgctttacgtcaattggaacagaattatcatgactcatcgtcttaa

SEQ ID NO: 8099 - DNA, 312 bp, Staphylococcus aureus
atgaatagagaagaagtccaattattaggttttgaaattgttgcatttgcaggggatgcacgttctaagtttttagaagcattgacagcagctcaagctggagattttgcaaaagcagatgcattgattgaagaaggaaacaattgcattgctgaagcgcatagagcacaaacaagcctgttagctaaagaagcgcaaggtgatgatattgcatacagtgtaacgatgatgcatggtcaagaccatttaatgacaacaattttactgaaagatttaatgaagcatttattagaattttataaaagagggtga

SEQ ID NO: 8100 - DNA, 1713 bp, Staphylococcus aureus
atgatgcaaaaattgatcgcacaaattgaaaaagggaagccatttttcgagaaattatcacgtaacatatatttaagagccatccgtgatggatttatttctgcaatgcctgtcatcttattctcaagtatctttctattaattgcatacgtgccaaatatatttggttttaaatgggataaaggcatggaagccattttaatgaaaccatataactatacgatggggcttgtagcatttttagtagcaggaacgacagcgaaatctttaacagattcatttaaccgtaagctagaaagtacaaatcaaattaactttatttctacaatgctagcagcgatgtgtggattcttgttcttagcttctgatccagccaaagatggtggattcttaagtgcatttatgggaactaaaggtttattaacagcatttttatcagcatttgtaactgttattgtttataacttctgtgtgaagcgcaatattacaattaaaatgccgaaagaagtaccgccgaatatttcacaagtatttaaggacttaattccattttcagcggtaatcatcattctttatgcattagatttagtcattcgcaacagctttaaatcaaatgtagcggaaggtattttaaaattattcgaaccattatttacagcagcagatggatggattggtgtcacaattatctttggtgcctttgcattattctggtttgtaggaattcatggtccatcaatagtagagccagcaattgcagccattacatatgcgaatatcgaagcgaacttcaagttgcttcaagctggagaacacgcagataaaattattacatcaggtacacaaatgtttatcgttacttttggaggtacgggtgcaacattggtcgtcccgttcatgtttatgtggatgacgaaatctaaacgaaacaaagcgattggacgtgcatcagttgtaccaacattctttggtgtaaacgaaccaattttatttggtgcaccactagtattgaatcctgtgttctttattccatttgtattagcaccaattgttaacgtatggattttcaaacttttcgttgaagtgttaggaatgaatagttttagtgtaaatttaccttggacaacaccaggtccattgggcattatcatgggtacaggttttggtttatggtcattcgtactagctattactttgattgttgtagatattattatttactacccattcctaaaagtttatgatagtgaaattcttgatgaagaagaaggacgtaaagaaagtaattcagatttaaaagaaaaagttgcagcaaactttgatacgaaaaaagctgattcaattttagcggcaagtggtgtatcagacgatgcagctaaagcttcaaatatcacagaacaaacaaatgtcttagtactttgtgccggtggtggtacaagtggattattagccaacgcacttaataaagcagctgaagaatatcatgtgccagtgaaagcagcagctggcggatacggcgcacatatggacattatgaaagagtaccaattaatcattttagcgccacaagttgcgtctaactatgaagatattaagcaagatacagatagattaggtattaaattagcgaagactcaaggtgctgaatatatcaaattgacacgagacggccaagcagcccttgatttcgttcaacaacaatttgaaaattaa

SEQ ID NO: 8101 - DNA, 762 bp, Staphylococcus aureus
atggcatcaacattagaaatcaaagacctacatgtgtctattgaggataaagaaatcttaaaaggtgttaacttgacaattaacactgatgaaatacatgcgattatgggaccaaacgggacaggtaaatcaactttatcatctgcaattatgggacacccaagctatgaagtaactaaaggagaagtacttttagacggtgtaaatattttagaattagaagttgatgaaagagcaaaagcaggattattcttggcaatgcaatatccatcagaaattacaggtgttacaaatgctgatttcatgcgttcagcaatcaatgcgaaacgtgaagaaggacaagaaatcaacttaatgcaatttattaagaaattagataaaaacatggattttctagacatagataaagacatggcacaacgttatttaaatgaaggtttctcaggtggagagaagaaacgtaacgaaatcttacaattaatgatgttagaacctaagtttgcaatcttagatgaaatcgattcagggttagacatcgatgcattaaaagttgtatctaaaggtattaaccaaatgcgtggggaaaactttggtgcattaatgattacacactatcaacgattattaaattacattactcctgataaagtacatgtaatgtatgctggtaaagtcgttaaatctggtggtccagaattagcaaaacgtcttgaagaagaaggatatgaatgggttaaagaagagttcggttcagctgaataa

SEQ ID NO: 8102 - DNA, 873 bp, Staphylococcus aureus
atgaagaaaaaagcgttactaccattatttttaggtattatggtctttttggctggttgtgactattctaaacctgaaaaacgtagtgggtttttctacaatacattcgtagatccaatgaaaaatgtattggattggttgggaaataacttattaaacgacaattatggtttagctattattatccttgtattggtaattcgtattattttattaccattcatgttgtcaaactataaaaatagtcatatgatgcgtcaaaaaatgaaagttgcaaagccagaagttgaaaaaattcaagaaaaagtgaaacgtgcgcgtacacaagaagaaaaaatggctgcaaaccaagaattaatgcaagtatataaaaagtatgacatgaacccgattaagagtatgttgggttgtttaccaatgctaatccaattgccaatcatcatgggattatactttgtacttaaagaccaacttgtagatggtttgtttaaatatccacacttcttatggttcgatttaggacgtcctgatatttggattacaattattgccggtgttttatactttatccaagcatatgtatcaagtaaaacgatgccagacgaacaacggcaaatgggttacatgatgatggtcatttcaccaattatgattatctggatttcattaagctcagcatcagcacttggtttgtactggtctgtcagtgcggcgttccttgtagttcaaacacactttgcgaacatttattatgaaaaagtcgctaaaaaagaagtacaacctttcattgaagcgtatgaaagagagcacaacggcggcagcaataaaaaaggcaaaaacacacaagtagtgtctaaaaagaaaaagaaataa

SEQ ID NO: 8103 - DNA, 465 bp, Staphylococcus aureus
atgaattttaataatctagatcaattatatagatctgtcattatggatcattataaaaatcctagaaataaaggtgtattagataacgggtctatgacagtagatatgaataacccgacatgcggtgaccgtatacgactaacatttgatatagaagacggcattataaaagatgctaagtttgaaggtgaaggttgttcgatttcaatggcaagtgcatcgatgatgacacaagctgttaaaggtcattcacttggagaagcaatgcaaatgagccaagaatttacgaaaatgatgcttggtgaagactatgtgattacagaagaaatgggagatattgaagcattgcaaggtgtatctcaattcccagctcgtattaaatgtgccacattagcttggaaagcattggaaaaaggtactgttgctaaagaaggtaaagcagaaggtacgactgaagaagaatag

SEQ ID NO: 8104 - DNA, 1260 bp, Staphylococcus aureus
atggctcaagaggtaataaaaataagaggtggacgcacactaaatggggaagttaatatcagtggcgcgaaaaacagtgctgtagctatcattcctgcaacattattagctcaaggacatgtgaaattagaagggttaccgcaaatctctgatgttaaaactttagtgagtttattagaagatttaaatattaaggcatcactaaatggtacggaattagaagttgatacaactgaaatacaaaatgctgcattaccaaataataaagttgaatcattacgtgcttcatactatatgatgggtgccatgttaggtagatttaaaaaatgtgtgattggtttaccgggaggatgtccacttgggccacgtccaattgatcaacatattaaaggatttaaagctttaggtgctgaaattgatgaatcaagcacgacatcaatgaaaattgaagctaaagaattaaaaggtgcgcatatttttctagatatggttagcgtaggtgcaacaattaacattatgctagctgcagtttatgcaacaggacaaactgtaattgaaaatgctgctaaagaaccggaagtagttgatgttgctaacttcttaacaagtatgggagctaatattaagggagcgggcacatcaacaattaaaatcaatggtgtcaaagaattacatggttctgagtatcaagttatacctgatagaattgaagcaggcacatatatgtgtatcgctgcagcatgtggagaaaatgttatattaaataatattgttccgaaacatgtagaaacattaactgctaaatttagtgaattaggtgtgaatgttgatgtaagagacgaaagaattcgcatcaataataatgcgccatatcaatttgttgatattaaaacactagtatatccaggttttgctactgatttgcaacagcctattacaccattattatttatggcaaatggtccttcatttgtaactgatacgatttatccggagcgttttaaacatgttgaagaattaaagcgcatgggtgcaaatattgaagttgacgaaggcacagcaacgataaaaccatcaacattacatggtgctgaagtttatgctagcgatttaagagcaggagcttgtttaattattgctggtttaattgctgagggtgtaactacaatttacaatgtaaaacatatttatagaggttatacagatattgtagaacacttaaaagctttaggtgcagatatttggacggaaactgtatag

SEQ ID NO: 8105 - DNA, 114 bp, Staphylococcus aureus
gtgaatgatgcgttattaatcaatcgtatgtgtaaaggcaagattttaacgattaaaataaagtattttacaaataaagtaaaattaatttataatgctaataatgcaaaaaat

SEQ ID NO: 8106 - DNA, 714 bp, Staphylococcus aureus
atggctaaactaaatgtagaagtatttgcggacggtgcagatattgaagaaatgaaagcagcttataaaaacaaacaagtggatggttttacaacaaatcctagtttaatggcgaaagcgggcgtaacagattacaaagcttttgctgaagaagctgtgaaagaaattccagatgcttcaatttcatttgaagtatttgcagacgatttagaaactatggaaaaagaagcagcaattttaaaacaatatggcgaaaatgtatttgttaaaattcctattgtaaatacaaaaggtgaatcaacgattcctttaattaaaaaactttcagctgacaatgtgagattaaacgttacggctgtttacacaattgaacaagttaaagaaataactgaagcagtaactgaaggtgtgccaacatatgtttcagtatttgcaggacgtattgcagatacaggcgtagatccattaccattaatgaaagaggctgtaaaagttacgcatagtaaagacggcgttaaattattatgggcaagttgccgcgaattattcaatgtgattcaagctgatgaaattggtgcagatattattacacgccctgcagatgttgtgaaaaaagtgaatacaaacttaggtcgcgatattaacgaattatcagtagatacagttaaaggctttgcgaaagatattcaatcttcaggtctttctattctataa

SEQ ID NO: 8107 - DNA, 1008 bp, Staphylococcus aureus
atgaaaatgataggatttgaaaagccctttaaattggaagaaggaaatttatttaaagtatacgaacaaagaaagccaacgccagaaaacgatgatatcttagtcaaagtaaatagtattagtgtaaatcctgtagatacaaaacaacgtcaaatgaaagtcactcaagcacctcgtgtacttgggtttgatgctattggtactgttgaagctatcggaccagacgttacattatttagtccgggtgacgttgtattttatgctggatcgccaaatagacaaggatcaaatgcgacatatcaattggtgtcagaagctatagttgcaaaggcaccacacaacataagtgctaatgaagcggttagtctaccgctaactggtattacggcatatgaaacgttttttgatacatttaaaatttcacataatccttctgaaaatgtaggtaaatccgtgttaatcattaatggtgccggtggtgtaggcagtatagccactcaaattgctaaacggtatggtttaactgtcattacaacagcatcacgacaagaaacaacagagtggtgtgaaaagatgggcgcagatatcgtattgaatcataaagaggatttagtgcgtcaatttaaagaaaaagaaattccattagtagattatatattttgcacttataatacagacttgtattacaatactatgattgaactgataaaaccattagggcatattacgactatcgtagcttttaatgaagatcaagatttaaatgcattaaaattaaaaagtataacatttacacatgaatttatgtttgcgcgtccaattcatcgaacgcctgatatgattaaacaacatgagtatttagaagatattacgaaaaatatagaattagggcattaccaaccaacaacgacacaagtttttgaaggtttatcacctgaaaacttatatcaagcacatcaattgttggaaaaacaatcaatgattgggaaattagtaattaatatatag

SEQ ID NO: 8108 - DNA, 1260 bp, Staphylococcus aureus
atgaagaacaataaaatttctggttttcaatgggcaatgacgattttcgtcttctttgtcattacaatggcgttatccattatgctcagagatttccagtctataattggtgtcaaacactttatatttgaagttacagatctagcaccattaattgctgcaatcatttgtatactcgttttcaaatataaaaaggtccaacttgcaggtttaaaattctcaatcagcctgaaagtaattgaacgtctattgctagctttaattttacctttaattattctaattattggtatgtacagctttaatacatttgcagatagctttattttattacaatcaacaggcttatcagtacctattacacacattctgattggacatattctgatggcgttcgtagtagaattcggattccgttcatacttacaaaatattgttgaaacgaaaatgaacacgttctttgcaagtattgttgttggtttgatgtattcagttttctcagcaaatacaacttatggtacagaatttgctgcttataacttcctttatacattctcattctctatgattcttggtgaattaattagagcgactaaaggacgtacaatttatattgcaacgacattccatgcttcaatgacattcggacttattttcttgtttagcgaagaaatcggcgatctattttcaatcaaagtcatcgccatttcaacagcaatcgttgcagtaggatacattggtttaagcttaattatccgaggtattgcatatttaacaacaagacgaaaccttgaagaacttgagcctaataattatttagaccatgtcaatgacgatgaagaaactaatcatactgaggctgaaaaatcttcttcaaatattaaagatgctgaaaaaacaggtgtagctactgcatcaacggttggtgttgctaaaaatgatactgaaaatacagtggctgacgaaccaagcattcatgaaggtactgaaaaaacagaacctcaacatcacataggtaatcaaactgaatctaatcatgatgaagatcatgacatcacttcggagtcagtagaatcagcagaatcagttaaacaagcaccacaaagtgacgatttaacaaacgattcaaatgaagatgaaatagagcaatcattaaaagaacctgcgacttataaagaagacagacgttcatcagttgtaattgatgcagaaaaacatatcgaaaaaactgaagaacaatcttcagataaaaacaaataa

SEQ ID NO: 8109 - DNA, 933 bp, Staphylococcus aureus
atggcacaaaaaccagtagataatattactcaaattattggcggtacaccggtagtcaaattgagaaatgtagtagatgacaatgcagcagatgtttatgtaaaattggaatatcaaaatccaggtggttctgtaaaggatagaattgctttagcaatgattgaaaaagcagagcgagaaggcaaaattaaacctggcgacacaattgtagaaccaacaagtggtaatacaggtatcggtttagcatttgtatgtgctgctaaaggatataaagcagtatttactatgcccgaaacaatgagccaagagcgtcgtaatttattaaaagcatacggtgcggaattagttttaacgcctggatcagaagcgatgaaaggtgcaattaaaaaagctaaagaattaaaagaagaacatggttacttcgagccacaacaatttgaaaaccctgcgaaccctgaagttcatgagttaactacaggtcctgagttattacaacaatttgaagggaaaactatcgatgcgttcctagctggtgttggtactggtggtacgttatctggtgtaggtaaagttctgaaaaaagaatatcctaacatcgaaattgttgctatagagcctgaggcttctccagtattgagcggtggtgagccaggtccacataaattacaaggtttaggtgctggatttattccaggcactttgaatacagaaatctatgacagtattattaaagtaggaaatgatacagcgatggaaatgtctcgtcgagttgctaaagaggaaggtattttagcaggtatttcatcaggtgctgcgatttatgctgccattcaaaaagcaaaagaattaggaaaaggtaaaacagtagtaacagtattgccgagtaatggtgaacgctacttatcaacacctttatattcattcgatgactaa

SEQ ID NO: 8110 - DNA, 351 bp, Staphylococcus aureus
atgacaaatcacaaattaatcgaagcagtaactaaatcacaattgcgtacagacttaccaagtttccgtcctggtgatactttacgtgtacacgtacgtatcattgagggtactcgtgagcgtatccaagtattcgaaggcattgtaattaaacgtcgtggcggtggcgtttctgaaacgtttacagttcgtaaaatttcatcaggtgttggcgtggaacgtacattcccattacacacaccaaaaattgaaaaaatcgaagttaaacgtcgtggtaaagtacgtcgtgctaaattatattacttacgtagtttacgtggtaaagctgctagaatccaagaaattcgttaa

SEQ ID NO: 8111 - DNA, 633 bp, Staphylococcus aureus
atgtttactggcatcgttgaagaaataggtgtcgttaaaagtgttcaaattcgtcaatcagtcaggacgattgaaatcgaagcacataagattacggcagatatgcatattggtgattccatcagtgttaatggtgcatgtttaacagtgattgattttgatcagacatcttttactgttcaagtaattaaaagcactgaaaataaaacctatttagcagatgttaagcgacaatcagaagtaaatttagagcgtgccatgagtggtaacggtaggtttggtggacattttgtcctcggtcatgtagatgaactaggaacagtttcaaaaataaatgaaacagccaatgccaaaattattacgattcaatgtagccaacatattaataatcagttagttaagcaagggtctattactgtggatggtgtaagtctaacggtatttgataagcatgataacagttttgacattcatcttattccagaaacgaggcgttcaacgattttatcatccaaaaaattaggagataaagtacatttagaaacagacgttttgtttaaatatgttgaaaatattttaaataaagataaagaccaattatctgtagataaattaagagcatttggtttttag

SEQ ID NO: 8112 - DNA, 1182 bp, Staphylococcus aureus
atgcaattcgataatattgacagtgctttaatggctttaaaaaatggagaaacaattattgtagtagatgatgagaatcgtgaaaatgaaggtgatttagtagcggttactgaatggatgaacgataataccattaattttatggcgaaagaagcaaggggattaatatgcgcaccagtgtctaaagatattgcacaacgtttggatttggtacaaatggttgatgataactccgacatctttggtacgcaatttacagtgagtattgatcatgtagatacaacaacaggaattagtgcttatgaacgtacattgactgccaaaaagctcattgatcctagtagtgaagctaaagattttaatcgtcctggtcatttatttccattagtagcacaagataaaggcgtattagctagaaatggacacacagaagcggctgttgatttagctaaacttactggtgccaagcccgctggtgtcatttgtgagattatgaatgatgacggcacgatggcgaaaggacaagatttacaaaattttaaagaaaaacatcaattaaagatgattacgattgatgatttaattgaatatcgtaaaaaattagaaccagaaattgaatttaaggcaaaagtgaaaatgcctacagatttcggaacatttgatatgtatggttttaaagcgacatacacagatgaagagatagttgtactgacaaaaggtgcaattcgacaacatgaaaatgtacgcttacattctgcgtgccttacaggcgatattttccatagtcaacgttgtgattgtggtgctcaacttgaatcgtctatgaagtatatcaatgaacatggtggcatgattatttatctacctcaagaaggtcgtggcataggattgttaaacaaattacgcgcatatgaattaattgagcaaggatatgatacagtaactgcaaatttagcattaggttttgatgaagatttacgagattatcatattgctgcacagattttaaaatattttaacatcgaacatatcaatttattaagtaataatccaagtaaatttgagggattaaaacaatatggcattgatattgcagaaagaattgaagttatcgtaccagaaacggtacataatcatgattatatggtaacgaaaaaaataaaaatgggtcatttaatatag

SEQ ID NO: 8113 - DNA, 924 bp, Staphylococcus aureus
gtgataaataaagacatctatcaagctttacaacaacttatcccaaatgaaaaaattaaagttgatgaacctttaaaacgatacacttatactaaaacaggtggtaatgccgacttttatattacccctactaaaaatgaagaagtacaagcagttgttaaatatgcctatcaaaatgagattcctgttacatatttaggaaatggctcaaatattattatccgtgaaggtggtattcgcggcattgtaattagtttattatcactagatcatatcgatgtatctgatgatgcgataatagccggtagcggcgctgcaattattgatgtctcacgtgttgctcgtgattacgcacttactggccttgaatttgcatgtggtattccaggttcaattggtggtgcagtgtatatgaatgctggcgcttatggtggcgaagttaaagattgtatagactatgcgctttgcgtaaacgaacaaggctcgttaattaaacttacaacaaaagaattagagttagattatcgtaatagcattattcaaaaagaacacttagttgtattagaagctgcatttactttagctcctggtaaaatgactgaaatacaagctaaaatggatgatttaacagaacgtagagaatctaaacaacctttagagtatccttcatgtggtagtgtattccaaagaccgcctggtcattttgcaggtaaattgatacaagattctaatttgcaaggtcaccgtattggcggcgttgaagtttcaaccaaacacgctggttttatggtaaatgtagacaatggaactgctacagattatgaaaaccttattcattatgtacaaaagaccgtcaaagaaaaatttggcattgaattaaatcgtgaagttcgcattattggtgaacatccaaaggaatcgtaa

SEQ ID NO: 8114 - DNA, 315 bp, Staphylococcus aureus
atgcctaaagtttatggttcattaatcgatactgaaacacgctgtcgccattattttaccgaagaagatattattgctattaaatttaaatgttgtaataaatactatccatgctataagtgccataatgagtttgaaaagcacgccattaagcgttggtctgagccttcatttaacgaaaaagcaatcttatgcggtgtatgcaaacacgaattaacaatcaatgaatatatgatggtagagcgttgtccaaattgccaatctcggtttaacaatcgctgtaaatatcactatcatatttattttgaaatttaa

SEQ ID NO: 8115 - DNA, 882 bp, Staphylococcus aureus
atgacacacgattatattgttaaagcattagcatttgatggggagattagggcttatgctgctttgacaactgaaactgttcaagaagcacaaacgagacattatacatggccgacagcatctgctgcaatgggaagaacaatgacagcaacagctatgatgggcgcaatgttgaaaggtgatcaaaaattaactgtcactgtagatggccaaggacctattggacgaattattgccgatgcaaatgctaaaggcgaggtgcgtgcttatgtagaccatccacaaactcattttccattaaatgagcaaggtaaacttgatgtaagacgagcagtagggacaaatggatctattatagttgttaaagacgttggaatgaaagactatttctctggagcaagtccaattgtttcaggagaacttggtgaagattttacttattattatgctacaagtgaacaaacaccttcatcggtaggtcttggtgtattggtaaatcctgataatacgattaaagcagcaggaggatttatcattcaagttatgccaggtgccaaagatgaaacaatttcaaaattagaaaaagcaattagtgaaatgacaccagtttctaaattaattgaacaaggattaacgccagaaggattactaaacgaaatcttaggtgaagaccatgtgcaaattttagagaaaatgcctgttcaatttgaatgtaattgtagtcatgagaaatttttaaatgctattaaaggattgggcgaggctgagattcaaaatatgattaaagaagatcatggtgctgaagcagtatgtcatttctgtggaaataaatataaatatactgaagaagaattaaacgtgttgctagaaagtttagcgtaa

SEQ ID NO: 8116 - DNA, 183 bp, Staphylococcus aureus
atggctaaaaaagaaagtttctttaaaggcgttaagtctgaaatggaaaaaacaagttggccgacgaaagaagagctatttaaatatactgtaattgtagtttctactgttatattcttcttagtctttttctatgccttagatttaggaattacagcattgaaaaatttattatttggttag

SEQ ID NO: 8117 - DNA, 1665 bp, Staphylococcus aureus
atgactgataaaaagtacactgcagccgatatggttattgatactttgaaaaataatggggtagaatatgtttttggtattccgggtgcaaagatagactatctatttaatgctttaattgatgatggtcctgaacttattgtcactcgtcatgaacaaaatgctgcaatgatggcacaaggtattggaagattaacaggtaaaccgggtgtagtacttgttacaagtggccctggtgtaagtaatttaacgactggactattaacagctacatctgaaggggatcctgtattagcgttaggtggccaagtgaaacgtaatgatttattacgattaacgcatcaaagtattgataatgctgcgctattaaaatattcatcaaaatacagtgaagaagtacaagatcctgaatcattatcagaagttatgacaaatgcaattcgaattgctacttcaggaaaaaatggcgcaagttttattagtattccgcaagacgttatttcttcaccagttgaatctaaagctatatcactttgccaaaaaccaaatttaggagtaccgagtgaacaagatattaatgatgtcattgaagcgattaaaaatgcatcatttcctgttttattagctggtatgagaagttcaagtgcagaagaaacaaatgccattcgcaaattagttgagcgcacgaatttaccagttgtagaaacattccaaggtgcaggtgtaattagtcgtgaattagaaaatcatttcttcggtcgtgtgggcttattccgcaatcaagttggtgatgaattattacgtaaaagtgatttagttgttacaatcggttatgatccaattgaatacgaagctagtaactggaataaagaattagaaacacaaattatcaatattgacgaagttcaagctgaaattactaattatatgcaaccgaaaaaagagttgattggtaatattgctaaaacgattgaaatgatttctgaaaaagtggatgagccatttataaatcaacaacatttagacgaattagaacaattaagaacacatattgatgaagaaactggtattaaagcgacgcatgaagaaggaattctacatccagtggaaattattgaatctatgcaaaaggtattaactgatgatactactgtaacagttgatgttggaagtcactatatttggatggcacgtaatttcagaagttacaatccaagacatttattatttagcaatggtatgcaaacgcttggtgtagcattaccgtgggcaatttcagctgcacttgtgcgccctaatacgcaagttgtgtccgttgctggcgatggtggctttttattttcatcacaagatttagaaacggccgtacgtaaaaatttaaatatcatccagcttatttggaatgatggaaaatataacatggttgaattccaagaagaaatgaaatataaacgttcgtcaggtgtagacttcggtcctgtagattttgtaaaatatgcagaatcatttggcgcgaaaggtttacgagttactaatcaagaagaattagaagcggcaattaaagagggctatgaaacagatggtccagtattaattgatatacctgtaaattacaaagataatatcaaactttcaacaaatatgttacctgacgtatttaactaa

SEQ ID NO: 8118 - DNA, 705 bp, Staphylococcus aureus
atgactaatgttttataccaacatggtacattaggcacattaatggcaggattattaaaaggaactgcatcaataaatgaattattgcaacatggtgacttaggtatcgctacactaacaggttcaaacggtgaggtaatctttttagatggaaaagcttaccatgcaaatgaacataaagaatttgtagaattaaaaggtgacgagttaacaccatatgcaactgtaactaaatttgtagcagatacaagctatgaaacgaaagataaatcttcagaagcagtttttgcagaaattaaggaaaagatgttgagtgaaaatttattttcagcagtaaaaatttcaggcttatttaaaaaaatgcatgtacgtatgatgccggctcaagaaccaccttatacacgtttaatcgattcagctagaagacaacctgaacaaactgaaacgtatgtcaaaggttcagtcgttggtttctttacaccagaattattccatggtatcggatcagcaggatttcatgtacactttgcgaatgatgatcgtaactttggtggacatgtcttagattttgaagtagaagatgttaaagtagaaatccaaaatatagaaacatttgaacagcattttccaattcaagataaagatttcactaaagcaaatattgactataaagatattgcagacgaaattagagaagctgaataa

SEQ ID NO: 8119 - DNA, 1143 bp, Staphylococcus aureus
atgaagataggtataacatgttacccgtccatgggtggttctggaattattgccacagaattaggaattaaattagcagagcgaggtcacgaagtacattttatcacttcaaatatcccgtttagaataagaaaaccattgccgaatatgatttttcatcaagttgaagtgaatcaatatgcagtatttcaatatccaccgtatgatattacgttaagtactaaaatcgctgaagttattaaagaatatgatcttgatttgttgcatatgcactatgctgtacctcatgcaatttgtggaattttagctcgtgagatgtcaggtaaagatataaaaattatgacaacgctacacggtactgatattactgttttgggctatgatcattcactccaaggtgcaattaaatttggcattgaaaaaagtgatattgtgacaagtgtgagtaaatctttagcgcaagaaacacatgaaattatcgaaactaacaaagaaattataccgatttataattttgtacgtgaaaatgagtttccaactaaacataacacagcattaaaatcacaatttggtatagcaccagatgaaaaagtgttaatacatgtatcgaattttagacaagtaaaacgcatagatactattatagaaacatttgcaaaagtacgtgaaaagatacctagtaaattaattttacttggagatggtcctgaattagtgccaatgcgtcaattgacgaaagagttaaacgtagaagaggatgttttatttttagggaaacaagattgtgtaagtgaattttatcaattatctgacttagtattattattaagtgaaaaagaaagctttggactaactttacttgaggctatgaaaacaggcgtcgttccaattggttcaaatgccggtggaattaaagaggttattaaacatggtgaaactggatttgttgtagatgtgggtgattgtgattcagcgagtgactatgctatccgtttacttgaagataaggcgttatacaacaaacttcagaaaaacatgctagcagatattgctgaacgttttggatcagaacttattacagatcaatatgagtattattatcaaaaaatgctaaatgagcataacaaaagtaaaggcgagtaa

SEQ ID NO: 8120 - DNA, 1203 bp, Staphylococcus aureus
atggataaatcattatttgaacaggcaaggcctatattagaacaaattcaagacaatggttttgaagcatattatgtaggtggctctgtaagagattatgtcatgggaagaaatattcatgatatagatatcacaacaagtgcaacgccggatgaaatagaatctatctttagtcatacgatacctgtaggtaaagaacatggcaccataaatgtagtttttaatgatgaaaattatgaagtgacaacattccgggctgaagaagattatgtcgatcaccgtagaccaagtggtgttacatttgttcgggatttatacgaagatttgcaacgaagagatttcacgatgaatgcgatagcaatggatacagcatacaaattgtatgattattttgatggtcaacaagatattaataatcgaataataagaactgtaggtatagctgaggaacgattccaagaagatgctttacgtatgattcgatgtttaagattccagtcacaattatcatttgatattgcaatggaaacatttgaagcgatgcgtacacaaatggcagatattaaatttttatcaattgagcgtatagtgattgaactaactaaattaatgcgaggtattaatgttgaagagagttttaatcatttaaaatcgctgaaagcatttaattatatgccatatttcgaacaacttgatatgaatcaaattaatgtaactgaaccaattgatttagaattgttgattgctatagtgtcagttaaatttgatattaattactcattgaagcctttaaagctaagtaaccgacaagtaaaagatatcaatcaatatattcaaattatgaatgcattaccaagtattattacaaaagaacaattaaaaatgtttgtttatgattatgatacgaatctcattaaaaatgtaatggttgcagcagacgtgttaaaggcaaatgatattcaaggacatgaaccattaatcgttaaccttcaaacgattgatgaaacattacatcgtttacctatgcataatagaaaagacatgatggttaatggcggtgtacttatggcacatttaaatgccaaaagtggtccgtggttaaaagatgtgctaagacaaattgagatagcgattgtaacaggtaaagtaagcaacgaagaaactgaaattttgaaatgggtggataatcatgtcaaaatatag

SEQ ID NO: 8121 - DNA, 771 bp, Staphylococcus aureus
atgtttaaaaagctaataaataaaaagaacactataaataattataatgaagaattagactcgtctaatatacctgaacatatcgctattattatggatggtaatgggcgatgggctaagaagcgaaaaatgcctagaattaaaggccattacgaaggtatgcaaacaataaaaaaaattactaggatagctagtgatattggtgttaagtacttaactttatatgccttttccactgaaaattggtcaagacctgaaagtgaagtaaattatattatgaatttgcctgtcaatttcttaaagacattcttaccggaactaattgaaaaaaatgtcaaagttgaaacaattggatttactgataagttgccaaaatcaacgatagaagcaattaataatgctaaagaaaagacagctaataataccggcttaaaattaatatttgcaattaattatggtggcagagcagaacttgttcatagtattaaaaatatgtttgacgagcttcatcaacaaggtttaaatagtgatatcatagatgaaacatatataaacaatcatttaatgacaaaagactatcctgatccagagttgttaattcgtacttcaggagaacaaagaataagtaatttcttgatttggcaagtttcgtatagtgaatttatctttaatcaaaaattatggcctgactttgacgaagatgaattaattaaatgtataaaaatttatcagtcacgtcaaagacgctttggcggattgagtgaggagtag

SEQ ID NO: 8122 - DNA, 105 bp, Staphylococcus aureus
atgaaagatagtgaaaatctcgtgttttttggttttgaggtgttgtttgtattttataaaatggcttacatatatgaagcgttgattaagtatggaattgttaat

SEQ ID NO: 8123 - DNA, 1752 bp, Staphylococcus aureus
gtgtttttttacttttggggcgtatttctttataattcattacataaatgtaagggctttagttttcatgttttattaagtctaactgagattttgaaaggatgtttagcaacaatggataaagaattatggatagaaagagctaatgatagtttagttaaacatttttatgagcagcaatctgacattgaacagcgagaaggttttgaaagtaaattaacatttggtactgcgggtatacgcggaaaattcggtcttggtgaaggtcgacttaataagtttactattgaaaaattggcattaggtttagcgcgttatttaaatgcccaaacaaacagtccaacaatagtcattcattatgatattagacatctttcaactgaattcgcccaaattattgctaatgtattagcaaaccatcaaataacagtttatttacctgatacatataaaacgacaccggaattatcgttcgcggttcgcaatcttaatactactgccggcattatgattacagcaagtcataatccgaaagactataacggcattaaagtatatggttctgatggcgcgcaattatcgactgatgcatctgagcttgcaagtcgttatatcgaagaagttggcgatccattacagattgatatacctatttcaaaacaaaatacatcttatatcaaaccttttccgaaatctgtaactgatgactatatgaaacacattcaaaatatgattggctatattcctaaatctgatttacaagttgtgttcactagtttgcatggtacaagtgttccaattgtacctgagttattaaaatctttgaatttcaatcaatttaatcttgtagatgcacaatgtaaacctgatccgaattttagttcagttcaaagtgctaatcctgaagatcatcgcgcttttgatcaagcagtcgaacttgcaaataaaagtcatgcagacttattaatatcaactgacccagatgcagatcgacttggtattgctgaacgtgatgcacatggtcatatcacatattttaatggcaaccaaattggtgcgctgttacttaattatcgtattcaacaaacgtctcaattacgtcaccgcttaatgattcaatctattgtaagtagtgagttaacaaagtcattagcacgctataataatgttaaatacaaagaggtactgacgggctttaaatttattgctcaggaaataagacaactggatgatcatcaaaatatgattttcgcatttgaagagagttacggttttctatcagagccttttgtacgtgataaagatgccgtacaaattgtgccactcattataaaatacgcttctgagttaaaattatatggcaaaacattgaaagatgaattagaacagatttatcaaactgttggtagacatgaggatacattattctcgcatacgctagaaggattagaaggtaagaaaaaaattgaatcaattatgacacatttccgttcaaatccaccgcaagagattcaaggactgaaagtgaaagcaattgaagattatttaactagcgaggtttatcatttggataaagatacaacgtcacagattaattcttctaaatcaaatgttattcgtgtcttatttgacgaaggatttatcgctttacgtccttctggtactgaacctaaaattaaattatatgtgtcgttaaaatgtccggattttgatgatgtagctcaaaaaattaatgcgatgatttttagctaa

SEQ ID NO: 8124 - DNA, 807 bp, Staphylococcus aureus
atgaaatttgcagttatcggaaatcctatttcacattccttgtcgcccgttatgcatagagcaaattttaattctttaggattagatgatacttatgaagctttaaatattccaattgaagattttcatttaattaaagaaattatttcgaaaaaagaattagatggctttaatatcacaattcctcataaagaacgtatcataccgtatttagattatgttgatgaacaagcgattaatgcaggtgcagttaacactgttttgataaaagatggcaagtggatagggtataatacagatggtattggttatgttaaaggattgcacagcgtttatccagatttagaaaatgcatacattttaattttgggcgcaggtggtgcaagtaaaggtattgcttatgaattagcaaaatttgtaaagcccaaattaactgttgcgaatagaacgatggctcgttttgaatcttggaatttaaatataaaccaaatttcattggcagatgctgaaaagtatttagctgaattcgatatcgttattaatacaacaccagcgggtatggctggaaataacgaaagtattattaatttaaaacatctttctcccaatactttaatgagtgatattgtttatataccgtataaaacacctattttagaggaagcagagcgcaagggaaaccatatttataatggcttagatatgtttgtttaccaaggtgcggaaagctttaaaatttggactaataaagatgctgatattaattctatgaaaacagcagttttacaacaattaaaaggagaataa

SEQ ID NO: 8125 - DNA, 819 bp, Staphylococcus aureus
ttgaaaacagtaagtctattaatagatatgaaacaaaagcaaactaaaatttctatggtaacagcttatgattttccaagtgctaaacaagtggaagcagcgggtattgatatgattcttgttggggattcacttggtatgactgtattaggttatgaaagtaccgtacaagtgacgttagcagatatgattcatcacggtcgtgcagtaagaagaggcgcaccaaatacatttgtagttgttgatatgccgattggtgcagtaggcatctctatgacacaagacttaaatcatgctctaaagctttatcaggagacgaatgcaaatgcaattaaagcagaaggagcgcatattacaccatttattgaaaaagcaacggcaattggtattcctgttgttgcacatttaggattaacacctcaaagtgttggcgttatggggtataaattacaaggtgcaacgaaagaagcagcggagcaacttattttagatgcgaaaaatgtagaacaagctggtgcagttgcgttagtacttgaagcaattccaaatgatttagcagaggaaattagcaagcacttaacaattccagtcattggtattggtgcaggaaaaggtacagatggtcaagtattggtttatcacgatatgttaaattatggtgttgaacataaagcgaaatttgtgaagcaatttgctgattttagtgttggtgtggatggtttaaaacaatacgatcaagaagttaaatctggtgcatttccatcagaagaatatacgtataaaaagaaaattatgaatgaggttaataacaatgactaa

SEQ ID NO: 8126 - DNA, 2847 bp, Staphylococcus aureus
atgaaagaaccatccatagtagtaaaaggtgctcgtgcgcataacttgaaagatattgatatcgaactacctaaaaataaattaattgttatgacaggtttatctgggtcaggtaaatcgtcattagcattcgatactatatatgctgaaggacaacgacgttatgttgaatcattaagtgcctatgcgcgtcaatttttaggccaaatggacaaaccagatgttgatacaattgaaggattatcgccagcaatttcaatagatcaaaaaacaacaagtaaaaatccaagatcaactgtagcaacagtaacagaaatatatgattatatacgtttgttatatgcacgtgttggtaaaccttactgtccaaatcacaatatagaaattgaatcgcaaacagtacaacaaatggttgaccgcattatggaattagaggcacgtacaaagattcaattattagcacctgtcatcgctcatcgtaaaggtagtcatgaaaagctaatcgaagatattggtaaaaaaggttatgtacgtttaagaatcgatggcgaaattgttgatgtaaatgatgtacctactttagataagaacaagaatcatacaatagaagttgttgtagaccgattagttgttaaagatggaattgaaacacgactagctgactctatagaaactgcgttagagctttcagaaggacaattaacagttgatgtcattgacggggaagaccttaagttttcagaaagccatgcttgtcctatatgtggattttcaatcggagagttagaaccaagaatgtttagctttaacagtccttttggtgcttgtccgacatgtgatggcttaggccaaaagttaacagtcgatgtagacttggttgttcccgacaaagataagacgctaaacgaaggtgcaatagaaccttggataccgacgagttctgatttttatccaacattgttaaaacgtgtttgtgaagtttataaaatcaatatggataaaccttttaaaaagttaacagaacgtcaacgtgatattttattgtatggttctggtgacaaagaaattgaatttacatttacacaacgtcaaggtggtactagaaaacgaacaatggttttcgagggtgtagttcctaatataagtagacgattccatgaatctccttcagaatatacacgtgaaatgatgagtaaatatatgaccgaactaccttgtgaaacttgtcatggaaagcgattgagtcgtgaagcgttatctgtttatgtaggtggtttaaatattggtgaagtagtcgaatattcaatcagtcaagcgctgaactattataaaaacattgatttgtcagaacaagatcaagcgattgcaaatcaaatattgaaagaaattatttcccgactcacttttttaaataatgtgggacttgaatatttaacgctaaacagagcttcaggtacactttcaggtggtgaagcacaacgtattcgattggcaacgcaaattgggtcgcgtttgactggtgtcttatatgtattagatgagccatcaattggactgcatcaaagagataatgatcgattaattaatacacttaaagaaatgagagatttaggaaatactttaattgtagttgaacacgatgatgatacaatgcgtgcggctgattacttagtggatatagggcctggtgctggtgaacatggaggacaaattgtgtctagtgggacacctcaaaaggtaatgaaagataaaaaatcattaacaggacaatacttgagtggtaagaaacgtattgacgtacctgaatatcgcagaccggcttcagatcgtaaaatttctatacgtggagctagaagcaacaatcttaaagggattgatgtggacataccactatcaatcatgacggttgttacaggtgtatcaggttctggtaaaagctcattagtaaatgaagtattatacaaatcattagctcaaaaaattaataaatctaaagtaaagccaggattgtacgataagattgaaggtattgatcaacttgataaaattattgatattgatcaatcaccgataggtagaacgccacgctctaatccagcaacatatactggtgtgtttgatgatatacgtgatgtgtttgcgcaaacaaatgaagctaaaattcgaggatatcaaaaagggcgttttagttttaatgtaaaaggtggacgctgtgaagcttgtaaaggtgacggtattattaaaattgaaatgcattttttacctgatgtttatgttccttgtgaagtgtgtgatggtaaacgatataatcgtgagacactagaggttacttacaaaggtaaaaatattgctgacattttagaaatgactgttgaagaagcaacacaattttttgaaaatattcctaagattaagcgcaagttacaaacactagttgatgttggtcttggatacgtcacattaggtcaacaagctacaacgttatcaggtggtgaggctcaacgtgtgaaacttgcatctgaacttcataaacgttcaactggtaaatctatttatatcctagacgaactaacaacagggttacatgttgacgatattagcagattattaaaagtattaaatcgattagttgaaaatggtgacactgttgtaattattgaacataacctagatgttatcaaaacagcagactatattatcgacttaggtcctgaaggtggtagtggcggtggtactattgttgcgactggcacacccgaagatattgctcagacaaagtcatcatatacaggaaagtatttaaaagaagtacttgaacgagataaacaaaatactgaagataaataa

SEQ ID NO: 8127 - DNA, 1197 bp, Staphylococcus aureus
atgttaaataacaaacgattatttacttcagagtctgttacagaaggacacccagataaaatcgctgaccaagtgtcagatgcaatattagatgctattttaaaagacgacccaaatgcacgtgtagcttgtgaaacaactgttacaacaggtatggcattgatcgccggcgaaatttctacaacaacatatgttgatattccgaaagttgttagagaaacaattaaagaaattggatacacaagagcaaaatatggttatgattatgaaacaatggcaattttaactgcgattgatgaacaatcacctgacattgcacaaggcgtggataaagcattagagtatcgtgataaagatagcgaagaagaaattgaagcaacaggtgcaggtgaccaaggtttaatgtttggttacgcaacgaatgaaacagaaacgtacatgcctctagcaatttatttatcacatcaattggcaaaacgtttatctgatgtgcgtaaagatggtacgttaaattatttacgaccagacggtaaagttcaggtcactgttgaatatgatgaaaatgataacccagtacgtattgatacgattgtcgtatcaacacaacatgctgatgatgtgacacttgaacaaattcaagaagacatcaaagcgcatgtcatttatccaactgttccagaaaacttgattaatgaacaaactaaattctacatcaatcctacaggacgctttgtaatcggtggacctcaaggtgatgcaggattaacaggacgtaaaatcattgttgatacgtatggtggctatgcacgtcatggtggcggatgcttcagtggtaaggatcctacaaaagtagaccgctcagctgcatatgctgcacgttatgtggctaaaaatattgttgcagcaggtttagcagatcaatgtgaagtacaattggcatatgcgattggtgttgcagaaccagtgtcaattgcaattgatacatttggaacaggtaaagtttctgaaggacaacttgtcgaagcagttagaaaacactttgacctaagacctgcaggcattattaaaatgcttgatttgaaacaaccgatttacaaacaaactgctgcttatggtcattttggacgtacagatgtattattcccatgggaaaaattagacaaagtggaagaattaaaagacgcagtaaaatattaa

SEQ ID NO: 8128 - DNA, 642 bp, Staphylococcus aureus
ttgttaaaaagaatgagagacgatataaaaatggtatttgagcaggatccagcggcacgttcaacattagaagtcattacaacgtatgcaggtttacatgcagtttggagtcatttgattgcacataagttatacaaccaaaaaaaatatgttgcagcacgcgcgatatctcaaatttcaagatttttcacaggtatagaaatccatccaggtgctaaaattggaaagcgtctatttatagatcatggtatgggcgttgtaataggagaaacatgtacaattggtgataatgtgacaatctatcaaggcgtgacacttggtgggacagggaaagaaagagggaaaagacacccagatataggagacaatgttttaatagcagccggtgcgaaagttttaggaaatattaaaataaattcaaatgtaaatattggtgcaaattcagttgttttacaatcagttccaagttattcaacggttgttggtataccaggacatattgttaagcaagatggtgttcgagttggaaaaacatttgatcatcgccatctacctgatccaatttatgaacaaattaagcatttagaacgacaacttgaaaagactaggaatggagagattcaagatgattacattatataa

SEQ ID NO: 8129 - DNA, 2076 bp, Staphylococcus aureus
ttgttaaaaagactaaaagaaaaatcaaatgatgaaatcgttcaaaatacaattaacaagagaattaactttatatttggtgtgattgtatttatttttgcagtactagtactacgtttaggttatttacaaatcgcacaaggctcacattataaacaaattataaaaaatgatgaaaacattacagtgaatgagtctgtgccaagaggtcgtattttagacagaaatgggaaagttttagttgataatgcttctaaaatggctattacatatactaggggtcgaaaaacaacacaatcggaaatgttggatacggctgaaaagttatcaaagctaatcaagatggatactaagaaaattacagaacgtgataagaaagatttctggattcagttgcatcctaaaaaagcaaaagcaatgatgacaaaagaacaagctatgttagcagatggaagtattaaacaagatcaatatgataaacaactgttatcgaaaatcggaaaatcacaattagatgaattgtcttctaaagatttacaagttttagctatttttcgagagatgaatgcaggaacagttttagatccacaaatgataaaaaatgaagatgtcagtgaaaaagagtatgcagcagtttctcagcaactttccaaattaccaggtgttaacacgtctatggattgggatagaaaatatccatatggcgatactttaagaggtatattcggagatgtatcgacacctgctgaaggtattccaaaagaattgacagaacattacttatccaaaggatattcacgcaatgatcgtgttggaaaatcttacctagaatatcaatatgaagatgtattgcgtggtaagaagaaagaaatgaaatacacaacggacaaatctggtaaagttacatcttcagaagtgttaaatcctggcgctcgcggtcaagatttgaaattaacgatcgatatagatcttcaaaaagaagtagaagcattattagataaacaaattaagaagcttcgcagccaaggtgcaaaagatatggataatgctatgatggttgtacaaaatcctaaaaatggagacattcttgcgcttgccggaaagcagattaataagagtggtaaaatgactgattatgacattggtacgtttacttctcaatttgcggttggatcttctgtaaaaggtggaacattattagctggttatcagaataaagctatcaaagttggagaaacaatggtcgatgaaccattacatttccaaggtggtttgacaaaacgatcatacttcaataaaaacgggcatgtatctattaatgataagcaagctttgatgcattcatcaaacgtatatatgtttaaaacagcattaaaattagcgggagacccttattattctggtatggctttaccttcagatataagttcacctgcccaaaagcttagaagaggattaaatcaagtaggcttaggtgtgaaaacagggatagatttaccaaatgaaacaagaggtcaaatcgaaccattaacaaataatccaggtaattatctagatttatcaattggtcaatatgatacctatacaccattacaattatcacaatatgtttcaactatagcgaatgatggttatagaatacagccacacattggattaacgattcatgaatcaactaataaagatgaggttggtccactcaagaagaaaattaatggcactgtcttgaacaaggttaataatactgaaaaggaaatcaaacaaattcaagaaggattcaaaatggcatttaatgataaagatggtactggatatgttagttttaaagatacagtagtacctactgctggtaaaacgggtaccgctgaagtgttccaaaacggagagccaagagttaactctacttatataggatacgcgccaattgatgatccaaaattagcgttttcaattgtatatacaaatcagcctgtaccaccaccatggttaacaggtggagacttaggtagagatgtaattaactactactttaagcagttaggtaaagatgataaaaataaagacaaagacaaataa

SEQ ID NO: 8130 - DNA, 1695 bp, Staphylococcus aureus
atgacaaaaacgaaacaagcaatacatattgataacatatactgggaacgtgttcagttatatattgaaggacatagtgaaggtgtcgatttaacatcaggacaatttgttctgaggaatttaaccgaaacaaaaacattagaagcaaatgaaatgaaaatagacggtaatacatttatatgtagattcaacgtcgcaatattagacgatgggtattatttaccaatggataaatatttatttgtttatcatgaccagttagagtatattggacaacttaatccaaatattattgatcaagcttatgcggcattaaatgaagagcaaattgaagaatacaatgagctgactacacaaaatggaaaagtgaactatttattagcgtatgatgctaaagttttccgtaaaggtggcgtatcacaacatacggtctataccattactccggaaatagcaagtgacgttaacgaatttgtatttgatattgaaatcaccttacctcaagagaaatcaggggtcattgcgacaagtgcacactggcttcataaacaaggtcataaagcttcatttgaaagtagaagtttcttatttaaagctatttttaatattacaaagttactacatattaaaagaagcaaaacaatattattcacatcagattcgcgtccgaatttatcagggaatttcaagtatgtatatgatgagttactacgccaaaaagtagattttgattatgatattaaaacggtatttaaggcgaatattacggatagacgcaaatggagagacaagtttagattgccatatttacttggtaaggccgattatatttttgttgatgatttccatccattaatttatacggttcgctttagaccatcacaagaaattattcaagtgtggcatgctgttggtgcctttaaaacagttggctttagtcgtacaggtaaaaaaggtggtccgtttatcgattcattaaaccatcgtagttacacgaaagcatatgtttcatcagaaaccgatattccattttatgctgaagcatttggaattagagaagaaaatgttgtaccaacaggtgtaccacgtactgatgtactatttgatgaagcttatgcaacacaaattaaacaagagatggaagatgaattgccaattataaaaggtaagaaagttattctattcgcaccgacatttagaggtaatggtcacggtacggcacattatccattttttaaaattgattttgaacgtttagcaagatactgcgagaagcataatgcagttgtgttattcaaaatgcatccgttcgtaaaaaatagacttaatatttcacgtgaacatagacaatactttatcgatgtgtcagatcatcgtgaagttaacgatattctctttgttacagacttgttgattagtgattattcatctttaatatatgaatatgcagtatttaaaaagccgatgattttctatgcatttgacttagaagattacattacgacgcgtgatttctatgaaccatatgaatcatttgttccaggtaaaattgtacaatcctttgatgcattaatggatgctttggacactgaagattatgaggttgaaaaagttgtaccattcttagataaacattttaaatatcaagatggtcgctcaagtgaacgtttagtcaaagatttgtttagacgctaa

SEQ ID NO: 8131 - DNA, 273 bp, Staphylococcus aureus
atgaacaaaacagatttaatcaatgcagttgcagagcaagctgatttaactaaaaaagaagctggttcagcagtagatgctgtattcgaatcaatccaaaactcacttgctaaaggtgaaaaagtacaattaattggtttcggtaactttgaggtacgtgaacgtgctgcacgtaaaggtcgtaaccctcaaactggtaaagaaattgatatcccagcaagtaaagttccagcattcaaagctggtaaagcattaaaagatgctgtaaaataa

SEQ ID NO: 8132 - DNA, 1812 bp, Staphylococcus aureus
atggatacaaaagactttaaacgtttagaaaaaatgtattccccgcgatacttacccggattagatggattgagggcattcgcagttataggaatcattatttatcacttgaatgcacaatggttaagtgggggctttttaggagtagatacattcttcgttatttcaggttatttaataacaagtttgttgataagtgagtattatcggacgcaaaaaatcgatttgctagagttttggaagcgacgattgaaacgactcattccggcagtgttatttttaatctgtgtcgtgcttacgttcacactgatatttaaaccggaattgattatacaaatgaaacgagatgctattgcagctatattctatgtttcaaactggtggtacatttcacagaatgtagattattttaaccaatttgctattgaaccactcaaacatttatggtctttagccattgaagaacaattttacttgcttttcccattggttatcacgttcttattacatagatttaaaccgagaaatattattcaaacgctatttattgtatcgttgatttctttaggacttatgatagtgattcatttcatcactggagataattcacgtgtgtattttgggacagatacacgactgcaaactttattgcttggttgtatattagcatttatttggcctccgtttgctttgaaaaaagatatttctaaaaagattgtcgtatcattagatattatagggatatctggttttgcggttctaatgactttgttctttatagttggcgaccaagatcaatggatctataatggaggattttacattatatcatttgcaactttattcattattgcaattgcggtacatccttctagtttatttgctaaatttttaagtatgaaacctttactaattataggtaaacgatcatatagcttatatttatggcattatcctatcattgtttttgtgaacagttattacgtacaaggacaaataccggtatacgtttatattatagaaattttgttaacagcgttaatggctgaaatttcgtatcgctttattgaaacacctatacgtaaaaaaggatttaaagcttttgcatttttacctaaaaagaaggggcaatttgctagaacagtgttagttatcctattattggttccgtctatcgttgtgctcagtggacagtttgatgcacttggcaaacaacatgaagccgagaagaaagagaagaagacggaatttaaaacaacgaagaaaaaagtcgttaaaaaagataagcaagaggataagcagacagcgaatagcaaagaggatattaaaaagtcatcaccactattaattggtgactcggtcatggtggatattggtaatgtctttactaagaaaataccaaatgcacaaattgatggtaaagttggacggcaactcgttgatgctacaccaattgtgaaatcgcaatataaagactatgctaaaaaaggtcaaaaagttgtagtagagcttggtacaaatggggcatttacgaaagatcaattaaatgaactattggatagttttggaaaagcagacatatatttagtttctattagagtacctagagattatgaaggtagaataaataaattaatttatgaggcagctgaaaagcgctctaatgtacatctagtcgattggtataaagcttctgcaggtcatccggaatactttgcatatgacggtattcacttagaatatgcaggtagtaaagcgctgactgatttgattgtaaaaacgatggaaacacatgctacaaataagaaataa

SEQ ID NO: 8133 - DNA, 1188 bp, Staphylococcus aureus
atgtcaatcatgcgactatttacattcattttaagtatttttatcgtaggaatggttgaaatgatggttgcaggaattatgaacttgatgagtcaggacttacatgtatcagaagctgtcgttggtcaattagtgacaatgtacgctttaacatttgcgatatgtggacctattctggttaaattaacgaaccgtttttcatcaaggcctgtattattatggacattacttatatttatcattggtaatggcattattgctgtagcgccaaatttttcaatattagtagttggtagaattatctcatctgcagcagcagcactaattatcgtaaaagtattagctattacagcgatgttatcagcacctaaaaatcgtggcaaaatgattggacttgtctatacagggtttagtggggccaatgtttttggtgtaccaattggaacggttatcggcgatttagtaggttggcgctatacatttctattcttaattattgtgagtattattgttggcttcttgatgatgatctatttaccgaaggatcaggaaatacaacgaggccctgtgaatcatgaggcaccatctcatgaaaatcatgttacttcgaaaatattaagacctgctgaagtagcaaaatatttaattattacgtttttagtattgattgcaaactcagtgacattcgtctttataaatccacttattttatctaatggtcatgatatgtcattcgtttcattagcacttctagtaaatggaatcgctggcgttattggaacatcattgggtggtatattctccgataaaattacaagtaagcgttggttaatgatttctgtttctatttttatcgttatgatgttacttatgaatttaatcttacctggttcaggtctattgttagcaggactatttatttggaatatcatgcaatggagtactaatccagcagtgcaaagcggtgtgattcaacatgttgaaggcgacacaagccaagtaatgagttggaacatgtctagtttaaacgctggtattggtgttggcggcattattggaggcttggtcatgacacatgtttctgttcaagctatcacatatacgagtgccatcattggcgcattaggattaatcgttgttttcacattgaaaaataatcattatgctaaaacatttaaatcatcataa

SEQ ID NO: 8134 - DNA, 1134 bp, Staphylococcus aureus
atgaaagaaccatccatagtagtaaaaggtgctcgtgcgcataacttgaaagatattgatatcgaactacctaaaaataaattaattgttatgacaggtttatctgggtcaggtaaatcgtcattagcattcgatactatatatgctgaaggacaacgacgttatgttgaatcattaagtgcctatgcgcgtcaatttttaggccaaatggacaaaccagatgttgatacaattgaaggattatcgccagcaatttcaatagatcaaaaaacaacaagtaaaaatccaagatcaactgtagcaacagtaacagaaatatatgattatatacgtttgttatatgcacgtgttggtaaaccttactgtccaaatcacaatatagaaattgaatcgcaaacagtacaacaaatggttgaccgcattatggaattagaggcacgtacaaagattcaattattagcacctgtcatcgctcatcgtaaaggtagtcatgaaaagctaatcgaagatattggtaaaaaaggttatgtacgtttaagaatcgatggcgaaattgttgatgtaaatgatgtacctactttagataagaacaagaatcatacaatagaagttgttgtagaccgattagttgttaaagatggaattgaaacacgactagctgactctatagaaactgccttagagctttcagaaggacaattaacagtcgatgtcattgacggggaagaccttaagttttcagaaagccatgcttgtcctatatgtggattttcaatcggagagttagaaccaagaatgtttagctttaacagtccttttggtgcttgtccgacatgtgatggcttaggccaaaagttaacagtcgatgtagacttggttgttcccgacaaagataagacgctaaacgaaggtgcaatagaaccttggataccgacgagttctgatttttatccaacattgttaaaacgtgtttgtgaagtttataaaatcaatatggataaaccttttaaaaagttaacagaacgtcaacgtgatattttattgtatggttctggtgacaaagaaattgaatttacatttacacaacgtcaaggtggtactagaaaacgaacaatggttttcgagggtgtagtt

SEQ ID NO: 8135 - DNA, 1305 bp, Staphylococcus aureus
atgccaattattacagatgtttacgctcgcgaagtcttagactctcgtggtaacccaactgttgaagtagaagtattaactgaaagtggcgcatttggtcgtgcattagtaccatcaggtgcttcaactggtgaacacgaagctgttgaattacgtgatggagacaaatcacgttatttaggtaaaggtgttactaaagcagttgaaaacgttaatgaaatcatcgcaccagaaattattgaaggtgaattttcagtattagatcaagtatctattgataaaatgatgatcgcattagacggtactccaaacaaaggtaaattaggtgcaaatgctattttaggtgtatctatcgcagtagcacgtgcagcagctgacttattaggtcaaccactttacaaatatttaggtggatttaatggtaagcagttaccagtaccaatgatgaacatcgttaatggtggttctcactcagatgctccaattgcattccaagaattcatgattttacctgtaggtgctacaacgttcaaagaatcattacgttggggtactgaaattttccacaacttaaaatcaattttaagcaaacgtggtttagaaactgcagtaggtgacgaaggtggtttcgctcctaaatttgaaggtactgaagatgctgttgaaacaattatccaagcaatcgaagcagctggttacaaaccaggtgaagaagtattcttaggatttgactgtgcatcatcagaattctatgaaaatggtgtatatgactacagtaagttcgaaggcgaacacggtgcaaaacgtacagctgcagaacaagttgactacttagaacaattagtagacaaatatcctatcattacaattgaagacggtatggacgaaaacgactgggatggttggaaacaacttacagaacgtatcggtgaccgtgtacaattagtaggtgacgatttattcgtaacaaacactgaaattttagcaaaaggtattgaaaacggaattggtaactcaatcttaattaaagttaaccaaatcggtacattaactgaaacatttgatgcaatcgaaatggctcaaaaagctggttacacagcagtagtttctcaccgttcaggtgaaacagaagatacaacaattgctgatattgctgttgctacaaacgctggtcaaattaaaactggttcattatcacgtactgaccgtattgctaaatacaatcaattattacgtatcgaagatgaattatttgaaactgctaaatatgacggtatcaaatcattctataacttagataaataa

SEQ ID NO: 8136 - DNA, 459 bp, Staphylococcus aureus
atggctgatagaacgaataaagaaattaaaacaggacgctttattgcaactgcatcaatcgtattctcaatattattgattattcattactttgtttcgttggataatgcgactgccaaagcattacttaatttaacgaatcaaaacacttcagataaagcgattgattacattttaaacagctttagattcactggtattatgtatattttggcttatctagcaggcttcatcactttttggaatcgacatacttatgtgtggtggtttatgtttgcagtttatgtatcaaatagtttgtttacgttgattaatttatcaatcacaattcaagcaataaaagctgcacacggtgcgtacttaacattgccaattttaatcgttattataggttcggttgcattagcgatttatatgcttgttgtttctatcaaacgtaaaagtacatttaatcgctag

SEQ ID NO: 8137 - DNA, 1425 bp, Staphylococcus aureus
atgttatcagttaaaaaagccacaaaatttgcagttgctaaccttattatcgtgtcaacagttttcagttctgtcacacctgcaattgcgcaatccgataaaagttctaaagatgaaagtttcgcggttggtaatactaaaaatccaaaaaatgttatctttttagttggcgatggcatgggtccatcatttaacacagcttatcgttattataaaaatgattcgcatgccaaagaaatgacccctactgcttttgattcatatttaaaaggcacaaatcgtacatattcaaatgacccaaaacagaatattactgattctgcagctggcggaacagcctttagttctggccataagacatataatggtgccatcggtgttgacagtaacaagcagaaagtaaagacagtgcttgaacgtgcaaaagaaaaaggtaagtcgactggtcttgtttcaacagctgaattaacagatgcaacaccagcagcatatgctgcacacgtgacttctagagatgataaaaacgaaatcgctaaacaattttataaagataaaatcaacggaaagcataaagttgatgttttattaggcggcggcgctaaatatttcggtaaaagtaatggcaatttagataaaaaattcaaaaaagatggttacgaccttgccacgaacagtaaggatttatcaaaatctgataaagataaagttcttggtttgtttgcagataaaaatatgccacttgcaatagatgcttctaaagacgaaccatcattagctgatatgcaacaaagtgcacttagtaagcttgagcgtaataaaaaaggtttctttttaatggtcgaaggtgcttctatagataaatcagcgcattccaacgatattacaggcgttatgtctgaaatggaaggttttgaaaaagcattcgatgacgccattcaatatgctaagaaacataaagatacacttgtcgttgcaacagcagatcactctactggtggtctaacaattggtaaagataaaggatacgaatggaatcctcaaccgattaaatcgatgaaacactctggatcatatatgacagaaaaaatggctaaaggtgaagaccctgaaaaagttattaatgaaggttatggctttgaattttcacaagatgatatgaaaaaggttaaaaaagagaataaaaagttgcaaaaattacttaaaaaagaaaaagacgaaaaatctgcagatgtagaaaaacaaacaaaagccttacaacacgcaattcagaagccagtaaatgataaatcttatacagggtggacttccgatggacatacaggcgaggatgttaatacctacgcttacggacctagatcagaatcatttagtggtaatatcgaaaatacagaaagcgcaaaaataatatttgatatattcaagtaa

SEQ ID NO: 8138 - DNA, 555 bp, Staphylococcus aureus
atgacagatgtaattattgtacattctatgcatggaaatagtagaaatcattggtatcagtggttggagcataacttaactttagaaggatatgacgtaacattatttaattttgaatcccctgaagcgaagacagtggatcagtggattgaagctatgacgaaacaaattaatgtacgcaaaaaggatacatattttgtaacacatggtttaggttcaatcacagctttaaaatatattgaaatgattgatcagccgattgaaggcttttttagtatagcgggctttaaagaagatgcagaaaatatagatttagatattgatttaagtaatgtaaccattgattacgataatattaaaaagaaagttgacaatttttacggattgagttctaaaaatgacaaatacgtttcatataaagaaacccagcgtttaatgaatgcattagaggggaacttgcgaatcgtggaagatggagggcacttcttagaagaggatggcttcgaaacatttacagcgttgcaagatcggatgcaagattacatgacacgatag

SEQ ID NO: 8139 - DNA, 474 bp, Staphylococcus aureus
atggctgagagaatatcttctaaaattagacgcttagaaaaatcagaagaacaaattaagttagaaagtttaaatgaagttacagaggcaattgcagcgaataaagatagtatattaaaagcaatcaagcttattaaaacattagatgatgcaaaactattagatgctttaaatggtgcaattcgaggacgtcaagtcatcataaataaatttgcagttgaacttaataaagatatttatacagggctattatctaatatggcttcaatggtatttttattaggtgaactcaatgtatcagatttaagcgacttcctaaataaagttaataaaggattacacgttgccaatcaagcgagtccaaatgctaagacaactataagaagtctattgggcgtattgaaagatgacgacatgaaccgtagtttaacatacatgcttaatatgctaaaaggtatgtctcgagaagaataa

SEQ ID NO: 8140 - DNA, 4158 bp, Staphylococcus aureus
atgctaaacagagaaaataaaacggcaataacaagaaaaggcatggtatccaatcgattaaataaattttcgattagaaagtacacagtgggaacagcatcaattttagtaggtacaacattaatttttggtctggggaaccaagaagcaaaggctgcagaaagtactaataaagaattgaacgaagcgacaacttcagcaagtgataatcaatcgagtgataaagttgatatgcagcaactaaatcaagaagacaatactaaaaatgataatcaaaaagaaatggtatcatctcaaggtaatgaaacgacttcaaatgggaataaatcaatagaaaaagaaagtgtacaatctaccactggaaataaagttgaagtttcaactgccaaatcagatgagcaagcttcaccaaaatctacgaatgaagatttaaacactaaacaaactataagtaatcaagaagggttacaacctgatttgctagagaataaatcagtggtaaatgttcaaccaactaatgaggaaaacaaaaaggtagatgcgaaaactgaatcaactacattaaatgttaaaagtgatgctatcaagagtaatgctgaaactcttgttgataacaatagtaattcaaataatgaaaataatgcagatatcattttgccaaaaagtacagcacctaaaagtttgaatacaagaatgcgtatggcagcaatacaaccaaactcaacagattctaaaaatgttaatgatttaatcacatcaaatacaacattaactgtcgttgatgcagataatagcaaaacgattgtaccagcccaagattatttatcattaaaatcacaaattacagttgatgacaaagttaaatcaggtgattatttcacaattaaatactcagatacagtacaagtatatggattgaatccggaagatattaaaaatattggtgatattaaagatccaaataatggtgaaacaattgcgactgcaaaacatgatactgcaaataatttaattacatatacatttacagattatgttgatcgatttaattcagtaaaaatgggtattaattactcaatttatatggatgcagatacaattcctgttgacaagaaagatgttccttttagtgtaactattggaaatcaaattacaactacaacagcagatatcacttatccggcttataaagaagctgacaataattcaataggatcagcttttacagagacagtttctcatgtaggaaatgttgaagaccctggttactataaccaggtagtatatgttaatcctatggataaggatttaaaaggtgctaagttaaaagttgaagcgtaccatccgaaatatccaactaatattggtcaaattaatcaaaatgttacaaatataaaaatatatcgtgttcctgaaggatatacattgaataaaggatatgacgttaatactaatgatttggtagacgtaactgatgaatttaaaaataaaatgacgtatggatcaaatcaaagtgttaatcttgattttggtgatattacatcagcatatgttgtaatggttaatacaaaattccaatatacaaatagcgaaagcccaacacttgttcaaatggctactttatcttcaacaggtaataaatccgtttctactggcaatgctttaggatttactaataaccaaagtggcggagctggtcaagaagtatataaaattggtaactacgtatgggaagatactaataaaaacggtgttcaagaattaggagaaaaaggcgttggcaatgtaactgtaactgtatttgataataatacaaatacaaaagtaggagaagcagttactaaagaagatgggtcatacttgattccaaacttacctaatggagattaccgtgtagaattttcaaacttaccaaaaggttatgaagtaaccccttcaaaacaaggtaataacgaagaattagattcaaacggcttatcttcagttattacagttaatggcaaagataacttatctgcagacttaggtatttacaaacctaaatacaacttaggtgactatgtctgggaagatacaaataaaaatggtatccaagaccaagatgaaaaaggtatatctggcgtaacggtaacattaaaagatgaaaacggtaacgtgttaaaaacagttacaacagacgcagatggcaaatataaatttactgatttagataatggtaattataaagttgaatttactacaccagaaggctatacaccgactacagtaacatctggtagcgacattgaaaaagactctaatggtttaacaacaacaggtgttattaatggtgctgataacatgacattagatagtggattctacaaaacaccaaaatataatttaggtaattatgtatgggaagatacaaataaagatggtaagcaggattcaactgaaaaaggtatttcaggcgtaacagttacattgaaaaatgaaaacggtgaagttttacaaacaactaaaacagataaagatggtaaatatcaatttactggattagaaaatggaacttataaagttgaattcgaaacaccatcaggttacacaccaacacaagtaggttcaggaactgatgaaggtatagattcaaatggtacatcaacaacaggtgtcattaaagataaagataacgatactattgactctggtttctacaaaccgacttacaacttaggtgactatgtatgggaagatacaaataaaaacggtgttcaagataaagatgaaaagggtatttcaggtgtaacagttacgttaaaagatgaaaacgacaaagttttaaaaacagttacaacagatgaaaatggtaaatatcaattcactgatttaaacaatggaacttataaagttgaattcgagacaccatcaggttatacaccaacttcagtaacttctggaaatgatactgaaaaagattctaatggtttaacaacaacaggtgtcattaaagatgcagataacatgacattagacagtggtttctataaaacaccaaaatatagtttaggtgattatgtttggtacgacagtaataaagacggcaaacaagattcaactgaaaaaggtatcaaagatgttaaagttattttattaaatgaaaaaggcgaagtaattggaacaactaaaacagatgaaaatggtaaataccgctttgataatttagatagcggtaaatacaaagttatttttgaaaagcctactggcttaacacaaacaggtacaaatacaactgaagatgataaagatgccgatggtggcgaagttgatgtaacaattacggatcatgatgatttcacacttgataatggctactacgaagaagaaacatcagatagcgactcagattcggacagcgattcagactcagacagcgattcagactcagatagtgattcagattcagatagtgattcagattcagatagtgattcagattcagacagcgactcagactcagatagtgactcagactcagatagcgattcagattcagatagcgattcagactcagacagcgattcagattcagacagcgactcagactcagatagcgactcagattcggacagcgattcagactcagatagcgactcagactcagacagcgattcagactcagatagcgactcagactcagatagcgattcagattcagacagcgattcagattcagacagtgattcagattcagacagcgactcagattcagatagcgattcagactcagactcagatagcgattcagattcagacagcgactcagattcggacagcgactcagactcagacagtgattcagattcagatagcgactcagactcagatagcgactcagattcagacagcgattcagactcagatagtgactcagattcggacagcgattcagactcagatagcgactcagattcagacagtgattcagactcagatgcaggtaagcacacacctgttaaaccaatgagtactactaaagaccatcacaataaagcaaaagcattaccagaaactggtaatgaaaatagtggctcaaataacgcaacgttatttggcggattattcgcagcattaggatcattattgttattcggtcgtcgtaaaaaacaaaataaataa

SEQ ID NO: 8141 - DNA, 705 bp, Staphylococcus aureus
atgacgaatgtcttgtatcaacatggtacattaggtacgttaatggctggcttactagaaggaacagctacaattaatgaattgttagaacatgggaatttagggattgcaacgttaacagggtctgatggcgaagtaatatttttagacgggaaggcatatcatgctaacgagcataaagaatttatagaattaaaaggcgatgagaaagtaccgtatgcatcgattactaattttaaagcgagtaagacatttccattgcaacaattatcacaagatgatgtattcgcacaaattaaaaatgaaatgttaagtgagaatttattttcggctgttaaaatttatggcacatttaaacatatgcatgtacgaatgatgcctgctcagcaaccgccatatacacgtttgattgattcagcacgcagacaacctgaggaaaaaagacaagatattcgtggtgccattgttggattttttacaccagaattatttcatggcgtagggtctgctggttttcatatacattttgcggatgatgaaagagcttatggtggacatgttcttgactttgaagtggatgacgttgtcgttgagatacaaaactttgaaacattccaacaacatttcccggtaaataacgagacgtttgttaaagcgaaaatagactataaagatgtggcagaagaaattagagaagctgaatag

SEQ ID NO: 8142 - DNA, 2808 bp, Staphylococcus aureus
atgaatatgaagaaaaaagaaaaacacgcaattcggaaaaaatcgattggcgtggcttcagtgcttgtaggtacgttaatcggttttggactactcagcagtaaagaagcagatgcaagtgaaaatagtgttacgcaatctgatagcgcaagtaacgaaagcaaaagtaatgattcaagtagcgttagtgctgcacctaaaacagacgacacaaacgtgagtgatactaaaacatcgtcaaacactaataatggcgaaacgagtgtggcgcaaaatccagcacaacaggaaacgacacaatcatcatcaacaaatgcaactacggaagaaacgccggtaactggtgaagctactactacgacaacgaatcaagctaatacaccggcaacaactcaatcaagcaatacaaatgcggaggaattagtgaatcaaacaagtaatgaaacgacttctaatgatactaatacagtatcatctgtaaattcacctcaaaattctacaaatgcggaaaatgtttcaacaacgcaagatacttcaactgaagcaacaccttcaaacaatgaatcagctccacagaatacagatgcaagtaataaagatgtagttagtcaagcggttaatccaagtacgcctagaatgagagcatttagtttagcggcagtagctgcagatgcaccggcagctggcacagatattacgaatcagttgacagatgtgaaagttactattgactctggtacgactgtgtatccgcaccaagcaggttatgtcaaactgaattatggtttttcagtgcctaattctgctgttaaaggtgacacattcaaaataactgtacctaaagaattaaacttaaatggtgtaacttcaactgctaaagtgccaccaattatggctggagatcaagtattggcaaatggtgtaatcgatagtgatggtaatgttatttatacatttacagactatgttgataataaagaaaatgtaacagctaatattactatgccagcttatattgaccctgaaaatgttacaaagacaggtaatgtgacattgacaactggcataggaaccaatactgctagtaagacagtattaatcgactatgagaaatatggacaattccataatttatcaattaaaggtacgattgatcaaatcgataaaacaaataatacgtatcgccaaacaatttatgtcaatccaagcggagataacgttgtgttacctgccttaacaggtaatttaattcctaatacaaagagtaatgcgttaatagatgcaaaaaacactgatattaaagtttatagagtcgataatgctaatgatttatctgaaagttattatgtgaatcctagcgattttgaagatgtaactaatcaagttagaatttcatttccaaatgctaatcaatacaaagtagaatttcctacggacgatgaccaaattacaacaccgtatattgtagttgttaatggccatattgatcctgctagtacaggtgatttagcactacgttcgacattttatggttatgattctaattttatatggagatctatgtcatgggacaacgaagtagcatttaataacggatcaggttctggtgacggtatcgataaaccagttgttcctgaacaacctgatgagcctggtgaaattgaaccaattccagaggattcagattctgacccaggttcagattctggcagcgattctaattcagatagcggttcagattctggcagtgattctacatcagatagtggttcagattcagcgagtgattcagattcagcaagtgattcagactcagcgagtgattcagattcagcaagtgattcagattcagcaagtgattcagattcagcaagtgattcagactcagcaagtgattcagattcagcaagtgattcagattcagcaagcgattcagattcagcgagcgattcagattcagcgagcgattcagattcagcgagtgattccgactcagcgagcgattcagactcagatagtgactcagattccgatagcgattccgactcagatagcgactcagattcagacagcgattctgactcagacagcgattctgactcagacagtgactcagattccgatagcgattctgactcagacagtgactcagattccgatagcgattcagattcagacagtgattcagactcagatagcgattcagattccgacagtgactcagactcagacagcgattcagattccgatagcgattcagattccgacagtgactcagattccgatagtgactcggattcagcgagtgattcagattcagatagcgattcagaatcagatagtgactcagactcagacagtgattcagattcagatagtgactcagactcagacagcgattcagaatcagatagtgactccgattcagacagcgattcagaatcagatagtgactccgattcagatagcgattcggattcagcgagtgattcagactcaggtagtgactccgattcatcaagtgattcagattccgattcaacgagtgacacaggatcagacaacgactcagacagtgattcaaatagcgattccgagtcaggttctaacaataatgtagttccgcctaattcacctaaaaatggtactaatgcttctaataaaaatgaggctaaagatagtaaagaaccattaccagatacaggttctgaagatgaagcgaatacgtcactaatttggggattattagcatcattaggttcattactacttttcagaagaaaaaaagaaaataaagataagaaataa

SEQ ID NO: 8143 - DNA, 822 bp, Staphylococcus aureus
atgagtaaattacaagacgttattgtacaagaaatgaaagtgaaaaagcgtatcgatagtgctgaagaaattatggaattaaagcaatttataaaaaattatgtacaatcacattcatttataaaatctttagtgttaggtatttcaggaggacaagattctacattagttggaaaactagtacaaatgtctgttaacgaattacgtgaagaaggcattgattgtacgtttattgcagttaaattaccttatggagttcaaaaagatgctgatgaagttgaccaagctttgcgattcattgaaccagatgaaatagtaacagtcaatattaagcctgcagttgatcaaagtgtgcaatcattaaaagaagctggtattgttcttacagatttccaaaaaggaaatgaaaaagcgcgtgaacgtatgaaagtacaattttcaattgcttcaaaccgacaaggtattgtagtaggaacagatcattcagctgaaaatataactgggttttatacgaagtacggtgatggtgctgcagatatcgcacctatatttggtttgaataaacgacaaggtcgtcaattattagcgtatcttggtgcgccaaaggaattatatgaaaaaacgccaactgctgatttagaagatgataaaccacagcttccagatgaagatgcattaggtgtaacttatgaggcgattgataattatttagaaggtaagccagttacgccagaagaacaaaaagtaattgaaaatcattatatacgaaatgcacacaaacgtgaacttgcatatacaagatacacgtggccaaaatcctaa

SEQ ID NO: 8144 - DNA, 822 bp, Staphylococcus aureus
gtggattcaatcattgatttgcgattgccacgtatattaattgcattgatggttggcgcaatgttagcagtttctggagcattattacaagcagcactacaaaatcctttggcagaggcgaatatcattggcgtttcctcaggtgcacttataatgagagcactttgtatgttgtttattccacaattgtacttttacttaccattattaagttttattggaggtttaataccatttttaataattatattgttgcattctaaatttagattcaatgctgtaagtatgatattagtaggtgttgcgttattcgtattattaaatggtgttttagaaattttaactcaaaaccctttaatgaaaattcctcaaggcttaacaatgaaaatatggagcgacgtatacatattagcagtatcagcattattgggattaatattaacattactattgtcccctaaattgaatttactaaatttagacgacatacaagcgcgaagtatcggttttaatattgatcgttacagatggttaacaggtttattagcagtatttttagcaagtgcaactgttgcgattgttggacaactagcctttttaggtattattgtgccacatgtggttagaaagctagttgggggcaattacagagtacttattccgttttctacagttattggtgcatggctattgttagtggctgatttattaggacgagtgatacagcctcctttagaaattccagccaatgctattttaatgattgtcggtggtccaatgctaatttacttaatttgtcaaagtcaacgaaatcgaatctaa

SEQ ID NO: 8145 - DNA, 735 bp, Staphylococcus aureus
atgagaatgaagcgatttttaactattgtacaaattttattggttgtaattattatcatttttggttacaaaattgttcaaacatatattgaagacaagcaagaacgcgcaaattatgagaaattacaacaaaaatttcaaatgctgatgagcaaacatcaagaacatgtgagaccacaatttgaatcacttgaaaaaataaataaagacattgttggatggataaaattatcaggaacatcattaaattatccagtactacaaggtaagacaaatcacgattatttaaatttagattttgagcgagaacatcgacgtaaaggtagtatttttatggattttagaaatgaattgaagaatttaaatcataatactattttatacgggcaccatgtcggtgataatacgatgtttgatgtgttagaagattatttaaagcaatcgttttatgaaaaacacaagataattgaatttgacaataaatatggtaaatatcaattgcaagtatttagtgcatataaaactactactaaagataattacatacgtacagattttgaaaatgatcaagattatcaacaatttttagatgagacaaaacgtaaatctgtaattaattcagatgttaatgtaacggtaaaagataaaataatgactttatcaacgtgcgaagatgcatatagtgaaacaacgaaaagaattgttgttgtcgcaaaaataattaaggtaagttaa

SEQ ID NO: 8146 - DNA, 1485 bp, Staphylococcus aureus
ttgagtactaaaaacaaacacatcccttgtttaatcacaatctttggtgcaactggtgacttaagccatcgtaagttgtttccatcaatattccatctctaccaacaagacaatttagatgaacatattgccatcatcggtattggacgtcgtgacattactaatgatgatttccgtaatcaagtaaaatcatcaattcaaaagcacgtaaaagatacaaacaaaattgacgcgtttatggaacatgtcttctatcatagacatgatgttagtaatgaagaaagctatcaagaattactagattttagtaatgaattagatagccaatttgaattaaaaggtaatcgactattctatttagcaatggcaccacaattctttggcgttatttctgattatctaaaatcttctggtcttactgatacaaaaggatttaaacgccttgttatcgaaaaaccattcggtagtgatttaaaatcagccgaagcattaaacaatcaaattcgtaaatcatttaaagaagaagaaatttatcgtattgaccactatttaggaaaagacatggttcaaaatatcgaggtattacgttttgcgaatgcgatgtttgaaccattatggaataacaaatatatttcaaacatccaagttacatcttctgaaatactaggtgttgaagatcgtggtggttattatgaatcaagtggcgcgctaaaagatatggtgcaaaaccacatgttacaaatggttgcattattagctatggaagcacctattagtttaaacagtgaagatatccgtgctgagaaagtaaaagtacttaaatcactgcgtcatttccaatctgaagatgttaaaaagaactttgttcgtggtcaatatggcgaaggctatatcgatggtaaacaagttaaagcataccgtgatgaagatcgcgttgcagatgactctaacacacctacctttgtttcaggtaaattaacaattgataactttagatgggctggtgtaccattctatattcgtactggtaaacgtatgaaatctaaaacaattcaagttgtcgttgaatttaaagaagtaccaatgaacttatactatgaaactgataaactattagattcaaacctattagtaatcaatatccaacctaatgaaggtgtatctttacatctaaatgctaagaaaaatacacaaggtatcgaaactgaacctgttcaattgtcttattcaatgagcgctcaagataaaatgaatactgtagatgcatatgaaaatctattattcgattgtcttaaaggtgatgccactaacttcacgcactgggaagaattaaaatcaacatggaaatttgttgatgcaattcaagatgaatggaatatggttgatccagaattccctaactatgaatcaggtactaatggtccattagaaagtgatttactacttgctcgtgatggtaaccattggtgggacgatattcaataa

SEQ ID NO: 8147 - DNA, 393 bp, Staphylococcus aureus
acctgttatccatcgcctacgcctgtcggcctcagcttaggacccgactaacccagagcggacgagccttcctctggaaaccttagtcaatcggtggacgggattctcacccgtctttcgctactcacaccggcattctcacttctaagcgctccacatgtccttacgatcatgcttcaacgcccttagaacgctctcctaccattgtccaaaggacaatccacagcttcggtaatatgtttagccccggtacattttcggcgcagtgtcactcgactagtgagctattacgcactctttaaatgatggctgcttctaagccaacatcctagttgtctgggcaacgccacatccttttccacttaacatatattttgggaccttagctggtgg

SEQ ID NO: 8148 - DNA, 393 bp, Staphylococcus aureus
acctgttatccatcgcctacgcctgtcggcctcagcttaggacccgactaacccagagcggacgagccttcctctggaaaccttagtcaatcggtggacgggattctcagccgtctttcgcgactcacaccggcattctcacttctaagcgctccacatgtccttacgatcatgcttcaacgcccttagaacgctctcctaccattgtccaaaggacaatccacagcttcggtaatatgtttagccccggtacattttcggcgcagtgtcactcgactagtgagctattacgcactctttaaatgatggctgcttctaagccaacatcctagttgtctgggcaacgccacatccttttccacttaacatatattttgggaccttagctggtgg

SEQ ID NO: 8149 - DNA, 1536 bp, Staphylococcus aureus
atgtcgtatttctcgaacgttccattattcattttaaaaagggggactgtatttgttatgacaacacaacatagcaaaacagatgtcatcttaattggtggcggtattatgagtgcaacattaggaacattacttaaagaattatcacctgagaaaaatattaaagtgtttgaaaaattagcacaacctggcgaagagagttcaaatgtatggaataatgccggtacagggcattcagcactttgcgagttgaactatacaaaagaaggtaaggatggcacagttgattgtagtaaagcaattaagataaatgagcagtaccaaatttcaaaacagttttgggcatatttagttaaaacaggacaattagataacccagatcgctttattcaagcggtgccacacatgagttttgtcattggcgaagataatgtagcttttataaaaagtcgtgttgcaacgttaaagaaaagtgttttattcgaaaaaatgaaattatcgcaagatgaagaagaaatgaaatcttgggtaccgttaatgattgaaggtcgtaagtctgatgaaccaattgctttaacttatgatgaaactggtacagatgttaactttggtgcgttaactgcaaagttatttgaaaatttagagcaacgtggtgtgggaattcaatataagcagaatgtattagacatcaagaaacagaaatctggggcatggctagttaaagttaaagatttagaaactaatgaaacgacaacatatgaatctgattttgtatttattggtgctggcggtgcgagtttaccattactccaaaagactgggattaaacaatcaaaacatattggtggtttcccagtaagtggattattcctgcgctgtacaaatcaagaagtgattgatcgtcatcatgctaaagtgtacggaaaagcagcagtgggtgcgccaccaatgtcagtgccgcacttagatacacgttttgtagacggcaagcgttcattgttatttggtccatttgcaggtttctcacctaaatttttaaaaacaggttcacatatggatttaattaaatcggttaaaccaaataatatcgtgacgatgttatctgcaggtatcaaagaaatgagtcttacgaagtatttagtgtcacaattgatgttatctaatgatgagcgtatggatgatttaagagtctttttcccaaatgctaaaaatgaagattgggaagtgattacagcagggcaacgtgtccaagtaatcaaggatactgaggattctaaaggtaacttacaatttggtaccgaagtcattacgtcagatgatggcacattagctgcattacttggtgcatcacctggtgcgtcaacagctgtagatattatgtttgatgttttacagcgatgctatcgtgatgaattcaaagggtgggaaccaaagattaaagaaatggtgccgtcatttggttatcgcttaacagatcatgaggatttatatcacaaaattaatgaagaagtaactaagtatttacaagttaaataa

SEQ ID NO: 8150 - DNA, 687 bp, Staphylococcus aureus
atgattggtataattggtgccatggaagaagaagtaacaatattaaaaaataaattaacacaattaagcgaaatttcagttgcacatgttaaattttatactggcattttaaaagatagagaagtagtgattacccaaagtggcattggaaaagttaatgctgcaatttctacgacattattaattaataagtttaaaccggacgtcattattaatacaggttctgctggagctttagatgaaagtttaaatgtaggtgacgttcttataagtgatgatgtaaaatatcatgatgcggatgcaacagcatttggttatgaatatggacaaataccacagatgccggtagcatttcaatcaagtaaacctttaatagaaaaagtatctcaagttgtacaacaacaacaattaacagctaaagtaggcttaattgtaagtggtgatagctttatcggtagtgttgaacaacgccaaaaaattaaaaaagcatttccaaatgcgatggcggttgaaatggaagcaactgcaattgcacaaacatgttatcaatttaatgtaccatttgttgtagttcgtgcagtttcagacttagcaaatggagaagcggaaatgagcttcgaagcatttttagaaaaagcagctgtatcatcaagtcaaactgttgaagcattagtgtctcaattataa

SEQ ID NO: 8151 - DNA, 1296 bp, Staphylococcus aureus
atgattgaacgctattctagagaagaaatgtctaatatttggactgatcaaaatcgctatgaagcatggttagaagtggaaattttagcatgtgaagcatggagtgaattaggacatataccgaaagctgacgtacaaaaaattcgtcaaaacgcaaaggtaaatgtcgaacgtgcacaagaaattgaacaagaaacgcgccatgatgttgtagcctttactagacaagtttctgaaacgctaggtgaagaacgtaagtgggtacattatggtttaacttctactgatgttgtagatacagctttaagtttcgttattaaacaagcaaatgacattattgaaaaagatttagaaagatttatcgacgttttagctgaaaaagcaaaaaattataaatatacattgatgatgggacgtacacatggagtgcatgcagaaccaactacatttggtgtcaaaatggcattgtggtacacggaaatgcaacgtaacttacaacgtttcaaacaagtaagagaagaaattgaagtagggaaaatgagtggtgcagtaggtacttttgctaacattcctcctgaaatagaaagttatgtgtgtaaacatttaggtattggcacagcgcctgtatcaacgcaaacattgcaacgcgatcgacatgcatactatattgcgacattagcattaatcgcgacgtcactagaaaaatttgccgttgaaattcgtaaccttcaaaaaaccgaaacaagagaagttgaagaagcatttgcaaaaggccaaaaaggttcatctgcaatgcctcataaacgaaatccaattggttctgaaaatatcacaggtatttcaagagtcattcgtggttatattactacagcttatgagaatgtgccattatggcatgaaagagatatttctcattcttctgctgagcgtattatgttaccagatgttacaatagcactagattatgcattgaatcgtttcacaaatattgtggaccgtttaactgtatttgaagataatatgcgtaataacatagataaaacatttggtctgattttctcacaacgtgtcttattagcattaattaataaaggtatggttcgtgaagaagcatacgacaaagtacaaccaaaagcgatgatatcttgggaaacgaaaacacctttccgtgaattaatcgaacaagatgagtctattacaagtgttttaacaaaagaagaattagatgaatgtttcgatcctaaacatcatttgaatcaagttgacactattttcgaacgcgctggattagcataa

SEQ ID NO: 8152 - DNA, 858 bp, Staphylococcus aureus
atggataacgtaaaagcaatatttttggacatggatggaacaattttacatgaaaataatcaagcatcaacgtatacgaaagatgtcattaatcaattgagagagaaaggatataaagtatttttggcaacaggacgttcgcattctgaaatacatcaacttgtacctcaagattttgcggttaatggcatcattagttcaaatggaacaattggagaagtagatggagaaattatcttcaagcatggtttatcattggctcaagtgcaacaaattactaatttagctaagcgccaacaaatttattatgaggtatttccttttgaaggtaatagagtttctttaaaagaagatgaaacatggatgcgagatatgattcgtagtcaagatcctattaatggcgtaagtcatagtgaatggtcttcaagacaagatgcgcttgctggtaagatagattgggtaactaagtttcctgaaggtgaatattcaaaaatttatctattcagttctaatttagaaaaaataacagcatttagagatgaattaaagcaaaatcatgtgcaactacagattagtgtttcaaattcatcaagatttaatgcggaaacaatggcttatcaaactgataaaggtacaggcattaaagaaatgattgcacattttggtattcatcaagaagaaacgttagttattggagatagcgacaatgatagagcaatgtttgaatttggtcattatacagttgctatgaaaaatgcacgccctgaaatccaagcattaacttcagatgtaacggcatacacgaatgaagaggatggcgcagcaaaatatttagcaaagcattttttagctgattaa

SEQ ID NO: 8153 - DNA, 924 bp, Staphylococcus aureus
atggcaaatttacaaaagtatattgagtattctcgagaagttcagcaagcacgggagaacaatcaaccgattgtagcattagaatcaacaattatttcgcatggtatgccgtacccacaaaatgttgaaatggcaacaacagtagagcaaattatcaggaataatggtgccattccagcaaccatagccattatagatggcaaaattaaaattggtttagaaagcgaagatttagaaatactggcaactagtaaagacgttgctaaagtatctagaagggatttagcagaagttgttgcgatgaagtgtgttggtgctactactgtagcgacgacgatgatatgtgctgcaatggctggtattcaattttttgttacaggaggtattgggggcgtccataaaggtgcagaacatacgatggacatttcagcagacttagaagaactgtctaaaacaaatgtcactgttatctgtgcaggtgccaaatcaattttagacttacctaagacgatggagtatttagaaacaaaaggcgttccagttattggatatcaaacgaatgaattgccagcattcttcactcgcgaaagcggtgttaagttaacaagttcggttgaaacgccagaacgacttgctgacattcatttaacaaaacagcagttaaatcttgaaggtggcattgttgttgctaatccaattccatatgagcatgccttatcaaaagcatatattgaggcaatcataaatgaagctgttgttgaagcggaaaatcaaggtattaaaggtaaggacgccacaccgttcttgttagggaaaattgtagaaaaaacgaatggtaaaagtttagcagcaaatataaaacttgttgaaaacaatgcggcgttgggtgctaaaattgctgtcgctgttaataaattattgtag

SEQ ID NO: 8154 - DNA, 630 bp, Staphylococcus aureus
atgagtaaagtacacgttttcgatcatccattaattcaacacaaactaagctatattagagatgtaaatacaggtactaaagaatttagagaacttgtagacgaagttggtatgttgatggcatatgaagtaactagagacttagagcttcaggatgttgatattgaaacgcctgtaactaaaatgacggctaaacgattagctggtaaaaaattagctatcgttccaattttaagagctggtttaggtatgactgatggtattttaagtttagtacctgcagccagagttggacatatcggtttatatcgagatcccgaaacattaaaggctgtagagtattttgctaagttacctcaagatattactgaaagacaaatcattgttgttgatcctatgttagcaacaggcgcatcagcaattgaagctattacttcattgaagaaacgtggcgctaaaaatattcgcttcatgtgtttaattgcagcaccagaaggcgtagaaaagatgcatgaagcacatccggatgtagatatttatattgctgcacttgatgaaaagctaaatgataaagcatatatcacaccagggttaggcgacgctggagatagattgtttggtactaaatag

SEQ ID NO: 8155 - DNA, 1131 bp, Staphylococcus aureus
ttgatgaaaaagattatgaccatatttggaacaagacccgaagccataaagatggctcctttagttaaagctttggaacaagaaaaaatgctcgagccaattgttgttgttacagcacagcatagagaaatgcttgattcagtattaagtacctttgaaatcaaaccaaaatacgatttgaatattatgaaatcaggacagacactttctgagataacttctaaatcaatcactcaattagaacaagtgattcaattagaaaaaccagacatggtacttgtacatggtgatacgatgacgacatttgcaggtggtttagcggcattttataaccaagtgccgattggacacgttgaagcagggcttagaagttatgataaatattcaccttttccagaagaggtgaatagacaattagttggtgtattagctgacttacattttgcacctactaaaaatgctgcatcgcatttgttaagtgaagggaaatattcagaaagtgttgttgtcactggtaatactgcgattgatgctatgaaatatacagttgatgacaattataaatctaacatcatggataaataccatgacaaaaaattcattcttatgacagcacaccgacgagaaaatatcgggaaacccatggaaaatatatttaaagcggttagacgcttaatagatgagtatactgatttagcactggtatatccaatgcataaaaacccgaaagttcgagaggtggctcaaaagattttaggtagtcatgacagaattgaattgattgaacctttggacgtagtagatttccataattttgctaaaaaatcttattttattttgacagattcaggtggaattcaggaagaagcgccatcatttaataagccagttttagttttgcgaagcgttacagaacgtcctgaaggtgttgaagctggcacattaaaagtcattggaacaaataagcaaaatgtgtatcaagctgcaaaagaattaatcgatgatgagagattatatcatcaaatgtctgaagcatctaatccttacggtgatggatttgcttcagaaagaatagttaatcatattaagtattatttgaatttaatcactgaaaaaccaagcgatttctga

SEQ ID NO: 8156 - DNA, 540 bp, Staphylococcus aureus
atggaattacaacaagcaatagctaatagaagaagtgtgaaaaaatttaaaagagatatgcacatagatgacgcattgctatatcaagcaattgagaaagctgctgatgctccaaatcacggaatgagggaaccatggagagttgtgcatgttccgaaagacagattaggagatatgagtaaggatatttctaaatttgcatttcctaatgaattagataagcaacaatgtcattatgatgcagtaacgaaactaggtggcatgttattgcttattttaaaaacagatccaagacaacgtcaaaatgatgaaaactactttgcatttggtgcatatgcacaaaatcttatgttgttactttatgaagcggggataggtacatgttggaaatcgccattatatatctatgatcctaaagtaagaaaaacacttggtataaagaaagatgaagttcttgctggattcttatatttaacggatttagaagaagatatgcctaaagcaccacgtaaaaatagaaacttaattacattatattaa

SEQ ID NO: 8157 - DNA, 717 bp, Staphylococcus aureus
atgacacatgtggaagtagtagcgactatcgcgccacaattatctatcgaagaaactttaattcaaaaaattaatcatcgtattgatgcaatagacgtattagaattacgaattgatcaaattgaaaatgtcacagttgatcaagtggcagaaatgattacaaagctgaaggttatgcaagattcattcaaattattagttacgtatcgtacaaagttacaaggtggctatgggcaatttataaatgacttgtatcttaatttaatatcagacttagcaaatatcaatggcatagatatgattgatatagaatggcaagcagatattgacattgaaaaacatcaacgaatcattaaacacttgcaacagtataataaagaggtggttatatcacatcataatttcgaaagtacgcctccattagatgaattgcaatttatattttttaaaatgcaaaaattcaacccagaatacgttaaattagcagtaatgccacataataaaaatgatgtgttaaatttattgcaggcaatgtctacattttcagatactatggactgcaaagttgttggtatttcaatgtctaaacttggactaataagtagaacggctcaaggcgtttttggtggtgcattgacttatggttgtatcggagaaccacaagctccaggacagattgatgttactgatttaaaagcacaagtgactttatactaa

SEQ ID NO: 8158 - DNA, 2118 bp, Staphylococcus aureus
atgagtaaacaaagaatttacgaatatgcgaaagaattaaatctaaagagtaaagagattatagatgagttaaaaagcatgaatatagaggtttcaaatcatatgcaagctttggaagatgaccaaattaaagcattagataaaaagttcaaaaaagaacaaaagaacgacaataaacaaagcactcaaaataatcaccaaaaatcaaacaatcaaaaccaaaataaagggcaacaaaaagataacaaaaagaatcaacaacaaaataataaaggcaacaaaggcaataaaaagaataatagaaataataagaaaaataacaagaataataaaccacaaaatcaaccagctgctccaaaagaaataccatcaaaagtgacatatcaagaaggtattacagtaggcgaatttgcggataaattaaatgttgaatcatcagaaattatcaaaaaattattcttacttggtattgttgctaatatcaatcaatcattaaatcaagaaacaatcgaattaattgccgatgattatggcgttgaggttgaagaagaagttgtgattaatgaagaagatttatcaatctacttcgaagacgaaaaagatgatccagaagcaattgagagaccagcagttgtaacaattatgggacatgttgaccatggtaaaacgactttattagattcaattcgtcatacaaaagttacagcaggtgaagcaggcggaatcactcaacatattggtgcatatcaaattgaaaacgatggcaaaaaaatcactttcttagatacaccgggacatgctgcatttacaacgatgcgtgcgcgtggtgcacaagtaacagatattacaattttagtagtagcagctgacgatggtgttatgccacaaacaattgaagcaattaaccatgctaaagaagcagaagtaccaattattgttgcagtaaataaaattgataaaccaacttcaaatcctgatcgagttatgcaagaattaactgaatatggtttaattcctgaagattggggcggcgaaacaattttcgttccactttctgcattaagtggtgatggtatcgacgatttattagaaatgataggattagttgcagaagttcaagaacttaaagcaaatcctaaaaaccgtgctgttggtacagttatcgaagctgaattagataaatcacgtggtccttctgcatcattattagtacaaaacggtacattaaatgttggtgatgcgattgtagttggtaatacttacggccgtatccgtgcaatggttaatgacttaggtcaaagaatcaaaacggctggtccatcaacgcctgttgaaattacaggtattaatgatgtgccacaagctggggatcgctttgttgtatttagtgatgaaaaacaagctcgtcgtattggtgaatcaagacacgaagctagcattgtacaacaacgtcaagaaagtaaaaatgtttcattagataacctgtttgaacaaatgaaacaaggtgaaatgaaagatttaaacgttattattaaaggtgatgttcaaggttctgttgaagctttagctgcatcattaatgaaaattgatgttgaaggcgtaaatgttcgtatcattcatacagcggttggtgcaattaatgagtcagacgtgacacttgctaatgcctcaaatggtattatcattggtttcaatgttcgtccagacagtggtgcaaaacgtgctgcagaagctgaaaatgttgatatgcgtttacacagagttatttataatgttatcgaagaaattgaatcagcgatgaaaggtttacttgatccagaatttgaagaacaagttatcggacaagctgaagttcgtcaaacattcaaagtttctaaagttggtactattgctggatgttatgttactgaaggtaaaattacgcgaaatgctggtgtacgtattattcgtgatggtattgttcaatatgaaggcgaattagatacacttaaacgtttcaaagatgatgctaaggaagttgcaaaaggttatgaatgtggtattacaattgaaaactacaatgaccttaaagaaggcgatgttatcgaagcatttgaaatggttgaaattaagcgttaa

SEQ ID NO: 8159 - DNA, 3198 bp, Staphylococcus aureus
atggtggcatatttaaatattcatacggcttatgatttgttaaattcaagcttaaaaatagaagatgccgtaagacttgctgtgtctgaaaatgttgatgcacttgccataactgacaccaatgtattgtatggttttcctaaattttatgatgcatgtatagcaaataacattaaaccgatttttggtatgacaatatatgtgacaaatggattaaatacagtcgaaacagttgttctagctaaaaataatgatggattaaaagatttgtatcaactatcatcggaaataaaaatgaattcaatggaaaatgtttcatttgaactattgcaacaattttcatcgaatttgattatcatttttaaaaatgttgcagacgaacatcgtgacattgttcaagtttttgattcgcatgaagatacgtatttagatcatcaaagtgttttagttcagggtataaagcacgtatggattcaaaatgtttgttaccaaacacgtcaagatgccgatacgatttctgcattagcagctattagagacaatgcaaaattagacttaattcatgatcaagaagattttggtgcacattttttaactgaaaaggaaattaaacaattagatattaaccaagaatatttaacgcaggttgatgttatagctcaaaagtgtaatgcagaattaaaatatcatcaatctctacttcctcaatatcagacacctaacgatgaatcagctaaaaaatatttgtggcgtgtcttagttacacaattgaaaaaattagaacttaattatgacgtctatttagagcgattgaaatatgagtataaagttattactaatatgggttttgaagattatttcttaatagtaagtgatttaatccattatgcgaaaacgaatgatgtgatggtaggtccaggtcgtggttcttcagctggctcactggtcagttatttactaggtattacaacgattgatcctattaaattcaatctattatttgaacgttttttaaacccagaacgtgtaacaatgcctgatatagatattgactttgaagatacacgccgagaaagggttattcagtacgtccaagaaaaatatggcgagctacatgtatctggaattgtgactttcggtcatctgcttgcaagagcggttgctagggatgttggacgaattatggggtttgatgaagttacattaaatgaaatttcaagtttaatcccacataaattaggaattacacttgatgaagcatatcaaattgacgattttaaaaaatttgtacatcgaaaccatcgacatgaacgctggttcagtatttgtaaaaagttagaaggtttaccaagacatacatctacacatgcggcaggaattattattaatgaccatccattatatgaatatgcccctttaacgaaaggggatacaggattattaacgcaatggacaatgactgaagccgaacgaattgggttattaaaaatagattttctagggttgagaaacttatcgattattcatcaaatcttaatacaagtcaaaaaagatttaggtattaatattgatatcgaaaagattccgttcgatgatcaaaaagtgtttgaattgttgtcgcaaggagatacgactggcatattccaattagagtcagacggtgtaagaagtgtattaaaaaaattaaagccggaacactttgaagatattgttgctgtaacttctttgtatagaccaggtccaatggaagaaattccaacttacattacaagaagacatgatccaagcaaagttcaatatttacatccacatttagaacctatattaaaaaatacttacggtgttattatttatcaagagcaaattatgcaaatagcgagcacatttgcaaacttcagttatggtgaagcggatattttaagaagagcaatgagtaaaaaaaatagagctgttcttgaaagtgagcgtcaacattttatagaaggtgcaaagcaaaatggttatcacgaagacattagtaagcaaatatttgatttgattctgaaatttgctgattatggttttcctagagcacatgctgtcagctattctaaaattgcatacattatgagctttttaaaagtccattatccaaattatttttacgcaaatattttaagtaatgttattggaagtgagaagaaaactgctcaaatgatagaagaagcaaaaaaacaaggtatcactatattgccaccgaacattaacgaaagtcattggttttataaaccttcccaagaaggcatttatttatcaattggtacaattaaaggtgttggttatcaaagtgtgaaagtgattgttgatgaacgttatcagaacggcaaatttaaagatttctttgattttgctagacgtataccgaagagagtcaaaacgagaaagttacttgaagcactgattttagtgggagcgtttgatgcttttggtaaaacacgttcaacgttgttgcaagctattgatcaagtgttggatggcgatttaaacattgaacaagatggttttttatttgatattttaacgccaaaacagatgtatgaagataaagaagaattgcctgatgcacttattagtcagtacgaaaaagaatatttaggattttatgtttcgcaacacccagtagataaaaagtttgttgccaaacaatatttaacgatatttaaattgagtaacgcgcagaattataaacctatattagtacagtttgataaagttaaacaaattcgaactaaaaatggtcaaaatatggcattcgtcacattaaatgatggcattgaaactttagatggtgtgattttccctaatcagtttaaaaagtacgaagagttgttatcacataatgacttgtttatagttagcgggaaatttgaccatagaaagcaacaacgtcaactaattataaatgagattcagacattagccacttttgaagaacaaaaattagcatttgccaaacaaattataattagaaataaatcacaaatagatatgtttgaagagatgattaaagctacgaaagagaatgctaatgatgttgtgttatccttttatgatgaaacgattaaacaaatgactactttaggctatattaatcaaaaagatagtatgtttaataattttatacaatcctttaaccctagtgatattaggcttatataa

SEQ ID NO: 8160 - DNA, 717 bp, Staphylococcus aureus
atgaaatacgctggtattctagctggaggtataggctcaagaatgggtaacgtacctttacctaaacaatttttagatttagacaacaaaccgattttaatccatacattagaaaaatttattttaattaatgattttgaaaaaattattatcgcgacgccacaacaatggatgacgcatacgaaagatacacttagaaaattcaaaatttctgatgaaagaattgaagtcattcaaggtggtagcgatcgtaacgatacaattatgaatatcgttaaacatattgaatcaacaaatggtattaacgatgacgatgtcattgtgacacatgatgcagttagaccatttttaacgcatcgtattattaaagaaaatattcaagctgctttagagtacggtgcagtagatacagtgattgatgctatagatacgattgttacatctaaagataatcaaacgattgatgcaattccagtgcgtaatgaaatgtaccaaggtcaaacacctcaatcgtttaatattaatttattaaaagaaagctatgcacagttgagtgatgagcaaaagagtattttatctgatgcttgtaagattattgtagaaacaaacaaaccggttcgacttgtaaaaggtgagttatataacattaaagtaacaacaccttacgatttaaaagtagcgaatgctattattcgaggtggtattgccgatgattaa

SEQ ID NO: 8161 - DNA, 1026 bp, Staphylococcus aureus
atgattaatcaagtatatcaattagttgcacctagacaatttgaagttacgtataacaacgtagatatttacagtgactatgtcattgtacgtcctttatatatgtcaatttgtgctgccgatcaaagatattatactggtagccgtgatgagaatgtcttatctcagaaattgccaatgtctttaattcatgaaggtgttggtgaggtcgtatttgacagtaaaggtgtgtttaataaaggtacaaaagtagttatggtaccgaatacgccgacagaaaaagacgatgtcattgctgaaaactatttaaaatcgagctacttcagatcaagtggacatgatgggtttatgcaagattttgtgttgctaaatcatgatagagctgtaccactacctgatgatattgatttaagtattatttcatatacagagcttgtaacagtaagtttgcatgctattcgtcgttttgaaaagaaatctatttcaaataaaaatacatttggtatttggggtgatggtaacttaggttacattacagccattttattacgtaaattatatccagagtctaaaatatatgtctttggtaaaacagattataaattgagtcacttctcatttgttgatgatgtcttctttattaataaaatacctgaaggcttaacatttgatcatgcatttgagtgcgttggtgggcgtggtagccaatcagcaataaatcaaatgattgattatatttcaccagaaggaagcattgcactgttaggtgtaagtgagttcccagtagaagttaatacacgtctagtattggaaaaaggactaacgttgattggtagtagtcgaagtggttcaaaagatttccaagatgttgtagacttatacattcaatacccagatattgtagataaattagcgttgttaaaaggtcaagaatatgaaattgcaacaattaatgatcttacagaagcttttgaagcagacctgtctacatcttggggtaaaacagtattaaaatggattatgtaa

SEQ ID NO: 8162 - DNA, 2028 bp, Staphylococcus aureus
atgcatcatgtaaataaatatttcaatcaaacaatggtgatagaagctttgaaaatgagtttttataagctgaatcctaaacaattaataaaaaatccgataatgtttgtcgttgaggttggaatggttttaacgttgatattaatatgttttcctgacatatttggaactagctatctatcgcgaggttatttgattacaatttttatcatattattaataactatattgtttgctaatttttcagaagcctttgctgaaggtcgtggaaaagcgcaagctgatagtttaagacaagcacaatcaaatttaactgctcgattgatagaagaaaatggtgcgtatcggatagtgaacgccacagagttaaaagccggacaaaatattcgggtagaaaatggagaaacaatccctgctgatggcgttgtaataaatggattagcaaccgttgatgaatctgcaattactggtgagtctgcacctgtgataaaagaatcaggtggcgattttgatggagtcattggcggtacacttgtaacatctgattggttagaaatacgtgttgagagtgaagcgggtacatcttttttagataaaatgattgccttagttgaaggggcggaaagaaataaaacaccaaatgaaattgcactttttacattattaacaacgttaacaattatatttttagtcgttattgtaacgttatatccaatagcatcttacctgcatttaattttacctattgcgatgctcattgcgttaacagtatgtttaataccaacgacaatcggtggtttgttatcggcgattggtattgcaggcatggatcgtgttactcaattcaatgtattagcgaaaagtgggcgtgctgtagaagtatgtggagatgtcgatgtaatgattttagacaagacagggacaatcacttatggcaatcgaatcgctagtgaatttttaccagtgaatcaacaaatgctggaaaaattgatagtcgctgcttatatgtcatcaatctacgatgatacgccagaaggaaaaagtattgtacgattagcgaagcagatgtatataaatgagctgcctaaagacattgatggcacatataagccttttacagctgaaactagaatgagcggaatcattacaaatgaaatatcggtattcaaaggtgcacctaatagtatgataaatcttgtcaaacaacaacaaggcaatattcctcttaacattgagtctctctgtatggatgtatcgagtaaaggtggcacaccattaatagtcattgaaaacaatgtcatgcttggcgtgatttatttaaaagatgtgattaaagatggtcttgtagaacgatttactgaattgagaaaaatggggattgaaacagttatgtgtacaggtgataatgctttaacagcagctacaattgcaaaagaagccggggttgatagatttgttgcagagtgtaaacccgaagataaaattaaagtcatcaaagatgaacaagcgaaaggccatattgttgcgatgacaggagatggtacaaatgatgcacctgcgctagcacaagcgaatataggattagctatgaactcagggacaattagtgctaaagaggcagctaatctaattgatttagattcgaatcctacaaagttaatagaggttgtaaaaataggcaaacaattattaatgacgagaggtgcattaacgacatttagtttggctaatgacgtagcaaaatactttgcaattttacctgcactaatgatgtcaacaattccagaaatgacttcactaaatattatgcatttatcgtcacctaaatctgcaattatatcagctttgatattcaatgcattaatcattgttgccttaattccaattgccatgaaaggtgtaaaagtaaagggttacagcattgatagaatctttataaataatatgttgatttatggattaggtggattaatcgtcccgtttttaggcattaaattaatagatatgattgtacaattttttgtgtaa

SEQ ID NO: 8163 - DNA, 1359 bp, Staphylococcus aureus
atgacgcagcaacaaaatgataaaagaacattaaaaaataaacacacttatcaaaatgaaccactaccaaaccgtaaagattttgttgttagttttataactggcgcgcttgttggttcagctttaggtttgtattttaaaaataaagtttatcaaaaagcagatgatttaaaagtcaaagaacaagaactgtcgcaaaagtttgaagaaagaaaaacgcaacttgaagaaacggttgcctatacaaaagaacgtgttgaaggatttttaaacaaatctaaaaatgagcaagcggcattaaaggcacaacaagcagcgataaaagaagaagcaagtgcaaataatttaagtgatacatcacaagaagcacaagagattcaagaagctaaaagagaagcacaagcagaagcggataaaagtgtggctgtatcaaatgaagagtcaaaagcatcggcattaaaagtacaacaagcagcaataaaagaagaagcaagtgcaaataatttaagtgacacgtcacaagaggcacaagagattcaagaagctaaaaaagaagcacaagcagaaacagataaaagtgcagctgtatcaaatgaagaaccaaaagcagtggcattgaaagcacaacaagcagcgataaaagaagaagcaagtgcaaataatttaagtgatacatcacaagaggcacaagaggttcaagaagctaaaaaagaagcacaagcagagaaagacagtgacacatcaactaaagatgcaagtgcagcaaaggtagaagtatcaaaaccagagtcacaagctgaaagattagcaaacgctgcaaaacagaagcaagctaaattaacaccaggttcaaaagagagtcaattaactgaagcgttatttgcagaaaaaccagttgctaaaaatgacttgaaagaaattcctcaattagttactaaaaagaatgatgtatcagagacagagacggttaatatagataataaagacactgttaaacaaaaagaagctaaatttgaaaatggtgttattacacgtaaagctgatgaaaaaacaactaataatacagctgttgacaagaaatcaggtaaacaatctaaaaaaacaacaccttcaaataaacgaaatgcatcaaaagcatctacaaataaaacttcaggtcagaaaaagcaacataataagaaatcatcacaaggtgcaaagaaacaaagtagttcaagtaagttaactcaaaagaataatcaaactagtaataagaattcaaaaacaacaaatgctaaatcatccaatgcatcaaaaacgccaaatgctaaagttgaaaaagctaatagtaaaatagagaaacgtacattcaatgactaa

SEQ ID NO: 8164 - DNA, 1116 bp, Staphylococcus aureus
atgtggtctttcaaatcaatgttcaatacaccagaagatccggaaaaagatgcgtatgaattttatggtaaagtgcaaccaggcattaccacacccacgcaaaaaacatgcaatttcgttgcgttagatttgaagtcaaaagatagagatgcaattaaggcaatgtttaaaaagtggacggttatggctgatcgtatgatggatggtgatacagttggcaagacgagtaacaatcctttaatgccaccagtagataccggtgaatcgataggattaggtgcaagcaagttaacgattacctttgggattagtaagtctttgatgaagaaaattgggttatctagtaaaattcccgatgcctttaaagatttaccgcattttccgaatgatcagttaatagacgattacagcgatggtgatattatgattcaagcatgctcaaatgattcgcaagtatcctttcatgcggttcataatttagttcgtccatttcgagatattgttaaggtacgttgggcgcaatctggttttatctctgctaaaggtaaggaaacacctagaaatttaatggcatttaaagatggaacaattaatcctagaaagagtaatcaacttaaagattatgtgtttattgatgacggatgggcgaaacatggaacttattgtgttgtcagacgtattcaaatacacattgaaacgtgggatcgtactgcactggaagaacaagaggctacatttggtcggaaacgacatagtggtgcgccgttaacaggtgggaaagagtttgatgaaattgacttaaaagcgaaagatagtcatggcgagtatattattgataaagatgcccatacgagactagcgaaagaagcaaatacgtcaattttacgtagagcctttaattatgttgatggtacggatgaccgcacaggtaacttcgaaacaggcttgttgttcattgcttttcaaaaagcgacaaaacaatttatcgatatacaaaataatttaggtagtaatgataaattaaatgaatatattacacatagaggttctgcttcatttttagtattaccaggtgttagtaagggaggataccttggtgaaacattatttgactaa

SEQ ID NO: 8165 - DNA, 600 bp, Staphylococcus aureus
atgactgaaaaagaaaaaatgttagcagaaaaatggtacgatgcaaactttgatcaagacttaatcaatgaacgtgcacgagcgaaagatatttgctttgaattaaatcatacaaagccgagtgatacaaataaaagaaaggaattaatcgatcaattatttcaaacaacaacagacaatgtaagtatttcgattccttttgatacagattatggttggaacgttaaactaggaaaaaatgtctatgtaaacaccaattgttattttatggatggtggacagattacaattggcgataatgtttttataggacctaattgtggattctacacagcaacacatccacttaatttttatcatagaaatgaaggttatgaaaaagccggacccattcatattggcagtaatacttggtttggcggtcatgtagccgtgttaccaggggtgacgattggagaaggcagtgtgattggtgctggtagtgttgtcactaaagatattccgccacacagcttagcggttggaaacccttgtaaagtcgttcgtaaaattgataatgacctaccatccgaaacattaaatgacgaaacgataaagtag

SEQ ID NO: 8166 - DNA, 1338 bp, Staphylococcus aureus
atgtcagattatttaagtgtttcagctttaacgaaatatattaaatataaatttgatcaagatccacatctccaatctgtattgattaaaggtgagctttcaaatttcaaaaagcattcaagtggtcatttatactttaatgtgaaagataaagagagcgttataagtgccatgatgttcaaaggtagtgcttctaaattaaacttcgaacctaaagaaggagatgaagtcttattagaagcacgtgtttctgtttttgaacgtcgtggaaactatcaaatttatgtaaataaaatgcaattagatggtatagggaacttatatcaaaaattagaagcattaaagaaaaaattaactgaagaaggttgttttgataaagcgaataagaaatcaatacctaagtttcctaaaaaaattgcagttttaacagcgagtacaggtgccgcaattcgagatatccattcaacgataaatagtcgttttccattagctgaacaaatacaaattagtactttggttcaaggtgaaaaagcaaaagacgacattattgaaaaaattgaatatgcagatagtttaggtgtagataccattattgtaggtcgaggtggtggatccatagaagatttatggaatttcaacgaagaagctgtcgtccgtgcaatatataattgtaagacaccgattatatcagcagtaggtcatgaaacagactttacattaagtgattttgctgcagacatcagagctgcgactccaactcaagctgctgttattgcaacaccagaccaatatgaattgctgcaacaaatacagcaatatcagtttacattgactcgtttcatcaagaaacatttagaacaacaacgtaaacatgttgaacatttgtcatcgtattacaagtttaaacaaccaactttattgtatgatcaacagatacaacgtcgagatgatttagaaaagagactgaaacaacaaattcaggcaacttttgaacaacagagacatcgattaatgctgttgcaacaacgttataatttaaaagcattactaagtagtgttaatcaagaacaacaaaataatcttcaattgacaaaccaacttgttaaattattgaattctaagatattaagttataaaaatgatttgaaaaataaagtagaaaacttaaacaatttaagtccaactaatacaatgttgcgtggatatgcaattgttaataaaaaagacgaagtcattacgagtactaaagatttaacagaaaatgatcaattgacgttaacaatgaaagatggcttagtagatgcaaaagttacgaaagtaaggtgtaataatgactaa

SEQ ID NO: 8167 - DNA, 1488 bp, Staphylococcus aureus
atgagagaaaattttaaattacgtaaaatgaaagtcggtttagtatcagttgcaattactatgttatatatcatgacaaacggacaagctgaagcatctgaaactaatcagaaggtaagtacaaatcaagaatcaaaagctgtttcgcagactgaacaaaattccaaagaaacaaaagcggcagagtcttctaaaaactttgtaaatttagatcctatcaaaccaggagctcaaaaagtaacaggtactacattaccgaatcatattattttacttaatatagatggtaaaagtgctgattcagttgaaggaggatatggtgattttataactgcaaatgacaaaggagagtttgagtatcctttaaataatcgtaaaattgtccataaccaagaaattgaggtatcatcatcaagccctgatttaggtgacgatgaagaggatgaagaagtagaagaatcttcaactgaaaaagctggtgctgaggaagaaagtacagatgctaaagctacatatacaacaccacgatatgaaaaagcgtatgaaataccgaaagaacaactaaaagaaaaagatggacaccaccaagttttcatcgaaccaattactgaaggttcaggtattattaaaggtcatacgtctgtaaaaggtaaagttgctctatctattaataataaatttattaattttgaagaaagagctaaaggtggaattagtaaagaagatactaaagctagttccgatggtgtttggatgcctattaatgaaaaaggatattttgattttgatttcaaaaaaaatccttttgataacttagagttaaagaaaaatgatgaaatctcattaacatttgcacctgatgatgaagatgaagcattgaagtcattaattttcaaaactaaagtaacgagcttagaagatatcgataaagcagaaacaaaatatgaccatactaaagtggaaaaagtaaaagtattgaaagatgttaaagaagatatacatgtagatgaaatttacggaagcttatatcatacagaaaaaggtaaaggtattcttgataaacaaggaactaaagagattacagggaagactaaattcgcgaatgcagtagtgaaagtatattctgacttaggtgatgcgcaattgttccctgatattcaagtagatgaaaatggtaaatttagctttgatgctgaaaaagctggtttcagattgcaaaatggagaaacattgaattttgcagtagttaaacctattactggtgacctattacatcaaggatttgtctctaaatatattgatgtatatgaatctccggaagaaaagaaagaacgtgaatttgaagaaaaacttgaaaacacgcctgcatatcataaattacatggtgataaaattgtaggatatgatgttcaaggtaatccatcaacttggttctatccattaggtgaaaagaaagttgaacgtacaacacctaaattagaaaaataa

SEQ ID NO: 8168 - DNA, 627 bp, Staphylococcus aureus
atgaggatagcgattgaaaagataattggtttgctgaaaaaccagtcctctaaagaatcgaatgttaagattcatcgcttggcgtatattacaaactcaaaatttgatggcaataactatatagatagatggtgtaaaatcaggaattctcacattggtgaatacagttatattggatttggtagtgattttaataatgtagaagtaggaagatattgttcgatatcttcggatgtaaaaattgggttaggaaaacatcctacacacttttttagctcatcaccgattttttattctaataataatccatttaacataaagcaaaagtttatagactttaatgaccaaccaagccgtacaacaattaaaaatgatgtgtggattggtgcaaatgtaattattatggatggattaacaataaatactggtgcagtcatagcagccggctcagttgttactaaaaatgtaggagcatatgaggttgttggtggggttcctgcaaaagtgattaagaagcgatttgacaataaaacaattgaaaaacttttggaaagcaagtggtgggagaaaacgcctgacaaactaaaaggattttcggttgaatatttaaataaaaaggatacttaa

SEQ ID NO: 8169 - DNA, 3141 bp, Staphylococcus aureus
gcatctcgagcaattaatagagcgactaaattagataatgcaatgggtgcagtacaacaatatattgacgaacagcaccttggtgttatcagcagcacaaattacatcaatgcagatgataatttgaaagcaaattatgataatgcaattgcgaatgcagcacatgagttagataaagtgcaaggtaatgcaattgcaaaagctgaagcagagcaattgaaacaaaatattatcgatgctcaaaatgcattaaatggagaccaaaaccttgcaaatgccaaagataaagcaaatgcgtttgttaattcgttaaatggattaaatcaacagcaacaagatcttgcacataatgcaattaacaatgctgatactgtatcagatgtaacagatattgttaataatcaaattgacttaaatgatgcaatggaaacattgaaacatttagttgacaatgaaattccaaatgcagagcaaactgtcaattaccaaaacgctgacgataatgctaaaacaaacttcgatgatgctaaacgtctagcaaatacattgctaaatagtgataacacaaatgtgaacgatatcaatggtgcaattcaagcagtcaaagatgcaatccaaaatcttaacggtgagcaacgtctacaagaagctaaggacaaagcaattcaaaatgttaacaaagtattagcagataaattgaaagaaatcgaagcttcaaacgcgacggatcaagacaagcttattgcgaaaaataaagcagaagaattggcaaacagcatcattaataacattaataaagcaacaagtaatcaggatgtatctcaagttcaaacagctggcaaccaagcgattgaacaagtgcatgccaatgaaataccgaaagctaaaattgatgcaaataaagatgttgataagcaagttcaagcattaattgatgaaatcggtcgaaatccaaatctaacagataaggaaaaacaagcactcaaagatcgaatcaatcaaatacttcaacaaggtcataacgacattaacaatgcactgactaaagaagcaattgaacaagcaaaagagcgtttagcacaagcattacaagacatcaaagatttagtgaaagctaaagaagatgcgaaaaataaaataaaagccttagctaatgcgaagcgtgatcaaatcaattcaaatccagatttaacacctgagcaaaaagcaaaagcgctcaaagaaattgacgaagctgaaaaacgagcactacaaaacgttgagaatgctcaaactatagatcaattaaatcgaggattaaacttaggtttagatgacattagaaatacgcatgtatgggaggttgacgatcaacctgctgtaaatgaaatttctgaagcaacacctgaacaattgcttgttaatggtgaactaatcgtacatcgtgatgacatcattacagagcaagatgttttagcacacattaacttaatagatcagcttacagcagaagttatcgatacaccatcaactgcaacgatttctgatagcttaacagcaaaagttgaagttacattgcttgatggatcaaaagtgattgttaatgttcctgtaaaagttgtagaaaaagaattgtcagtagtcaaacaacaggcaattgaatcaattgaaaatgcggtacaacaaaagattaatgaaatcaataatagtgtgacattaacactggaacaaaaagaagcagcaattgccgaagttaataagcttaaacaacaagcaattgatcatattaacaatgcacctgatgttcattcagttgaagaaattcaacaacaagaacaagcgcatattgaacaatttaatccagaacaatttacgattgaacaagcaaaatcaaatgcaattaaatcgattgaagatgcaattcaacatatgattgatgaaatcaaagctcgtactgatctaacagataaagagaagcaagaagctattgctaagttaaatcaattaaaagaacaagcaattcaattgattcaacgtgcgcaaagcatcgatgaaataactgagcaattggaacaatttaaagctcaaatgaaagcagctaatccaacagcaaaagaactagctaaacgcaagcaagaagctattagtaaaattaaagacttttcaaatgaaaaaatgaatagtattcgaaatagtgaaattggcacagctgatgaaaaacaagcagcaatgaatcaaattaacgaaattgtgcttgaaacaattagagatattaataatgcgcatacattacagcaagttgaggctgcattgaacaatggtattgctcgaatttcagcagtacaaattgtaacatctgatcgtgctaaacaatcatcaagtactggaaatgaatctaatagccatttaacaattggttatggaactgcaaatcatccatttaacagttcgactattggacataaaaagaaacttgatgaagatgatgacattgatccacttcatatgcgtcactttagtaataatttcggtaatgttattaaaaacgctattggtgtggtgggtatctctggcttactagctagtttctggttcttcattgccaaacgtcgtcgtaaagaagatgaagaggaagaattagaaataagagataataataaagattcaataaaagagactttagacgatacaaaacatttaccacttttatttgcgaaacgtcgcagaaaagaagatgaagaagatgttactgttgaagaaaaagattcgttaaatactggcgagtcactcgataaagttaaacatacgccgttcttcttaccaaaacgccgtcgtaaagaagatgaagaagatgtggaagttacaaatgaaaacacagatgaaaaagtgttgaaagataacgaacattcaccactcttaatcgcaaaacgacgcaaagataaagaggaagatgttgaaacaacaactagtattgaatctaaagatgaggacgttcctttattattggctaaaaagaaaaatcaaaaagataaccaatccgaagacaaaaagtcagcatcaaaaaatacttctaaaaaggtagcagctaaaaagaagaaaaagaaatctaagaaaaataaaaaataatttgtttctttgataaatagaggagcaccgattgac

SEQ ID NO: 8170 - DNA, 723 bp, Staphylococcus aureus
gtgaaaatattactaattggctatggtgcaatgaatcaacgcgttgctagattagcagaagaaaaaggacatgaaatcgttggggtcattgaaaatacaccgaaagcaacaacgccatatcaacaatatcaacatattgcagatgttaaagatgccgatgttgcaatagatttttcaaatccgaatctattattcccattattagatgaagagtttcatttgccattagttgtggcaacaactggcgagaaagaaaaactacttaataagttagatgaattgagtcaaaatatgcctgtatttttcagcgcgaacatgagttatggcgttcatgcactgactaaaattttagcagctgctgttcccctacttgatgatttcgacatcgaattgactgaggcacatcataataaaaaagtagatgcaccaagtggtacgttagaaaaattgtatgatgtgatcgtatctttgaaagaaaatgtaacacctgtgtatgatagacatgaattaaatgaaaaacgccagccacaagatattggtatacattctattcgtggaggtacgattgtcggtgaacatgaagttctatttgctggcactgatgaaacgattcaaatcacacatcgtgcacaatcaaaagatatttttgcgaatggtgctatacaagcagcagaacgcttagttaataaaccaaacggcttttatacgtttgacaacttataa

SEQ ID NO: 8171 - DNA, 1011 bp, Staphylococcus aureus
atgaatagagagatgttgtatttaaatagatcagatattgaacaagcgggaggtaatcattcacaagtttatgtggacgcattaacagaagcattaacagcccatgcgcacaatgattttgtacaaccgcttaagccgtatttaagacaggatcctgaaaatggacacatcgcagatcgaattattgcaatgccaagtcatatcggtggtgaacacgcaatttcaggtattaagtggataggtagtaagcacgacaatccatcgaaacgtaatatggagcgtgcaagtggtgtcattattttgaatgatccagaaacgaattatccaattgcagttatggaagcaagtttaattagtagtatgcgtactgcagcagtttcagtgattgcagctaagcatttggctaaaaaaggatttaaagacttaacaatcattggttgcgggctaatcggagacaagcaattacaaagtatgttagagcaattcgatcatattaaacgcgtgtttgtttacgatcaattctctgaagcatgtgcacgctttgttgatagatggcaacaacagcgtccggaaattaattttattgcgacagaaaatgctaaagaagcagtatcaaatggtgaagtagtcattacatgtaccgtaacggatcaaccatacattgaatatgattggttacaaaagggtgcatttattagcaacatttctatcatggatgtgcataaagaagtctttattaaagctgacaaagtcgtagtagatgactggtcacaatgtaatcgagaaaagaaaactattaaccaattggtgttagaaggtaaattcagcaaagaagcacttcatgctgaactagggcaacttgtgacaggtgacataccaggacgtgaagacgatgatgaaatcatattacttaatccgatgggtatggctatcgaagatatttcaagtgcttattttatttatcaacaggcacaacaacaaaatattgggacaacattgaacctatattaa

SEQ ID NO: 8172 - DNA, 981 bp, Staphylococcus aureus
ttgattgaaaaaagtcaagcatgtcacgattcattgttagattctgtagggcaaacacctatggttcaacttcatcaactatttccgaaacatgaagtgtttgcaaagttagagtatatgaatcctggaggcagcatgaaagatcgacctgccaagtacatcattgaacatggtattaaacatggtttaatcactgagaatacacatttaattgaaagtacttctggtaatttaggcattgcgttggcaatgatagctaaaatcaagggattaaaactcacgtgtgttgttgatcctaaaatatcaccaacaaatttgaaaattattaaaagttatggtgccaatgtagaaatggttgaagaacctgatgcacatgggggttatttaatgactcgtattgcaaaggtgcaagaactgttagccactattgacgatgcatattggattaatcaatatgcgaatgagttaaattggcaatcccattatcatggtgcaggcacagagattgttgaaacaattaagcaacctatagattattttgtcgcgccagtcagcacgacaggtagcattatgggtatgagtagaaaaataaaagaagtgcatccaaacgcacaaattgttgctgttgatgcgaaagggtcagtcatttttggtgacaaacctattaatagagaattacctggtatcggtgctagtcgtgtacccgaaatattgaatagatcagaaattaatcaagtgatccatgtagatgattatcaatctgctttgggctgtcgaaaactgattgattatgaaggcatatttgccggaggttcaacaggctcgattattgcagcgattgagcagttgataacgtcaattgaagaaggtgcaacaattgtcacgattttaccagatcgaggcgatcgttacttagatttagtttattcagatacatggttagaaaaaatgaaatcaagacaaggagttaaatcagaatga

SEQ ID NO: 8173 - DNA, 1044 bp, Staphylococcus aureus
ttgagtcaatttatggattatgcgattcaacttgcaaatatggtacaaggtcaaacaggtgttaatccacccgttggcgctgttgtagttaatgaaggtaggattgttggtattggtgcacacttgagaaaaggtgacaagcatgcggaggttcaagcacttgatatggcacaacaaaatgctgaaggtgcgacgatttatattacgttagagccatgtagtcattttggttcaacaccaccctgtgttaacaaaattattgattgtaagatagcaaaagtagtatacgcaacaaaagacaattcgttagacacacatggtgatgagacgttacgggctcacggtattgaggttgaatgcgttgatgatgaacgggcatcacaattataccaagacttttttaaagcaaaagcaaagcaactgccacaaattacagtgaaagtatctgcaagtttagatggtaaacaagcgaatgataatggacaaagtcaatggattactaacaaagaggttaaacaagatgtctataagttaagacatcgacacgacgcagtgttaactggaagacgtacagttgaattagatgatccacaatatactacacgtattcaagatggaaaaaaccctataaaagtaatattgtctaagtctgggaatattcattttaatcagcaaatttatcaagatgaatcaacaccaatttggatatatactgaaaatccaaatttaacaagcaatcaaacacatattgaaattatttacttgaagtcttgtgatttaacaacaattcttcacaatttatataaaagaggagttggaactttgctagtcgaggcaggtccaaccactacttcagaatttctccaatctaattatatagatgaatttattctctattatgccccgaaattaattggcggatctggaaattatcaattttatcaaacaaatgatgtgattgagataccagatgcgaaccaatttgaaattgttcattccgagttattaaatcaaaatgttaaattaactttacgaaagaagtga

SEQ ID NO: 8174 - DNA, 1491 bp, Staphylococcus aureus
atggaacttttaaaacatttatctcagcgtcaatatattgatggtgagtgggttgaaagcacgaataaaaatacaagagatattatcaatccttacaatcaagaagtgatatttacggtttctgaagggacaaaagaggatgcagaacgtgcaatcttagctgcaagacgtgcgtttgagtctggtgaatggtcgcaagaaactgctgaaaaaagaggtaaaaaagtacgtgccatcgcggacaagatcaaagaacatcgcgaagcgttagcacgattagaaacattagatactggaaaaacgttagaagaatcatatgcagatatggatgatattcataatgtgtttatgtattttgctggattagcagataaagatggtggcgaaatgattgattcaccaattccagatacagaaagcaaaattgttaaagaaccagtaggtgtagttacacaaattacaccttggaattatccgttattacaagcatcatggaaaattgcgccagcgcttgctacgggttgttcactagttatgaaaccaagtgaaattacaccattaacaacaatacgtgtttttgaattaatggaagaagttggtttccctaaaggaacaattaatcttattctaggtgcaggttctgaagttggtgacgtaatgtcaggtcataaagaggttgaccttgtatcatttacaggtggcattgagactggtaagcatattatgaaaaatgctgctaataatgttacgaatattgccttggaacttggcggtaaaaatccaaacattatctttgatgatgctgattttgaattggcagtagaccaagcgttaaatggtggatattttcatgcaggtcaagtttgttcagcaggatcaagaatattagtacaaaacagtattaaagacaaatttgagcaagcacttattgatcgcgtgaaaaaaatcaaattaggtaatggttttgatgctgatactgaaatgggaccagtgatttcaacagaacatcgtaataagatcgaatcttatatggatgtagctaaagcagaaggcgcaacaattgctgttggtggtaaacgtccagatagagacgatttaaaagatggtctattcttcgagccaacagtcattacaaattgtgatacgtcaatgcgtattgtacaagaagaggttttcggacctgtcgttactgtagaaggctttgaaactgaacaagaagcgattcaattagcgaatgattctatatatggtttagcaggtgctgtattttctaaagatattggaaaagcacaacgcgttgctaacaagttgaaacttggaacggtgtggattaatgatttccatccatattttgcacaagcgccatggggtggatacaaacaatcaggtatcggtagagaattaggcaaagaaggcttagaagagtaccttgtttcaaaacacattttaacaaatacaaatccacaattagtgaattggtttagcaaataa

SEQ ID NO: 8175 - DNA, 840 bp, Staphylococcus aureus
atggctgtattatatttagtgggcacaccaattggtaatttagcagatattacttatagagcagttgatgtattgaaacgtgttgatatgattgcttgtgaagacactagagtaactagtaagctgtgtaatcattatgatattccaactccattaaagtcatatcacgaacataacaaggataagcagactgcttttatcattgaacagttagaattaggtcttgacgttgcgctcgtatctgatgctggattgcccttaattagtgatcctggatacgaattagtagtggcagccagagaagctaatattaaagtagagactgtgcctggacctaatgctgggctgacggctttgatggctagtggattaccttcatatgtatatacatttttaggatttttgccacgaaaagagaaagaaaaaagtgctgtattagagcaacgtatgcatgaaaatagcacattaattatatacgaatcaccgcatcgtgtgacagatacattaaaaacaattgcaaagatagatgcaacacgacaagtatcactagggcgtgaattaactaagaagttcgaacaaattgtaactgatgatgtaacacaattacaagcattgattcagcaaggcgatgtaccattgaaaggcgaattcgttatcttaattgaaggtgctaaagcgaacaatgagatatcgtggtttgatgatttatctatcaatgagcatgttgatcattatattcaaacttcacagatgaaaccaaaacaagctattaaaaaagttgctgaagaacgacaacttaaaacgaatgaagtatataatatttatcatcaaataagttaa

SEQ ID NO: 8176 - DNA, 957 bp, Staphylococcus aureus
atgaactatcaagttcttttatattataaatatacgacgattgatgaccctgaacagtttgctcaggatcacttagcgttttgcaaagcacaccatttaaaaggtagaattcttgtttctacagaaggtattaacggcacattatctggtacaaaagaagaaaccgaacaatatatggcacatatgcatgccgatgaacgattcaaagatatggtgtttaaaattgatgaagctgaaggacatgcttttaagaaaatgcatgtacgtcctcgaaaagaaatcgttgctttagatttagaagatgacgtcgatccaagacacacaactggccaatatttatcacctgtagaatttagaaaagctcttgaagatgatgacacagtcattattgatgcacgtaatgattatgaatttgatttaggtcatttccgaggtgcaattcgcccagacatcacacgctttagagatttacctgactggattaaagagaataaagcgttatttacagataaaaaagtggttacgtactgtacaggtggcattcgatgtgaaaaattttctggatggcttttaaaagaaggtttcgaagatgtagcgcagcttcacggcggtatagctacatatggtaaagaccctgaaacaaaaggtcaatattgggacggtaaaatgtatgtatttgatgatcgtatcagtgttgatatcaaccaagttgaaaaaacaattattggtaaggattggtttgatggcaaaccatgtgaacgttatattaattgcgctaacccagaatgtaataaacaaatattagtttctgaagaaaacgaaactaaatatttaggtgcatgctcttatgaatgtgctaaacatgagcgtaatcgttatgttcaagcaaataatattagtgataatgagtggcaacaacgtttaacaaactttgatgatttacatcaacatgcttag

SEQ ID NO: 8177 - DNA, 1287 bp, Staphylococcus aureus
atacacatgaaaaataaatatatctcgaagttgctagttggggcagcaacaattactttagctacaatgatttcaaatggggaagcaaaagcgagtgaaaacacgcaacaaacttcaactaagcaccaaacaactcaaaacaactacgtaacagatcaacaaaaagctttttatcaagtattacatctaaaaggtatcacagaagaacaacgtaaccaatacatcaaaacattacgcgaacacccagaacgtgcacaagaagtattctctgaatcacttaaagacagcaagaacccagaccgacgtgttgcacaacaaaacgctttttacaatgttcttaaaaatgataacttaactgaacaagaaaaaaataattacattgcacaaattaaagaaaaccctgatagaagccaacaagtttgggtagaatcagtacaatcttctaaagctaaagaacgtcaaaatattgaaaatgcggataaagcaattaaagatttccaagataacaaagcaccacacgataaatcagcagcatatgaagctaactcaaaattacctaaagatttacgcgataaaaataaccgctttgtagaaaaagtttcaattgaaaaagcaatcgttcgtcatgatgagcgtgtgaaatcagcaaatgatgcaatctcaaaattaaatgaaaaagattcaattgaaaacagacgtttagcacaacgtgaagttaacaaagcacctatggatgtaaaagagcatttacagaaacaattagacgcattagtagctcaaaaagatgctgaaaagaaagtggcgccaaaagttgaggctcctcaaattcaatcaccacaaattgaaaaacctaaagcagaatcaccaaaagttgaagtccctcaatctaaattattaggttactaccaatcattaaaagattcatttaactatggttacaagtatttaacagatacttataaaagctataaagaaaaatatgatacagcaaagtactactataatacgtactataaatacaaaggtgcgattgatcaaacagtattaacagtactaggtagtggttctaaatcttacatccaaccattgaaagttgatgataaaaacggctacttagctaaatcatatgcacaagtaagaaactatgtaactgagtcaatcaatactggtaaagtattatatactttctaccaaaacccaacattagtaaaaacagctattaaagctcaagaaactgcatcatcaatcaaaaatacattaagtaatttattatcattctggaaataa

SEQ ID NO: 8178 - DNA, 1185 bp, Staphylococcus aureus
atgagtgaaaaacaacaaattctcgattatatagaaacaaataaatatagttatatcgaaatcagtcatagaattcatgaacgtcctgaacttggtaatgaagaaatatttgcgtctcgaactttaatagatcgtttgaaagagcatgattttgaaattgaaaccgagattgctgggcatgcaactgggtttatagcgacatatgattcaggtcttgacgggccagctataggttttttagcagaatacgatgctttgccagggttgggtcatgcttgtggtcataatatcattggaactgcaagtgtgcttggtgcaattggtttgaagcaagtgattgaccaaattggtggtaaagtagtcgttcttggatgtccagctgaagaaggtggggaaaatggtagcgctaaagcttcttatgtcaaggctggtgtgattgatcaaatagacattgccttaatgattcatccgggaaatgaaacttataaaacgattgatactttggcagtggatgttttagatgttaaattttacggaaaaagtgctcatgcctctgaaaatgcagatgaagcgttaaatgcattagacgctatgattagttattttaatggtgtagcacaactacgacaacatattaaaaaagatcaacgtgtgcatggtgtgattttagatggcgggaaagcagctaatattattccagactatacacatgctcgtttttatactagagcaatgacgcgtaaagaattggatatattaacagaaaaagtaaatcaaatcgcacgtggagctgcgatacagactggttgtgattatgaatttggtccaattcaaaacggtgtgaatgaattcattaaaacgccgaaattagatgatttatttgctaaatatgctgaagaagttggtgaagcagttattgatgatgattttggttatggctctacggatacagggaacgtaagtcatgttgtgccaacaatacatcctcatattaaaataggatcacgtaatttagtaggacatacgcatagatttagagaggcggctgcgagtgtacatggtgatgaagcattaattaaaggtgctaaaataatggcgttgatggggttagagttaattacaaatcaagacgtttatcaagacattattgaagagcatgcgcatttgaaagggaatgggaagtaa

SEQ ID NO: 8179 - DNA, 882 bp, Staphylococcus aureus
atgacgaatctaccgatgaataaattaatagatgaagtcaataatgaattatcggttgcgataaataaatcagtaatggatactcagctagaagaaagcatgttgtattcattaaatgctggaggtaaacgcatccgaccagttctgttattactcactttagattcactaaataccgagtatgagttaggtgtgaagagcgcaattgcactagaaatgattcatacatattcacttattcatgatgacctaccagcgatggataatgatgattatcgacgagggaaattaacaaatcataaagtatatggtgagtggactgcgatattagcaggtgatgctttattaactaaagcatttgaacttatttcaagtgatgatagattaactgatgaagtaaaaataaaagttctacaacggctgtcaatagcaagtggtcatgttggaatggtcggcggtcaaatgttagatatgcaaagcgaaggccaaccaattgatcttgaaactttggaaatgatacacaaaacaaaaacaggagcattattaacttttgcggttatgagtgcagcagatatcgctaatgtcgatgatgcaactaaagaacatttagaaagttatagttatcatttaggtatgatgttccagattaaagatgatttattagactgctatggtgatgaagcaaagttaggtaaaaaagtgggcagcgatcttgaaaataataaaagtacgtacgtgagtttattagggaaagatggcgcagaagataaattgacttatcatagagacgcagcagtggatgaactaacgcaaattgatgaacaattcaatacaaaacacttattagaaatcgttgatttattttatagcagggatcactaa

SEQ ID NO: 8180 - DNA, 885 bp, Staphylococcus aureus
atggttattcaatggtatccaggacatatggcgaaagccaaaagagaagtaagtgaacaattaaaaaaagtagatgtagtgtttgaactagtagatgcaagaattccatatagttcaagaaaccctatgatagatgaagttattaaccaaaaaccacgtgttgttatattaaataaaaaagatatgtctaatttaaatgagatgtcaaaatgggaacaattttttattgataaaggatactatcctgtatcagtggatgctaagcacggtaaaaatttaaagaaagtggaagctgcagcaattaaggcgactgctgaaaaatttgaacgcgaaaaagcgaaaggacttaaacctagagcgataagagcaatgatcgttggaattccaaatgttggtaaatccacattaataaataaactggcaaagcgtagtattgcgcagactggtaataaaccaggtgtgaccaaacaacaacaatggattaaagttagtaatgcattacaactattagacacaccagggatactttggcctaaatttgaagatgaagaagtcggtaagaagttgagtttaactggtgcgataaaagatagtattgtgcacttagatgaagttgccatctatggattaaactttttaattcaaaatgatttagcgcgattaaagtcacattataatattgaagttcctgaagatgcagaaatcatagcgtggtttgatgcgatagggaaaaaacgtggcttaattcgacgtggtaatgaaattgattacgaagcagtcattgaactgattatttatgatattcgaaatgctaaaataggaaattattgttttgatatttttaaagatatgactgaggaattagcaaatgacgctaacaattaa

SEQ ID NO: 8181 - DNA, 1362 bp, Staphylococcus aureus
gtgaagtcattgaagacggtgattgggatgaataataaggaacatattaaatctgtcattttagcgctactcgtcttgatgagtgtcgtattgacatatatggtatggaacttttctcctgatattgcaaatgtcgacaatacagatagtaagaagagtgaaacgaaacctttaacgacacctatgacagccaaaatggatacaactattacgccatttcagattattcattcgaaaaatgatcatccagaaggtacgattgcgacggtatctaatgtgaataaactgacgaaacctttgaaaaataaagaagtgaagtccgtggaacatgttcgtcgtgatcataacttgatgattccggatttaagcagtgattttacattattcgattttacgtatgatttaccgttatcaacatatcttggccaagtactgaacatgaatgcgaaagtaccaaatcatttcaatttcaatcgtttagtcatagatcatgatgctgatgataatatcgtgctttatgctataagtaaagaccgccacgattacgtaaaattaacaactacaacgaaaaatgatcattttttagatgcattagcagcagtgaaaaaagatatgcaaccatacacagatatcatcacaaacaaagatacaattgatcgtacgacgcatgtttttgcaccaagtaaacctgaaaagttaaaaacatatcgcatggtatttaacacgattagtgttgagaaaatgaatgctatactatttgacgattcaaccatcgttcgtagttcaaagagtggtgttacaacctacaacaataatacaggtgtcgcaaactataacgataaaaatgaaaaatatcattataaaaacctgtccgaagatgaagcaagttccagcaaaatggaagaaacgattccaggaacctttgattttattaatggtcatggtggtttcttaaacgaagacttcagattgtttagtacgaataatcagtcaggcgagttaacatatcaacgtttccttaacggttatccaacgtttaataaagaaggctctaatcaaattcaagtcacttggggtgaaaaaggcgtctttgattatcgtcgttcgttattgcgcaccgacgttgtgttaaatagtgaggataataaaacgttgccgaaattagagtctgtacgttcaagcttagcgaacaatagtgatattaattttgaaaaagtaacaaacatcgctatcggttacgaaatgcaggataactcagatcataatcacattgaagtgcagattaacagtgaactcgtaccgcgttggtatgtagaatatgatggtgaatggtatgtttataacgatgggaggcttgaataa

SEQ ID NO: 8182 - DNA, 666 bp, Staphylococcus aureus
atggcattagtcgttaaagatatcgtcaaaaatttcggagaaggtttgtctgaaacaaaagttttaaaaggtattaattttgaagtggaacaaggggaatttgtcattttaaatggtgcctctggttctgggaaaacaacattgctaacgatattaggcggattgttaagtcaaacgagtggtacagtgctttacaatgatgcaccattgtttgataaacagcatcgtcctagtgatttgcgattggaagatattggttttatttttcaatcttcacatttagttccttatttaaaagtgatagagcaattgacactcgtaggccaagaagcgggaatgaccaaacaacaaagttcaacaagagcaatacaacttttgaaaaatattgggttagaagatcgcttgaatgtatatccgcatcagttatctggcggtgaaaagcaacgtgttgcgattatgagagcatttatgaataatccgaaaatcattttagcagatgagcccacagcaagtttagatgccgatagagcaacaaaagttgttgagatgatacgtcaacaaattaaagaacaacaaatgattggtattatgattacacacgatcgaagattatttgaatatgcagatcgagtgattgaattagaagatggcaaaataactgattag

SEQ ID NO: 8183 - DNA, 1056 bp, Staphylococcus aureus
atgaaattagcgataaaagagattatgttttacaaatttcgttatattttaatcacattaatcattcttttattaagtattatggtgttatttattagtggtttagctcaagggcttggtagggagaatatttcgttatttgaacactttgataatgatgaatatgttgttcaaaaaatgaaagagccgcaaattgagaaatcgcaacttagtgatacgcaacagaatcaaattaaaaaggtaattcatcaagaaccatataaaatgaatattcaaacattgaaattatctaataaagaacaagatgtgattacaatgaatgacgttaaacaacaacgcatacaacttaaaaaaggtgattatcctaaaaatgctcatgaggtcgctattaatgataagttagctgcagacaacattagagtcggggatagattacattttaaaaataattcaactagttatagagtttctggtattttaaacgacacaatgtatgcgcatagttccattgtgctattgaacgataacggatttaatgcattgaataaggttaatacggcattttatccagtgaaaaatttaacacaacaacaacgtgatgagcttaataaaataaatgacgttcaagttgtgagtgaaaaagatttaacaggtaatattgcgagttatcaagcagagcaagcaccgttaaatatgatgattgttagtttgtttgctattacagcaatcgttctaagtgcatttttctatgttatgacgattcaaaaaatatcacaaattggcattttgaaagcaattggtattaagacaagacatttattgagtgcgttagttttacaaattttaacactaacaataattggggtaggtattgctgtgatcatcatagtaggactatcatttatgatgccggtaacgatgcctttttacttaacaacgcaaaatattttattaatggtggggatatttatattagtagcgattttaggtgcctcactatcatttatcaaattatttaaagtggatcctatcgaagcaattggaggtgcagaataa

SEQ ID NO: 8184 - DNA, 345 bp, Staphylococcus aureus
ttgttagctattacagcaatcgttctaagtgcatttttctatgttatgacgattcaaaaaatatcacaaattggcattttgaaagcaattggtattaagacaagacatttattgagtgcgttagttttacaaattttaacactaacaataattggggtaggtattgctgtgatcatcatagtaggactatcatttatgatgccggtaacgatgcctttttacttaacaacgcaaaatattttattaatggtggggatatttatattagtagcgattttaggtgcctcactatcatttatcaaattatttaaagtggatcctatcgaagcaattggaggtgcagaa

SEQ ID NO: 8185 - DNA, 2076 bp, Staphylococcus aureus
atgttaagaggacaagaagaaagaaagtatagtattagaaagtattcaataggcgtggtgtcagtgttagcggctacaatgtttgttgtgtcatcacatgaagcacaagcctcggaaaaaacaccaacgtccaatgcagcggcacaaaaagaaacactaaatcaaccgggagaacaagggaacgcgataacgtcacatcaaatgcagtcaggaaagcaattagacgatatgcataaagagaatggtaaaagtggaacagtgacagaaggtaaagacacgcttcaatcatcgaagcatcaatcaacacaaaatagtaaaacaatcagaacgcaaaatgataatcaagtaaagcaagattctgaacgacaaggttctaaacagtcacaccaaaataatgcgactaataatactgaacgtcaaaatgatcaggttcaaaatacccatcatgctgaacgtaatggatcacaatcgacaacgtcacaatcgaatgatgttgataaatcacaaccatccattccggcacaaaaggtattacccaatcatgataaagcagcaccaacttcaactacacccccgtctaatgataaaactgcacctaaatcaacaaaagcacaagatgcaaccacggacaaacatccaaatcaacaagatacacatcaacccgcgcatcaaatcatagatgcaaagcaagatgatactgttcgccaaagtgaacagaaaccacaagttggcgatttaagtaaacatatcgatggtcaaaattccccagagaaaccgacagataaaaatactgataataaacaactaatcaaagatgcgcttcaagcgcctaaaacacgttcgactacaaatgcagcagcagatgctaaaaaggttcgaccacttaaagcgaatcaagtacaaccacttaacaaatatccagttgtttttgtacatggatttttaggattagtaggcgataatgcacctgctttatatccaaattattggggtggaaataaatttaaagttatcgaggaattgagaaagcaaggctataatgtacatcaagcaagtgtaagtgcatttggtagtaactatgatcgcgctgtagaactttattattacattaaaggtggtcgcgtagattatggcgcagcacatgcagctaaatacggacatgagcgctatggtaagacttataaaggaatcatgcctaattgggaacctggtaaaaaggtacatcttgtagggcatagtatgggtggtcaaacaattcgtttaatggaagagtttttaagaaatggtaacaaagaagaaattgcctatcataaagcgcatggtggagaaatatcaccattattcactggtggtcataacaatatggttgcatcaatcacaacattagcaacaccacataatggttcacaagcagctgataagtttggaaatacagaagctgttagaaaaatcatgttcgctttaaatcgatttatgggtaacaagtattcgaatatcgatttaggattaacgcaatggggctttaaacaattaccaaatgagagttacattgactatataaaacgcgttagtaaaagcaaaatttggacatcagacgataatgctgcctatgatttaacgttagatggctctgcaaaattgaacaacatgacaagtatgaatcctaatattacgtatacgacttatacaggtgtgtcttcacatactggtccattaggttatgaaaatcctgatttaggtacatttttcttaatggatacaacgagtagaattattggtcatgatgcaagagaagaatggcgtaaaaatgatggtgtcgtaccagtgatttcgtcgttacatccatccaatcaaccatttattaatgttacgaatgatgaacctgccacacgcagaggtatctggcaagttaaaccaatcatacaaggatgggatcatgtcgattttatcggtgtggacttcctggatttcaaacgtaaaggtgcagaacttgccaacttctatacaggtattataaatgacttgttgcgtgtggaagcgactgaaagtaaaggaacacaattgaaagcaagttaa

SEQ ID NO: 8186 - DNA, 1026 bp, Staphylococcus aureus
atgtcaacgaatattgcaattaatggtatgggtagaattggaagaatggtattacgtattgcattacaaaataaaaatttaaatgtagtagcgataaatgctagttatccacccgaaacaattgcacatttaatcaattacgatacaacacatggaaaatataatctaaaagttgaaccgattgaaaatggattgcaagttggtgatcataaaattaaattggttgctgatcgcaatcctgaaaacttgccatggaaagaattagatatcgatattgctatagatgcaactggtaaatttaatcatggtgataaagccatcgcacatattaaagcaggtgccaaaaaagtattgttaactggtccttcaaaaggtggacatgttcaaatggtagttaaaggcgtaaatgataaccaattagatatagaagcatttgacatttttagtaatgcttcatgtactactaattgcattggtccagttgcaaaagttttaaataatcagtttggaatagttaatggtttaatgactactgttcacgctattacaaatgaccaaaaaaatattgataatccacataaagatttaagacgtgcacgttcatgtaatgaaagcattattcctacttctactggtgcggcgaaagctttaaaagaagtattaccagaattagaaggtaaattacacggcatggcattacgtgtaccaacaaagaatgtatcgctcgttgatttagttgttgatttagaaaaagaagtaactgcagaagaagtaaaccaagcttttgaaaatgcaggtttagaaggtatcatagaagtcgaacatcaaccactagtgtctgttgattttaatactaatccaaattcagctattattgatgcaaaatcaacaatggtcatgtcagggaataaagtaaaagttattgcttggtatgataatgaatggggttattcaaatagagttgtagatgttgctgagcaaattggagcacttttgacatcaaaagaaactgtaagtgcaagttaa

SEQ ID NO: 8187 - DNA, 663 bp, Staphylococcus aureus
atgaaatttgagaaatatatagatcacactttattgaagcctgagtcaacacgtacgcaaatcgatcaaatcatcgatgaagcgaaagcatacaattttaaatctgtatgtgtgaatccaacgcatgttaaatatgcagcagagcgactagctgattcagaggtgctcgtttgtacggtaataggattcccattaggtgcgtcgacaactgcaacgaaagcatttgaaacagaagatgcaattcaaaatggtgcagatgaaattgacatggtcatcaacatcggcgcattaaaagatggacgttttgatgatgtacaacaagacattgaagcagtggttaaagctgcgaaaggtcacacagtaaaagtgattattgagacggtattgttggaccatgacgaaattgtaaaagcgagtgaattaacaaaagcggctggtgcggacttcgttaaaacttcaacaggttttgcaggtggcggtgcgactgcagaagacgttaaattaatgaaagatacagtaggtgctgatgtagaagtaaaagcatcaggtggcgtacgtaatttagaagatttcaataaaatggttgaagcaggtgcgacacgtattggtgcgagcgcaggcgttcaaattatgcaaggtttagaagcagattcagattactaa

SEQ ID NO: 8188 - DNA, 663 bp, Staphylococcus aureus
atgaatagtgcaaaattgattgatcacactttattgaagcctgagtcaacacgtacgcaaatcgatcaaatcatcgatgaagcgaaagcataccattttaaatctgtatgtgtgaatccaacgcatgttaaatatgcagcagagcgactagctgattcagaggtgttagtttgtacggtaataggattcccattaggtgcatcgacaactgcgacgaaagcatttgaaacagaagatgcgattcaaaatggtgcagatgaaattgacatggtcatcaacatcggcgcattaaaagatggacgttttgatgatgtacaacaagacattgaagcagtggtgaaagctgcgaaaggtcacacagtaaaagtgattattgagacggtattgttggaccatgacgaaatcgtaaaagcgagtgaattaacaaaagtggctggtgcggacttcgttaaaacttcaacaggttttgcaggtggcggtgcgactgcagaagacgttaaattaatgaaagatacagtaggtgctgatgtagaagtaaaagcatcaggtggcgtacgtaatttagaagatttcaataaaatggttgaagcaggtgcgacacgtattggtgcgagcgcaggcgttcaaattatgcaaggtttagaagcagattcagattactaa

SEQ ID NO: 8189 - DNA, 2010 bp, Staphylococcus aureus
atggggaaaattaaagaactccaaacctcattagcaaataaaatcgcagcaggtgaagtagttgaaagaccgagttctgttgtgaaagaactgttggaaaatgctatagatgcaggcgctacagaaataagcattgaagtagaggaatctggcgtccaatctattcgcgtagtcgataatggaagcggaattgaagcggaagacttaggattagtatttcatagacatgcgactagtaaattagatcaagatgaagatttatttcatattaggacattaggattccgtggtgaagcactagccagtatttcatcagttgctaaagtaacattgaagacttgcacggataatgctaatggaaatgaaatatatgtagaaaatggtgaaatattaaatcataagcctgcaaaagcgaaaaaaggaacagatatacttgtagaatcattattttataatacaccagcacgtttaaaatatattaaaagtttatacactgaactaggtaaaataacagatattgtcaatagaatggctatgagccatccggacattcgaatagcactcatttcagatggcaaaacaatgttaagtacaaatggttcaggacgaactaatgaagtgatggcagagatttatgggatgaaagttgcacgagatttagtacatatatctggagatacaagtgattatcacattgaaggttttgttgcaaagcctgaacattctagaagtaataagcactatatttctatttttattaatggacgatacattaaaaactttatgctaaataaagcgattttagaaggctatcatacactcttaacaataggtaggttcccgatttgttatattaatattgaaatggatccaatcttagtagacgtaaatgttcatccaacaaaactagaagtgcgtttatcaaaagaagagcaactatatcaattgatagtgagcaaaatacaagaagcatttaaagaccgtatattaattcctaaaaataacttggattatgtgccaaaaaaaaataaagtattatattcattcgaacaacaaaaaatcgaatttgaacaaagacaaaacacagagaataaccaagagaagacgttttcatctgaagaaagtaacagtaagtcatttatggcagaaaatcaaaacgatgagatagttataaaagaagattcatataatccattcgtaacgaaaacatctgaaagtttaataactgatgatgaatcttctggttataataatacacgtgaaaaagatgaagactacttcaaaaaacaacaagaaattttacaagaaatggatcaaacatttgattcaaatgaggatgcatctgtgcaaaattatgagaataaagcgtctgatgattattatgatgtaaacgatattaaaggaacaaaaagtaaagaccctaaacgaagaattccatatatggaaattgttggccaagtacatgggacgtatattattgctcaaaatgaatttggcatgtacatgattgaccagcatgcagctcaagaaagaataaaatatgaatattttcgagataaaataggtgaagttaccaatgaagtacaagatttattaatcccgttaacatttcatttttcaaaggatgaacaattagttattgatcaatataaaaatgagcttcaacaagtaggtatcatgttagaacattttggtggtcatgattatattgtaagtagctatccagtttggttccctaaagatgaagtagaagaaatcattaaagatatgattgagctaattttggaagagaaaaaagtagatattaaaaaattacgtgaagatgtagcaatcatgatgtcatgtaaaaaatctattaaagcgaatcattatttacaaaaacatgaaatgtctgatttaattgatcaattaagagaagcggaagatccatttacatgtccacatggtcgtccaataatcattaatttttcaaaatacgaattagaaaaattatttaagcgtgtgatgtag

SEQ ID NO: 8190 - DNA, 2325 bp, Staphylococcus aureus
atggttagacgtgaggtagtaagaattgtgactccaggaactgtgatggagcaaggtggtgtagatgataaacaaaataactatattttaagttttgttatgaatcaacctgaaattgcgcttagttactgtgatgtttctactggcgaattaaaggttacacattttaatgatgaagcgactttattaaatgaaattacgacgataaaccctaacgaagttgttatcaatgacaatatttccgataatttaaaaagacaaattaatatggtgacagaaacaataacagtcagggaaacgttatcatcagaaatctatagtgtgaatcaaactgaacataaattaatgtatcaagcgacacaattattgctagattatattcatcatacacaaaaacgtgatttatcgcatatcgaggatgttgttcaatatgcagctatagattatatgaaaatggatttttatgctaagagaaaccttgagttaacggaaagcattcgattaaaatcaaaaaaaggaacgctactttggctaatggacgaaacgaaaacaccaatgggagcacgccgcttaaaacaatggatagatagaccactaataagtaaagaacaaattgaagcacgattagatatcgttgatgaatttagtgctcatttcatagaaagagacaccttaagaacatatcttaatcaagtgtatgatattgaacgtcttgttgggcgtgttagttacggaaatgttaatgcgagagatttaattcaacttaaacattccatttctgaaataccgaatattaaagcattactaaattctatgaatcagaatacgcttgtacaagttaatcaactagaaccccttgatgatttacttgatatattagaacagagtttagtagaagaaccaccaatttcagttaaagatggcggactattcaaagttggttttaatacgcaattagatgaatatcttgaagcttcaaaaaacggaaaaacatggttagcagaattacaagccaaagaaagacaacgtacaggaataaaatcattgaaaataagctttaataaagtgtttggttattttatagaaataacacgtgccaacttgcaaaattttgaaccaagtgaatttggttatatgaggaagcaaacgttatcgaatgctgaacgttttataactgatgaacttaaagaaaaagaagatatcattttaggtgcggaagacaaagccatcgaattagaatatcaattatttgttcagctacgtgaagaagttaaaaaatatactgaacgtttacaacaacaagctaaaattatttcagagctagattgtttacagagctttgcagaaattgctcaaaaatataattacactaggccttcatttagtgaaaataaaacattagaattagtggaatctaggcacccagtagtggaaagagtaatggattataatgactatgtgcctaataattgtcgattagataatgaaacatttatatatttaattacaggtccgaatatgtctggtaaatcgacatatatgagacaagttgccataattagtataatggcccaaatgggagcttatgtcccttgtaaagaggcagtgttacctatatttgatcaaatattcactagaataggtgcggcagatgatttggtttcaggtaagagtacgtttatggtagaaatgctagaagcacaaaaggcattaacttatgcaacagaggatagtttgattattttcgatgaaattggacgtggtacttcaacgtatgacggtttagctttagcgcaggcaatgatagagtatgtagctgaaacatcgcatgctaaaacgttattttcaacacattatcatgaattgacaacattagatcaagcattaccaagtctaaaaaatgttcacgtcgctgctaatgaatataaaggtgaacttatattcttgcataaagtcaaagatggtgcagttgacgatagttatggtattcaagttgcgaaattagctgatttacctgaaaaagttattagcagagcacaagtgatcctaagcgagtttgaagcgtctgctggtaaaaaatcatcgatatcaaatttaaaaatggtcgaaaatgaacctgaaattaatcaagaaaatttaaacttaagtgttgaagaaacaactgatactttatctcaaaaagactttgaacaagcatcatttgatttgtttgaaaatgatcaagaaagcgagattgaactacaaattaaaaatttgaatttatctaatatgacaccaattgaggcattggtgaagttaagtgaattacaaaatcaattaaaatag

SEQ ID NO: 8191 - DNA, 378 bp, Staphylococcus aureus
ttgcataaagtcaaagatggtgcagttgacgatagttatggtattcaagttgcgaaattagctgatttacctgaaaaagttattagcagagcacaagtgattctaagcgagtttgaagcgtctgctggtaaaaaatcatcgatatcaaatttaaaaatggtcgaaaatgaacctgaaattaatcaagaaaatttaaacttaagtgttgaagaaacaactgatactttatctcaaaaagactttgaacaagcatcatttgatttgtttgaaaatgatcaagaaagcgagattgaactacaaattaaaaatttgaatttatctaatatgacaccaattgaggcattggtgaagttaagtgaattacaaaatcaattaaaa

SEQ ID NO: 8192 - DNA, 768 bp, Staphylococcus aureus
atgattgatattcataaccatatattagttgatatagatgatggtcctaaaacaattgaaaagagtattgcactattaaagcaagctaaggatgaaggtgtaacaagtattgtagcgacacctcatcatttgcatccgagatatgataatacatttcaacaagtgcttgtgaaattggcggagttaagaacgcatccagaagttcaagcattggatattaaattatttcccgggcaagaaattagaattacagattcgattctgaaaggcttagataatggtagtattcaaggtattaatcgttcgaaatatttattaattgaatttccaacgggcgaagtaccacattatacaaaacaattgttttttgaaatacaatcgagaggctacataccaatcattgcacatcctgaaagaaatagaagtatcgccaaaaatccagaaatattatatgaattggttgcaaatggggcattgagtcaattaacatcgagttctttagttggtggatttggtaaaaacattcaaaagttatcattacaatttatagaatgtaatttggctcattttgtagcttcagatgcacattcatgtgaccaaagaccatttttgatgcaagaattatttcacaatcataaattgaagaaatattcgaatgatattgaagcattacttcgaaatgccagttcagtaatcaatgataattttgtttatttagacagaccgactaagccaggaaaagtgaagtcgtttttgaaatggttttaa

SEQ ID NO: 8193 - DNA, 816 bp, Staphylococcus aureus
atgacattgttaacagttaagcatttgacgattacagatacctggacagatcaaccactcgtgagtgatgtgaattttacattaactaagggtgaaactttaggcgttattggagaaagtggtagcggtaaatcaattacatgcaaatcgattattggtttgaatcccgaacgactcggggtgacaggtgaaattatctttgatggtacatcaatgttgtcattatctgaatcgcaacggaaaaagtaccgtggtaaagatattgcgatggtcatgcaacaaggtagtcgtgcctttgacccatcaactactgtcggtaaacaaatgtttgagactatgaaagtacatacgtcaatgtctacacaagaaattgaaaagacattgattgaatatatggattatttaagtttgaaagatcctaaacgtatattaaaatcatacccttacatgttatcaggaggaatgttacagcgattgatgattgctttagcgttagctttgaaaccaaagttaatcattgctgatgagccgacaacggctttagatacaattacacaatatgatgtactggaagcatttatagatattaaaaaacactttgactgtgcgatgattttcatttcacatgatttaacggttattaataagattgcagaccgtgttgttgtgatgaaaaatggtcaactgatagagcatggtacacgtgaatcagtcttgcatcatccagaacatgtttatacgaagtatttattatcaacgaagaagaagattaatgatcattttaaacatgtgatgaggggtgatgtacatgattaa

SEQ ID NO: 8194 - DNA, 2094 bp, Staphylococcus aureus
atgcagaaagcttttcgcaatgtgctagttatcgtaataataggcgttattatttttggtctattttcatatttaaacggtaatggaaatatgccgaaacagcttacatataatcaatttactgagaagttggaaaaaggtgaccttaaaactttagaaatccaaccacaacaaaatgtctatatggtaagtggtaaaacgaaaaatgatgaagactattcatcaactattttatataacaacgaaaaagaattacaaaaaattactgatgctgctaaaaagcaaaacggtgtaaaattaacgattaaagaagaagaaaaacaaagtgtctttgtgagtatactttcaacattaattccagttgtagtcatagcgttattatttattttcttcctaagccaagcacaaggtggcggtagtggcggtcgtatgatgaactttggtaaatctaaagcaaaaatgtacgataataataaacgtcgtgttcgtttctctgatgtagcaggggcagatgaagaaaaacaagaattaattgaaattgttgatttcttgaaagataataaaaaattcaaagaaatgggatctaggattcctaaaggtgtcttacttgttggacctccaggtactggtaaaacattacttgctagagcggttgcaggtgaagctggcgcaccattcttctctattagtggttcagactttgtagagatgtttgttggtgttggtgcgagccgtgttcgtgacttattcgataatgctaagaaaaacgcgccttgtatcatctttatcgatgagattgatgctgttggtcgtcaacgtggtgcaggtgttggtggcggtcatgatgaacgtgaacaaaccctaaaccaattattagttgaaatggatggtttcggtgaaaatgaaggtatcattatgatagctgctacaaaccgtcctgatatccttgacccagccttattacgtccaggtcgttttgatagacaaattcaagttggtcgtccagatgtgaaaggccgtgaagcaattcttcatgttcatgctaaaaacaaaccacttgatgaaacggttgatttaaaagcaatttcacaacgtacacctggtttctcaggtgctgatttagagaacttattaaatgaagcatctttaattgctgtacgtgaaggtaaaaagaaaattgacatgagagatatcgaagaggcaacggatagagttatagccggacctgctaagaaatctcgagttatttctaagaaagaacgtaatattgttgctcatcacgaagctggtcatacaattatcggtatggtacttgatgaggcagaagtagtgcataaagttactattgttccacgtggacaagcaggtggttatgcaatgatgctacctaaacaagatcgtttcttaatgactgaacaagagttattagataaaatctgtggtttacttggtggacgtgtatcagaagatattaactttaacgaagtatcaacaggtgcttcaaatgacttcgaacgtgcaacacaaatcgcacgctcaatggttacgcaatatggtatgagtaaaaaattaggaccattacagttcggtcatagcaatggtcaagtattcttaggtaaagatatgcaaggtgagcctaattattcaagccaaatcgcatatgaaattgataaagaagttcaacgaatcgttaaagaacaatacgaacgttgtaaacaaattttattagagcacaaagaacaattaattttaattgctgaaacattattaacagaagaaacattagttgctgaacaaattcaatcattattctacgaaggtaaattacctgaaattgattatgatgcagctaaagttgttaaagatgaagattctgaatttaatgatggtaaattcggtaaatcttatgaagagattcgtaaagagcaattagaagatggacaacgtgacgaaagtgaagatcgtaaagaagaaaaagatattgctgaggataaaaaagaagctgataaatctgatgaaaaagatgaaccagcacatcgacaagccccaaatatcgaaaaaccttacgatccaaatcacccagacaataaataa

SEQ ID NO: 8195 - DNA, 255 bp, Staphylococcus aureus
atgaaacaaggaattcatcctgagtatcaccaagtaatctttttagatactactacaaacttcaaattcttaagcggttctacaaaaacatcttcagaaatgatggagtgggaagatggaaaagaatacccagttattcgtttagatatttcatctgattcacatccattctacactggacgtcaaaaattcgctgctgcggatggacgtgtggaacgtttcaacaaaaagtttggtcttaaatcaaacaactaa

SEQ ID NO: 8196 - DNA, 1152 bp, Staphylococcus aureus
ataaattatctaaaagaaaatggtttgtataatgaaatagatacaattgaaggtgcaaacggaccagaaatcaaaatcaatgggaaatcatacattaacttatcttcaaataattatttaggactagcaacaaatgaagatttgaaatcagctgcaaaagcagctattgatacacatggtgtaggtgcaggcgctgttcgtacaatcaatggtacattagatttacacgacgaattagaagaaacactagcaaaatttaaaggaacagaagctgcaatagcttatcagtcaggatttaattgtaatatggctgctatttcagctgtcatgaataaaaatgatgctattttatcagatgagcttaatcatgcatcaattattgatggatgtcgcttatctaaagctaaaattattcgagttaaccattcagacatggatgatttacgtgcgaaagcaaaagaagcagttgaatcaggtcaatacaataaagtgatgtatatcactgatggcgtttttagtatggatggtgatgtggctaaattacctgaaattgtagaaattgcagaagaatttggtttattaacttatgttgacgacgctcatggttcaggtgttatgggtaaaggcgctggtacggttaaacattttggtttacaagataaaatcgatttccaaataggtacgctttctaaagcaattggtgtcgttggcggctatgtagcaggtacaaaagagttaatagattggttaaaagcacaatcacgaccattcttattctctacatcattagcacctggggataccaaagcaataactgaagcagttaaaaagttaatggattcaactgaattacatgataaattatgggacaatgcacaatatttaaaaaatggattgtcaaaattaggatatgatacaggtgagtcagaaactccaattacaccagtaattattggtgatgaaaaaacaactcaagaatttagtaagcgtttaaaagacgaaggtgtctatgtgaaatctatcgttttcccaacagtaccaagaggtacaggacgtgtaagaaatatgcctacagctgcacatacaaaagacatgttagatgaagcaattgcggcttatgaaaaagtaggaaaagaaatgaagttgatttaa

SEQ ID NO: 8197 - DNA, 4500 bp, Staphylococcus aureus
atgcacaatgagaaattaattaaaggcttatatgactatcgtgaggaacatgatgcgtgtggtattggtttttatgcgaatatggataataaaaggtctcacgacatcattgataaatcgcttgaaatgttgcgacgcttagatcacaggggcggggtcggcgcagatggcatcactggtgatggcgcaggtattatgactgaaataccttttgcatttttcaaacaacatgtaacggactttgatatcccaggtgaaggtgaatatgccgtggggttatttttttccaaagaacgcattttaggttctgaacatgaagcagtttttaaaaaatattttgaaggcgaagggttatcaattcttggttatcgtaatgtaccagttaataaagatgccattgctaaacatgtagcagatacgatgccagtcattcaacaagtgtttattgatattaggggcattgaagatgttgaaaagcgtttgtttttagcgagaaaacaattagagttctattcgactcagtgcgatttagaattgtattttacgagcttatcacgcaaaacaattgtatataaaggttggttacgatcagaccaaattaaaaaactatatacagatttatcggatgatttatatcaatcaaagctagggttagtgcattcgagatttagtacgaatacattcccgagttggaaaagggcacatcctaaccgtatgttaatgcataatggtgagattaacacgattaaaggtaatgtaaactggatgcgagcacgccaacataaattaatcgaaacattatttggcgaggatcaacataaagtgtttcaaattgtcgatgaggatggtagtgactctgctattgtagataatgcgctagagttcttatcgttagccatggagccagaaaaggcagcgatgctactcatacctgaaccttggttatacaatgaagcgaatgatgcaaatgtacgtgcgttttatgaattttatagttatttaatggaaccgtgggatggtcctacaatgatttcgttctgtaacggtgacaaacttggcgcgcttacagatagaaatggattacgtccaggtcgttatacgattactaaagataactttattgtcttttcatctgaagtgggtgttgtggacgtacctgaaagtaatgttgcttttaaaggtcaattgaatcctggaaagttattgcttgttgattttaaacagaataaagtcattgaaaataatgatttaaaaggtgcgattgctggagaattaccatataaagcgtggattgataaccataaagttgactttgattttgaaaatatacaatatcaagattcgcaatggaaagatgagacgttatttaaattacaacgtcagtttgcatacacgaaagaagagattcataagtatattcaggaacttgtagaaggtaagaaggatcctatcggtgcaatgggatatgatgcgccaattgcagtgttgaacgagcgaccagaatcactatttaattactttaaacagctgtttgcacaagttacgaatccaccaattgatgcgtatcgtgaaaaaatcgtaacgagtgaactttcttatttaggtggcgaaggtaacttactagcacctgacgaaacggttttagatcgtattcaattgaaaaggccggtattgaatgaatcacacttagcagcgattgatcaggaacattttaaattaacttatttatcaacggtatatgaaggggatttggaagatgcgttagaagcattaggccgagaagcagtgaatgctgtaaagcaaggcgctcaaattctagtgttagatgacagtggattagttgatagcaatggctttgcaatgccgatgttactcgcaataagtcatgtgcatcaattacttattaaagcagatttacgtatgtctacaagtttagtcgctaaatctggtgagacacgagaagtgcatcatgttgcttgtttactcgcatatggcgcgaatgcaattgtgccatacctagcgcaacgtacagttgaacaactgacattgacagaagggttacaaggcaccgttgtcgataatgttaagacatatacggatgtattgtcagaaggtgtcattaaagtaatggctaagatgggaatttcgacagtgcaaagttatcaaggtgcacaaatatttgaagcgattggcttgtctcatgatgtgattgatcgttattttactgggacacagtctaagttatcgggtatttcgattgatcaaattgatgctgaaaataaagcacgtcaacaaagtgatgataattatcttgcatcaggtagtacatttcaatggagacaacaaggtcaacatcatgcttttaatccggaatctattttcttattgcagcacgcatgtaaagaaaatgactatgcgcaatttaaagcatactctgaagcggtgaacaaaaatagaacagatcacattagacatttacttgaatttaaagcatgtacaccgattgacatcgaccaagttgaaccggtaagtgacattgtcaaacgctttaatacaggggcgatgagttatggatcgatttcagcggaagcacatgaaacgttagcacaagccatgaaccaattaggtggaaagagtaatagtggtgaaggtggcgaagatgcaaaacgttatgaagtacaagttgatggaagcaacaaagtaagtgcgattaaacaagttgcttctgggcgttttggtgtaactagtgattatttacaacatgccaaagaaattcaaattaaagttgcgcaaggtgcaaagcctggtgaaggtggtcaattacctggtactaaggtatatccgtggattgcaaagacaagagggtcaacgccaggtatcggtctgatttcaccaccgccacatcatgatatttattcaatagaagatttagcgcaactgatacatgatttgaaaaatgcgaataaagatgcagatatcgcggtaaaattagtttcgaaaacaggtgttggtaccattgcatctggggtggcaaaagcgtttgcagataaaattgtcatcagtggttacgatggtggtacaggggcttcacctaaaacgagtattcagcatgccggtgttccttgggagattggtttagcagaaacacatcaaacattaaaactaaatgacttaagaagtcgtgttaagttagaaacagacggtaagttattaactggtaaagatgtagcgtacgcatgtgcgcttggagcggaagaatttggatttgcaactgcaccattagtggtgttgggctgtattatgatgcgtgtatgccataaagatacatgtccagtaggagttgcaactcaaaacaaagatttacgtgctttatatagaggtaaagcacatcatgttgttaattttatgcattttattgcacaagaattaagagaaattttagcatctttaggtttgaaacgtgtagaagacttagttggaagaactgatttattacaacgatcatcaacattaaaagcgaatagcaaagtggctagtattgatgttgaaaaactgttatgtcctttcgatgggccaaacacaaaagaaattcaacaaaatcataatcttgagcatggatttgatttaacaaatttatatgaagtaacgaagccatatattgctgaaggacgtcgctatacaggtagctttacagtaaataatgaacaacgtgatgtaggagttattacaggtagtgagatttcgaaacaatatggagaagcaggacttcctgaaaatacaattaatgtttatacgaatggtcatgctggtcaaagtcttgcagcatatgcaccgaaaggcttaatgattcatcatactggagatgcgaatgactatgttggtaaaggattatctggtggtacggtcattgtcaaagcaccttttgaagaacgacaaaatgaaattattgctggtaacgtctcattctatggtgcgacaggtggtaaggcatttattaacggtagtgcaggagaaagattctgtattagaaatagtggtgtagatgttgtcgttgaaggtatcggtgaccatggattagagtacatgactggtggacatgtcattaatttaggtgatgtaggtaagaacttcggtcaaggtatgagtggtggtattgcttacgttatcccgtctgatgtagaagcttttgttgaaaataatcaactagatacgctttcgtttacaaagattaaacaccaagaagaaaaagcattcattaagcaaatgctggaagaacatgtgtcacacacgaatagtacgagagcgattcatgtgttaaaacattttgatcgcattgaagatgtcgtcgttaaagttattcctaaagattatcaattaatgatgcaaaaaattcatttgcacaaatcattacatgacaatgaagatgaagcgatgttagctgcattttacgatgacagtaaaacaatcgacgctaaacataaaccagccgttgtgtattaa

SEQ ID NO: 8198 - DNA, 1464 bp, Staphylococcus aureus
atgggtgaatttaaaggatttatgaagtatgacaaacagtacttaggtgaattatcactggtagaccgtttgaagcatcataaagcatatcaacaacgatttactaaagaagatgcctctatccaaggtgcgcgatgtatggattgtggaacgccgttttgtcaaaccggacaacagtatggtagggaaacaataggttgtccaattggaaactacattcctgaatggaacgacttagtgtatcatcaagattttaaaactgcttatgaacgcttaagcgaaacaaataactttcctgactttacagggcgtgtatgtcctgcaccatgcgaaagtgcttgtgtgatgaagattaatagagaatcgattgcgattaaaggtattgaacgcacaattattgatgaagcttttgaaaatggttgggtagcgccgaaagttccgagtcgccgtagagatgaaaaagtggcaatcgttggaagcggtccggcaggattaactgctgctgaagaacttaatctactgggatatcaagtgactatttatgaacgtgctagagaatcaggcggtttattaatgtatggtattccaaatatgaagcttgataaagatgtggttcgacgtcgtattaagttaatggaagaagcgggcattactttcattaatggtgttgaagtaggcgttgatattgataaagcaacgttagaatctgagtatgatgccattatattatgtactggtgcacaaaaaggtagagatttacctttagaaggacgcatgggtgatggtatacatttcgctatggattatttaactgaacaaacgcagctgttaaatggagaaattgatgatattacaataactgcaaaagataagaatgtcattatcattggtgctggtgatacaggggcagactgtgtagcgacagcattaagagaaaattgtaaatcgattgttcaatttaataaatatacgaaattgccagaagcaattacatttacagaaaatgcatcatggcctttagcaatgccggtgtttaaaatggactatgcgcaccaagagtacgaagctaagtttggtaaggaaccacgtgcatatggtgttcaaacaatgcgttacgatgttgacgataaaggacacatacgtggtttgtatactcaaattttagagcaaggcgaaaatggtatggtcatgaaagaaggacctgaaagattttggcctgctgaccttgtattattatcaatcggcttcgaaggtacagaaccaacagtaccgaatgcttttaacattaaaacggatagaaatcgaatcgtggcggatgatacaaactatcaaactaataatgaaaaggtatttgctgctggagatgctagacgtggtcaaagtttagttgtatgggcaattaaagaaggtagaggcgtagcgaaagcagtagatcagtatttagcgagtaaagtttgtgtataa

SEQ ID NO: 8199 - DNA, 801 bp, Staphylococcus aureus
atgaaatttgagaatcgtgttcaacgttatcaacatttatttacaaaaactgataaacgcatcgtcaattatataagacaaaatggttatagcgatgccttttcaacgattaactccttagcccatgcgattggtacatcaccagcaacgatgacacgctttagtcataagctagattatgagaatttccaagatttaaaatttaatattcaacaagaaatgacagagacagttattgaaaatagcccaattattcaaagaattcataaatatcatcaacaaatcattcaacaaactggtgaatttattgataacgacattatccaaacctttatcgacaaactccaatcaagtcgacatatactctttgctggactaggtagctctggtttatcagcgactgaattttattatcgtatgattcgtatggggctaaaaggtaatgttactaccgattcacatttaatgaaaatatcggcatccctactatctcattcggacatgtttattgctatgtcaaatagtggtaatacttcggaattaatttcagcagcggaagtcgccaaatctcatggtgcatatgtcgttgccatcacaaatttcgaaggtagtaaacttacagattgtgcagatttagtacttttaacaacggatcaatcgcgtaataccgaccatcaatttatcaacacacaaattgcgacactctttttaatcgatatcgtgagttatcatttattagaaaatacaaatctgagtcaaacttatcaacatactaaatctattatcctagacaacaaataa

SEQ ID NO: 8200 - DNA, 2238 bp, Staphylococcus aureus
atgcaacgtgattatttaattcgagtagaaactgaaagcatgccagatttcaaaaggctcaatggtttaatgattggttttgttattaaaggtgaggcacatatttatgatgaaaataacatgacgcaatgcaacagtggcgacattttcatcattaaccaccgtgacttgtatcgatttcaacttcaacaagatggcatcatatgttatatccaattccaaatgaaatatttggcagacaagtttgatgatgcgcattgtctatattttcacttaacagatgcgaccacaaccaagaatatacatcaactgagaaatataatggcaagactggtttcaacacacattcgacataatgagttgtctaaattgactgagcaacaacttgtgattcagttgcttatgcatatgattcattatgtcccgcgtacatatcattcgaaccaaagtatcttaaatgatgataaagtgaatcaagtatgcgactatatcgagttacattttcatgaagatttaagcctttcagaattaagcgaatacgttgggtggtcagagagccatctgtctaaaaagtttacagaatcgctaggtgtaggattccaacatttcttaaatacgacgcgaattgagcatgcgaaactcgatttaacatacacagatgaaacgattactgatattgcattgcaaaatggcttttcaagtgcagcgagctttgcgagaacatttaaacactttacgcatcaaacgcctaaacaatatcgaggtgatcgtccagcaatcactgaaaatcaacaatcggcacaacataattatcacgaccgtgaattgatattacttttaaatgactacattgaagaaatgaatcatttcattgaagatattgaaaagatgaactataaagagattgcctttaaaccaactaatcaacaactaaatcaatttaatcatattattcaagtgggctatttgaggaatttgctcaatacacagtatcaatcacagttgcttacatgtcatcatgattttcaagtcaatgaagtattagcatatgatgtgatgccatatattatgaaaaagctcaatgcgccattcacgtatgatgcagagatttcgaatatattttatgatatcgatttgtgtttagactttttattagatcataactttagtctaaccatgcatttgaatcagtatgactcacgagattatatcgatgcattcaaagtatttatccatcacgttgccctgcatgtcagtcatagaaaagatttgaagttcaacttgtatgtgacgacattgcacacgtctttaattgaaatgattgattattttaaagcattattccctaatggtggcttgtacattcacttagatcaagctacggaaagacatctaccattgttgaaacgacttgagccacacatcaaccattttgtatttgatgccaattcaaatgatgctgttgattttaataaaatgaatgatgatgaatttaaaaccgcgagtcaaatgattattaataaaacgaattaccttatcgacttaatgcatcgccataacctaaagcgtccactcattttactcaattggaatacattgacgggtgatacatttattacaaacggcgaatattttagaggtggtatcatcattgagcaattattaaaattaagtactaaagtagagggtatcgggtattggttgaattatgatttgcacgtcagtcattgtagaaatgaacgggattatatgaattctattgaactgtttcatcaatataatggaaaacgtccggtctatttcacggcattgctatttaataaattaacaagcaatattttgtattctgatgatacatgtattgtcacgggaactgattcaaattttcaaatattgttatatgatgcaaagcattttaatccgtacttagcgttggacaatcaaatgaatatgcgtgcaacggaaatgatccatttgaacattaatgccctagaagacggtatgtataagattaaacattttaccttagataaagaaaatggtgcgttatttaatctttggcgcaaacatcatacgatacatggcatggacaaggactctatagattacgttaatcgaatgagttttccgaaattagaagtatatgatatagatatcacggacacactggcattaaacattaaaatgattacgaatgggattcacttaattgaagtaaaacgttacccaagttcataa

SEQ ID NO: 8201 - DNA, 1350 bp, Staphylococcus aureus
atgaagaagaaactaacatttaaagaaaacatgtttataggttctatgttatttggtttattctttggtgccggcaatcttatcttcccaatacacttgggtcaagctgctggttctaacgtttttatcgctaacttaggatttttaattacagcaattggcttaccatttctaggtatcattgctattggcatttcaaagacatctggtttatttgaaattgcatcgcgtgttaataaaacatatgcttacattttcacgattgccttatatctagttatcggaccatttttcgccttacctagactggcaacgacatcatttgaaattgcattttcgccatttttatcaccaaagcaaatcactttatatttatttatttttagcttcgtcttctttgtgattgcatggttttttgcgagaaagccatcaagaattttagaatatatcggtaaatttttaaatccggtattcttagtattattagcaattattttattatttgcttttatccatccattaggtggcatatctgatgcacctattagtaaacaatatcaatcacatgccttatttaacggctttttagatggatacaataccttagatgcgctagcgtcattggcatttggtatcatcattgttgcaacgattaaaaagttaggtatcgaaaatccaactgatatcgctaaagaaacaattaagtctggtactatcagtatcattatgatggggattatttataccctactagcaatcatgggtacattaagtattggtcatttcaaacttagtgaaaatggtggtattgccttagcgcaaattacgcaatactacttaggtaactacggtatcgtcctgttgtcacttatcgttatggttgcttgtttaaaaacagccatcggtttgattacggcattttcagaaacattcgaacaccttttccctaaaatgaattacctagcgattgcaacagttgtaagctttatttcgttcttattcgcgaatgttggcttaactaagattattatgtactcagtcccagtgttaatgttcttatatccattagcaattgccttgattgtactaacattatttagtagcaaattccatcattcaaaaattatttatcaatgtaccattttctttacaatgattgctgcattagtagatggattaaaagctagtccagagttcatttcaagcacatcattctcacaaactttgattaatttcagccaaaaatatttaccattatcagacattggtatgggctgggttgttctcagtttgattggtttcattatcggcttcattatttataaaattaagcatcgtaaaattccataa

SEQ ID NO: 8202 - DNA, 2184 bp, Staphylococcus aureus
atgacggaaaacaaaggatcttctcagcctaagaaaaacggtaataatggtgggaaatccaactcaaaaaagaatagaaatgtgaagagaacgattattaagattattggcttcatgattattgcatttttcgttgttcttttactaggtatcttattgtttgcttattatgcttggaaagcacctgcttttaccgaagctaaattacaagatccgattcctgcaaagatatatgacaagaacggagaacttgttaaaacattagataatggccaaagacatgagcatgtaaatttaaaagacgtgccgaaatcaatgaaagacgcagtacttgcaactgaagacaatcgtttctacgaacatggcgcacttgattataaacgtttattcggtgcaattggtaagaacttgactggtggatttggttctgaaggtgcctcaacattaacacaacaagttgttaaagatgcatttttatcacaacataaatctattggacgtaaagctcaagaagcatacttatcatatcgtttagaacaagagtatagtaaagatgatatcttccaagtatatctaaacaaaatttactgttctgatggcgtaacaggtattaaagctgctgctaagtattactttaataaagatttaaaagatttaaacttagcggaagaagcttatttagccggtttacctcaggttccaaacaactataatatttatgatcatccaaaagctgctgaagatcgtaaaaacactgttttatacttaatgcattatcataaacgcattacagataaacagtgggaagatgctaagaaaatcgatttaaaagcgaacttagtaaatcgtactcctgaagaacgtcaaaacattgatacaaatcaagattctgagtataattcatacgttaactttgtgaaatctgaattaatgaataataaagcattcaaagatgaaaatttaggtaatgtattacaaagtggtattaaaatttatacaaacatggataaagatgttcaaaaaacattacaaaatgatgttgataatggtagcttctacaagaataaagaccaacaagttggtgcaacgattcttgatagtaaaactggtggtttagttgctatatctggtggacgtgatttcaaagacgtcgttaacagaaaccaagcaacagatcctcaccctactggttcatctttaaaacctttcttagcgtatggacctgccattgaaaatatgaaatgggcaacaaaccatgcgattcaagatgaatcttcatatcaagttgacggttctacatttagaaactatgatacgaagagtcacggtactgtatctatttatgatgctttacgacaaagtttcaatatcccagctttaaaagcatggcaatcagttaagcaaaatgctggtaacgatgcacctaagaaattcgctgccaaacttggcttaaactacgaaggcgatattggtccatctgaagtacttggtggttctgcttcagaattctcaccaacacaattagcatcagcatttgctgcaatcgctaacggtggtacttataacaacgcgcattcaattcaaaaagtagttactcgtgacggtgaaacaatcgaatacgatcatactagccataaagcgatgagtgattacactgcatacatgttagctgagatgctaaaaggtacatttaaaccatatggttctgcatatggccatggtgtatctggagtaaatatgggtgctaagacaggtactggtacttacggtgctgaaacttattcacaatataatttacctgataatgcagcgaaagacgtgtggattaacggctttacacctcaatacactatgtcagtgtggatgggcttcagtaaagttaaacaatatggtgaaaactcatttgtgggacatagccaacaagaatatccacagttcttatatgaaaatgtgatgtcaaaaatttcatctagagatggcgaagactttaaacgtcctagctcagtaagtggtagtatcccatcaatcaatgtttctggtagtcaagataacaacactacaaatcgtagtacacacggtggtagtgacacatcagcaaacagcagtggtactgcacaatcaaataacaatactagatctcaacaatctagaaacagcggtggattaacaggtatattcaactaa

SEQ ID NO: 8203 - DNA, 693 bp, Staphylococcus aureus
atggctaaaaaaggtaaaaagtatcaagaagcagctagtaaagttgaccgtactcagcactacagtgttgaagaagcaattaaattagctaaagaaacaagcattgctaactttgacgcttctgttgaagttgcattccgtttaggaattgatacacgtaaaaatgaccaacaaatccgtggtgcagttgtattaccaaacggaactggtaaatcacaaagtgtattagtattcgctaaaggtgacaaaattgctgaagctgaagcagcaggtgctgactatgtaggtgaagcagaatacgttcaaaaaatccaacaaggttggttcgacttcgatgtagtagttgctacaccagacatgatgggtgaagttggtaaattaggtcgtgtattaggaccaaaaggtttaatgccaaaccctaaaactggaactgtaacaatggatgttaaaaaagctgttgaagaaatcaaagctggtaaagtagaatatcgtgctgaaaaagctggtatcgtacatgcatcaattggtaaagtttcatttactgatgaacaattaattgaaaacttcaatactttacaagatgtattagctaaagctaaaccatcatctgctaaaggtacatacttcaaatctgttgctgtaactacaacaatgggtcctggagttaaaattgatactgcaagtttcaaataa

SEQ ID NO: 8204 - DNA, 537 bp, Staphylococcus aureus
atgattactgttttgtttggtgggagtagaccaaacggtaatactgcacaattaacaaaattcgctttgcaagatttagagtatcaatggattgacgtgacacaacatcagtttaaaccgatacgtgacgtgagacatacagcagagactattacttcatatgacgatgactatttgccgattctagataaaatattggctagtgatacaattatttttgcatcaccagtgtattggtatagcatttcagcaccattgaaagcatttatcgaacattggtcagaaacattacaagataaacgatatcctaattttaaggcacaaatggccgaaaaggattttagagttattttagttggtggagattgtccaaaaataaaagcgaagccagcaattacgcaaatgaaatatagtttagactttttaggtgccactttaaatggttatattattggaactgctgaaaagcctggtgacatcatgaaagacaactatgccttagcacgtgcaactgagtggaatagtatattgcaataa

SEQ ID NO: 8205 - DNA, 1515 bp, Staphylococcus aureus
atgatggaaaaaaatgaaaacattaatgtagagattttaactacgtcagatatgcatagtcatttcttaaatggtgattatggttcaaatatttatagagctggtacttatgttaaccaaataagagcacaaaatcatcgcgtcattttattagatagtggcggaagtttagctggctcgttagcggcctattattatgctattgttgcaccttataaacgacatccaatgataaagttaatgaacagaatgcattatgatgctagcggtgtgagtccaagtgaattcaagtttggtttatcatttttaactcgttcaattgctttggcacgttttccatggttatcagcaaatattgaatacaatgttactaaggagccttatttttcaactccatattgtattaaacattttggtgacttaaaaattgctatcgtaggcgtcacagcagatggtttaatggaaaatgagtattctgaaatggagcaagatgtatctattgaaaagacattagtggcatcaaaacgttggattagatatatccatgaagttgaagagccagattttttgattgtaatttatcatggtggattgaataaaattagtaatagtacgaaaaataaaaaggcaagttcgaatgaagctgaaaaattaatggaagaactcggtgttatagatttaatgattacagctcatcagcatcaaacaatagtaggtcaagatcatgaaacgtattatgttcaggctggtcaggatgccaaagagcttgtacatctttcgattaattttaaaaagagaacaacaacttatgatgttgaaagcattgattctaaagtgattgacttaaatgagtatgaagaggatcaagaattattagatttaacattctatgatagaaaagcagtggcttattggtcacaggaaatcataagtgataaaggtttgatgttatcagtgaatgggttacaagatttagtctgtcaaacacatccattttcgcaattattacatgatgcaattcagcttgcatttgataatgatataacatgtgtccacgtgcctttgaacggagagaaggggttgagtggacagattcgaaatgaagatttgtatcatgcatacccatatccagataagccaatggatatgacaattagtggtcaaaatatcaaagatatattggagtatagttattcacatttagattttgttaacgagcaattaagcttaacaattattgatgaaacgttatgtacaatgtggcaaggattcaattatgagattgatatgaatcaagaacctgggcaacgagtaatgttagatcaaattgatttgactaagagttatagagttacaatgactgactattgttatcgtaactacaagaattatttaaaaaatgctattatacatgaatcgtacgatgaaacaatgagtacattaattgcagagaagttaagagatccgaattatcgtatttcatgtagtgataattttgtagttaaaaacaggtaa

SEQ ID NO: 8206 - DNA, 615 bp, Staphylococcus aureus
atgaaaagattagttacagggttactagcattatcattatttttagctgcatgtggtcaagatagtgaccaacaaaaagacagtaataaagaaaaagatgataaagcgaaaactgaacaacaagataaaaaaacaaatgattcatctaaagataagaaagacaataaagatgatagtaaagacgtaaacaaagataataaagataatagtgcaaacgataaccagcaacaatctaattcaaatgcaacaaacaatgaccaaaaccaaacaaataataaccaatcaagtaataatcaaaaatcaagttacgttgcaccatattatggacaaaatgccgcgccggttgcacgtcaaatttatccgtttaatggaaataaaactcaagctttacagcaattgccaaatttccaaacagctttaaatgcggctaataatgaagcaaataaatttggtagtaataataaagtgtataatgattattctattgaagaacataatggcaactataagtatgtgtttagttttaaagacccaaatgcaaatggaaaatattcaattgtaacggttgattatactggacaagcaatggttactgatccaaactaccaacaataa

SEQ ID NO: 8207 - DNA, 3453 bp, Staphylococcus aureus
ttgaaacaaataaaaaagttacttgttgctaaccgtggagaaattgcaattcgtatattcagagcggcggcagaattagacatcagcacagttgcaatttattcgaatgaagacaaaagttcattacatagatataaagcagatgaatcctatttagttggaagtgatttaggtcctgctgaaagttatttaaatattgagcgtatcattgatgtagcaaaacaagcgaatgtggatgcgattcatcctggctatggatttttaagtgaaaatgaacaatttgcgcgtcgttgtgcagaagaaggaattaaatttattggtcctcatttagaacatttagatatgtttggagataaagttaaagctcgtacaacggctatcaaggcagatttaccagttattcctggtacagacggtccaattaaatcatatgaattagcaaaagaatttgcagaagaagctggtttcccgctaatgattaaagccacaagtggtggcggcggtaaaggtatgagaatcgttcgtgaagaaagtgaattagaagatgctttccatagagcaaaatcagaagctgaaaaatcatttggtaatagtgaagtttacatagaaagatacattgataatccaaagcatattgaagtacaagtcataggtgacgaacatggaaatatcgtacacttatttgaacgtgattgttcagtacaacgtcgtcatcaaaaagttgtagaagttgcaccatcagttggattatcaccaacattacgtcaacgtatttgtgatgctgcaattcaattgatggaaaatattaaatatgtcaatgcaggtactgttgaatttctagtatctggtgacgaattcttctttatagaagttaaccctcgtgtacaagtagagcatacaattacagagatggtaacaggaattgatattgttaagacacaaattttagttgcagcaggtgccgatttatttggtgaagagattaatatgccgcaacaaaaagatattacaacattaggctatgccatccaatgtcgtattacaacagaagatccgttaaatgatttcatgccggatactggaacaatcattgcttatcgttcaagcggtggctttggtgtacgtcttgatgctggagatggtttccaaggtgctgagatatcaccttattatgattcattactcgtaaaattatctacacatgcgatatcatttaaacaagcagaagaaaaaatggtacgttcattacgagaaatgcgtattcgtggtgttaaaactaatattccattcttaattaatgtaatgaagaataaaaagttcacaagtggtgattacacaactaaatttattgaagaaacaccagaacttttcgacattcagccgtctctagatagaggtactaaaacattagaatatataggtaatgtaacaattaatggtttcccaaatgttgagaaacgtccgaaaccagactatgaattagcatcaattccaactgtatcttcaagtaaaatcgcttcatttagtggtacgaaacaattgcttgatgaagtaggtccaaaaggtgtagctgaatgggttaaaaagcaggatgatgtcttactaacagatacaacctttagagatgcacaccaatcattattagctacacgagttagaactaaggatatgattaatatcgcatccaaaacagcggacgtatttaaagatggtttctcactagaaatgtggggcggtgctacatttgatgtggcatataatttcttgaaggaaaacccatgggaacgacttgaacgtctacgtaaagctatcccaaatgtattattccaaatgttgttacgtgcttcaaacgcagttggttataaaaactatcctgataatgttattcataaattcgtacaagaaagtgctaaagcaggcatagatgtctttagaattttcgattcattaaactgggtagatcaaatgaaagttgccaatgaagcagtacaagaagcgggcaaaatctctgaaggtactatttgttatacaggtgacattttaaatcctgagcgatcaaacatttatactttagagtattatgtcaaactagctaaagagttagaacgtgaaggtttccatattttagcgattaaagatatggcaggcttattaaaacctaaagccgcttacgaattgattggtgagttaaaatcagctgtagatttaccaattcatcttcacactcatgatacaagtggtaatggtttattaacatacaaacaagcaatagatgctggggtcgatatcattgatactgctgttgcttcaatgagtggtttaacaagtcagccaagcgccaattcgttatattatgcattaaatggcttcccacgccaccttagaactgatattgaaggtatggagtcacttagtcattattggtcaactgtacgtacttattattcagactttgaaagtgatatcaaatcaccgaatactgaaatttatcaacatgaaatgcctggtggacagtattcgaatttaagtcaacaagctaaaagtttaggtttaggcgaaagatttgatgaagtcaaagatatgtatcgcagagtgaatttcttatttggtgatatcgtaaaagtaactccatcgtctaaagtagttggtgatatggcactttatatggtacaaaatgatcttgatgaacaatccgtgattacagatggctataaattagatttcccagaatcagtagtgtcgttcttcaaaggcgaaataggacaacctgtaaatggttttaataaagatttacaagcggttattttaaaaggccaagaagcactaacagctcgtccaggtgaatatctagagccagttgattttgaaaaagtccgtgagttgcttgaagaagagcaacaaggtcctgttacggagcaagatattattagttatgtattatatccaaaagtatatgaacaatatattcaaactagaaatcaatacggaaacttatcgttacttgatacgcctacattcttctttggaatgcgtaatggtgaaacagtagaaatcgaaatcgataagggtaaacgattaattattaaactagaaacgattagtgaaccagatgaaaatggtaatagaacgatttactatgcgatgaatggtcaagcgagacgtatttacattaaagatgaaaatgtgcatacaaatgcgaacgttaagccaaaagcagataagagtaatccaagtcatatcggtgctcaaatgccaggttcagtaactgaagtcaaggttagtgttggtgaaactgtgaaagctaatcagccgttgctaattactgaagctatgaaaatggaaacaacaattcaagcaccatttgacggtgtgattaaacaagtaactgtaaataatggtgacacaatagcgacaggcgatttattaatcgaaattgaaaaagcaactgactaa

SEQ ID NO: 8208 - DNA, 2406 bp, Staphylococcus aureus
atggcaaagcaaaaactagtaatgattggtaacggtatggcgggcattcgaacaatcgaagaaatattagagcgcgccaacgatttatatgatattacggtaataggtaaagaaccttatccaaactataaccgcatcatgctttcaaatattttacaaaataaaatgacagttgaagaaacaattatgaatccatatgagtggtatgaggaacatggtatcgagttaattaccaatgatcctgtaattgaagtagatagagcaaatcaatcagttactactgcaaatggtattgaagtatcatacgataaattgatttttgcgacaggttctaaagcattcgtcattccagttccaggttcgacattaccgagtgtaattggttggagaacgattgatgatactgaacaaatgatgaacattgcgaagactaaaaagaaagcaattgtaattggtggaggcttactaggtttagagtgtgcacgtggtttattagatcaaggtatggaagtaacggtgttacatttagctgaatggttgatggaaatgcagctagaccgtaaagcaggaaatatgcttaaagcagatttagaaaagcaaggtatgaagtttgaaatgcaagccaacacaactgaaatcttaggagaagatgatgttgaaggtgttaaattggctgatggacgcgagattccggcagacttagttgttatggcagtaggtatacgaccatacacagaagtagccaaagaatcaggtctagatgttaatcgtggtattgttgtcaatgatgtgatgcaaacaagtgatagcaatgtatatgcagttggagaatgtgcagaacataacggcaaagtttatggactcgttgcaccactatatgaacaaggtaaagtattagctgatcatttaacaaataaagaaacgaacggatacaagggatcaacaacatttacgtcattaaaagtttctggttgtgacttgtatagtgctggtcaaattgtagaaaatgcagaaattaaaggtattgaaatatttaatagtgttgataataactataaaaaaatctttttaaaagacggtaatgtagttggtgcagtactatatggtgatatcgatgatggttcacgcttttataacatgatgaaaaaaggtgaatccactgaagattacacacttgtatcattgcttactaaaggtggagaagaggcatcgctatcaattgctgatatggctgatgatgaaacaatttgtggttgtaatggtgttgataaaggtactatagtaaatgcgattacggaaaatggctttacaacagttgaagaagtaacggctaaaacaaaagcggggaattcatgtggtaaatgtaaaccgcaaattgctcaaatattgcagcacaccttaggagatgactttgttgccgcaaaacctgctgctatatgtggttgtactgatttgacacgcgatcaaattgtaacgcaaataagagcgaaaggtttaaaaacatctaaagaagttcgacatgttttaaactttaaaaataaaggtggatgtccaaaatgtcgaccagcaatcaactattatttaaacatggtttatccacatgatcatgaagatgaaagagaatcaagatttgctaacgaacgttaccatgcgaatattcaaaatgatggtacattttctgttatacctcaaatgcgtggaggtgttacagatgcagaccaactgattcgtctaggagaagtggctaagaaatatcatgtgccactagttaaagtgacaggttcgcaacgtgttggtttgtatggagttaaaaaagaagaattaccaaatatatgggaagacctaggtatgcgttcagcatcagcttatggtaagaaaacacgctcagttaaaagctgtgttggtaaagagttttgtcgatttggtacgcaatacacgacacgacttggcattcgtttagaaaaaacatttgaatacatcgatacacctcataaattcaaaatgggtgtatcaggctgcccaagaagttgtgttgaatcaggtgttaaagattttggtattatctcagttgaaaatggattccaaatctatatcggtggtaatggtggtacagaagtcgaaaaagctgaatttttaacaactgtagaaacagaagatgaagtaatcaaattatgtggtgctttgatgcaatattatcgcgaaacaggtatatatgctgaaagaacagcgccatggttaagaagacttggatttgaaaatgtaaaagaagtcttacttgacccagaaagacaaaatgaactatttgaacgcattatggatgctaaaaaagcagtcgaagctgaaccttgggaagcaataactagcaatgcgcaagcacgtaaaatttttgaagtggagaaggtgtaa

SEQ ID NO: 8209 - DNA, 1470 bp, Staphylococcus aureus
gtgtaccaattagaagacgacagtttaatgttacataatgacttatatcaaataaatatggctgaaagttattggaatgataatattcatgaaaaaatggctgtatttgatttgtattttagaaaaatgccatttaatagtggctatgctgtttttaatggtttaaaacgcgtcattgattttatagaacattttggattttcagaatctgatttggaatatttaaagtctattggctacaaggatgatttcttatcatatttaaaagatttaaaattcacaggaagcattcgttcgatgcaagaaggcgaattatgctttggtaacgaaccattgttacgcgtagaagcaccattgattcaagcgcaattaatagaaacaattttattaaacattgtaaatttccatacactaattacaacaaaggctagtagaattcgtcaaattgcatcaaatgataaattaatggagtttggtacacgtcgtgcgcaagaaattgatgcagcattgtggggcgctagagctgcttacatcgggggctttgattctacaagtaatgttagggcaggtaaattatttggtatacctgtgtctggtacacatgcacacgcatttgtccaaacttatggagatgaatatgttgccttcaaaaaatatgctgaaagacataaaaattgtgtgttcctagtagatacattccatactttaaaatctggcgtgccaaatgcaataaaagttgcaaaagaattaggtgacaaaattaactttgtaggtattcgattggattctggagatatcgcttatttatctaaagaggcaagacgtatgcttgatgaagcaggatttactgaaactaaaattatcgcgtctaatgatttggatgaagaaacgattacgagtttgaaagcacaaggtgcaaaagtagattcttggggcgttggtacaaagctgattacaggatacgatcaaccagcattaggtgcagtatataaacttgtagctattgaaaatgaagagggttcatatagtgatcgtattaaattatcaaataacgctgaaaaggttacgacgccaggtaagaaaaatgtatatcgcattataaacaagaaaacaggtaaggcagaaggcgattatattactttggaaaatgaaaatccatacgatgaacaacctttaaaattattccatccagtgcatacttataaaatgaaatttataaaatctttcgaagccattgatttgcatcataatatttatgaaaatggtaaattagtatatcaaatgccaacagaagatgaatcacgtgaatatttagcacaaggattacaatctatttgggatgaaaataagcgtttccttaatccacaagaatatccagtcgatttaagcaaggcatgttgggataataaacataaacgtatttttgaagttgcggaacacgttaaggagatggaagaagataatgagtaa

SEQ ID NO: 8210 - DNA, 1758 bp, Staphylococcus aureus
atgagaaaaactaaaattgtatgtacaattggaccagcttcagaatcagaagaaatgattgagaaattaatcaatgctggtatgaacgttgcacgattaaacttttcacatggtagtcatgaagagcataaaggtagaattgatacaattcgtaaagtagctaaaagattagacaaaattgtagcaattttattagatacgaaaggtccagaaattcgtacgcataatatgaaagacggtatcattgaacttgaacgtggtaacgaagttattgttagcatgaatgaagttgaaggaacacctgaaaagttctcagtaacatatgaaaacttaattaacgatgttcaagtaggttcatacattttacttgatgatggcttaattgaattacaagttaaagatattgaccatgctaaaaaagaagttaaatgtgatattttaaactctggtgagcttaaaaacaaaaaaggtgttaacttacctggtgtaagagtaagtttacctggtattacagaaaaagatgctgaagatatccgtttcggtattaaagaaaatgttgacttcattgcagcaagtttcgtacgtcgtcctagtgatgttttagaaattcgtgaaattttagaagaacaaaaagctaacatttcagtattccctaaaattgaaaaccaagaaggtattgataatattgcggaaattcttgaagtgtctgatggtttaatggttgcacgtggtgacatgggtgttgaaattccacctgaaaaagtaccaatggttcaaaaagatttaatcagacaatgtaacaaattaggtaaaccagttattacagctacacaaatgttagattctatgcaacgtaacccacgtgctacacgtgcagaagctagtgacgttgccaacgcaatctatgatggtacagatgcagtaatgttatctggtgaaactgctgctggtttatatcctgaagaagctgttaaaacaatgagaaatattgctgtatcagctgaagcagcccaagattataaaaagttattgtcagatcgtactaaattagttgaaacttcattagtgaatgctatcggtatttcggttgcacatacagctttaaacttaaatgttaaagcaattgtagctgctactgaaagtggttcaacggcacgtactatctctaaatatcgtccacattcagacattattgcggtgactccaagtgaagaaacagcacgtcaatgttcaattgtttggggagttcaacctgtagttaaaaaagggcgtaagagtacagatgcattgttaaacaatgcagttgcaacagctgttgaaactggtagagtatctaatggtgatttaatcattattactgctggtgtaccaactggtgaaactggaactactaatatgatgaaaatccacctagttggtgacgaaattgctaatggtcaaggtattggacgtggatcagttgttggtactacgttagttgctgaaactgttaaagatttagaaggtaaagatttatctgacaaagttatcgttactaactcaatcgatgaaacgtttgtaccttatgtagaaaaagctttaggattaattacagaagaaaatggtattacatcaccaagtgcaattgttggtttagaaaaaggtattccaacagttgtaggtgtagaaaaagctgttaaaaacataagcaataacatgttagttacgattgatgctgctcaaggtaaaatctttgaaggatatgcaaacgtactataa

SEQ ID NO: 8211 - DNA, 861 bp, Staphylococcus aureus
atgactatacggtttgacaatgtaagttatacctatcaaaaagggacaccatatcagcatcaagctattcatgatgttaatacagaatttgaacaaggtaaatattacgccatcgttggacaaacgggtagtggtaaatcaacgttgatacaaaatattaatgcgctgttaaagccgactactgggacagttacagttgatgacattactattacacataagaccaaagataaatatattagacctgtaagaaaaagaattggaatggtatttcaatttcccgaatctcaattatttgaggacacagtagagcgtgaaatgatatttggacctaaaaactttaaaatgaatttagatgaagccaaaaactatgcccatcgtctgttgatggatttaggcttttcaagagatgtaatgtcacaatcaccatttcaaatgtcaggtggacaaatgcgtaaaatagcgattgtatcgatattggcaatgaatcctgatattatcgtggttgatgaacctacagcaggacttgatccacaaagtaaacgacaagtaatgagattactaaagtcactacaaacagatgaaaataaggcaattatcctaatttcacatgatatgaatgaagtcgcgcgttatgcagatgaagtcatcgttatgaaagaaggtagtatagtgtcgcaaacatcaccaaaagagctcttcaaagataaaaaaaaattggcggattggcatattggtttgccagaaattgttcagttacaatatgactttgaacaaaaatatcaaacaaaattaaaagatattgccttaactgaagaagcatttgtaagcttgtataaggagtggcaacatgaaaaataa

SEQ ID NO: 8212 - DNA, 402 bp, Staphylococcus aureus
atggttaaagtgacatatgatattccgacttgcgaggattattgcgcattaaggattaacgcaggtatgagtccaaagacgcgcgaagcagctgaaaaaggattacctaatgccttatttacagtaaccttgtatgataaagatcggttaattggtatgggtagagtgattggcgatggcggaactgtttttcaaattgttgatattgctgtttcgaaaagttatcaaggtcaagattacggcagtctaattatggaacatattatgaagtatattaaaaatgtatctgtcgaaagtgcatacgttagtctgatcgcagactacccagcggataaattatatgcaaaatttggatttatgcctaccgaaccagattcaggcggtatgtatatcaaatactaa

SEQ ID NO: 8213 - DNA, 996 bp, Staphylococcus aureus
ttgtatgcaagcttttatgctggattgcgagatatgtctgtaagattgatagatgttcaatctgaattagggggtaagatgagaatttaccctgaaaaaattatttgggatattggcggcattgcgccaaaaccttgtcatgaaattttaaaagatacaattaagcaaggattatattttaaaccggaagttcatttgaatgaacgtgtggtagatattaggaaaaaggcagaacgtcatttcgaagttgaaacagaagcgggagaaatatatacatcgaaagcagttatcattgcaattggtgcgggtattattaatccaaaacaattagatgttaaaggtgtagagagatatcaattaactaatttacattatgttgtacaaagttacagacgtttcaaagataaagatgtattaatatcaggtggaggaaatacagcattagattgggcgcatgatattgccaagattgctaaaagcgtgacagttgtttatcgaaaagaagatgtaagtggtcatgaagcgatgaaaacgttggtgacagatttaaatgtgaaactatgcccaaaaacacgtattaaatacttggtcggcaatgatgatgaaacgcatataagtgaagttgttttggaacatgttgaaagtggcgataggcatacagttaaatttgacgatgtcattattagtcatgggtttgatcgttgtaatacattattgagtgaaacatcttcaaagctagatatgcatgatgattgtcgtgttaaaggatttggtaatacgacaactagtatacctggtatctatgcgtgtggagatattgtttatcatgatgcaaaatcacatctaattgcaagtgcatttagtgatggtgcaaatgcagcgaaccttgctaaaacatatatccaaccagatgcgaatgcagagggttatgtttcaagtcatcatgaagtgtttaaagaagcgaataagactattgtaaataaacatttatactag

SEQ ID NO: 8214 - DNA, 117 bp, Staphylococcus aureus
atgcataacaagaatgaaaatgtaacatacgtagcaattggtttcataaattggatgttagtggcgtattggttcattagacgtattagtaataaaattgtatatatcataaggaga

SEQ ID NO: 8215 - DNA, 2274 bp, Staphylococcus aureus
atgattaaaccgaagtataagtggaaattaactaaaccagctgaatacataagtgatgaattaacatcaaaattaaagttaacgccaatcgtaaaaaaaatattagaaagtaaatcgattattgatgaacaagcaattgaatccatcatttcagacacagatgtcaatcatgatgcattgcaattgagcgatatgactaaggctattgaaagaattaaaagagcgatagcgaatgatgagaaaatcctagtttatggtgattacgatgccgacggtgttacctcaactacaattttagtgacaacattacaacttttaggtgcacaagtaggatggcatattcctaaccgctttaccgaaggatatggaccaaacgaactagcatttagaaatgctcatgatgaaggcataacattaatcataactgttgataatggcatacaaggtcataatgaaattaaaatggttcaagatttaggagttgatgtcattgtaactgatcatcatgaaattggtagtacattaccagaagcatatgcaatcgtacatccaatgcatccatcgtttaattatccgttccaacaattgtgtggtgcaggtgttgcatacaaattagcacaagcattgattgaaaatgtacctgattattttaaagcattagttgcgataggtaccattgcggatttagtatccttaactgatgaaaatcgatcattagtgaaacaaggattaaaagtcttaaatgatcaatgtccgacctctgttaaagcattgctaaaagaagcgggatacaatgacaatattgatgaagaaacaattggttttattattggacctagacttaatgctgtaggtcgtttagatgacgcatcattagcttgcgaattgttgatgactgacgacgaagaagaagctgcatttttagcagaacaagttgaacattttaaccgtgaaagaaaagatattgtagcaactatcacagaagaagcaatggctatggcagaaacgaaagttaaaaagggagatttatttttacttttagcaaaagaaaattggcatgaaggtgtcttaggtattgttgcttcgaaaattgtcgaaacatttgctttgccaacattaattttaaatattgatagggagcaaaatcatgcaaaaggttccgccagatcaattgatcaagtgtcgatgtttgaaatactatcagcacatcaagagttaatcgctaaatttggcggccatcatatggctgcaggtatgacgatggatattgaaaatatagaatcgttagctgaaggtttaaataaatggatgaaagaattatctaaaacaacttcgttagatcccgtaaagccagtagacgtattattaacagaaaatgatataacgattaaaaatattcgtgatatgaatcgtttaagacccttcggaacagatttttctagacctatttttgaaatggatgatttatcagtttcttcagttaaggcgatcggtcaacaaaaaaatcatctaaaattgacacttggtgaaagtaatatcgccgcgctattttggcaaaatggacacttagaacctgagttacaagatgaacagccaattaatatattaggatctgttcaaatcaacgaatggaatggtaatcaatcaccgcaattaattattcaagatattgcgatgaatgaacagcaaatattagattatagaagtaagcgaaaaagtttaccttttacagaaaatgatgaaaatattgtcgtgcttattcatcctaaaagtgataaagtaaatgcgaatgaatattattatggtgaagaaattaaacaacaaactgataaagtagtattaagagatttaccaacgtcaatggaagacttgtctaattccttgcaacaactgcaattttctcaactttatatagttttgcaacataatcattcgatttacttcgatggtatacctaatatggatatttttaaaaagtgttataaagcattaataactaaacaagaaacaaatatccagaaagagggtatgttattgtgtcaacatttaagtgtgaaaccagatacacttaaattcatgttgaaagttttcttagacttaaaatttgtaacacaagaagatggtttaattcgaatcaatcaacaacctgataaaagatcgattgattccagcaaagtatatcaattaagacaacaacgtatggatgttgaaaagcaattattatatcaagatttttcagaaataaaaaattggataaagtcacaattgtcgtga

SEQ ID NO: 8216 - DNA, 576 bp, Staphylococcus aureus
atgagcagaataacacaagtgcatcgtattttagaacaaaaacatttagatgcgattatcattctttcggattacaatagaagatatttatcaggttttactggtaccagtggagcacttatcatatctaaagataaacaatatttgataacagactttagatatattgatcaagcaactaagcaggcgccaaattatgaaattattaatcgtaaatctactattattggtgagattaaagaattgctacaccaagaaaattttgaaaatataggttttgaggggcatcatgtaagttatgatacataccttgaattaaataaaagccgtatatcattaataagcatttctaatactgtagataaaattagagacgtcaaagatgttgacgaaattgctttaattcaaaaagcagctaatattgttgatgaaacatatgaatatattttaactgttgtaaaagcaggtatgactgaaaaagaattaaaggcaatattagaaagtaaaatgctagaattaggagcagatggaccatcatttgatacgattgtagcatctggtatagaggtgcattaa

SEQ ID NO: 8217 - DNA, 312 bp, Staphylococcus aureus
ataggcgcgtattataacggctattgttcagatatgactagaacatttgctataggagaaccagatcctacagctgaaagaatatatccaatagtacttgaatctctaatgatagcaattactgagattagacctggcatgactggtgcagaagctgatgccatttcaagaaactatttagagtcaaaagggtatggaaaagaatttggacattcactaggacatggtattggtttagaaatccatgaagggccaatgctggctcgctacgatacaacgataaacttcaagttaacaactgtgttacagtag

SEQ ID NO: 8218 - DNA, 309 bp, Staphylococcus aureus
atggcaaaacaaaaaatcagaatcagattaaaagcttatgatcaccgcgtgattgatcaatcagcagagaagattgtagaaacagcgaaacgttctggtgcagatgtttctggaccaattccgttaccaactgagaaatcagtttacacaatcatccgtgccgtgcatatgtataaagattcacgtgaacaattcgaacaacgtacacacaaacgtttaatcgatattgtaaacccaacaccaaaaacagttgacgctttaatgggcttaaacttaccatctggtgtagacatcgaaatcaaattataa

SEQ ID NO: 8219 - DNA, 249 bp, Staphylococcus aureus
ttggcaaaatatacaatcgttgatatggatacttgtattgcatgtggtgcatgcggtgcagcagcgccagatatatatgattacgacgacgaaggtattgctttcgtaatccttgacgataaccaaggtactgcagaagtacctgaggaattatatgaagatatggaagatgcaattgatggatgccctacagattctattaaaattgcagacgaatcatttgatggggacgctttaaaatttgaataa

SEQ ID NO: 8220 - DNA, 819 bp, Staphylococcus aureus
atgaataactttaataatgaaatcaaattgatattacaacaatatttggaaaagtttgaagcgcattacgagcgtgtattacaagacgatcaatatatcgaagcattagaaacattgatggatgactatagtgaatttattttaaatcctatttatgaacaacaatttaatgcttggcgtgacgttgaagaaaaagcacaattaataaaatcactgcaatatattacagcgcagtgtgttaaacaagtggaagtcattagagctagacgtctattagacggacaggcgtctaccacaggttactttgacaatatagaacattgtattgatgaagagtttggacaatgtagtatcactagcaatgacaaattattgttagttggttcaggtgcatatccaatgacgttaattcaagtagcaaaagaaacaggtgcttcagttatcggtattgatattgatccacaagccgttgacctagggcgcagaatcgttaacgtcttagcaccaaatgaagatataacaattacggatcaaaaggtatctgaacttaaagatatcaaagatgtgacgcatatcatattcagctcgacaattcctttaaagtacagcattttagaagaattatatgatttaacaaatgaaaatgtcgtagttgcaatgcgctttggtgatggcatcaaagcaatatttaattatccgtcacaagaaacagcggaagataagtggcaatgtgtgaataaacatatgagaccacagcaaatttttgatatagcactttataaaaaagcagctataaaggtaggtattacggatgtctaa

SEQ ID NO: 8221 - DNA, 447 bp, Staphylococcus aureus
atgaaagtaatttttacacaagatgttaaaggtaaaggtaaaaaaggtgaagttaaagaagtaccagtaggttatgcaaataacttcttattgaaaaagaattatgctgtagaagcaacaccaggtaaccttaaacaattagagttacagaaaaaacgtgcaaaacaagaacgccaacaagaaattgaagatgctaaagcattaaaagaaacgttatcaaacattgaagttgaagtatcagcaaaaactggtgaaggtggtaaattgtttggatcagtaagtacaaaacaaattgccgaagcactaaaagcacaacatgatattaaaattgataaacgtaaaatggatttaccaaatggaattcattccctaggatatacgaatgtacctgttaaattagataaagaagttgaaggtacaattcgcgtacacacagttgaacaataa

SEQ ID NO: 8222 - DNA, 1092 bp, Staphylococcus aureus
atgtcaagtgatttaaaacaaacacctttatatcaaaattatgttgatagaggtgcaaaaattgtggaattcggaggatgggcgatgcctgttcaattttcaagtattaaagaggagcataatgctgttcgatacgaaattggcctgtttgatgttagtcatatgggtgaaattgaagtaacaggtaaagatgctagtcagtttgtgcaatatttattatcaaatgatactgataatttaactacttcaaaagcattatatactgctttatgtaatgaagaaggcggtattattgatgatttagtaatatataaattagctgacgacaattatttattagttgttaatgctgctaatactgaaaaagattttaattggattttaaaacacaaagagaaatttgatgttgaagtacaaaatgtatcaaaccaatatggtcaattagcaatacaaggaccaaaagctagagatttaattaatcaattagttgatgaagatgtaactgaaatgaaaatgtttgaatttaaacagggtgtcaaattatttggagcaaacgtcattttatctcagtcaggttacacaggtgaagatgggtttgaaatttattgtaatatcgatgatactgaaaaaatttgggatggtttattagagtataatgttatgccatgtgggttaggcgctcgtgatacattaagattagaggctggattgccattacatggacaagatttaactgaatcaattacaccatatgaaggtggtatcgcttttgcaagtaaaccattaattgatgctgattttattggtaaatctgtattaaaagatcaaaaagaaaatggtgcaccaagaagaacagtgggattagaattacttgaaaaaggaattgcaagaactggttatgaagttatggatttagatggaaatattattggagaagtaacttcaggaacacagtctccatcatcaggaaaatcaattgcacttgcaatgataaaaagagatgagtttgaaatgggtagagagttgcttgttcaagttcgtaagcgtcaattaaaagcgaaaattgttaagaaaaatcaaattgataaataa

SEQ ID NO: 8223 - DNA, 684 bp, Staphylococcus aureus
atggaatggatattatttgataaagatggtacgttaattgaatttgatagaagttgggaaaaaataggggtacgatttgtacaatcattgcttgagactttcccagtacataataaagaagctgctttaagacaactcggtgtcattaaagaatctattgatccaaaatcagtgatgggttcaggatctttacaacaaattatccaggcatttaatgatgtgacgggacaagatacaaccgactggtccaagtcaacaagtcaaaagctggtagatgaacgtattcctgaaattaattgggtagaaggtgttaaagaagcacttatcgatttgaaagcaaaaggctatcaacttggtattgttacgagtgatactaaaaaaggtgtagaacaatttttagcacataccaatgctatctcgttgttcgatttgatcatttctaccgaagcggatgcctatgagaagccaaatcctaaagtattatcgcctttatttgagcaatataatgtagatcctcagaaagtagctatagtaggagacactgctaatgatatgaagacagcaagtaatgcaaatttaggtatggcaataggtgtattaacaggtattgcaacaaaagaagaattacatgaagctgatattattttaaatagtgcggcagatattttagaagctttaaattaa

SEQ ID NO: 8224 - DNA, 795 bp, Staphylococcus aureus
atgattcattcaaagaaattaacgctcggtatatgcttggtattactcattatattgattgtaggttatgtcattatgacaaaaacaaatggtcgaaacgcccaaattaaagacacatttaatcaaacattaaaattatatccaaccaaaaatctcgatgatttttacgataaagaaggctttcgagatcaagaatttaaaaagggtgataaaggtacttggatagttaattctgaaatggtaatcgagccaaaaggtaaggatatggaaacgagaggaatggtgctctatatcaatcgcaatactagaaccacaaaagggtattattttataagtgaaatgacagatgacagtaacggcagaccaaaggatgatgaaaaaaggtatccggtaaaaatggaacataataaaatcataccaacgaagccactaccgaatgacaagttaagaaaagaaatcgaaaactttaaattctttgtacaatacggtgactttaaagatattaatgattataaagatggtgacatttcatataatcctaatgttccaagttattccgcaaaatatcaattgaaaaacgatgactacaatgtgaagcaacttcgaaaaagatataatattccaaccaacaaagctccgaaattattaataaaaggtgatggtgatttaaaaggctcatctgtagggtcaaaaaatctagaatttacctttgtagaaaataaagaagaaaacatttattttacagattctgtacaatatacttcaagtgaggatacaagttatgagtcaaactga

SEQ ID NO: 8225 - DNA, 1122 bp, Staphylococcus aureus
atggcagaattacaaagaggtttagaaggggttatcgcagcggagactaaaataagttcaattattgaaagtcaattgacttatgccggctatgatattgatgatctagctgaaaatgcgcaatttgaagaagttattttcctattatggaactatagattgccaaacgaagaagagcttgctcatctaaaagggaaattaaatcaatacatgacattaaatcctcgtgtgtatacacattttgaggagtatgttacagatcacgtgcatccaatgacagcattacgtacgtcattatcatatattgcacatttcgatcctgatgctgaaaatgaatcagatgaaaatcgttatgaaagagcaatgcgtatacaggctaaagtagcatcattagttacagcgtttgctcgagtaagacaagataaagaaccacttaagcctaatcctgacttaagttatgcggcaaacttcctatatatgttacgtggggaattaccaacagatatagaagtagaagccttcaataaagcacttattttacacgctgatcatgagttgaacgcatctgcatttacagcacgttgtgcggtatcatcattgtcagatatgtactcaggtattgtagcagctgtaggttctctgaaagggccattacatggtggtgcaaacgaacaagttatgacgatgttatctgagattgggtcaattgaaaatgttgatgcttacttagatgaaaaatttgctaataaagataaagtaatgggctttggtcatcgtgtatataaagatggtgatcctagagcgaaatatttaagagaaatgagccgtcaaattacgaaagacgctggtcgtgaagaattatttgaaatgtcagtgaaaatggaaaaacgtatggcagaagaaaaaggattaattcctaatgttgatttttatagtgcgagtgtttatcactgtatggaaatacctcatgacttattcacgccaatctttgctgtaagtcgttctgcaggatggattgctcatattttagaacaatataaagataatagaattatgcgtcctagagcgaaatatattggcgaaacgaatcgtaagtatatcccgcttgaagaaagaaaataa

SEQ ID NO: 8226 - DNA, 1239 bp, Staphylococcus aureus
atgtcttatatcaccaagcaagataaagttatcgcagaagcaatcgagagagaatttcagagacaaaatagcaacatagagttaatcgcatcggaaaattttgtatcggaagcggttatggaagcacaaggttcagtgttgactaataagtatgctgaaggctatccaggacgccgatattatggtggatgtgagtttgtagatgttactgaaagcatcgcaattgatcgtgctaaagcattgtttggagctgaacatgtcaatgttcaaccacattcaggttcacaagcgaacatggctgtttacttagttgcattagaaatgggcgacacagttttaggtatgaatttgagtcatggtggtcacttgacacatggagcgcctgttaattttagtggtaaattctacaatttcgttgaatatggagtagataaagacacagaacgaatcaattatgatgaagttcgtaaattagcgttagagcataagcctaagcttattgtggcaggagcatcagcatattcaagaacaattgacttcaaaaagtttaaagaaatcgcagatgaagtaaacgctaagttaatggtagacatggcacatattgcaggattagtagcggcaggtttacatccaaatccagtagaatatgctgattttgtaacaactacaacacacaaaacattacgcggaccacgtggtggtatgattttatgtaaggaagaatataaaaaagacatagataaaacaattttccctggtattcaaggtggacctcttgagcatgttattgcagcaaaagcagttgcttttggagaagcgttagaaaataatttcaaaacgtatcaacaacaagtggttaaaaacgcaaaagttcttgcagaagcattaattaatgaaggatttagaattgtttctggcggtacagataatcacttagtagctgttgatgtaaaagggtctataggacttactggtaaagaagctgaagagactttagattcagttggtatcacatgtaacaaaaataccattccgttcgatcaagaaaaaccttttgtaacgagtggtatacgtttaggtacacctgctgcaacaacgcgtggatttgatgaaaaagcttttgaggaagttgcaaaaatcatcagtttagcattgaaaaatagtaaagatgaagaaaaattacaacaagctaaagaacgcgttgcgaaattaacagctgaatatcctctatatcaataa

SEQ ID NO: 8227 - DNA, 615 bp, Staphylococcus aureus
gtggcaaatccgattaaaattggtattggtggtcctgtaggtgcaggtaaaacacaattaattgaaaaagttgtaaaacgtctttcaaaagaaatgagtatcggcgttattacaaatgatatatatacaaaagaagacgaaaagatattagtaaattcaggagttctacctgaaagtcgtatcattggtgttgaaactggtggatgtcctcatactgcgattcgtgaagatgcatctatgaactttgcagcaatagacgaattattagaacgtcatgacgatatagaactaattttcatagaatctggtggcgataacttagcagcaacatttagcccagaacttgttgacttttcaatatatattatcgatgttgctcaaggtgaaaagattccacgtaaaggtggtcaaggtatgattaagtcagatttctttgtaattaacaaaactgatttagctccctatgtaggtgcatcattagaacaaatggctgaagatactaaagtatttcgtggtaaacgtccatttacttttactaacttaaaaaccgacgaaggtttggatgaagttatcgattggattgaacgcgacactttactcaaaggattatcataa

SEQ ID NO: 8228 - DNA, 690 bp, Staphylococcus aureus
atgattgatcatacacacttaagattatttcagttctgtgattcacagtttccaacaggtgctttcagtcattcatttggtcttgaaacatatattcaacgaaatataattcatgacgatcatacttttattgcttggttaaaaatgtttttacaagagcaacttacctattctgatggtttagccatgcgtttagtttatgatgcattggaaaatgatgatacacaaaaagtattacacatagataaactgatgtttgttcaaaacttacctaaagaaacacgtgttggtgcaaaacaaatggggactcgcatggttaaattggctttagaactttataatagcccatggattgcttggtatcatcaacaaatgcaagataagaaagcaaagttaaatccagctatttgttttactatgctaggccatcatttaggtgtagatattgaaacgattattgattactatttatatcaaaatgtttcaagtttaactcaaaatgctgttcgtgctattccacttggacaaactgctggtcaaaagatagttactcacatgattccttatatagaagaaacaagaaagcagattttcgaattaaaagaagcagattttggcatgacagcgcctggtttagaactaaatcaaatggcgcatgagaacgtcaatgttagaattttcatatcatag

SEQ ID NO: 8229 - DNA, 2097 bp, Staphylococcus aureus
atgtctcaagaaaagaaagtttttaaaactgaatgggcaggaagatctttaacgattgaaacagggcaattagctaaacaagcaaatggcgctgtattggttcgttatggagatacagtcgtgttatcgacggcaactgcatcaaaagaacctcgtgatggagatttcttcccattaacagtgaactacgaagaaaaaatgtacgctgcgggtaaaattcctggtggatttaaaaagagagaaggacgtcctggtgacgatgcaacattaactgcgcgattaattgatagaccaattagacctttattccctaaagggtataagcatgatgttcaaattatgaacatggtattaagtgcagatcctgattgttcaccacaaatggctgcaatgattggttcatctatggcgcttagtgtgtcggatattccattccaagggccaatcgccggtgtaaatgtgggttatattgatggtaaatatatcattaacccaacagtagaagaaaaagaagtttctcgtttagaccttgaagtagctggtcataaagatgcagtaaacatggtagaggcaggcgctagtgagattactgaacaagaaatgttagaggcgattttctttggtcatgaagagattcaacgtttagttgatttccaacaacaaatcgtcgaccacattcaacctgttaaacaagaatttattccagcagagcgtgatgaagcgctagttgaacgtgtgaaatctttaaccgaagaaaagggacttaaagaaacagttttaacatttgataaacaacaacgagatgaaaatcttgataacttaaaagaagaaatcgtcaatgaatttatcgatgaagaagatccagagaatgaattacttattaaagaagtttatgcaattttaaatgaattagtgaaagaagaagttcgacgtttaattgcagatgaaaaaattagaccagacggccgtaaacctgatgaaatccgtccattagattctgaagttggtattttacctagaacgcatggttcaggtctatttacacgtggtcagactcaagcactttcagttttaacattaggtgctttaggcgattatcaattaattgatggtttaggacctgaagaagaaaaaagattcatgcatcattataacttcccgaacttttcagtaggtgaaactggtccagtacgtgcgccaggtcgtcgtgaaattggacatggtgcgttaggtgaaagagcattaaaatatattattcctgatactgctgatttcccatatacaattcgtattgtaagtgaggtacttgaatcaaacggttcatcatctcaagcgtcaatttgtggatcaaccttagcattaatggatgcgggcgtaccgattaaagcaccagttgctggtattgctatgggccttgttacacgtgaagatagctatacgattttaactgatatccaaggtatggaagatgcattaggtgatatggactttaaagtcgctggtactaaagaaggtattacagcaatccaaatggatattaaaattgacggtttaacgcgtgaaattatcgaagaggctctagaacaagcgagacgtggtcgtttagaaataatgaatcatatgttacaaacaattgatcaaccacgtactgaattaagtgcttacgcgccaaaagttgtaactatgacaattaaaccagataagattagagatgttatcggacctggtggtaaaaaaattaacgaaattattgatgaaacaggcgttaaattagatattgaacaagatggtactatctttattggggccgttgatcaagctatgataaatcgtgctcgtgaaatcattgaggaaattacacgtgaagcggaagtaggtcaaacttatcaagccactgttaaacgtattgaaaaatacggtgcgtttgtaggcctattcccgggtaaagatgcgttgcttcacatttcacaaatttcaaaaaatagaattgaaaaagtggaagatgttttaaaaatcggtgacacaattgaagttaagattactgaaattgataaacaaggtcgagtaaatgcatcacacagagcattagaagaataa

SEQ ID NO: 8230 - DNA, 234 bp, Staphylococcus aureus
gtggaaaatttcgataaagtaaaagatatcatcgttgaccgtttaggtgtagacgctgataaagtaactgaagatgcatctttcaaagatgatttaggcgctgactcacttgatatcgctgaattagtaatggaattagaagacgagtttggtactgaaattcctgatgaagaagctgaaaaaatcaacactgttggtgatgctgttaaatttattaacagtcttgaaaaataa

SEQ ID NO: 8231 - DNA, 1167 bp, Staphylococcus aureus
atgagatatctaacttcaggagaatcacatggacctcaattaacagttattgtcgaaggtataccagcaaatttagaaattaaagttgaagatattaataaagaaatgttcaagcgtcaagggggttatggtcgtggccgacgcatgcaaattgagaaagatacagtagaaatagtatcaggcgttagaaatggttatacattaggtagtccaattactatggttgtaaccaatgatgactttacgcattggagaaaaattatgggagcagctccaataagtgaagaagaacgtgaaaatatgaaacgtactattacaaaaccaagacctggtcatgcagatttggttggaggtatgaaatataatcatcgtgatttacgaaatgtgctagagcgatcatctgctagagaaacagcagctcgagttgcagtcggtgccttatgtaaagtgttattacaacagttagatatcgatatatacagtcgtgttgttgaaataggtggcattaaagataaagatttttatgattcagaaacatttaaagcaaatcttgatcgtaatgatgttcgtgtaattgatgacagtatcgcacaagcaatgcgagataaaattgacgaagctaaaaatgaaggagattcaattggcggtgtcgttcaagttgtagttgaaaatatgcctgttggtgttggtagttatgtgcattatgatcgtaagttagatggtaagattgcacaaggtgttgtcagcataaatgcttttaaaggtgtaagctttggagaaggatttaaagcagctgaaaagccaggtagtgagattcaagatgaaattctatataatagtgaaattggttattatcgtggatctaatcatttaggtggtttagagggtggtatgtcaaatggtatgccaattattgtaaatggtgtaatgaaacctattcctacgttatataaaccattaaattcagttgatataaatactaaagaagactttaaggcaacaattgaacgttctgatagttgtgctgtacctgcagcaagtatagtgtgtgaacacgttgttgcatttgaaatagcgaaagcattacttgaagagtttcaatcaaaccatattgaacaacttcaacaacaaattgctgaccgcagacaattaaatgttgagttttaa

SEQ ID NO: 8232 - DNA, 531 bp, Staphylococcus aureus
atgcgtacactgtattattttttgataggtattttactattttatatagatactgcaattgggcttcttattccaatgcatataggtaagtttgaacttgtatttgtaccacaccttacatttatgtatattttaatgatggtagtgtatcgtggctttggcgtatcattattgctcagcatatttttaggcgtaatgactgatgtatactttggtagtatttatggagtgtacttatttggctatatattgtttttagcacttatagatcgattctttaaaattttttacaaagatcattcgatgttattcattattatattagccagcaccttattattagaagtctatgtggcattaatatacggtatgttaggattcattcaatttgatattattcattttgtagtctttagattattgccaacattaattatgaattttgtactgttgattatgctttatccgttgattataaagttccttaaaaaaacaaacaatgacattgacatgaaacgtcgtcaatggtaa

SEQ ID NO: 8233 - DNA, 912 bp, Staphylococcus aureus
atggataataatgaaaaagaaaaaagtaaaagtgaactattagttgtaacaggtttatctggagcaggtaaatctttggttattcaatgtttagaagacatgggatatttttgtgtagataatctaccaccagtgttattgcctaaatttgtagagttgatggaacaaggaaatccatccttaagaaaagtggcaattgcaattgatttaagaggtaaggaactatttaattcattagttgcagtagtggataaagttaaaagtgaaagtgacgtcatcattgatgttatgtttttagaagcaagtactgaaaaattaatttcaagatataaagaaacgcgtcgtgcacatcctttgatggaacaaggtaaaagatccttaattaatgcaattaatgatgagcgagagcatttgtctcaaattagaagtatagctaattttgttatagatactacaaagttatcacctaaagaattaaaagaacgcattcgtcgatactatgaagatgaagagtttgaaacttttacaattaatgtcacaagtttcggttttaaacatggaattcagatggatgcagatttagtatttgatgtacgatttttaccaaatccatattatgtagtagatttaagacctttaacaggattagataaagacgtttataattatgttatgaaatggaaagagacggagattttctttgaaaaattaactgatttgttagattttatgatacccgggtataaaaaagaagggaaatctcaattagtaattgccatcggttgtacgggtggacaacatcgatctgtagcattagcagaacgactaggtaattatctaaatgaagtatttgaatataatgtttatgtgcatcatagggacgcacatattgaaagtggcgagaaaaaatga

SEQ ID NO: 8234 - DNA, 996 bp, Staphylococcus aureus
atgagacaaataaaagttgtacttatcggtggtggcactggcttatcagttatggctaggggattaagagaattcccaattgatattacggcgattgtaacagttgctgataatggtgggagtacagggaaaatcagagatgaaatggatataccagcaccaggagacatcagaaatgtgattgcagctttaagtgattctgagtcagttttaagccaactttttcagtatcgctttgaagaaaatcaaattagcggtcactcattaggtaatttattaatcgcaggtatgactaatattacgaatgatttcggacatgccattaaagcattaagtaaaattttaaatattaaaggtagagtcattccatctacaaatacaagtgtgcaattaaatgctgttatggaagatggagaaattgtttttggagaaacaaatattcctaaaaaacataaaaaaattgatcgtgtgtttttagaacctaacgatgtgcaaccaatggaagaagcaatcgatgctttaagggaagcagatttaatcgttcttggaccagggtcattatatacgagcgttatttctaacttatgtgtcaatggtatttcagatgcgttaattcattctgatgcgcctaagctatatgtttctaatgtgatgacgcaacctggggaaacagatggttatagcgtgaaagatcatatcgatgcgattcatagacaagctggacaaccgtttattgattatgtcatttgtagtacacaaactttcaatgctcaagttttgaaaaaatatgaagaaaaacattctaaaccagttgaagttaataaggctgaacttgaaaaagaaagcataaatgtaaaaacatcttcaaatttagttgaaatttctgaaaatcatttagtaagacataatactaaagtgttatcgacaatgatttatgatatagctttagaattaattagtactattcctttcgtaccaagtgataaacgtaaataa

SEQ ID NO: 8235 - DNA, 915 bp, Staphylococcus aureus
atgtcgaatgttttggagttaacaattcctgcatcaacagccaaccttggagttggctttgattctataggtatggctttagataaatttttgcatctgtctgtaaaggaaacatcagggacaaaatgggaatatattttccatgatgatgcatctaagcaattgcctactgacgaaacaaactttatttatcatgtagcacaacaagttgcttctaaatatagtgttgacttgcctattttatgtatcgaaatgagaagtgatattccattggcaagagggttaggttcgtcagcttctgctttagtaggagctatatatatcgcaaattattttggtgatatccaactgtctaaacatgaggtattacaattagcgactgaaatcgaaggacatcctgataatgttgcgccgaccatttatggtggtttaatcgctggattttataatgatgtctcgaaagaaacgtcagttgcacatatcgacataccagacgtggatgtgattgtaacgataccaacttatgaactaaaaacagaagcatcaagacgtgctttaccacaaaaattaacacatagtgaagcggtaaaaagtagtgcaattagtaatacaatgatttgtgcattagcacagcacaattatgaattagcaggtaaactcatgcaacaagatggctttcatgaaccgtatcgtcagcatttaattgctgaatttgatgaagtgaaaacaattgctagtcaacataatgcctatgcaactgtaattagtggtgctggaccaactattttaatatttagtcgtaaagaaaatagtggggaattggttcgctctttaaatagtcaggtagtatcatgccattctgaattggtcgatattaatatcagtggtgttaaagaacgaattgtataccaatag

SEQ ID NO: 8236 - DNA, 804 bp, Staphylococcus aureus
atgacaaattataaagttgtcgttttagatatggatgacacattgctaaattcagataatgtgatatcagaagaaactgcaaattatttaacagcaattcaagatgaaggttattatgttgttttagcatctggtagacctactgaaggtatgattccaactgctagagatttaaaattacctgaacatcatagctatattattagttataacggtagtaaaacgattaacatgactaatgaagaagtagaagtaagtaaatcgattggtaagcaagatttcgatgaaattgtagattattgtcgagacagaggctttttcgttcttacatatcatgatggtcaaattatttacgacagcgaacatgagtatatgaatattgaagcagaattaacaggtttaccgatgaaacgtgttgatgatatcaaagcgtatattcaaggcgatgtacccaaggtcatgggtgtagattatgtagcgaatattacagaagctagaattgatttgaatggtgtgttcaatgataatgtagatgctacgacaagtaagccattcttcttagaatttatggccaaagatgtttcaaaaggtaatgcaattaaagcgttatgtcacaaattgggatattcggtggatcaagtcattgcttttggtgatagtatgaatgataaatcaatgtttgaagtcgcaggtctagctattgctatggggaatgcatcagatgaacttaagcaatatgcagatgaagttacgttggaccataatgaaaatggtattccacatgcgctcaaaaaattgttataa

SEQ ID NO: 8237 - DNA, 1269 bp, Staphylococcus aureus
atgactgcagaaaaaattactcaaggaactgaaggattaaacgtacctaatgaaccaattatcccatttattatcggtgatggaattggaccggatatttggaaggcagcaagccgagttatagatgctgctgttgagaaagcctataatggcgaaaaacgcattgaatggaaagaagtgctagctggccaaaaagcatttgatacaactggtgaatggttacctcaagaaacacttgatacaattaaagaatatttaattgctgttaaaggacctttaacaacaccaattggtggtggtattagatcattaaatgtggctttacgccaagaattagatttatttacttgcttaagaccggtacgttggtttaaaggagtaccatcacctgttaaacgtccacaagatgttgatatggttattttccgtgaaaatactgaagacatttatgctggtattgaatttaaagaaggtacaacagaagttaaaaaggtaattgacttcttacaaaacgaaatgggtgcgacaaacattcgattcccagaaacttcaggtattggtattaaaccagtttctaaagaaggaactgagcgattagttagagcagctatacaatatgctatcgataataaccgtaaatcagttactttagttcataaaggtaatattatgaaatttacagaaggctcatttaagcagtggggttacgatttagcattatctgaatttggtgatcaagtattcacttggcaacaatatgacgaaattgttgaaaatgaaggcagagatgctgctaatgctgctcaagaaaaagctgaaaaagaaggcaagattatcattaaagattctattgctgacattttcttacaacaaattttaactcgtccagctgagcatgatgttgtagcaactatgaacttgaatggtgactatatttcagatgctttagctgcacaagttggtggtattggtattgcgccaggtgcaaacattaattatgaaacaggtcatgctatttttgaagcaacacatggtacagctccaaaatatgcaggtttaaataaagtgaatccatcttcagtaattttaagttctgtattaatgttagaacatttaggatggcaagaagcggcagataagattacagattcaattgaagatacaattgcttcaaaagttgttacttatgactttgcccgtttaatggatggtgctgaagaagtttctacatcagcatttgcagatgaattgattaaaaatttaaaataa

SEQ ID NO: 8238 - DNA, 2610 bp, Staphylococcus aureus
atggatataaataaaatgacatatgctgttcaaagtgctttacaacaagcagttgaactgagtcagcaacataaattacaaaatatagaaattgaggcaattttaagcgctgccttaaatgaaagtgaaagcttatataaaagtattttagaacgagcaaatattgaggtagatcaattaaacaaagcttatgaagacaaactaaacacgtatgcatctgtagaaggtgacaatatacaatatggtcaatatattagccaacaagcaaaccaattgataactaaggctgaatcatacatgaaagaatatgaagatgaatatatttcaatggagcatattttacgttcggcaatggacattgatcaaacaacaaaacattatataaataataaagtagaagttatcaaagaaattattaaaaaagtaagagggggaaatcacgtgacatcacaaaatccagaagttaattacgaagcattagctaaatatggccgcgacttagtagaagaagttagacaaggtaaaatggatcctgttataggaagagatgaagaaattcgaaatacgattcgtattttaagtcgtaaaactaaaaacaaccctgtgctcattggtgaaccaggtgttggtaaaactgcaattgttgaaggattagcgcaacgtatagttaagaaagatgtgccagaatcattattagataaaactgtttttgagttagatttaagcgcattagtagcgggcgctaaatatcgtggtgaatttgaagagagattaaaagcagtcctaaaagaagttaaagagtctgatggtagaattatattatttattgatgaaatccatatgcttgtaggtgctggtaaaacagatggtgccatggatgcaggcaacatgctaaaaccaatgttagcacgaggagagttacattgtattggtgcaacaactttaaatgaatatcgagaatatattgaaaaagattcggcattagagcgtcgtttccaaaaagtagcagttagtgagcctgatgttgaagatacaatttcaattttacgtggtttaaaagaacgatatgaagtgtatcatggtgtgcgtattcaagatagagccttagttgctgccgctgaattgtctgatcgttacatcactgatcgttttttaccagataaagcgattgatttagttgaccaagcatgtgcaacaattcgtacggaaatgggatcaaatccaactgaattggatcaagttaatagacgtgtcatgcaattagaaattgaagaaagcgcacttaaaaatgaatctgacaatgcgagcaaacagagattacaagaactacaagaagagcttgccaatgaaaaagagaaacaagcagcacttcaatctcgtgtagaatcagaaaaagaaaaaatagcaaatttacaagaaaaacgtgcgcaactagatgaaagtagacaagcgttggaagatgcacaaacaaataacaatttagaaaaagctgctgaactacaatatggaacaattcctcaattggaaaaagaacttagagaattagaggataatttccaagatgagcaaggtgaagatacagatcgaatgattcgtgaagttgtaacagacgaagaaattggcgatattgtcagccaatggacaggcataccagtttcaaaattagttgaaacagaacgtgaaaaattacttcacttaagtgacatcttgcataaacgtgttgtaggtcaagataaagcggttgacctggtttcagatgcagtagttagagcaagagcaggtattaaagatccaaacagacctattggtagtttcttattcctaggtccaactggagtaggtaaaactgaattagctaaatcattagctgcatcattatttgattctgaaaaacatatgattcgtattgatatgagtgaatatatggaaaaacatgcagtatcaagattgataggggcacctccaggatatattggacatgatgaagggggtcaattaactgaagcggttcgtcgtaatccatactcagttatcttattagatgaggttgaaaaagcgcatactgacgtctttaatgtattattgcaaattttagatgaaggccgtttaactgattctaaaggacgtagcgttgattttaaaaatactattattattatgacaagtaatattggatctcaagttttattagaaaacgtaaaagagactggtgaaattacagaatcaacagaaaaagctgttatgacaaatttaaatgcatatttcaaaccagaaattttgaatcgtatggatgacatcgtattatttaaacctctatctattgatgacatgagtatgattgtagacaaaatattaacgcaattaaatataagattattagaacagcgaatctcaattgaagtttctgatgatgctaaagcttggctaggtcaagaagcttatgaacctcaatacggtgcaagaccattaaaacgttttgtacaacgccaaattgaaacaccattagcacgtatgatgattaaagagggattcccagaaggtacaacgattaaagttaatttaaattcagacaataacttaacgtttaatgttgaaaaaattcatgaataa

SEQ ID NO: 8239 - DNA, 903 bp, Staphylococcus aureus
atgaaattcttatcattcaagtataatgacaaaacttcatatggcgttaaagtaaaacgcgaagatgctgtatgggatttaacacaagtatttgctgactttgcagaaggagatttccatcctaaaacattgttagctggtttacaacaaaatcatactttagattttcaagaacaagtacgtaaagcagttgtagcagcagaagatagcggcaaagctgaagactataaaatttcatttaatgacattgaattcttaccaccagtaacacctccgaataatgtgattgcttttggtagaaattacaaagatcatgcgaacgaattaaatcatgaagtagaaaaattatatgtatttacaaaagcagcgtcatctttaacaggagataatgcaacaattccaaatcataaagatattactgatcaattagattatgaaggtgaattaggtattgttattggtaagtctggtgaaaagattccaaaagcattagctttagattatgtttacggctatacaattattaacgatatcactgatcgcaaagcacaaagtgaacaagatcaagcatttttatcaaaaagtttaactggcggttgcccaatgggtccttatatcgttactaaagacgaactaccattacctgaaaatgtaaatattgttacaaaagttaacaatgaaattagacaagatggtaacactggcgaaatgattcttaaaattgatgaattaatagaagaaatttcaaaatatgttgcactacatccgggagatattattgcaactggtacaccagcaggcgttggtgcaggtatgcaaccacctaaatttttacaaccaggtgatgaagttaaagtgactattgataatattggaacgctgacaacttatatcgctaaataa

SEQ ID NO: 8240 - DNA, 942 bp, Staphylococcus aureus
atgagaaatatagagaatctaaatcccggagattcagttgatcactttttcttagtgcataaagctacacagggtgtaacagcacaaggtaaagattatatgacattacatttgcaagataaaagtggtgaaattgaagcgaaattttggacggctacaaaaaatgatatggcaacaatcaagcctgaagaaattgtacatgttaaaggtgacatcataaactatcgcggaaataaacagatgaaagtcaaccaaattagactagcgacaactgaagatcaattaaaaacagaacaatttgtagatggtgcacctttatcaccggcagaaatacaagaagagatttctcattatttgctagatattgaaaatgctaatttacaacgtatcacacgtcatttattgaaaaaatatcaagaacgattttacacatatccagctgctagttctcatcatcataactttgcgagtggcttaagctatcatgtattgacgatgttacgtattgcaaaatcaatttgtgacatttatccattgttaaacaaaagtttgttatatagtggtattattttgcatgatattggtaaagttagagaattgagtggtcctgttgcgacgtcgtatacagtcgaaggtaacttattaggacacatctcgattgcgagtgatgaagtagttgaagcagctcgtgaattgaacattgaaggagaagaaatcatgttgttaagacatatgattttatctcatcatggtaagttagagtatggttcgccaaaactgccatacttaaaagaagcagaaattttatgctatatcgataacatcgatgctagaatgaatatgtttgaaaaggcttataaaaaaactgacaagggtcagtttacagataaaatatttggtcttgaaaatcgtagattctacaatcctgaatcactcgattaa

SEQ ID NO: 8241 - DNA, 480 bp, Staphylococcus aureus
atgaaaatcaccattttagctgtagggaaactaaaagagaaatattggaagcaagccatagcagaatatgaaaaacgtttaggcccatacaccaagatagacatcatagaagttccagacgaaaaagcaccagaaaatatgagcgacaaagaaattgagcaagtaaaagaaaaagaaggccaacgaatactagccaaaattaaaccacaatccacagtcattacattagaaatacaaggaaagatgctatcttccgaaggattggcccaagaattgaaccaacgcatgacccaagggcaaagcgactttgtattcgtcattggcggatcaaacggcctgcacaaggacgtcttacaacgcagtaactacgcactatcattcagcaaaatgacattcccacatcaaatgatgcgggttgtgttaattgagcaagtgtatagagcatttaagattatgcgtggagaagcatatcataaatga

SEQ ID NO: 8242 - DNA, 399 bp, Staphylococcus aureus
ttgagtggtttagttaatgcagaccaaactgttattgatgcattggatattcgtttagaacctaaattcacttcagatattgtaccagttggtttgaataaagatggctctttgagtaaacgaggcagccaagtggcagatgaagcaacgatttataaattcatccaacataacaaagagaattttatagaaacagcttcaaatattatggatggacatactgaagttgcaccattaaagtacaaacaaaaattgccatgtgctttttgtagttatcaatcggtatgtcatgtagatggcatgattgatagtaagcgatatcgaactgtagatgaaacaataaatccaattgaagcaattcaaaatattaacattaatgatgaatttgggggtgagcaa

SEQ ID NO: 8243 - DNA, 900 bp, Staphylococcus aureus
atgggacttgtaattgaacatgttacgaaacgttttggcaagatgacggcagtaaatgatatttcattagagttagaatcaggcaaaatgttaggttttctaggaagaaatggtgcaggtaaaacaacgacatttcgtatgtttttaggcttaagtgaaccaactgaaggacacattacgtataacggtaaaaaactagataaaacaatgtacaatcgtattggttatttaccggaagaacgcggtttacatgggaaattgacagttgaagaagaattgaaatatttggcaactttaaagggaatgtcaaaaacagaaatacaacagcaaatatcgtattggcttgagcgttttgatattactgaaaaccgcaaaaaacgaattgatagtctatcaaaagggaatcaacaaaaaattcagctgttagcaagtatgttacataaaccagaattactaatattagatgagcctttcagtggtctagacccagttaatgttgagttattaaaagaagcagttaaagacttaaatgattggggcagtacaatcgtttatagttctcaccgtatggagcatgttgaagaattatgtgatgatgtttgtattttagataaaggtcaacttgttgtttctggtgatatcaatcatgtacgtgcatctaatggtaacaagaaagttgtcattgaatcagaaacaacactaccagatttaacaaacattagaggcatcattcatagtgaaaacatgaagcaaggtcttcagttgacgattgagaatgaagacgtagccaaagatatttatcaagttgtggcacatcaaggttatgttaaacgattccaagttgtagaaccatcattacaagatatattcattgagaaggttggtggcaaggatgcataa

SEQ ID NO: 8244 - DNA, 1536 bp, Staphylococcus aureus
ataaacaagggggtaacatatatgactttatatttagatggtgaaacactaacaattgaggatattaaatcatttttacaacaacaatcaaagattgaaattattgatgatgcgttagaacgtgtcaaaaaaagtagagcggtagttgaacgtattattgaaaatgaggaaacggtttacggtatcactacaggttttgggttatttagtgatgtacgtatagacccgacgcaatataatgaattacaagtgaatctgatacgctcacatgcctgtggactaggtgagccattttcaaaagaagtagcattagtcatgatgattttacgattgaatacattattaaaaggtcattcaggtgccactttagaattagtgagacaattacaattttttataaatgaacgtattataccgataatcccacaacaaggctctctcggtgcatcaggagatttagcgccattatcacatttagcattagcattaattggtgaagggaaagtattgtacagaggggaagaaaaggatagtgacgatgtattaagagaattaaatagacaacctttgaaccttcaggctaaagagggtttagcattgattaatggtacgcaagctatgacagctcaaggtgtcattagttatatagaagcagaagatttaggttaccaatctgaatggattgctgcattaacgcatcagtctcttaatggcattatagatgcatatcgacatgatgtgcactctgttcgtaattttcaagaacagattaatgtggcagcgcgtatgcgtgattggttagaaggatcaacattaacgacgcgacaagcagaaatacgtgtacaagatgcatatacgttgcgttgtataccacaaatccatggcgcgagttttcaagtattcaattatgttaaacagcaattagaatttgaaatgaatgcggctaatgataatccacttatatttgaggaagcaaatgaaacgtttgttatttcaggtggtaacttccatggacaacctattgcttttgcattagatcatcttaaattaggtgtaagtgaattagcaaacgtatcggaacgtcgtctagagcgactagtaaatcctcaattaaatggtgatttaccagcatttcttagtccagagccaggattgcaaagtggcgcgatgattatgcaatatgctgctgcaagtctcgtttctgaaaataaaactttagcgcatccagcgagtgttgattctatcacttcatctgcgaaccaagaagatcacgtatctatgggaactacagctgctagacatggttatcaaattattgaaaatgcaagacgtgtgttggcaatcgaatgtgttattgcattacaagcagcagagttgaaaggtgtcgaaggattatcaccaaaaacacgtcgtaaatatgaggagtttcgaagtatcgtgccatccattacacatgaccgtcaatttcataaagatattgaagcggttgcacagtatttaaagcaatcaatttatcaaacgactgcatgtcactaa

SEQ ID NO: 8245 - DNA, 1056 bp, Staphylococcus aureus
ttgacaggcttttcagtgtatttaggacaacctttagatgaagcgtatattaagcgaatgattaaacaaggttaccaaatgatttttacatctgtacaaataccagaagaagatgacgagacaaaatatcattatttcacaaaactactcaatttattaaaatatgaacaagtgacttacctcatagatgctaatccatctattttaacaccatctttttatgagcatcttcgacaatatgatgcacaatttatgattcgtatcgatcatagtacatcaattgaggcaatcgaagcgataatggcacagggtttaaagtgctgtttgaatgcaagtattatttcccgggaattgttaacaagcttacatcaacaattgaatgattttacattactttcattttgtcataactattatccaagaccagatacgggattatctgttgacttggtcaataagaaaaatgaactcatttatcaatttaatccaaaggcacaaatatatggttttattgtagggagtggtttgcgaggtcctttgcataaaggcttgccaacaattgaagcaacgagacatagtcatcctgtcgttgcagctaaattattacaagaaactggtgtatctgaagtgttagttggagactcattgattgaaatgaggcaggcaaaacaacttatagatttttgcaagcataggcatttcacgttatgtattgaagaagtgtttgatacgacagtgacttaccttttcgatatgtgtcataaagtacgcccggataatccggaaaatgtcattcgttcggaaacgtcaagacaaatatgtccacattcgattcaaccacagtttacgacgcaacgacgcattggttcagtaaccgttgataatttgaataacggacgttatcaaggcgaaatgcaaattgtgagacaaacgcttagtgcacatgacaatgtgaatgttgttgcacaaattattaaagaagacttaccactgttaagttgtatcgagccgaatgatacatttgattttcaaaaaactagggagtgtaagaagtga

SEQ ID NO: 8246 - DNA, 861 bp, Staphylococcus aureus
gtgtattacatcgcaatcgatattggaggcactcaaattaaatcggcagttattgataagcaattgaatatgtttgactatcaacaaatatcaacgccggacaacaaaagtgagcttattactgacaaagtatatgagattgtaacaggatatatgaagcaatatcagttgatccaacctgtcataggtatttcatcagcaggcgttgttgatgaacaaaaaggcgaaattggatacgcagggccaaccattccgaattataaaggtactaattttaagcgattattaaaatcactgtctccttatgtcaaagtaaaaaatgatgtaaacgctgcattactaggcgaattgaaattacatcaatatcaagcagaacggatcttttgtatgacgcttggtacaggcattgggggtgcgtacaagaataatcaaggtcatattgataatggtgagcttcataaggcaaatgaagttgggtatttattgtatcgtccaactgaaaatacaacgtttgagcaacgtgctgcaacgagtgcattgaaaaagcgcatgattgacggaggatttacgagaagcacacatgtgccagtattgtttgaagcagctgaagaaggtgatgatattgcaaaacaaatattgaatgagtgggcagaagatgtagcagaagggattgcccaaatacaagtcatgtatgatccagggcttatattaattggtggcggtatatctgaacaaggagacaatctcattaaatatatcgagccgaaagttgcacactatttaccaaaagactatgtttatgcaccaatacaaacgactaagagtaaaaatgatgcagcattatatggctgtttgcaatga

SEQ ID NO: 8247 - DNA, 594 bp, Staphylococcus aureus
atggaacatatttttcgtgaaggacaaaaaggtgcaccaacgctaatattgttgcatggtacaggtggcgatgaattcgatttattgccattaggcgaagcattgaatgaaaattatcacttgttaagtattagaggacaagtttcagaaaatgggatgaaccggtatttcaaacgtcttggtgaaggtgtttatgatgaagaagatttggaatttcgtggacaagaattgttagcgttcattaaagaagctgctgaacgttatgaatttgatattgaaaaagcagtacttgttggattttcaaatggatcaaatatagcgattaacttaatgttgcgttcggaagcaccatttaaaaaagcattgttatatgcaccgttatacccagttgaagtaacgtcaacaaaggatttatcagatgtaagtgtgttgctttctatggggaaacatgatccaattgtgccattagctgcaagtgaacaagtcattaacttgtttaagacacgtggggcagtagtcgaagaagtttgggtgaatggtcatgaaattacagaaactggattaacggctggtcaacaaatacttgggaaataa

SEQ ID NO: 8248 - DNA, 294 bp, Staphylococcus aureus
atgactgaacaagataatgcacatcattctgaacaaataaaaacgaatcttaaatcacgtttaaatcgaattgaaggacaagtgagagcgattaatcgcatgattgaagaagatgtctattgtgatgatgtccttacgcaaataagagcgacacgttcggcgttaaacagtgttgcgataaagttattagaacaacatatgaaaagttgtattatgaataaagttaatcaaggtgctcaggaagaggcaatggaagagttattagtgacttttcaaaaattgattaaagactaa

SEQ ID NO: 8249 - DNA, 795 bp, Staphylococcus aureus
atgaacgtttcggtaaacattaaaaatgtaacaaaagaatatcgtatttatcgtacaaataaagaacgtatgaaagatgcgctcattcccaaacataaaaacaaaacatttttcgctttagatgacattagtttaaaagcatatgaaggtgacgtcatagggcttgttggcatcaatggttccggcaaatcaacgttgagcaatatcattggcggttctttgtcgcctactgttggcaaagtggatcgtaatggtgaagtcagcgttatcgcaattagtgctggcttgagtggacaacttacagggattgaaaatatcgaatttaaaatgttatgtatgggctttaagcgaaaagaaattaaagcgatgacacctaagattattgaatttagtgaacttggtgagtttatttatcaaccagttaaaaagtattcaagtggtatgcgtgcaaaacttggtttttcaattaatatcacagttaatccagatatcttagtcattgacgaagctttatctgtaggtgaccaaacttttgcacaaaaatgtttagataaaatttacgagtttaaagagcaaaacaaaaccatctttttcgttagtcataacttaggccaagtgagacaattttgtactaagattgcttggattgaaggcggaaagttaaaagattacggtgaacttgatgatgtattacctaaatatgaagctttccttaacgattttaaaaagaaatccaaagccgaacaaaaagaatttagaaacaaactcgatgaggcccgcttcgttattaaataa

SEQ ID NO: 8250 - DNA, 459 bp, Staphylococcus aureus
atgtacaaatctaaaatactgttgaaatatatttttagtgaagaatcagaagttaaagatttaactgaagaaaaatataatcaagattacgaagcattaacatttagctttaaagaggaaacatatcaaagtaggttagctaagaaaacaccgactaaagcagggtattttgttacatgttggacgaaagacgagaacaattgtaatcaaccatactcgaaagaggcatttgcagattacttaatgattatagttattgatgaagaattaagcggttattttttatttcctagggaattattggtagaaaaaggtatcttaactacatttgaacataaaggtaagatggcttttagagtttatcctaagtggtgtaatcaattgaataaaacagcagggcaaacacaaaagtggcaatgtaaatattttttgaatactaataaaaagtcatatggttga

SEQ ID NO: 8251 - DNA, 990 bp, Staphylococcus aureus
atgacaaagttagcagttgtgggtgcaacaggattagtaggcacaaaaatgttggagacattaaatcgtaaaaatattcctttcgatgaattagtattattttcatcagcacgttctgcagggcaagaagttgaatttcaagaaaaaacatatacagtacaagaattaactgatgctcgtgctagtgaacatttcgattatgtattaatgagtgctggtggcggtacaagcgaacactttgccccactctttgaaaaagctggtgcaatcgttatagacaattcaagtcaatggcgtatggcagaagatattgatttaatcgttccggaagtcaatgaacctacatttacaagaggtatcattgccaatccaaactgctctacgattcaatctgttgtgccattaaaagtattgcaagatgcttatggtttaaaacgagtggcatatacaacatatcaagctgtatcaggttcagggatgaaaggtaagaaagatttagctgaaggtgtaaatggtaaagcaccagaagcatatccacatccaatttataataatgtgttaccgcatattgatgtgtttttagaaaacggatatacaaaagaagaacaaaaaatgattgatgagacgagaaaaattttaaatgcgccagacttaaaagtaacagcaacatgcgcacgtgtgcctgttcaagatagtcatagtgttgaaattgatgtaacgcttgacaaagaaacgacagcagaagatattaaagcgttatttgatcaagatgaccgcgttgttttagtagacaatccagagaacaatgaatatccaatggcaatcaattccactaataaagatgaagtgtttgttggccgtatacgtagagatgattcattagaaaatactttccatgtatggtgtacatcagacaatttattaaaaggtgctgcattaaatgctgtacaagtattggaacaagttatgcgtttaaaaggagcgaattaa

SEQ ID NO: 8252 - DNA, 1263 bp, Staphylococcus aureus
atgacgaatgtattaattgaagatttaaaatggagaggtcttatttatcaacaaactgatgaacaaggtattgaagatttattaaataaagaacaagtgacgttatactgcggtgccgatccaacggcagatagtttacatattggtcacttactaccattcttaacattaagacgttttcaagaacatggacatcgtcctatcgttttaattggcggtggtacaggtatgattggtgatccatcaggtaaatcagaagaacgtgtgctacaaacagaagaacaagtagataaaaatatcgaaggtattagtaagcaaatgcacaatatttttgaatttggaacagaccatggtgcagtgcttgttaataatagagactggttaggacaaatctcattaattagctttttacgtgactatggtaaacacgtcggcgttaattacatgttaggtaaagattcaatccaaagtcgtttagaacatggtatttcatatacagaattcacatacacgattttacaagctattgatttcggtcatttgaatagagaattgaattgtaagattcaagtaggtggatcagatcaatggggtaatatcacaagtggtattgaattaatgcgtcgtatgtatggtcaaacagacgcatacggtttaactattccgcttgtaactaaatcagatggtaagaaatttggtaagtctgagtcaggtgctgtttggttagatgctgaaaaaacaagtccttatgaattttatcaattctggattaatcaatcagacgaagatgtaattaaattcttaaaatactttactttcttaggaaaagaagaaattgatcgcttagaacaatctaaaaatgaagcaccgcatttacgtgaagctcaaaaaacattagctgaagaagtaactaaatttattcatggtgaagatgcattaaatgatgcaatccgtatttcacaagcattatttagtggtgatttaaaatcattatcagcgaaagaattaaaagatggatttaaagatgtgcctcaagtgacattatcaaatgacacaacaaatatcgttgaagtccttattgaaacaggcatttctccttctaaacgacaagcacgtgaagatgttaacaatggtgcgatttatattaatggtgagagacaacaagatgttaattatgctttagcaccagaagataaaattgatggcgaatttacgattattcgtcgcggtaagaaaaaatacttcatggttaactatcaataa

SEQ ID NO: 8253 - DNA, 999 bp, Staphylococcus aureus
atgaaaatgaaaaaattagtcaaatcatcagttgcttcatcaattgcactgcttttgctatcgaatacagttgatgcagctcaacatatcacacctgtaagcgagaaaaaagtagatgacaaaatcactttatacaaaacaacagcaacatctgataatgataaattgaatatttctcaaattttaacgtttaatttcattaaggataaaagttatgacaaagatacattagtacttaaggcagccggaaacattaattcaggttataaaaagcctaatccaaaagattacaattactcacagttttattggggcggtaagtataatgtttcggttagttcagaatcaaatgatgctgtaaatgttgttgactatgcacctaaaaatcaaaatgaagaattccaagttcaacaaacattaggttattcttatggcggagatattaatatatctaatggcttatcaggtggattgaatggatcaaaatcattttcagaaacaataaattataaacaagaaagttacagaactacgattgatagaaaaacaaatcataaatcaattggctggggtgttgaggcgcacaaaattatgaataatggttggggaccatatggtagagatagttatgacccaacatatggtaatgaactgtttttaggtggtagacaaagtagttcaaatgctggacaaaatttcttgccaacacatcaaatgcctttattggcgcgtggtaactttaacccagaatttataagcgtactttctcataaacaaaatgatacaaaaaaatctaaaatcaaagtaacttaccaaagagaaatggatagatatactaatcaatggaatcgactacactggattggtaataactacaaaaatcaaaatacagtaacgtttacatctacttatgaagttgactggcaaaaccatactgttaaattaatcggtacggatctaaagaaactaatcctggagtatagaattgtatatgattaa

SEQ ID NO: 8254 - DNA, 366 bp, Staphylococcus aureus
atgacaacaacaccatatgacatcattggtaaagaagcgttatacgatatgattgattatttttacacccttgtagaaaaagatgaacgacttaatcacctgtttccaggagattttgcagaaacaagtcgtaaacaaaaacaatttttaacacagtttttgggcggtccaaacatttataccgaagaacacggacatcctatgctaagaaaaagacatatggattttacaatcactgaatttgaaagagatgcatggttagaaaatatgcagacagcaattaatcgcgctgcgtttccacaaggtgttggagattatttatttgagcgcttaagattaactgctaatcatatggtgaattcctaa

SEQ ID NO: 8255 - DNA, 555 bp, Staphylococcus aureus
ataaagcagctgagttacaaggtcgtgtcgaagacagaaaagatttatacatacacatgctataatgaaatcatacctaaaagagatattattacagaatcaatgatttgtgactgtattcaaaatgcaggtattgatttagaagtatttaaagacgacttacaaaaaagtaaactaaccgaaagcttgaaaattgatttgcatattgcaagagaaatggaaatcgaacaagccccttctctcgttttctttagtgaagatgttcatgaagaaggtttaaaagtcgaaggattatacccatatcacatctatacttatataattaatgaattgatgggtaaacctatcgaaaagaatcttcctcctaaattagaaacttatatacagcaacaacaacttgtaacgatggaagaattacttactatttatgaatggccagaaaaacttttaaacaaagagttaaagaagttagccattcaacaaaaaattgaaaaacttaaatatccagacggcgatttctggaaatctaaaatgcctaaaatcaaatcaaaataa

SEQ ID NO: 8256 - DNA, 327 bp, Staphylococcus aureus
ataaacatggctggagaattacgaataatggaaaataagagtcgtgaagatattaatctatcacctgtaagtaaaatcgaaatttattcatttttcgatccatttagctccgattgcttcaaattatcagcaatcttatccaaattaagaattgaatataatcaatatatacgtatcagacatatattaaatccttcgttaaaagtattaacgaaatgccaagctcaaagtacatccaactttgataacatcgccctagcttataaagcagctgagttacaaggtcgtgtcgaagacagaaaagatttatacatacacatgctataa

SEQ ID NO: 8257 - DNA, 1005 bp, Staphylococcus aureus
atgacaacagtttattatgatcaagacgtaaaaacggacgctttacaaggcaaaaaaattgcagtagtaggttatggatcacaaggccacgcgcatgcacaaaacttaaaagacaatggatatgatgtagtcatcggtattcgcccaggtcgttcttttgacaaggctaaagaagatggatttgatgtgttccctgttgcagaagcagttaagcaagctgatgtaattatggtgctattacctgatgaaattcaaggtgatgtatacaaaaacgaaattgaaccaaatttagaaaaacataatgcgcttgcatttgctcatggctttaacattcattttggtgttattcaaccaccagctgatgttgatgtatttttagtagctcctaaaggaccgggtcatttagttagacgtacatttgttgaaggttctgctgtaccatcactatttggtattcaacaagacgcttcaggtcaagcacgtaatattgctttaagttatgcaaaaggtattggtgcaactcgtgcaggtgttattgaaacaacatttaaagaagaaactgagacagatttatttggtgaacaagcagtactttgcggtggtgtatcgaaattaattcaaagtggctttgaaacattagtagaagcgggttatcaaccagaattagcttattttgaagtattacatgaaatgaaattaatcgttgatttgatgtatgaaggcggtatggaaaatgtacgttactcaatttcaaatactgctgaatttggtgactatgtttcaggaccacgtgttatcacaccagatgttaaagaaaatatgaaagctgtattaactgatatccaaaatggtaacttcagtaatcgctttatcgaagacaataaaaatggattcaaagaattttataaattacgcgaagaacaacatggtcatcaaattgaaaaagttggtcgtgaattacgcgaaatgatgccttttattaaatctaaaagcattgaaaaataa

SEQ ID NO: 8258 - DNA, 303 bp, Staphylococcus aureus
ttgcattttacacaacgagagcaagacaaattaatgattgtagtggcggcggaagttgcacgtcgtcgtaaagcacgtggtttgaaactaaatcatcctgaggcattagctttaatcagcgatgaattattagaaggtgcacgcgatggtaagaccgttgcagagttaatgagttatggtagacaaattctaaacaaagaagatgtcatggatggtgtcgaacacatgattacagatatcgaaatcgaggctacgttccccgatggtactaagttaatcacagtacatcaccctattgtttaa

SEQ ID NO: 8259 - DNA, 1716 bp, Staphylococcus aureus
atgagctttaaaatgacgcaaaatcaatatacgagcttatacggtccaactgttggagattctattcgtttaggtgatacgaatctatttgctcaaatagaaaaagactatgcggtttatggtgaagaagctacttttggtggtggtaaatctattagagacggtatggcgcaaaatcctcgtgtaacacgtgatgacgtgaacgttgcagaccttgtcatttctaatgccgttattatcgattacgataaagtggttaaagctgatataggcattaaaaatggttatattttcgccataggtaatgccggcaacccagatataatggataatgtcgacattattataggttcaacaacagatatcattgccgctgaaggtaaaatcgtcactgctggtggtattgatactcatgttcattttattaatcctgaacaagcagaggtcgcattagaaagtggtattacgactcatattggtggtggtactggtgcttcagaaggttctaaagcaacaactgtaactccaggtccatggcatattcatagaatgttagaagctgccgaaggtttaccgattaatgtcggttttacaggtaaaggacaagcaacaaatccaactgcactcattgaacaaatcaatgccggagcaattggattaaaagtacatgaagactggggtgcaacaccatctgctttgagtcatgcattagatgttgctgatgaatttgatgttcaaattgcattacatgcagatactttaaatgaagcaggatttatggaagacacaatggctgctgttaaagaccgtgtacttcatatgtaccatactgaaggtgctggtggcggtcatgcgcctgatttaattaaatccgctgcattttcaaatattttaccttcatctacaaatccaactttgccttatacacataatactgtagatgaacatttagatatggtaatgattactcaccatttaaatgcggctattcctgaagatatcgcattcgcagattcacgtattcgtaaagaaacgattgcagcagaagatgttctgcaagatatgggtgtattcagtatgattagttccgattcacaagcaatgggccgtgtaggtgaagtaattacacgaacatggcaagtagcacatcgcatgaaagaacaacgtggtcctttagatggtgattttgaacataatgataataatcgcatcaaacgttatatcgctaaatatacaattaacccagcaattacacatggtatttctgaatatgtaggatctatcgagccgggcaaactagctgacattgtcttatgggacccaattttctttggggttaaacctgaattagttgtaaagggcggattaattaactctgccgtaaatggcgatgcaaatggttctatacctacatctgaaccgatgaagtaccgtaaaatgtatggtcaatacggcggaaaccttacaagtacgtcaatgacattcgtgtctaaaactgcttatgaaaatggtatcaatcgtgcattaaatttaaaacgcatggtgcgtccagttaaaaatattagacaattatctaaagcagatatgaaaaataacagtgcaacacctaaattagacgttgatccacaaacatatgaagtatatgtagatggagaaaaaattacaagtaatgcagcaactgagttaccattaactcaaagatacttcttattctag

SEQ ID NO: 8260 - DNA, 1401 bp, Staphylococcus aureus
atggacacatcaaaacaatttagaggtgacaaccgattgcttttgggtatcgttttaggggttattaccttttggctattcgcgcagtcacttgttaatcttgttgtcccattacaatcaacatatagtagtgacgttggaacgataaatatcgctgttagcttatctgccttatttgctggtttgtttatcgtaggtgctggtgatgttgctgataaatttggtcgcgtcaaaattacttatgtaggattgatattaaatgttgtaggttcattactcatcatcattacacctttgccagcatttttaattataggtagaataattcaaggtttgtctgcagcatgtattatgccatccacacttgctattattaacgaatattatattggtacaagaagacaacgtgccttaagctattggtctattggttcttggggtggtagtggtatttgtacgttgtttggtggcttaatggctacatatataggttggcgttcaatatttgttgtttcaattctattaacattattagcaatgtacttaatcaaacatgcacctgagactaaagcagaaccaatcaaaggtatgaaagcagaagctaaaaagtttgacgttattggtttagtcattttagtagtgacgatgttaagtttaaatgtaatcatcacacagacgtctcattttggtttagtttcaccgttaattctaggtttaattgttgtgtttatctgttcattagttggttttgtatattacgaaaataaaataaagcatccacttgttgatttttcaatttttaaaaatagaggatacagtggtgcaactatttcaaacttcttattaaatggtgtagcaggtggtgcacttatcgttattaacacgtattatcaacaacaattaggatttaattcttcgcaaacgggttatatttcattaacgtatttaatagcagtgttgtcaatgattcgtgtaggtgaaaagattttatctcaacatggtccgaagcgcccactattactaggaagtggctttacagtgattgggttaatcttattgtcgttaacatttttaccagaagtgtggtatatcatatctagtatagttggatatttattgtttggtactggtttaggattatatgctacaccatcaactgatacagcagttgctagtgcgccagatgataagtcgggtgttgcttcaggcgtatataaaatggcgtcatcattaggaaatgcatttggagtagcagtatctggtacagtttatactgtgttagcagctaatttaaatttgaacttaggtggtttcacaggtatgatgtttaatgccttgctagcaattgttgcatttttagtcattttactattagttcctaaaaatcaaacgaatttgtaa

SEQ ID NO: 8261 - DNA, 1170 bp, Staphylococcus aureus
atgattaaaaatacaattaaaaaattgatagaacatagtatatatacgacttttaaattactatcaaaattgccaaacaagaatctaatttattttgaaagctttcatggtaaacaatacagcgacaaccccaaagcattatatgaatacttaactgaacatagcgatgcccaattaatatggggtgtgaaaaaaggatatgaacacatattccaacagtacaatgtaccatatgttacaaagttttcaatgaaatggtttttagcgatgccaagagcgaaagcgtggatgattaacacacgtacaccagattggttatataaatcaccgcgaacgacgtacttacaaacatggcatggcacgccattaaaaaagattggtttggatattagtaacgttaaaatgctaggaacaaatactcaaaattaccaagatggctttaaaaaagaaagccaacggtgggattatctagtgtcacctaatccatattcgacatcgatatttcaacatgcatttcatgttagtcgagataagattttggaaacaggttatccaagaaatgataaattatcacataaacgcaatgatactgaatatattaatggtattaagacaagattaaatattccattagataaaaaagtgattatgtacgcgccaacttggcgtgacgatgaagcgattcgagaaggttcatatcaatttaatgttaactttgatatagaagctttgcgtcaagcgctggatgatgattatgttattttattacgcatgcattatttagttgtgacacgtattgatgaacatgatgattttgtgaaagacgtttcagattatgaagacatttcggatttatacttaatcagcgatgcgttagttaccgactactcatctgtcatgttcgacttcggtgtattaaagcgtccgcaaattttctatgcatatgacttagataaatatggcgatgagcttagaggtttttacatggattataaaaaagagttgccaggtccaattgttgaaaatcaaacagcactcattgatgcattaaaacaaatcgatgagactgcaaatgagtatattgaagcacgaacggtattttatcaaaaattctgttcattagaagatggacaagcgtcacaacgaatttgccaaacgatttttaagtga

SEQ ID NO: 8262 - DNA, 2163 bp, Staphylococcus aureus
atgaataaaattaatgatagagacttaacagaattgagtagttactgggtttatcaagacatcaataaagataatgattttacagttaacggaaaaagatttaagcaggttgatgaatataatgataatggaaataaaaataaaaaaggtgcctcagatttaaaaatttatgaattgttggatgaaaaaggaaaaccaactggtgaacaaaccatgatttatcaaggaacatctaatgaggcaataaaccctaataatccattaaaatctttagatatcggagatgattggttacaaaatgcgaaattaatggataatagtaataagtcaacggattatcttaagcaatcagacgaatttgcagatttatatagagacaaactaaatgacgctaataaattaagtaagtataactttacacaaaaatatggtgttagtccaaataattacaaaaacaaaaccattgtggcggatggcggtaattcggaaggcggtgcaggagcaaaatatcaaggagcgaaacatccaaatgaaaaagttgttgctactgacccagcaatggtaccttatgctgcttggcagaaatttgctagaccacgctttgataatatgattagttttaatagtaccaacgatttattaacatggttacaagatccattcatcaaagatatgccaggaaaacgcgttaacattagtgatggtgtgcccaggttagatgctttaatagacagccatgtaggttataaaaggaagttaaatagaaaagacaacacatacgatactgtaccactaatcaaaattaagtcggtaaaagatacagaaattaaaaatggaaaaaaagtaaaaaagactattaacataacattagatatggatgggcgaattccgataaatgtttggacaggggattcgattgcacgttctggaagaggaactttaattaaacttaatttagaaaatcttgatgcgttgagtaaactgattactggtgaaactagtggtatgttagcagaatgcgtaatctttttaaatgaaagttttaacatctcagaaaatgaaaataaaaattttgcagatagaaagcaacaattatcagaaggatttaaggataagattaacttatttcaattagaagaaatggaaagaactttaattagtaaaataaactcacttgaagaagttgcagatgaaacaatagaaagtattagtgctgttaaacacttattacctgattttgcattggatgcattaaaagaaagaattaatgagttgtttaaaggtataaaatcttttatagaaaaagtgtatgatagtatagataatgaaattttagaaattttcaaaaatatagatcacgacttcagagatggagtatctgaagaaatgatgaaacatttgaaagtagtgaaacagaatatagagcgaataaaaaatcaaaatgatatttatggtaggcaaattgcagaaattagaagtattatgaaacaacaagatgcaacaattttagatgggaatttccaaattaattgtagcggcgaaaatatggtacagggtctagttataccttctaattatttaggaagaaaaatgaaaatattaaaagaccatatcgatgatggtattaaaaaaatagcagactatgttcaaagtatatatgatgaatatgcatcgaaaattgttgatgtaataaaatatttgattaatacaattcccaaaatacgtaagaatttaagacatgcaattgaaatgttaaatgtaaaaaagaaagaatttttgtccctgattcctaatgtaacttgtaattatattaaaactaaattagaagaattagataatactttaggcaaatgggagccatttcttaatgatttaaaagcagtgtcaccaattttagataaccatttagatgatattgttaagaacatgaagcctttgattgtacagatgttatttgaaccatcacattatgatgatatgtttattttaaacacacaagctcatgcacgtcttgatcaaatggcacaacagtttgaagttgtttgtaatggcttgaacgaaaatgaaggacaagcaattcaaacgatggatcaatctgcctctctaatacggtcaaacttaattcaagttaaagaacaattagaaaaactagctgtatactaa

SEQ ID NO: 8263 - DNA, 1599 bp, Staphylococcus aureus
atgagaaaactaactaaaatgagtgcaatgttacttgcatcagggctaattttaactggttgtggcggtaataaaggtttagaggagaaaaaagaaaacaagcaattaacgtatacgacggttaaagatatcggtgatatgaatccgcatgtttacggtggatcaatgtctgctgaaagtatgatatacgagccgcttgtacgtaacacgaaagatggtattaagcctttactagctaaaaaatgggatgtgtctgaagatgggaagacttatacattccatttaagagatgatgtgaaattccatgatggaacaacatttgatgctgacgcagttaagaaaaatattgatgcggttcaacaaaataaaaaattgcattcttggttaaagatttcaacattaattgacaatgttaaagttaaagataagtacacggttgaattgaatttgaaagaagcatatcaacctgcattggctgaattagcgatgcctcgtccatatgtatttgtgtctccaaaagactttaaaaacggtacaacaaaagatggcgttaaaaagttcgatggtactggtccatttaaattaggtgaacacaaaaaagatgagtctgcagactttaacaaaaatgatcaatactggggcgaaaagtctaaacttaacaaagtacaagcaaaagtaatgcctgctggtgaaacagcattcctatcaatgaaaaaaggtgaaacgaactttgccttcacagatgatagaggtacggatagcttagacaaagactctttaaaacaattgaaagatacaggtgactatcaagttaagcgtagtcaacctatgaatacgaaaatgttagttgtcaattctggtaaaaaagataacgctgtcagtgacaaaacagtcagacaagcgattggtcatatggtaaacagagataaaattgccaaagaaattttagatggtcaagaaaaaccagcaactcaattatttgcgaaaaatgtaacagacattaatttcgatatgccaacacgtaagtatgaccttaaaaaagcagaatcattattagatgaagctggttggaagaaaggtaaagacagtgatgttcgtcaaaaagatggtaaaaaccttgaaatggcaatgtactatgacaaaggttcttcaagtcaaaaagaacaagcagaatacttacaagcagaatttaagaaaatgggtattaagttaaacatcaatggcgaaacatcagataaaattgctgaacgtcgtacttctggtgattatgacttaatgttcaaccaaacttggggattattgtacgatccacaaagtactattgcagcatttaaagcgaaaaatggttatgaaagtgcaacatcaggcattgagaacaaagataaaatatacaacagcattgatgacgcatttaaaatccaaaacggtaaagagcgttcagacgcttataaaaacattttgaaacaaattgatgatgaaggtatctttatccctatttcacacggtagtatgacagttgttgcgccgaaagatttagaaaaagtatcattcacacaatcacagtatgaattaccattcaatgaaatgcagtataaataa

SEQ ID NO: 8264 - DNA, 1044 bp, Staphylococcus aureus
atgaaccactacaatagaacaattggttcaatgctcatcttagtatatagcatgctagctgcatttctattcatcgataaagtttttgtaaatatcatctattttcaaggtatgttttatacacaaatattcggaataccagtctttttatttttaaatctcatcatcatattattgtgtattattgttggttcggtactcgcatacaaaatcaatcagcaaaatgattggattaagacgcaaattgagcgttcaatggaaggcgaaacagttggcattaatgatcaaaatatagaaatatatagtgaaacgttagatttataccatacactcgtacctttaaatcaagaattgcataagttgcgacttaaaactcaaaacttaaccaatgaaaattataatattaatgatgtgaaagttaaaaagattattgaagatgaacgtcaaagactagctcgagaacttcacgattctgttagtcagcaactttttgcggcaagtatgatgctttctgctatcaaagaaacgaagttagaaccaccattagaccaacaaattccgattttagagaaaatggttcaagattcgcagttagaaatgcgtgctttgctgttacatttaagaccgcttggtttaaaagacaaatctttaggtgagggtattaaagatttagttattgatttacaaaaaaaagtgccaatgaaagttgtgcatgaaatacaagattttaaagtgcctaaaggtattgaagatcatttgttcagaattacacaggaagcaatttcgaatacattgcgtcattcaaacggtacaaaagtgacagtagaattgtttaataaagacgattatttattgttgagaattcaagataatggtaaaggttttaatgttgatgaaaaattagaacaaagttatggacttaaaaatatgcgtgaaagagctttggaaattggtgcaacgttccatattgtatcattgccagattcaggtacacgtatcgaggtgaaagcacctttaaataaggaggattcgtatgacgattaa

SEQ ID NO: 8265 - DNA, 474 bp, Staphylococcus aureus
ttgaaaggagtcatcatcatgtcgaccaataaaaacgattatgagcatatgttgttttattttgcatataaaacgtttattactaccgctgatgaaattatagagaagtatggtatgagccgtcagcatcatcgttttttgttttttatcaataaattacctggtattactattaaatcattactagaaatattagaaatttctaaacaaggatcacatgcaacacttcaaaaattaaaagagcaaggtctcattattgaaaaagttttagagactgatcgacgtgtcaaaaaattatattcgacggataaaggcgatcaactcattgctgaattgaacaaggcgcaagatgaattattgcaaaatatatatcaacaagtcggttcggattggtatgatgtgatggaagcattggctaaagggcgacctggctttgattttattaagcatttgaaagatgaaaaagaaagctag

SEQ ID NO: 8266 - DNA, 807 bp, Staphylococcus aureus
atggcatttcacgataaaacagcaacacaagtgacaaacattgaactgaacgtaagagacttagacttaatgacaacattttacaaaaacattttaggactatccgttaaaagttctgacgataacacaaccgtattatctgttgggactggtggccatactctaacgttacatttattagaagacggccgtcagacttccccacgtgaagcaggactttttcatatagcatttttattaccaactactgaggatctagctaacttcttatatttcgtggcacaaaaaaatatgggcattggcgctggtgatcatttagtaagtgaagctttatatttcaacgaccccgaaggtaatggtattgaagtctatcgcgatagaccttcatcttcatgggaatggcaaaatggcaaagttaaaatggatactttagaagttgatagccaaaccttattaacacatcgtactgatgaaggttggcaaggaatgccagcaaaaggcatgattggacacttacatttaaaaacacatgatttagacgcagcatatcaatgttacattgaacaattaggattccaacatgtgtctgattttccacgtgcgctatttatgtcaacgaatcattatcaccatcatattgctgctaatacttggcaatccaatcaagcaagacaaaacaatgcacaaagttatggattaacacatgttgatatttatcaacccgacgcctcaacacatacatttacggcaccagaagggtttgacatcacagttcattcaaatactgaccttgttccagaaaaataa

SEQ ID NO: 8267 - DNA, 1341 bp, Staphylococcus aureus
atgccaaaacgtactttcactaaagaagacattcgtaaatttgcagaagaggaaaatgtaagatatttaagattacaattcactgatattttaggaacaattaaaaatgttgaagtgcctgtaagccaattagaaaaagtacttgataacgaaatgatgtttgacggttcttctatcgaaggtttcgtacgtatcgaagaatcagatatgtacttacatccagatttagatacttgggtaatcttcccatggactgctggacaaggtaaagttgcacgtttaatttgtgatgtatataaaacagatggaacaccatttgaaggggatcctcgtgcaaacttaaaacgtgtattaaaagaaatggaagatttaggcttcacagactttaacctagggcctgaaccagaattcttcttgtttaagttggatgaaaaaggggaaccaactttagaacttaatgatgatggtggatatttcgatttagcacctacagatttaggtgaaaactgtcgtcgtgatattgttttagaattagaggatatgggcttcgatattgaagctagtcaccatgaagttgcccctggtcaacatgaaattgactttaaatatgcagatgctgttacagcatgtgataatatccaaacatttaaattggttgttaaaacaatcgcacgtaaacataatttacacgcaacatttatgcctaaaccattattcggtgtgaatggtagcggtatgcactttaacgtttcattattcaaaggtaaagaaaatgcattctttgatccaaatactgaaatgggcttaacggaaactgcatatcaatttacagcaggtgtgcttaaaaatgcacgcggatttactgctgtatgtaacccgttagtaaactcatataaacgtttagtacctggttatgaagcaccatgttatattgcatggagtggtaaaaaccgttcaccattaatccgtgtaccatcttcaagaggattatctactcgtatcgaagtacgttcagtagatccagctgcaaacccatacatggcgttagctgcaatcttagaagctggactagatggtattaaaaataaattaaaagttccagaaccagttaaccaaaatatttacgaaatgaaccgtgaagaacgtgaagcagtaggcattcaagacttaccttcaacactttatactgcattaaaagcaatgcgtgaaaatgaagttattaaaaaagctttaggaaatcatatctataatcaatttattaattcaaaatcaattgaatgggattactacagaactcaagtatctgaatgggaaagagatcagtacatgaagcaatattaa

SEQ ID NO: 8268 - DNA, 1002 bp, Staphylococcus aureus
ttggttaaattaagcgtattagactatgccttaatagatgaaggtaaggatgcacaaaaggcattgcaagattcagtgacacttgcaaaattagcagatcgacttggctttaagcgaatttggtttacggaacatcataatgtaccagcgtttgcgtgtagtagtccagaacttttgatgatgcatacattggcgcagacaaatcacatacgagttggctctggtggtgtgatgctgccgcactatcgaccttataaaattgctgagcattttagaatgatggcagcgttatatccaaatcgtattgatttaggtattggtaataatccaggtactactatggtaaagcaagctttagatggaataaatcctacatatgatagttacgatgaatcgatttcgttattacgtgattatcttacaataaaggataaaccaagtgcgcatacgttaggtgtccaaccacacattgatcattttccagaaatgtggttattaagtagtagcgcaacatctgccaaaatagctgccgaactaggtatagggctttctgttggaacatttttgctaccagatataaatgcgatacatgcagcgaaggataacattgatatttacaaaaaacatttccaagcatcaacgattaaaatggacgcaaaggtgatggcatctgtatttgtcattgtagcagataacgaagcggaagtagcagcattgcaacatgccttagatgtttggttattaggtaaattacaatttgcagaatttgaacattttccttcagtagacacagcacaaaagtataagcttaatgatcgagacaaagagatgattcaagtacatcaagcacgcatcattgcaggcacacaagaacaggttaaagcacaattagatgatttcattgctacgtttgaagttgatgaggtgttagtagcaccgcttattccaggtattgaacagcgttgtaaaacattaaaattactcgcggaaatttatttgtag

SEQ ID NO: 8269 - DNA, 1491 bp, Staphylococcus aureus
gtgagtagcaaaaaagaagcttatgatttagcggataaactaagttcaaaagggattaaaagtgttgctttaacaggagatgatagtgttaattatcgccaaattgtaatagaaaaattaaaagaaggtaagattaactatattataactgtagatctttttaacgaaggtattgatattccagaagtcaatcaagttgtaatgttgagaccaacagagtctagtattatattcattcagcaacttggtagaggattaagaaaaagtgcaaataaagagtatgttactgtaattgattttattggtaattataagaccaattatttaattccgattgcgctttctggggatcaatcgcaaaataaagataattataagaagtttttaacgaataacgattcgattaatggagtatctacaattaattttgaagaagttgctaaaaaacagatttacaattcattggatgcagtatcattgaatcaaaataaattaatattaaaagcttatgaagaagttgaaaatagattgggacacatgccgttactaatggattttatacaacaacattctatagatccaagcgttatattttctaaatttagtaattattacgaatttttattaaggtataaaaaaatagatgctttattgacggaaaatgaatctaaaaatctggttttcttttcaagacaaatagcacctggattgaaaagaatcgatagtttagttttagaagaacttttaaaaaatgaattaacatatgatgaattaaaaaataaaatgttgaacgaagttaaggatataacagaagatgatatagatacttcattaagaattttagatttttcattttacaacgcaggaattgaaaaaatctatggaagtcccattatagaatgtaatgaaagaatgataagactaagcgatgcatttactaatgctctaagtaatcaaacatttaaaatatttttagaagatcttattgaattatcaaagtataacaatgaaaaataccaaaaaggtaaaaatggactgattttatataataaatattcaagagaagattttagcaaaatatttaattggaataaaaatggttcgtctgtaatcatgggatacatgataagaagccaagaaatgccaatatttatcacttatgataagcatgaggatataagtgatagtacaaaatatgaagatgaatttttaagtcaagatgaattaaaatggtttactaaatctaatagaacgctaaaatcaaaagaagttcagaaaattttgtcccatagagcaaaaggaattaaaatgtatatttttgtacagaaaaaagatgatgatggtatatatttttattatttaggaactgctggatatatagaaggttcagagaagcaagataaaatgccgaatggttcaaacgtagtaacgatggatttagcactcgataaagctgtaagagatgatatatatcgctatataacaaattaa

SEQ ID NO: 8270 - DNA, 510 bp, Staphylococcus aureus
atgatccgtctaggtaaaatgtcagatttagatcaaatcttaaatctagtagaagaagcaaaagaattaatgaaagaacacgacaacgagcaatgggacgatcagtacccacttttagaacattttgaagaagatattgctaaagattatttgtacgtattagaggaaaatgacaaaatttatggctttattgttgtcgaccaagaccaagcagaatggtatgatgacattgactggccagtaaatagagaaggcgcctttgttattcatcgattaactggttcgaaagaatataaaggagctgctacagaattattcaattatgttattgatgtagttaaagcacgtggtgcagaagttattttaacggacacctttgcgttaaacaaacctgcacaaggtttatttgcgaaatttggatttcataaggtcggtgaacaattaatggaatatccgccatatgataaaggtgaaccattttatgcatattataaaaatttaaaagaatag

SEQ ID NO: 8271 - DNA, 276 bp, Staphylococcus aureus
atggcagttaaaattcgtttaacacgtttaggttcaaaaagaaatccattctatcgtatcgtagtagcagatgctcgttctccacgtgacggacgtatcatcgaacaaatcggtacttataacccaacgagcgctaatgctccagaaattaaagttgacgaagcgttagctttaaaatggttaaatgatggtgcgaaaccaactgatacagttcacaatatcttatcaaaagaaggtattatgaaaaaatttgacgaacaaaagaaagctaagtaa

SEQ ID NO: 8272 - DNA, 945 bp, Staphylococcus aureus
atagcaattgaatgtccagtaacaaatttggaggaagcgtatatgtatcaaacaattattatcggaggcggacctagcggcttaatggcggcagtagctgcaagcgaacaaagtagcagtgtgttactcattgaaaaaaagaaaggtctaggtcgtaaactcaaaatatctggtggcggtagatgtaacgtaactaatcgattaccatatgctgaaattattaagaacattcctggaaatgggaaatttttatatagtcccttttcaatttttgataatgaatccatcatagatttttttgagtctaggggtgttaaattaaaagaagaagatcacgggcgtatgtttccagtttccaacaaagcacaagacgtggttgatacattagtgacaactatcgaacgccaacatgtaacgattaaagaagaagaagctgttagtagaatcgaagttaatacagaccaaactttcactgtacatactcaaaataatagttatgaaagccattcgctagtgattgctacaggtggtacaagtgtccctcaaactggttcaactggtgatggttataagttcgcacaagatttaggtcataccattactgagttattcccgaccgaagttccaattacatcagctgaacctttcatcaaatccaatcgtctaaaaggtttaagtttaaaagatgttgaattgtcagtacttaagaaaaatggtaaaaaacgcatcagtcatcaaatggatatgttatttactcattttggtatcagtggtccagctgcattaagatgtagtcagtttgtttataaagaacaaaaaaatcaaaagacacagcacatttctatggcaatcgatgcatttcctgaattaaaccatgaacaattaaaacaacacatcacatcacttatcaaatcaacaattgaacgacttagtaaatatgtttaa

SEQ ID NO: 8273 - DNA, 2862 bp, Staphylococcus aureus
atgaataataaaaagacagcaacaaatagaaaaggcatgataccaaatcgattaaacaaattttcgataagaaagtattctgtaggtactgcttcaattttagtagggacaacattgatttttgggttaagtggtcatgaagctaaagcggcagaacatacgaatggagaattaaatcaatcaaaaaatgaaacgacagccccaagtgagaataaaacaactgaaaaagttgatagtcgtcaactaaaagacaatacgcaaactgcaactgcagatcagcctaaagtgacaatgagtgatagtgcaacagttaaagaaactagtagtaacatgcaatcaccacaaaacgctacagctagtcaatctactacacaaactagcaatgtaacaacaaatgataaatcatcaactacatatagtaatgaaactgataaaagtaatttaacacaagcaaaaaacgtttcaactacacctaaaacaacgactattaaacaaagagctttaaatcgcatggcagtgaatactgttgcagctccacaacaaggaacaaatgttaatgataaagtacattttacgaacattgatattgcgattgataaaggacatgttaataaaacaacaggaaatactgaattttgggcaacttcaagtgatgttttaaaattaaaagcgaattacacaatcgatgattctgttaaagagggcgatacatttacttttaaatatggtcaatatttccgtccaggttctgtaagattaccttcacaaactcaaaatttatataatgcccaaggtaatattattgcaaaaggtatttacgatagtaaaacaaatacaacaacgtatacttttacgaattatgtagatcaatacacaaatgttagcggtagctttgaacaagtcgcatttgcgaaacgtgaaaatgcaacaactgataaaactgcttataaaatggaagtaactttaggtaatgatacatatagtaaagatgtcattgtcgattatggtaatcaaaaaggtcaacaacttatttcgagtacaaattatattaataatgaagatttgtcacgtaatatgactgtttatgtaaatcaacctaaaaagacctatacaaaagaaacatttgtaacaaatttaactggttataaatttaatccagatgctaaaaacttcaaaatttacgaagtgacagatcaaaatcaatttgtggatagtttcaccccagatacttcaaaacttaaagatgttactggtcaattcgatgttatttatagtaatgataataagacggcgacagtagatttattgaatggtcaatctagtagtgataaacagtacatcattcaacaagttgcttatccagataatagttcaacagataatgggaaaattgattatactttagaaacacaaaatggaaaaagtagttggtcaaacagttattcaaatgtgaatggctcatcaactgcaaatggcgaccaaaagaaatataatctaggtgactatgtatgggaagatacaaataaagatggtaaacaagatgccaatgaaaaagggattaaaggtgtttatgtcattcttaaagatagtaacggtaaagaattagatcgtacgacaacagatgaaaatggtaaatatcagttcactggtttaagcaatggaacttatagtgtagagttttcaacaccagccggttatacaccgacaactgcaaatgcaggtacagatgatgctgtagattctgatggactaactacaacaggtgtcattaaagacgctgacaacatgacattagatagtggattctacaaaacaccaaaatatagtttaggtgattatgtttggtacgacagtaataaagatggtaaacaagattcgactgaaaaaggaattaaaggtgttaaagttactttgcaaaacgaaaaaggcgaagtaattggtacaactgaaacagatgaaaatggtaaataccgctttgataatttagatagtggtaaatacaaagttatctttgaaaagcctgctggtttaactcaaacaggtacaaatacaactgaagatgataaagatgccgatggtggcgaagttgatgtaacaattacggatcatgatgatttcacacttgataatggctactacgaagaagaaacatcagatagtgactcagattcggacagcgattcagactcagatagcgactcagattcagatagtgactcagactcagatagcgactcagactcagatagcgactcagacagcgactcagactcagatagtgattcagattcggacagcgactcagattcagacagcgaatcagattcggatagcgactcagactcagatagcgactcagacagcgactcagattcagacagtgactcagactcagacagcgactcagattcagacagcgattcagattcggatagcgactcagattcagatagcgattcggactcagacaacgactcagattctgacagcgattcagactcagatagcgactcagattcagacagcgactcagattcagacagcgattcagattcagatagcgattcagattcagacagcgactcagattcagatagcgactcagactcagacagcgattcagactcagatagcgactcagacagcgattcagattcggatagcgattcagattcagatgcaggtaaacatactccgactaaaccaatgagtacggttaaagatcagcataaaacagctaaagcattaccagaaacaggtagtgaaaataataattcaaataatggcacattattcggtggattattcgcggcattaggatcattattgttattcggtcgtcgtaaaaaacaaaataaataa

SEQ ID NO: 8274 - DNA, 276 bp, Staphylococcus aureus
atgactaaagaaacagataataaaaaaacagtagcgacttctgacaacaaagacacacagcaacaaaatcaaactgaagaagatgaacgtcaaggtttgaatggttatcgtaaaacagatcttgatttagaaattgagcaagagctacgtgaaatgatgaaaacaggagaaaatgaaacgaaaaacgactacaaaaagtttaaagtgttttcacttatttcaacacttgtcattgtcattttagcaattataagatttgttcataaaatgatttaa

SEQ ID NO: 8275 - DNA, 1260 bp, Staphylococcus aureus
atgaaatttacagagttaactgttaccgaatttgacaactttgtacaaaatccatcattggaaagtcattatttccaagtaaaagaaaatatagttacccgtgagaatgatggctttgaagtagttttattaggtattaaagacgacaataacaaagtaattgcagcaagccttttctctaaaattcctactatgggaagttatgtttactattcgaatcgtggtccagtaatggatttttcagatttaggattagttgattattatttaaaagagttagataaatatttacagcaacatcaatgtttatatgttaaattagatccgtattggttatatcatctatatgataaagatatcgtgccatttgaaggtcgcgagaaaaatgatgccttagtaaacttgtttaaatcacatggttacgagcatcatggctttacaactgagtatgatacatcgagccaagtacgatggatgggcgtattaaaccttgaaggtaaaacacccgaaacattgaaaaagacatttgatagtcaacgtaaacgtaatattaataaagcgataaactatggtgttaaagtcagattccttgaacgtgatgagttcaatcttttcttagatttatatcgtgaaactgaagagcgtgctggatttgtgtcaaaaacagatgattatttttataactttattgacacatatggagataaagtattagtaccattagcatatattgaccttgatgaatatgtgttaaagttgcaacaggaattgaatgacaaagaaaatcgtcgtgatcaaatgatggcgaaagaaaacaaatcagataaacaaatgaagaaaattgcagaattagataagcaaattgatcatgatcagcatgaattattgaatgcaagtgaattgagcaaaacggacggcccaattctaaaccttgcttctggcgtttattttgcaaatgcatatgaagtgaattatttctctggtggttcatcagaaaaatataatcaatttatgggaccatacatgatgcattggtttatgattaactattgcttcgataatggctatgatcgttataatttctatggtttatcaggtgattttacggaaaacagtgaagattatggcgtataccgctttaaacgtggatttaatgtacaaatcgaagaattaataggggatttctataaaccaattcataaagtgaaatattggttgttcacaacattggataaattacgtaaaaaattaaagaaatag

SEQ ID NO: 8276 - DNA, 555 bp, Staphylococcus aureus
atgagtgacattattaatgaaactaaatcaagaatgcaaaaatcaatcgaaagcttatcacgtgaattagctaatatcagtgcaggaagagctaattcaaatttattaaacggcgtaacagttgattactatggtgcaccaacacctgtacaacaattagcaagcatcaatgttccagaagcacgtttacttgttatttctccatacgacaaaacttctgtagctgacatcgaaaaagcgataatagcggctaacttaggtgtcaacccaacaagtgatggtgaagtgatacgtattgcagtacctgccttaacagaagagcgtagaaaagagcgcgttaaagatgttaagaaaattggtgaagaagctaaagtatctgttcgaaatattcgtcgtgatatgaatgatcagttgaaaaaagatgaaaaaaatggcgacattactgaagatgagttgagaagtggtactgaagatgttcagaaagcaacagacaattcaataaaagaaattgatcaaatgattgctgataaagaaaaagatattatgtcagtataa

SEQ ID NO: 8277 - DNA, 360 bp, Staphylococcus aureus
atgattttgcgttacgcaacaaatttaaaacttgcgaaagagctataccaagccagtaaacctaaattgcaagaagataagggtatgattgaactgtttgaacatacttttggcttgcaaaaagaacttgtaaaatacgtcggcattgcagaagcaactactgctgctttatactcagctagctttatcaataaaaacatttctcgccttgcatcactatcaacgataggcattttaagtgtagctgcttacaaacatttcgaagctggccaaggtaaaaaaggtgcacaacatgcattagatttattaggtcttgctactttaagtttactagatacattttcttgtaataaaaaatag

SEQ ID NO: 8278 - DNA, 819 bp, Staphylococcus aureus
atgaaacgtttggaaaataaagttgcagtcgtaacaggagcaagtacaggtatcggacaagcttctgcaatcgctttagctcaagaaggtgcgtatgtattggcggtagacatagctgaagcggtatcggagactgtcgataaaattaaaagtaacggtgacaatgcgaaggcgtataatgtggatatttcagatgaacaacaagtggtagactttgtgtctgacataaaggaacagtttggaagaatcgatgtgttgtttaataatgccggtgtggataatgcggctggtagaattcatgagtatccaatagatgtgtatgacaagattatgaatgtagatatgcgtgggacaattttaatgacgaaaatgatgttacctttaatgatgaatcaaggtggctctattgttaatacgtcttcattttcaggacaggcagaagatttgtatcgctcaggatataatgctgcgaaaggcgcagtgattaattttacaaaatcaatcgcaattgagtatggtcgtgatggcattcgatccaatgcaattgcaccaggtacaattgaaaccccgttagtagataaactgacaggtacgagtgaggatgatgcaggtaaaacatttagagaaaatcaaaaatggatgactccgctgggacgtttaggtaaaccagaagaagttgctaaattagtagtcttcttagcatctgacgacagttcattcataactggagagacgattcgaattgatggtggtgtgatggcttacacatggcctggcgagatgttaagtgatgattcgtggaagcggacattggaataa

SEQ ID NO: 8279 - DNA, 537 bp, Staphylococcus aureus
gtgaaacgacttaaaaactttatccttggcttattaatagtagtaatcgtggggttcctgttattcatgtatatccaagatggacgtataactgaatatcaagactacttccttcaatttgaatggttccaaccattacttatttcacttgctgcactattgatattaataggtcttatattagtatttagtatcttcaaacctacgcatcgaaaacctggattatacaaagacttcgatgatggtcatgtttacgtatctcgtaaagctgttgaaaagacggcattcgatacggttgcaaaatatgatcaagtaagacaaccaaatgtagttgcgaaactatataacaaaaaaaataaatcttatatcgacattaaaactgactttttcgtaccaaataatgttcaagttcaatctttaactgaagcaattcgttcggatattaaaaagaatgtagaatatttcacagaaatgccagtacgtaagttagaagttaatgtgagagatcagaaaacttctggtccacgagtgttgtaa

SEQ ID NO: 8280 - DNA, 240 bp, Staphylococcus aureus
atggctaacaatcataaccaaaacggacaagactctacacaacaagtgattaattttttaaaagtatttaaatggagaatcgttggtttcctagcgtttctattaatcgcgatattattcttaacgttaggtttttggaaaacagtacttatcatcgttttatgtttaattggtgtaggtattgggtatatgaaagaccgtaagcaagattttatgaattttttaaatcgatggagttaa

SEQ ID NO: 8281 - DNA, 1593 bp, Staphylococcus aureus
atgtcaaatttattagaagtcaacagtctgaatgtacaattcaattatgatgaaactacagttcaagcggtaaaaaatgtctctttcgaattacgaaaaaaacatatcctaggtattgttggtgaatcaggatcaggaaaaagtattactgctaaatctattttagggctactaccagattatccagatcacacattaacaggagaaattatttttaatgggcaatcgttaaataatttatcaacttcagcgttacaacaaattcgaggtaaggatatttcaatgatttttcaagatccactctcttcgttgaatccaagattaacgattggcaaacaaattacagaagtactatttcaacataaacgtgtatctaaatctgaagcaaagtcgatgacaataaacattttagaaaaagtaggtataaaacatgcaactcgacaatttgatgcttatccacatgaactttctggtggtatgcgtcaacgtgtcatgatagcaatggcattgattttaaagccacaaattttaatcgcagatgaaccaacaacggcattagatgccagtacacaaaatcaattactgcagttaatgaagtccctttatgagtacacagaaacatctattatttttatcactcacgatttaggcgctgtgtatcaattttgcgacgatgtgattgtaatgaaagatggaagtgtcgttgaaagtggcacggttgaaagtatttttaaatcgccacaacatacctatacaaaacgcttaatagatgcgattcctgatattcatcaaacgcgtccgccaagaccgttaaacaatgatattttattaaaattcgatcgcgtgagcgtggattacacatcaccgagtggcagcctataccgagcagttaatgatattaacttggctattagaaaaggcgaaacattaggcattgtcggtgaatcagggtcagggaaatcgacattagctaagacggtcgtcggtctaaaggaagtgtcagaaggctttatttggtataacgaattaccattaagtttatttaaagatgatgaattgaaatctttacgacaagagatacaaatgatttttcaagatccattcgcatctattaatccaagatttaaagtcattgatgtgattaaacgaccactaatcattcatgggaaagtcaaagataatgatgacattattaaaactgtcgtatcgttgttagaaaaggttggcctagatcaaagtttcttatatcgctatccacacgaattatctggtgggcaacgtcagcgtgtaagtatcgcgagagcacttgctgtagaacctaaagtgattgtttgcgacgaggcagtgtccgctttagacgtttcaattcaaaaagatatcatcgagttattaaaacaattacagttagacttcggcatcacttatttattcatcacacatgacatgggtgttatcaatgaaatatgtgatcgcgttgcagttatgaaaaatggcgaaatcgttgaactgaataacacagaagatattatcaaacatccgcaatcagactatgcaaagcaacttatttcagaagtagcagttattgctaaataa

SEQ ID NO: 8282 - DNA, 696 bp, Staphylococcus aureus
atgggtaaatcatttagtgaaattataaatgaaatgattacaatgcctaatattcagtggccagaagtttggactgcaatagtcgaaacactatacatgacagtcgtctcaactatatttgcatttatactcggtcttattttaggtgtgttattattcttgtctgctaaaggtaagtctatcggtgcaaggttattttattctatcgtttctttcattgttaacttatttagagcgataccatttattattttaattttattattaattccatttacaagtttgatacttggaacgataagtggtccgacaggtgcgttaccagccttgattattggcgcagcaccgttttatgcaaggctcgtagaaattgcttttaaagaaattgataaaggtgtcatcgaagcggcctggtcaatgggtgccaatacttggatagtaattcgtaaagtcctcttacctgaagccatgccagcgctagtgtctggcattacagttacagcaatcgctttagttggttcaacagcagttgcaggtgtaattggtgccggtggtttaggaaatttagcatacttaacaggtttcactcgaaatcaaaatgatgtcattttagtatcaactgtttttattttaattattgtatttataatccaattcattggggattggcttacaaataaacttgataaacgataa

SEQ ID NO: 8283 - DNA, 717 bp, Staphylococcus aureus
atgatttatgcaggtattttagcaggaggtattggttcgagaatggggaacgtgccattaccaaaacaatttttagatattgataataaaccgattttaatccatacaattgagaagttcattttagtgagtgaatttaatgagattattatcgcaacgccagcacagtggatttcccatacacaggatattttaaaaaaatataacattacagatcaacgtgtcaaagtagttgcaggtggtacggatcgaaacgaaacaattatgaacattatcgaccatattcgcaatgtaaatggaattaataatgatgatgtgattgtaactcatgatgccgtaagaccatttttaactcaacgtattattaaagagaacattgaagtagcagcaaaatatggtgcagtagatacagtcattgaagcaattgatacgattgtaatgtctaaagataaacagaacatacacagtatccctgtaaggaatgaaatgtatcaaggccaaacaccacaatcatttaatattaaattattacaagatagttatcgcgccttaagtagtgaacaaaaagaaatcttatcagatgcatgtaaaataattgtcgaatctggacatgcagttaaattggtacgtggagaactatacaacattaaagtgacaacaccgtatgatttaaaagtagcaaatgccattattcaaggtgatattgccgatgattaa

SEQ ID NO: 8284 - DNA, 834 bp, Staphylococcus aureus
atggaggttaaaacattttataatggaaacacgatgccacaaattggtttagggacatttcgtgtggaaaatgatgaaaattgcatggaaagtgttaagtatgccattgaacaaggatatcgtagtattgataccgcaaaagtttatgggaatgaagaacaagtaggtgctggcattcgtgccggattggagtcaactggtattgctagagaagacttatttattacttcaaaattatattttgaggatttcggtcgtgaaaatgtagcagctgcttacgaagctagtttatctagattaggtttaaaatacttagatttgtatctagtacattggccaggcacgaacgaagccgtaatggttgatacatggaaaggtatggaagatttatataaaaataataaagctaaaaatataggtgtcagcaattttgaacctgaacatttggaagctttgttggcacaagtgtcaattaaacctgtaattaatcaagttgaatatcatccatatttaacgcaacataaattgaaattatatttggcagcacaacatatcgtgatggaatcttggtcaccattgatgaatgcacaaattttaaatgatgagacaattaaagacattgctcaagaattaggaaagtcacctgcccaagttgttttaagatggaatgtgcagcatggtgtggttataatccctaaatcggtaacaccaaacagaatctctgaaaacttccaaatatttgatttcgaattatcagatgaacaaatgacgcgaattgatggtttaaatcaagataagagaattggacctgatccaaaaacttttgaaggatag

SEQ ID NO: 8285 - DNA, 1776 bp, Staphylococcus aureus
gtgaagaaaatcattagtatcgcaattatagttttagcgttggtattaagtggttgtggtgtccctacgaaatcagaagtggctcaaaagtcatcgaaagttgaagtgaaaggcgagcgaccaacaatacatttcctaggacaagcaagttatgaaaatgatatgaatatcgttaaagatcaattggaaaatgcaggatttaacgtgaagatgaatatccaaccagattatggtagctatcgtacacaacgtcaagccggcaattatgatatccaaattgatgactggatgacagtgtttggtgacccgaactatgctatgacggcattatttagttctacaggatcaaatagtttattgaaagataaacatgtagaccagttgttaaataaagcttctactcaaaatgaagcagatgttaaacaaacatataagcaaattgaagatgaagttgtatttgataaagggtatatggcgcctttatatggatcaaaaaagaatttagtatatgacaataaagtgttagataaaaatagtgttggattgccaaattcacgtgcattaatatggcaacaatttgattacaacaatagtagagaacgagatacgcggccacttgtgatgacacaacaagatggtgaaattcctacattggatccaatacgttcaattgcgccgtcagtatattcaattaatatgaatatgtacacaaggttattattattagatgaaaatgatcacttaacaacgaaaggttcgttaagtcgtgattatgctgtgaataaggacaataaagcattttatttcttgttaagagatgatgattattttgcgaaagtggtcaatggacaagcacgtaatactggagagcgtgtatcggctgaagatgttaagttttctttagatagagcacgtgataaaaagtctgtgcctaacaataatacttacaatatgcacaaacatataaatgacatcaagatattaaaagatgaggacatcgatcagttgcgtaaagagaaagacaaggatgataaatcaatctatgataagttgattaaagcttataacgtcaaatcgttaacgacagatggtcaaaaagtaaataataaagacggtatttatcaaattgttaaaattacgacagatcaatcgatgcctcgagaggtaaattacttaacacactcttcggcaggcattttatctaaaaaatttgttaatcaagtaaatcaagaatatccaaaaggatatggggatagcagtacaattcctgcaaattcagatggaaaaaatgcgctttatgcaagtggcgcatacattatgacacagaaaaatgcatatcaagcaacgtttcaacgtaatccaggattcaacgaaacagaaaaaggtagttatggatcacctaaaattaaaaatattacattgaagtttaatggtgatccgaataatgcattgtcagaacttagaaatcattcaattgatatgttggcagatgtgaatcaaaaacattttgatttaattaagtcggataaaaatttaagcattattcgcaaaaatggacgcaagtcagtctttttaatgctaaatattaaaaaaggtatatttaagacgcatccaaacttgagacaagcagtagttaatgcgatagatcaggatcaatttattaagttttatcgtggcgataaatttaaaattgcatcaccgattacaccacttgtcgatactggtaacgagcaacgtcaagatttagaaaaagtagaaaaagccattaatcaataa

SEQ ID NO: 8286 - DNA, 582 bp, Staphylococcus aureus
cctgacagcacttatattggtccagacgttacaattggtagtgatacagtcattgaaccaggcgtacgaattaatggtcgtacagaaattggcgaagatgttgttattggtcagtactctgaaattaacaatagtacgattgaaaatggtgcatgtattcaacagtctgttgttaatgatgctagcgtaggagcgaatactaaggtcggaccgtttgcgcaattgagaccaggcgcgcaattaggtgcagatgttaaggttggaaattttgtagaaattaaaaaagcagatcttaaagatggtgccaaggtttcacatttaagttatattggcgatgctgtaattggcgaacgtactaatattggttgcggaacgattacagttaactatgatggtgaaaataaatttaaaactatcgttggcaaagattcatttgtaggttgcaatgttaatttagtagcacctgtaacaattggtgatgatgtattggtggcagctggttccacaatcacagatgacgtaccaaatgacagtttagctgtggcaagagcaagacaaacaacaaaagaaggatataggaaa

SEQ ID NO: 8287 - DNA, 2349 bp, Staphylococcus aureus
atgagacaaaaaacattagacgtcttagaatttgaaaaaataaaatcactcgttgccaatgaaactattagtgacttaggcttggaaaaggtcaatcaaatgatgccagctactaattttgaaacggttgtttttcaaatggaagaaacggatgagattgctcaaatctataataagcatcgtttaccaagcttgagtggcttatctaaagtatcagcattcattcatcgcgctgatattggcggcgttttaaatgtatcagagcttaacttgataaaaagattaattcaagtacaaaatcaatttaagacattttataatcaattggttgaagaagatgaaggtgttaaatacccaatattagatgacaagatgaatcaattacctgtgttaactgatctttttcatcaaataaatgaaacatgcgatacgtatgatttatatgataatgcgagttatgaattgcaagggattagaagtaaaatttctagcacgaatcaacgtattagacaaaatttggaccgtattgttaaaagccaagcaaatcagaaaaaattatcagatgctattgtaacagttaggaatgaaagaaacgttatacctgtcaaagctgaatatcgacaagattttaatgggattgtacatgatcaatctgcttcaggacaaacattgtatattgagccatcatcagttgttgaaatgaataatcaaattagtcgattacgtcatgacgaagcaattgaaaaagaacgcgttttaacgcaactaactggttatgtggctgcggacaaagatgcactacttgtggcagaacaagtcatggggcagttagattttttaatcgcaaaagcgagatatagtagaagtattaaaggaacaaagccgatatttaaagaggaacgtactgtatatttacctaaagcataccatccattattaaatcgtgagactgttgtagctaataccatcgaatttatggaagatattgaaacggtaattattacaggaccgaatacaggtggtaaaactgtaacattaaaaacattaggtttaattattgttatggctcaatcaggattgttgattcccacacttgatggtagtcagttaagtgtatttaaaaatgtatattgcgatatcggagatgaacaatcaatagaacaatcattatcaactttttcatctcatatgacgaatatagttgaaattttaaagcatgcagacaaacatagtttagttttatttgatgaattaggtgcaggtacagatccaagtgaaggtgctgcattagcaatgagcattttagatcatgttagaaaaattggttctctagtaatggcaacgacgcactatcctgaacttaaagcatatagttataatcgagaaggcgttatgaatgcgagtgtagaatttgatgtagatactttgagtccaacgtataagttattaatgggtgtgccgggtcgttcaaatgcttttgacatttctaaaaagttaggtcttagtttgaatattattaataaggctaagacgatgattggtactgatgaaaaagaaataaatgaaatgattgaatcattagagcgtaattataaacgtgtagagacacagaggttagaactggaccgtcttgtaaaagaagcggagcaagtgcatgatgatttatctaagcagtatcaacaattccaaaattatgaaaagtctctaatagaggaagcgaaagaaaaagcaaatcagaagattaaagctgcaacaaaagaagctgacgatattattaaagacttaagacaattgcgtgaacaaaaaggtgcagatgttaaagaacatgaattgattgataagaagaaacgattagatgatcattatgaagcgaaatctataaagcaaaatgtacaaaagcaaaaatacgataaaattgttgctggtgatgaagtaaaagtattatcttacggtcaaaagggtgaagttttagaaattgtcaatgatgaagaagcaattgttcaaatgggaattattaaaatgaagttacctattgaagatttagagaaaaaacaaaaagaaaaagttaagccaacgaaaatggttacacgtcaaaatcgtcaaacaattaaaactgaacttgacttacgaggctatcgttatgaggatgctttaattgaactagatcaatatttagatcaagccgttttaagtaattacgaacaagtttatatcattcatggtaaaggtacaggtgcacttcaaaaaggtgtacaacaacatttgaagaagcataaaagtgttagtgactttagaggtggtatgccaagcgaaggtggatttggcgttaccgttgcaacactaaaataa

SEQ ID NO: 8288 - DNA, 370 bp, Staphylococcus aureus
atggctaaattatcttatttagaggcgatacgccaggcacaagacttagcattacaacaaaataaagatgtgtttattcttggtgaagatgttggaaggtggcgtatttggtactactcaaggactgcaacaaaaatatggtgaagacagagttatcgatacgccattagctgagtcaaatattgttggaactgccattggtgcagctatggtaggtaaaagaccaattgcagaaattcaatttgcagattttattttacctgcgacaaatcaaattattagtgaagctgcgaaaatgcgttatcgttcaaataatgattggcaatgcccattaacgattcgtgcaccatttggtggcgttgctcacagg

SEQ ID NO: 8289 - DNA, 318 bp, Staphylococcus aureus
atgcgcggtggcggaaacatgcaacaaatgatgaaacaaatgcaaaaaatgcaaaagaaaatggctcaagaacaagaaaaacttaaagaagagcgtattgtaggaacagctggcggtggcatggttgcagttactgtaactggtcataaagaagttgtcgacgttgaaatcaaagaagaagctgtagacccagacgatattgaaatgctacaagacttagtgttagcagctactaatgaagcgatgaataaagctgatgagcttactcaagaacgtttaggtaaacatactcaaggcttaaacatccctggaatgtga

SEQ ID NO: 8290 - DNA, 597 bp, Staphylococcus aureus
atgcattatccagaacctatatcaaagcttattgatagctttatgaaattgccaggcattggtccaaagacagcccaacgtctggcttttcataccttagatatgaaagaagacgatgttgttcagtttgccaaagcattagtagatgttaagagagaattaacatattgtagcgtatgtggtcacattactgaaaatgatccatgttatatttgtgaagataaacaaagagatcgttcagttatttgtgttgtggaagatgacaaagatgtcatagctatggaaaaaatgagagaatacaaaggtttatatcacgttttacatgggtctatttcacctatggatggcattggaccagaagatattaatattccttcattgattgaacgcttgaaaagcgatgaagttagcgaattaatcttagctatgaacccgaacttagagggggaatctacagccatgtatatttctagattagttaagcctataggtatcaaagtgacgagattagcacaagggttatcggtaggtggcgatttagagtatgctgacgaagtaacattatctaaagcaatcacaggtagaacagaaatgtaa

SEQ ID NO: 8291 - DNA, 585 bp, Staphylococcus aureus
atgaacattgaaaaagcaaaacggcttgcaaaagagaaactgccagagaaacgttataatcattctttaagagttgcagaaacagcgattaaattggcagaaatttatgatggagacactagtaaagtagaattagcaggtgtattacatgatttctgtaaatatgatgatttaggtaaaatgtatcaaattgttcgacaatacgaattaggtaatgatctactgagttatggtagtgaaatattgcatggccctgtgtgtgcagcaatcatggaacatgaatatggtatcaatgatgaggaagtattaatggctatcaaataccatactactggacgtcaacaaatgacaaaaactgaaaaactgatttttattgctgattacatcgaacctggaagaacaatcccaggagttgatgatattcgagatatggcatacaatcaaggtagtttagataagacaatttatgaaatttctaaacgcacagtactatttttaatacagaaagatattacggtatataataagacgattgactgtttaaattattataactatagtgacgaaagaataaaggatgattaa

SEQ ID NO: 8292 - DNA, 627 bp, Staphylococcus aureus
atgaaattcaaagctatcgttgcaatcacattatcattttcactattaactgcctgcggtgctaatcaacataaagaaaataatagtaaatcaaatgacactactaaaaagacgcaagaaactgacaacactacacagtcaaatacagaaaagcaaatgacaccacaagaagccgaagatatcgttcgaaacgattacaaagcaagaggtgctaacgaaaatcaaactttaaattataaaacaaatcttgaacggagtaatgaacatgaatattatgttgaacatctagtccgcgatgcagttggcacacctttaaaacgttgcgctattgttaatcgacacaatggtacgattattaatatttttgatgatatgtcagaaaaagataaagaagaatttgaagcatttaaaaagagaagccctaaatacaacccaggtatgagtgatcatgataaaacagatggtgagtcagaagacattcaacatcatgacaatgataataacaaagccattcaaaatgatacaccagatcaaaaagccgttgataaaaacgataaaaatgctgttaataaagaagaaaaacatgataaccatgcaaaaaattcagcagaaactaaagttaaataa

SEQ ID NO: 8293 - DNA, 1050 bp, Staphylococcus aureus
atgagtgattttcaaagagaacagagaaaaaatgaacatgttgaaatagcaatggcccaatctgacgcaatgcattcagattttgataagatgcgttttgtgcatcattctatcccatcaattaatgtaaatgatatcgatttgacatcacagacgcctgacttaacgatggcatatccgatttatattaatgcaatgacgggtggtagcgagtggacgaaaaacatcaatgaaaagctagctgtagttgcaagagaaactcgcttagcgatggcagttggatcaacacatgcggcattgagaaatccacgcatggctgagacgtttacgattgcgcgaaaaatgaatcctgaaggcatgatttttagcaatgttggtgcggacgtaccagtagaaaaggctttggaagcagttgaattacttgaggcacaagcgttacaaatccatgttaattctcctcaagaattagttatgcctgaagggaatcgtgaatttgtgacttggttagataatatagcgtcgattgtatcacgagtgtctgttccagtcattataaaagaagttggatttggtatgagcaaagaattaatgcatgacttacaacaaataggcgtcaagtatgtcgatgttagtggcaaaggtggtactaactttgtagatattgaaaatgaacgtcgtgcaaataaagatatggattacttatcatcatggggacagtctacagttgagtcattacttgaaacaacggcttatcaaagcgaaatttcagttttcgcgagtggtggtttacgtacaccactcgatgcaattaaaagtttagcacttggtgcaaaggcaactggtatgtcacgtccgtttttaaatcaagttgaaaataatggcattgcacatacagtagcttatgtagaatcatttattgaacacatgaaatcaataatgacgatgttagatgctaaaaatattgacgacttaacacaaaaacaaatcgtatttagtccggaaataatgtcatggatagaacaacgtagcttgaatatacatcgaggataa

SEQ ID NO: 8294 - DNA, 1848 bp, Staphylococcus aureus
atgactaataaaagagaagatgtccgcaatatagcaattattgctcacgttgaccatggtaaaacaactttagtagatgagttgttaaaacaatctggtatattcagagaaaatgaacatgtcgatgaacgtgcaatggactctaacgatatcgaaagagagcgtggaattacgattctagccaaaaatacggctgttgattataaaggtacacgtattaatattttggatacaccaggacatgcagactttggtggagaagtagaacgtattatgaaaatggttgatggggttgtcttagtagtagatgcgtatgaaggtacaatgcctcaaacacgttttgtacttaaaaaagcgctagaacaaaacctgaaacctgttgttgttgttaataaaattgataaaccatcagcacgtccagagggtgttgtagatgaagttttagatttatttattgaattagaagcaaacgatgaacaattagaattccctgttgtttatgcttcagcagtaaatggaacagctagcttagatcctgaaaaacaagatgataatttacaatcattatatgaaacaattattgattatgtaccagctccaattgataacagtgatgagccattacaattccaagtagcattgttggactacaatgattatgttggacgtattggtattggtcgtgtattcagaggtaaaatgcgtgtcggagataatgtatcactaattaaattagacggtacagtgaaaaacttccgtgtaactaaaatctttggttactttggattaaaacgtttagaaattgaagaagcacaagctggagatttaattgctgtttcaggtatggaagacattaatgttggtgaaactgtaacaccacatgaccatcaagaagcattgccagttctacgtattgatgagcctactcttgaaatgacatttaaagttaacaattctccatttgctggccgtgaaggtgactttgtaacagcacgtcaaattcaagaacgtttaaatcaacaattagaaacagatgtatctttgaaagtttctaacacagattctccagatacatgggtagttgctggtcgcggtgaattgcatttatcaatccttattgaaaatatgcgtcgtgaaggttatgaattacaagtttcaaaaccacaagtaattattaaagaaatagatggtgtaatgtgtgaaccatttgaacgtgtgcaatgtgaagtgccacaagaaaatgcaggtgctgttattgaatcattaggtgcacgtaaaggtgaaatggttgatatgactacaactgataatggacttacacgtttaatctttaatgtaccggctcgtggtatgattggttatacgactgaatttatgtcaatgacaagaggttacggtattattaaccatacatttgaagaatttagaccacgtattaaagcacaaattggcggtcgtcgtaatggtgcattaatttcaatggatcaaggttctgcaagtacttatgccattttgggacttgaagatagaggtgtaaacttcatggaacctggtactgaagtttatgaaggtatgattgttggtgaacataatcgtgaaaatgatttaactgttaacatcactaaaacaaaacatcaaactaacgtacgttctgcaacgaaagaccaaacacaaacaatgaatagaccgcgtattctaacattggaagaagcgttacaattcattaatgatgatgaacttgttgaggttacaccagaaagtatacgtttaagaaagaaaattttaaacaaaaatgttcgtgaaaaagaagcaaagcgtatcaaacaaatgatgcaagaaaacgaataa

SEQ ID NO: 8295 - DNA, 609 bp, Staphylococcus aureus
atgatgataatcgtcatgttactactaagttatcttatcggcgctttcccaagtggattcgtaattggaaaattatttttcaaaaaagatattagacaatttggtagtggtaatactggcgctactaatagctttagagtattaggtcgtcctgcaggattcttggtaacatttctagatattttcaaagggttcataactgttttcttccctttatggttaccagttcacgcagatggccctattagtactttttttacaaatggtttaattgttggcttattcgctatacttggacacgtttatcctgtttatttaaaattccaaggtggcaaagctgttgcaactagtgcaggtgtcgtcttgggagtcaatccgatacttttactaatacttgcaattatcttctttattgtattgaagatttttaaatatgtttctttagcaagtatcgttgcagcaatttgctgtgtgattggctcgcttatcattcaagactatattttattagtcgttagtttcttagtttcaatcatattgataattagacatcgctctaatatcgcaaggatttttagaggcgaagaacctaaaataaaatggatgtaa

SEQ ID NO: 8296 - DNA, 675 bp, Staphylococcus aureus
atgatagataaaaaattaacatcaccgaaaatgacagtgcctttatttttaatcgcgctgattgtatttataggtatgttttacggtgtagtgacaaatcaagaatggcttaaaaatatagatatgggatcattaacatggtttacagattatttcggtgagccacaacgtcagtatgttaacaatttgtttaattattatatgacgtttagtgcggaaattggagatgtcaaaggtgtcgtgttgatttcaattatcgtcacaatcatactgtttattaaacagaggcatttagcggtttggtttgtgacatatttggtttcaggtgtcatcatgaacaaattaattaaagatactgttttacgtccaagaccatataatcatttagccgttgatacaggcttttcatttccaagtggacattccaacgccagcacattattatatttcgccttaatgatcattattatttcagttgctgctaagacaataacaaaagtgttgagtgcgctagttatgggaatattatggcttagcatattattttgtcgcctttattttcatgcacattacttttcagatgtcattggcggcacgtcactagcaatcatttgggtagcgttattcttaatggtatacccatactttattaatcatcgacgacaacgcgtttag

SEQ ID NO: 8297 - DNA, 765 bp, Staphylococcus aureus
atgattgatattcataaccatatattgcctaatatcgatgacggtccgacaaatgaaacagagatgatggatcttttaaaacaagcgacaacacaaggtgttacagaaatcattgtaacatcacatcacttacatcctcgatataccacacctatagaaaaagtgaaatcatgtttaaaccatattgaaagcttagaggaagtacaagcactaaatctaaagttttattatggtcaggaaataagaattaccgatcaaatccttaatgatattgatcgaaaagttattaccggtattaatgattcacgctatttactaatagaatttccatcaaatgaagttccacactatactgatcaattatttttcgaattacagagtaaaggctttgtaccgattattgcacatccagagcgaaataaagcaataagtcaaaaccttgacatactatacgatttaattaacaaaggtgctttaagtcaagtgacaacggcgtcattagcgggtatttccggtaaaaaaattagaaaattagcaattcaaatgattgaaaacaatctgacacatttcatcggttcagatgcgcataacacagaaatcagaccgttcttaatgaaagacttatttaatgataagaaattacgtgattattatgaagatatgaacggatttattagtaatgcgaagttagttgttgatgataaaaaaattcctaaacgaatgccacaacaagattataaacagaaaagatggtttgggttataa

SEQ ID NO: 8298 - DNA, 522 bp, Staphylococcus aureus
gtgactgaaacagctaacttattcgttcttggtgcagctggaggcgttgagtggggtactgtgattgtacaggtcctaactttcatcgtgttacttgcgttacttaaaaagttcgcatggggtccattgaaagatgtaatggataaacgtgaaagagatattaacagagatatcgatgacgcagaacaagctaagttaaatgcacagaaacttgaagaagaaaataaacaaaaacttaaagaaacacaagaagaagttcaaaagattttagaagatgctaaggttcaagcacgtcaacagcaagaacaaattattcatgaagcaaacgtacgtgcaaacggtatgattgaaacagcacaaagtgaaatcaatagccaaaaagaacgtgccattgcagatattaataatcaagtatctgaactatcagtgttaattgcttctaaagttcttagaaaagaaatttctgaacaagaccaaaaagcattggttgacaagtatctaaaagaggcaggcgataaataa

SEQ ID NO: 8299 - DNA, 1743 bp, Staphylococcus aureus
gaatactttactctaaacgataaaaggttaaaaaaacaacaaaaagaaaatattactgtcataattggaaatacaccgtattctgctggtcaatctagtgtaaataatgataataaaaaaatgaatatgaaaaattaaatgcaaaaatagcaaatacctatgcaaatttttcaacagcaaatttaaaaaaatcattatatgattcgtatatacaggcttttcgatgggcaactgatagagttggaaaaaaggtattataggatttgtaacaaatggatcatttattgatagtcaaagcactgatggatttagaaaagttttatacgatgaatttaactatctgtacataattaatttgagaggcgaccaacgaacacagggtgaaaaatcaagaaaagaaggtggaaaaatatttggatcaggaagtagagcaccgatagctatatctattttagttaaagatggaagttacaatcacgatatctattataatgacattggtgaatatttaactagagagcaaaaattagatactttaatgaaacatcaatcaattgtgaatttgaaaagtttgaatgttttacccgataaaaacaatgattggattaatcaacgagacataaactatgagaattatttaccaatgtatgattccaaggatattgaaaattctatatatttagatcaatttaatggagtaaattcagcaagagataattgggtaacaaatttttcgaatgaaaaagcattagtaaatgcaaaattacttgtagataactataattctgaaatagatagattaattgatatcttagattcaagagaacgtataaatttagtgaacaaagatgaaacatttattagttggacacgaggacttacccaaaaattttctaaaggaaaaaatatttcaattaatccagagagaattgttaaatttatgcatagaccatttacaaaaaaatggatagtgtacgacaaaaatattatggaaatgccaagtagatattataatataatggagaatactggacaggtgatttatatacaaggacagggaatgaataaagaattctcggctatgatcacggacatattacctaatttccaatttattggtaatggcaaaggctttgctacatacaaaggtaaagatagtttgaggcttgtagataatatttctaattcttttaaaaagaaaataaatcttaattcagaagagatagtatattatatatatgcaattttgcatcataaatattatgtgaacaaatattcaagtgatttgagtaaaggttttccgcgaataccgatattaaaggatgtatatggatttgttgaaattggtagggagttagtggaattacatttaaattatgaaaaacaactcaattgggatggtgtagaaataatttataataatatgaatccgaattataaagttgaaaaatgaagcaccctaaaaagggcgtgttggatacagtaatatacaataccgatattacagttactaacattccaaataaagtatataattatattgtgaatggcaagcctgctattgaatggattatagatcagtacaacgtaagcatcgacaagaaatctggaatattagatgatcctaatgaatttagtgaagatccgaattacattttaaatctgcttttatcagttattactgtaagtatgaaaactcttggattaatagataaattaccagattttgaagtattagattaa

SEQ ID NO: 8300 - DNA, 2610 bp, Staphylococcus aureus
atgttaactatacctgaaaaagaaaatcgtggatcgaaagaacaagaagtggcaattatgattgatgctctagctgacaaagggaaaaaagcattagaagcattatctaaaaagtcacaagaagaaattgatcatattgttcatcaaatgagcttagcagctgttgatcaacatatggtgctagcaaaattagcacatgaagaaactggaagaggtatatacgaagataaagcgattaaaaatttatacgcttctgaatatatatggaattcaataaaagacaataagacagtagggattattggtgaagataaagaaaaaggattaacgtatgtagcggaaccaattggtgttatttgtggtgttacgccaacaacaaatcctacgtcgacaactatttttaaagcgatgattgcaattaagacaggaaatccaatcatttttgcattccatccaagtgcacaagaatcgtcgaagcgtgcagcagaagttgtattagaagcggcaatgaaggcaggtgcacctaaagatattattcagtggattgaagtgccttctatcgaagcaacaaaacaattaatgaatcacaaaggtattgcattagttctagcaacaggtggttcgggcatggttaagtctgcatattcaactggcaaaccggcattaggtgtgggaccaggtaacgtgccgtcttacattgaaaaaacagcacacattaaacgtgcagtaaatgatatcattggttcaaaaacatttgataatggtatgatttgtgcttctgaacaagttgtagtcattgataaagaaatttataaagatgttactaatgaatttaaagcacatcaagcatactttgttaaaaaagatgaattacaacgcttagaaaatgcaattatgaatgaacaaaaaacaggtattaagcctgatattgtcggtaaatctgcagttgaaatagctgaattagcaggtatacctgtccccgaaaatacaaaacttatcatagccgaaattagcggtgtaggttcagactatccgttatctcgtgaaaaattatctccagtattagccttagtaaaagcccaatctacaaaacaagcatttcaaatttgtgaagacacactacattttggtggattaggacacacagccgttatccatacagaagatgaaacattacaaaaagattttggactaagaatgaaagcttgtcgtgtacttgtaaatacaccatcagcggttggaggtattggtgatatgtataacgaattgattccgtctttaacattaggttgtggttcgtacggtagaaactcaatttcacataatgttagtgcgacagatttattaaacattaaaacgattgctaaacgacgtaataatactcaaattttcaaggtgcctgctcaaatttattttgaagaaaatgcaatcatgagtctaacaacaatggacaagattgaaaaagtgatgattgtctgtgaccctggtatggtagaattcggttatacaaaaacagttgagaatgtattaagacaaagaacggaacagcctcaaattaaaatatttagcgaagtcgaaccgaacccatcaactaatacagtatataaaggtctggaaatgatggttgatttccaaccagatacaatcattgcacttggtggtggttcagcgatggatgctgcaaaagcaatgtggatgttctttgaacaccctgagacatcattcttcggtgctaaacaaaagttcctagacatcggtaaacgtacttataaaataggcatgcctgaaaatgcgacgttcatttgtatccctacgacatcaggtacaggttcagaagtaacaccatttgcagttatcacagatagtgaaacaaatgtaaaatatccgttggctgattttgctttaacacctgacgttgcaattattgaccctcaatttgtgatgagtgtgccaaaaagcgttacagcagatacaggaatggatgtactaacgcatgcaatggaatcatatgtatctgtaatggcttcagactatacaagaggtttgagtctacaagcgattaaattgacgttcgaatatttaaaatcatctgttgaaaagggtgataaagtttcaagagagaaaatgcataacgcatcaactttggctggtatggcatttgcaaatgcattcttaggcattgcacactcaattgcacataaaattggtggcgaatatggtattccgcatggtagagcgaatgcgatattactaccgcatattatccgttataatgccaaagacccgcaaaaacatgcattattccctaaatatgagttcttcagagcagatacagattatgcagatattgccaaattcttaggattaaaagggaatacgacagaagcactcgtagaatcattagctaaagctgtctacgaattaggtcaatcagtcggaattgaaatgaatttgaaatcacaaggtgtgtctgaagaagaattaaatgaatcaattgatagaatggcagagctcgcatttgaagatcaatgtacaactgctaatcctaaagaagcactaatcagtgaaatcaaagatatcattcaaacatcatatgattataagcaataa

SEQ ID NO: 8301 - DNA, 669 bp, Staphylococcus aureus
atgaagccagttgtagttatgacacaaacaaatgacatgcaaagtgatttagtatcaattattcacaaaccctttattgatataaagccactaaattttgatattcatttgttaaatcaacgctatgactggcttattttttcatctaaaaatgctgtgaaattcttttataaatatctaaaaggaattaatgttgataacattgctgtgataggaagtaagacagcgcaatattgtgaatcacttggcattcgagttgattttatgccaaacgacttttctcaagaaggatttttaaaatcatttaatcaaactaaccaaaaaatacttttgccttcgagtgaattggcgagaccattgttattagcagcgttatctaaagataatgaagttgttaaaatagatttatatacttcagtgcctaacaaacaaaatatacaagatgttaaagaaatgatagaacatcaacaaatcgatgcattaacattttcaagttcgtcggcagtacgttattattttaatgaaggatttgtaccaaaattcaagtcgtattttgctattggagaacaaacagcacggaccattaaaacatatcaacaaccagtaacaattgcagaaattcaaacactcgaatcactaattgaaaagattttagaaagtaggggctaa

SEQ ID NO: 8302 - DNA, 1989 bp, Staphylococcus aureus
atgaattttccatgggatcaattactagttaaaggtaactggatgattacaatggcacaaattggtgccccattcttagttattggtttaatcgcagtaattacttactttaaattatggaaatatctttacaaagaatggttcacatctgtagaccataagaaaatcggtattatgtatttaatctgtgccgtattaatgttcgtccgtggtggtattgatgcgttacttattcgtgcgcaattaacagtacctgataacaaatttttagaatctaaccactataacgaaatttttagtacacatggtgtaatcatgattatcttcatggcaatgccatttatctttggtttatggaatatcgttgttccattacaaattggagcacgtgatgttgcattcccagtattaaacaacgtaagtttctggctattctttgcaggtatgattttattcaacctgtcatttattattggtggttcaccagcagctggttggacaaactatgcgccactagcaggtgaattcagtcctggtccgggtgttaactattacttaatagctatacaaatttcagggcttggtaccttagctacaggtatcaacttctttgtaacaattttaagatgtaaaacaccaactatgaagtttatgcaaatgccaatgtttacagtaacaacatttattactacattaattgttattcttgctttccctcctttaacagtagcgttagcattaatgacaactgatagaatatttgacacagcattcttcacagttgcacatggcggtatgccaatgctttgggctaacttcttctgggtatgggggcaccctgaagtttatatcgttatccttccagcatttggtatttactcagaaattatcccgacattcgctcgtaagcgtttattcggacatcaaagtatggtatgggcaactgccggtatcgcgttccttagtttcttagtttgggttcaccatttcttcacaatgggtaatggtgcgttaatcaactcattcttctcaatttcaacaatgctgattggtattccaactggtgtgaaattgtttaactggttattaacattatataaaggacgtattacatttgagtcaccaatgctattctcattagcatttatccctaacttccttttaggtggtgttacgggtgtaatgttagcaatggcatcagctgactatcaatatcacaatacgtacttcttagtagctcacttccactatacattggttactggtgttgtatttgcctgcttagctggtttaatcttctggtatccaaagatgatgggttacaaattaaacgaaacattaaacaaatggtgcttctggttcttcatgatcggatttaacgtttgtttcttaccacaattcattcttggattagatggtatgccacgtcgtttatacacttatatgccatcagatggttggttcttattaaacttaatttcaactatcggtgcattattaatggcaatcggattcttattccttgttgttagtatcgtatacagtcacttcaaatctccacgtgaagcaactggagataactgggatggccttggccgtactctagagtggactactgcatcagcaattccacctaaatacaactttgccattacaccagattggaatgactacgacacatttgttgatatgaaagaacatggtcgtcattacttagacaaccataattacaaagacattcatatgccaaacaatactcctgttggattctggattggtatctttatgactatcggcggtttcttcttaattttcgaaactgtaattccagcattaatttgtttattcggtatttttggtactatgatttatcgcagtttccaaatcgatcacggatatcatatccctgctgctgaagttgctgaaactgaagctagattaagagaagcgcgtattaaagaaagggaggctgtaagtcatgagtcatga

SEQ ID NO: 8303 - DNA, 684 bp, Staphylococcus aureus
atgaataacaattttttcaatagtgacttcgattctattttacgaagaatgatgcaagacatgcaaaactcaaatcagactagtaacaagaaatactatattaatggtaaagaagtttcaccggaagaattagcacaatttacgcaacaaggtggtaatcattctgccgaacaaagtgcgcaagcttttcaacaagcagcactaagacaacaaggtcaacaaagtggcaatggcaattatctagaacaaattggtcgtaacttaacgcaagaggctcgtgacggattattagatccagtcatcggtcgtgataaagaaatccaagaaactgcagaagtcttaagtagacgcactaaaaacaatcctatcctagtcggagaagctggagttggtaaaactgcgattgtcgaaggtttagcgcaagcaatcgttgaagggaacgtacctgcagcaatcaaagataaagaaattatatctatagatatttcatcgcttgaagctggaacgcaatatcgtggcgcctttgaagaaaacatccaaaagttagttgaaggcgttaaatcatcacaaaatgctgtgctcttctttgacgaaattcaccaaatcatcggttccggcgcaacaggaagtgattccggtagtaaagggttatctgatattttaaaaccagcattaagtcgtggt

SEQ ID NO: 8304 - DNA, 930 bp, Staphylococcus aureus
atggctaaaacatatattttcggacataagaatccagacactgatgcaatttcatctgcgattattatggcagaatttgaacaacttagaggtaattcaggagccaaagcataccgtttaggtgatgtgagtgcagaaactcaattcgcgttagatacatttaatgtacctgctccggaattattaacggatgatttagatggtcaagatgttatcttagttgatcataacgaattccaacaaagttctgatacgattgcctctgctacaattaagcatgtaattgatcatcacagaattgcaaatttcgaaactgctggccctttatgttatcgtgctgaaccagttggttgtacagctacaattttatacaaaatgtttagagaacgtggctttgaaattaaacctgaaattgccggtttaatgttatcagcaattatctcagatagcttacttttcaaatcaccaacatgtacacaacaagacgttaaagcagctgaagaattaaaagatattgctaaagttgatattcaaaagtacggcttagatatgttaaaagcaggtgcttcaacaactgataaatcagttgaattcttattaaacatggatgctaaatcatttactatgggtgactatgtgactcgtattgcacaagttaatgctgttgaccttgacgaagtgttaaatcgtaaagaagatttagaaaaagaaatgttagctgtaagtgcacaagaaaaatatgacttatttgtacttgttgttactgacatcattaatagtgattctaaaattttagttgtaggtgctgaaaaagataaagtcggcgaagcattcaatgttcaattagaagatgacatggccttcttatctggtgttgtttctcgaaaaaaacaaatcgtacctcaaatcactgaagcattaacaaaataa

SEQ ID NO: 8305 - DNA, 561 bp, Staphylococcus aureus
atgaaaataggtgtattagcattacaaggtgcagtacgtgaacatattagacatattgaattaagtggtcatgaaggtattgcagttaaaaaagttgaacaattagaagaaatcgagggcttaatattacctggtggcgagtctacaacgttacgtcgattaatgaatttatatggatttaaagaggctttacaaaattcaactttacctatgtttggtacatgcgcaggattaatagttctagcgcaagatatagttggtgaagaaggataccttaacaagttgaatattactgtacaacgaaactcattcggtagacaagttgacagctttgaaacagaattagatattaaaggtatcgctacagatattgaaggtgtctttataagagcgccacatattgaaaaagtaggtcaaggcgtagatatcctatgtaaggttaatgagaaaattgtagctgtccagcaaggtaaatatttaggcgtatcattccatcctgaattaacagatgactatagagtaactgattactttattaatcatattgtaaaaaaagcatag

SEQ ID NO: 8306 - DNA, 563 bp, Acinetobacter baumannii
gtaaaatatggtgtagaaattttaaaactcattgaaggccgtgtgtctacagaagtcgatgctgcactttcatcatgcacaccgcacagcgcaccattcaaacacagcaccatgaattcatgtgcagctttatcaaaggttcatgggcattgcatcagtcacgtcattctgcattcaaaattgcatcgcacttgggcaaggtcattccaagcggctcaaagatgttagaagctgaaggtattgcttgtaacactcactctccttttcggtttacatcaagcccaagcgtgtgcagatgccaaagttactttaatctcaccttttgtaggccgtattttagactggtacaaaaaagctgcaaggtgtagcattctatacccaatcgcagcaaagcatccaggtgtggttatcagattaagcaaaatctacactatcatttcacacgccagacgaaaatattccaactcaagtccatgggtgcgagcttccgtagcatcgcacaggtgctaggcttgcaggatgtgataggcttacgatcctccaagcttgctaacgcagcttga

SEQ ID NO: 8307 - DNA, 204 bp, Acinetobacter baumannii
atgcttgagattctggtgggcggcggtatggatttattccgtgctttacgtatgctcgtgccaccagcttggcagaacgttgaaactttagatgcagacttgcgtgcattctatgagttcaactctaaacatatggaagcttgggatggtccggcaggcctcgttattcaagatggtcgtcatgcgatttgtatgcttgaccgt

SEQ ID NO: 8308 - DNA, 417 bp, Acinetobacter baumannii
atggctaaaaaaccgatttataaatcactttattttcaagtgattattgcgattattgcgggtgttttggtagggcatttctcaccaagtacaacgcaaattgttaatggtgttgaacaacatattccaggtttaggtgagcaactcaagccattaggtgatgcttttattcgtttgattaaaatgatcatcgcacctgttattttctgtacagtagtaagtggtattgctggtatggaaagcatgaagtcagttggtaaaactggcggtgttgcgttgttatacttcgagatcgtttcaacaatcgcgcttctgattggccttgtggtgattaacattgcaaagccgggcgtaggaatgaatgttgatcctgcaactctggacacttcaggtatccaaaaatacgtcacttctggt

SEQ ID NO: 8309 - DNA, 458 bp, Acinetobacter baumannii
attaccctacaaattccaaccattaatgcctatggtgagccagaggtacaacgaaaaaccttacaggtaaaaatacctaaaggcatgaaagaaggtcagcaaattcgcctaagtggacaaggacaaagtggtattaatggtggtgccaatggcgatctttatatcgagattcagtataaagatacagatcgtgtgcatgtcgaaggcagtgatgtatatttgactgtagatgtagcgccatgggaagccgcattagggcaaggcacttgaagtaaaaacgcctgcgggacctttacacgtcaatttacctaaaaatgcaaaacaaggacaacagctacgtttaaaagacaaagggataccaaataaaacgccaggccatctttatttaattttaaatattgtattcccaccggcgcattctgaaaaagaaaaagaagcctatcagcaattggcagaag

SEQ ID NO: 8310 - DNA, 622 bp, Acinetobacter baumannii
  misc_feature (588)..(588): n=g, a, t or c
tttggtatggccgaagatgaagcacaagtaggccgtgtaaatggcttggcatggacttctgtagggggtgaattgcttactattgaagttgccgcagttaaaggtaaaggtaaattcattacaaccggttcactcggtgatgtaatgaaagaatcaattaccaccgcaatgactgtagtacgcacacgcgccgatgaacttggaattgaagcatctcgctttgaagaaactgatgtacacgttcacttacctgaaggtgcaactccaaaagatggtttggcattaacaactgcacttgtatcagcatttactggaattgcgattcgaccagatattgcaatgacaggtgaaacaagtctaggtggtcgtgcgatgcgtatcggtggcttgaaagagaaacttcttgctgcacatcgtggtggaatcaagctcgtctttattcctcaagataacgttcgtgatttggcagaaattccagacaatgtgaaagaaggattagaaatcaaagctgtgaaaagcattgatgaaatcttacctttagcattaacttcgatgccaaagcctttaactaaaacaccgattgtaaancggtggaaggctcaaagcagcgcgtcacttattc

SEQ ID NO: 8311 - DNA, 480 bp, Acinetobacter baumannii
atggctccaattgatatcctgtttttatttggctttttaggtatttggattccacaagcattttgggcatggttaagctatcaagcgtggaagtattccaaaacggctgaaaaagagctgcaaaacttaccaataccagaaagatggccagtcttaagtgttttgatccctgcttataatgaaggcgttgtgattgaggacactttgcatgccattgctcaacaggactatccggcaaagtcttatgaagtcttactgatcaatgatggctccaaagacaacacccttgaaatcgcagaaaacctcgcaaaaatttatccttgcataaaaattgtcaatgtacccaaagggatgggtggtaaaggtaaatcaagaacgcttaataatggtcttccccatgccaaaggtgagttaattgttgtttacgacgccgatagcacccctgaacccgattgcgtccgattacttgcccagtggcga

SEQ ID NO: 8312 - DNA, 540 bp, Acinetobacter baumannii
atgtgctggaaaggttctgtaatcgcatgtgaatcaacattcggtgtatgtgcgaaatgttatggtcgtgaccttgctcgtggtcacttggtaaacccaggtgagtcagtaggtgtaatggctgcacagtcaatcggtgaaccaggtacacagttaacaatgcgtacgttccacgtgggtggtgctgcaagccgaacttctgctgcaaacagtgttcaagtacgtaacaaaggtactgtacgtttccataacgtaaaaactgtacaacatgcgaaaggccacttggtttcagtttcacgttcaggtgaaattggtattgccgatgagttaggccgtgagcgtgaacgctacaaacttccttacggtgcgagcatcttgttgaaagatggtgagcttgttgaggctggtggtatcgttgcgacatgggatccgcatacgcatccattggtaacagaagttgctggtaaagcacgtttcagccaaattgctgatggtgtaactgcaacagtggcgatgatatcagatctgccggtctcccta

SEQ ID NO: 8313 - DNA, 373 bp, Acinetobacter baumannii
atggcaacaacgaatcagtgatccgtaagggtcgtacgactttggttgaaaaatccaaagttcctgcgttgaaggctcgtccacaacgtcgtggtgtttgtacacgtgtttatacaactacacctaaaaaacctaactcagctatgcgtaaggttagccgtgttcgcttaacttcaggttttgaagtatctagctacatcggtggtgaaggccataacttacaagagcacagtgtgttcttatccgtggtggtcgtgttaaagacttaccgggtgtacgttaccataccgttcgtggttctttagactgtgctggtgttaaagatcgtaaccaatcacgttctaaatacggtgctaaacgtcctaagaagtaa

SEQ ID NO: 8314 - DNA, 468 bp, Acinetobacter baumannii
atgccaagacgtcgcgtagtcgctgctcgtgagatccttccagatcctaaatttagcagccaaacaatcgctaaattcatgaaccacgtaatgcaagatggtaaaaaatctattgctgaaagtatcgtttacggtgctttagaacgcgttcaagaaaaaaacaaagtagacccagttgaatttttcgagactactcttgaaaaagttcgtcctatggtcgaagtaaaagcacgccgtgttggtggtgctacttatcaagtacctatggaagtacgcccatcccgtcgtactgccttagcaatgcgttggttagtagatgctgctgctaagcgttctgaaaaaactatggctttacgtcttgctggcgagttgcttgatgcagctgaaggcaaaggtgctgcgatcaaaaaacgtgaagacgtgcaccgtatggcagaagctaacaaagccttctctcactaccgtttc

SEQ ID NO: 8315 - DNA, 936 bp, Acinetobacter baumannii
ttggcactttatgatagcgaactcggcttacggggacaggttctttatagccagataaaacttcatgccgaatatggtggtgtggttccagagttagcttctcgtgaccatgttcgtaagcttattcctttaatgaatcagctgcttgaacaaagtggtgttaagaaacaggaaattgatgcagtcgcatatacgcgtggcccgggtttaatgggagcgttaatgaccggagccttgtttggaagaactttagcattttcacttaataaaccggcaattggtgttcaccacatggaaggccatatgttggctcctttgctttcaagccaaccgcctgagtttccatttgttgcattgcttgtttcaggtggtcatacacaattgatggcagctcatggtattggtcaatatgagctattaggtgagtcaattgatgatgcggcaggtgaagctttcgacaaagtcgcaaaaatgatgaatctgccatatccgggtggaccaaatattgctaagttggcgttatctggtgatcctttagcatttgaatttccacgcccaatgcttcatcagggcttagacttttcttttagtggtttaaagacggcagtttctgttcagttgaaaaaattgaacggcgaaaaccgtgatgctgatattgctgcttcattccaagaagccattgtagataccttagtaaaaaaatctgtaaaagctttaaagcagactgggcttaagcgtttagtaattgctggtggggtaagtgcaaatttacgattacgtgaacagttggaaacttcattggcgaaaattaaagctcaggtttactatgcagaacctgctttatgtactgataatggtgcaatgattgcatttgcaggttatcagcgtttaaaagcaggtcagcatgatggtttagctgtcactactacaccacgt

SEQ ID NO: 8316 - DNA, 1862 bp, Acinetobacter baumannii
attactcgttaccgtaacatcggtatctctgcgcacatcgacgcaggtaaaacaactacaactgaacgtattttgttctacacaggtgtatctcacaaaattggtgaagtacacgacggtgcagcaacaatggactggatggaacaagagcaagagcgtggtattacaattacctctgctgcaacaacttgtttctggtctggtatgggtaaccaattcccacaacaccgtatcaacgtaattgatacaccgggacacgttgacttcacaatcgaagttgagcgttctatgcgtgttcttgacggtgcttgcatggtttactgtgcagttggtggtgtacagcctcagtctgaaactgtatggcgtcaggctaacaaatataaagtgcctcgtttagcattcgtgaacaagatggaccgtactggtgcaaacttcttccgtgttgttgaacaaatgaaaacacgtcttggtgcgaatcctgtgccaatcgttgtgccaatcggtgctgaagacacattcactggtgtagttgaccttatcgaaatgaaggcaattatctgggatgaagcttctcaaggtatgaagtttgaatacggcgagattccagctgacctagttgatactgctcaagaatggcgtacaaacatggttgaagctgctgctgaagcttctgaagagttaatggacaaataccttgaagagggtgatctttctaaagaagacatcatcgcaggtttacgtgctcgtacattagcttctgaaatccaagtaatgctttgtggttctgcattcaagaacaaaggtgttcaacgtatgttggacgctgtaattgaattcttaccatcacctacagaagttaaagcgatcgaaggtatccttgacgataaagacgaaactaaagcgtctcgtgaagcatctgacgaagctccgttctctgcgcttgcgttcaaaatcatgaacgacaaattcgtaggtaacttaacattcgtacgtgtttactctggtgttcttaaacaaggtgatgctgtttataacccagttaaatctaagcgtgaacgtatcggtcgtatcgtgcaaatgcacgcaaacgaacgtcaagatattgatgaaatccgtgcaggtgatatcgcagcgtgtgtaggtcttaaagacgttactactggtgatacattatgtgatgagaaaaacatcattacacttgaacgtatggaattcccagatccagtaattcagttagcggttgaaccaaaaactaaagctgaccaagaaaaaatgtctatcgctttaggccgtttggctaaagaagacccttcattccgtgttcacactgatgaagaatctggtcagacaattattgctggtatgggtgagcttcaccttgacatcatcgttgaccgtatgaagcgtgaattcggtgttgaagcgaatatcggtaaaccaatggttgcttatcgtgaaacgattaagaaaactgttgagcaagaaggtaaattcgtacgtcaaacaggtggtaaaggtaaattcggtcacgtatatgttcgtttagaaccgcttgacgttgaagctgctggtaaagaatacgaattcgctgaagaagttgttggtggtgtagtacctaaagaattcttcggtgcagttgacaaaggtattcaagaacgtatgaagaatggtgtcttggctggttacccagttgtaggcgttaaagctgttctttttgacggttcttaccacgatgtcgactctgacgaattgtcgttcaaaatggctggttcttacgcattccgtgatggtttcatgaaagcagatcctgttcttcttgaacctatcatgtaagttgagttgagactccagaagactacatg

SEQ ID NO: 8317 - DNA, 1188 bp, Acinetobacter baumannii
atggctaaagccaagtttgaacgtaataaaccacacgtaaacgtgggtacaatcggtcacgttgaccatggtaaaacaactttaactgctgcgattgcaacaatttgtgcaaaaacttacggcggtgaagcgaaagattactcacaaatcgactcagcacctgaagaaaaagcacgtggtattacaattaatacatcacacgtagaatacgattctccaactcgtcactacgcacacgttgactgcccaggccacgccgactacgttaaaaacatgatcactggtgctgctcagatggacggcgcgatccttgtatgtgctgcaactgacggtccaatgccacaaactcgtgagcacatccttctttctcgtcaggtaggtgtaccttacatcatcgtattcttaaacaaatgcgaccttgtggatgacgaagaattacttgaattagtagaaatggaagtacgtgaacttctttctacttatgacttcccaggtgatgacactccagtaatccgtggttcagctcttgcagcgcttaacggtgaagctggtccttacggtgaagaatcagttcttgctcttgtagcagcacttgactcttatatcccagagccagagcgtgcaatcgacaaagcattcttgatgccaatcgaagacgtattctcaatttctggtcgtggtacagtagtaacaggccgtgttgaagctggtatcatcaaagttggtgaagaagtagagatcgttggtattaaagatacagttaaaacaactgtaactggcgtagaaatgttccgtaaacttcttgacgaaggccgtgcaggtgagaactgtggtatcttacttcgtggtactaagcgtgaagaagtacaacgtggtcaagtacttgctaaaccaggtacaatcaagccgcacactaaattcgacgcagaagtatacgtactttctaaagaagaaggtggtcgtcacactccattcttaaatggttaccgtccacagttctacttccgtacaactgacgtaactggtgcgatccagttgaaagaaggcgttgaaatggtaatgccaggtgacaacgttgaaatgtcagtagaattaatccacccaatcgcaatggacccaggtctacgttttgcgatccgtgaaggtggtcgtactgtaggtgctggtgttgttgctaaagtaactgca

SEQ ID NO: 8318 - DNA, 543 bp, Acinetobacter baumannii
atgaaaaagtttttaggcaattctatcttcaaagcagttggttggacctatgatgcagatcctaccattcttgagaaaaaacaagttattatcggttttgaacatacttctaaccttgatgcgatcttatcaatcgctttgtttcaaatattagatttaaaaattcatacactaataaaaaaagaacttttcaaaggtccaatgaagcctattcttgaaaagctaggtggcattcccgtagaccgaaaagcaagcaaagatatcgtctctcaaatggttgaaaaattccaaagtagcgatacattcaatctagtgattgcacctgaagcaacgcgtgccaaagatggatcggaacgcaaacctattcgaaccggtttttggcatattgctaaggcagcaaatgttccaattgtactgatgtatgcaaatgcaagaaccaaaaaaggcggtattttaggtaagatttatcctacggatttacagaaagatcttgaaacgattaaagaactttatgcgcaatatgatattgatgtgaaaattaac

SEQ ID NO: 8319 - DNA, 294 bp, Acinetobacter baumannii
tcatcaaaaggtaaaggtttccaaggtggtgttaaacgttggaatttccgtacccaagatgctactcacggtaactctgtttctcaccgtgttttaggttctacaggtcaaaaccaaactcctggacgcgtgttcaaaggcaaaaaaatggctggtcacttaggtgatgaacgcgtaacagtacaaggtcttgaaatcgtatctgttgacactgaacgttcagttttggttgttaagggtgcaattcctggtgcaactggcggtgacgttatcgtacgtcctaccatcaaggcc

SEQ ID NO: 8320 - DNA, 600 bp, Acinetobacter baumannii
gtgaatttaaaaactgtttccggctctgctgttgaattgtctgaagtagctttcggacgtgaatttaacgaagctcttgtacaccaagttgttactgcttacttagcaggtggtcgtcaaggtactcgtgctcacaaatcacgtgcagacgtttctggcggtggtaaaaaaccattccgtcaaaaaggtactggtcgcgctcgtgcgggttctattcgtagcccaatctgggttggtggtggtaaaacttttgctgctcgtccacaagattggtctcaaaaagtaaaccgtaaaatgtatcgcggtgcaatgcaatgtatcttagctgaacttgttcgccaagatcgccttgttttagttgaagagttcgctgttgctgctccaaaaactaaagaattgcttgcaaaacttaacgatttaaatgcagctcgtgctttgatcgttacagatgctgtagatgagaacttatatcttgcagcgcgcaaccttccacacgttgatgtggtagatgcaactgcaatcgatcctgtaagcttgatcgcgtttgataaagttgtgatgtctgtagctgctgctaagaaaattgaggtagaactcgga

SEQ ID NO: 8321 - DNA, 318 bp, Acinetobacter baumannii
atgaacaacgaacgtatctatcaagtcctaaaaggaccagtcttctcagaaaaggcacaagttttaggtgatactgctggtgttcaagtatttaaagtagatatcaacgctactaaacttgaaatcaaaaaagcagttgaaaaactttttggtgtagaagttgttaaagttaacacaactattactaaaggtaagactaagcgctttggtcgtacattaggacgtcgttctgatgttaaaaaagcatacgtcaccctgaaagccggccaagatgttgaaatggctgacttgggcgataccgctgaaagcgcagcggaa

SEQ ID NO: 8322 - DNA, 822 bp, Acinetobacter baumannii
atgccgattcaaaaatgtaagccaacgtctccaggacgtcgctttgtagagaaagtggttcatgaccatcttcacaaaggcgcgccttatgcaccgttggtagaagcaaaaaaacgtactggtggtcgtaataacaacggtcacattactactcgtcacgttggtggtggtcataagcaacattaccgtatcgttgactttaaacgtaacaaagatggcgtacctgctgttgtagaacgtattgaatacgatccaaaccgtacagcgcatattgcattattgaaatatgctgacggtgagcgtcgttatatcattgcgcctaaaggcttacgtgctggtgataaagtacaatctggtaacgatgctccaattcgtccaggtaactgtttaccacttcgtaacatgccaatcggttctacacttcataacgttgaacttaaaatcggtaaaggtgctcaattagcacgttctgctggtgcttcagttcaattgttgggtcgtgatggttcttacgcaatcattcgtcttcgttcaggcgaaatgcgtaaagtacacgttgaatgccgcgctgtaattggtgaagtttctaaccaagaaaacaaccttcgctcattaggtaaagctggtgctgcacgctggcgtggtgttcgtcctaccgtacgtggtatggcgatgaacccgattgatcacccacacggtggtggtgaagggcgtaacaaaggtattcaacctgtaagcccatggggtcaaaaagctaaagggtacaagacacgtaccaacaagcgtacgactaagatgattattcgcgaccgtcgcgtcaag

SEQ ID NO: 8323 - DNA, 273 bp, Acinetobacter baumannii
atgcctcgttctctgaaaaaaggcccattcgtcgatgcgcacttgttcgctaaggttgaagcggctgttgctagtaactctcgcaagccgatcaaaacttggtctcgtcgttcgatgatccttccagactttgttggtttaacaatttctgttcacaatggccgtaaccacgttccagtaattgttactgagcatatggttggtcataaactcggtgaattcgcgccaactcgtacctatcgtggtcacggtgttgacaagaagtctaaacgt

SEQ ID NO: 8324 - DNA, 330 bp, Acinetobacter baumannii
atgatggaagtaactgctaaattacgcggtgccgctatctcggcacaaaaagcacgtttggttgcggacttaatccgtggcaagtctgttgcacatgctttaaacatcttgaacttcagcaacaaaaaagctgcagttttagttaaaaaagcattggaatctgcaattgcaaacgctgaacacaataacagtttagatgttgacgaccttaaagtttctacgatttacgttgacgaaggcatgagccttaaacgtattatgccacgtgctaaaggccgtgcagatcgtattactaagcgtacttgtcacatcaccgttaaggtaggggtt

SEQ ID NO: 8325 - DNA, 695 bp, Acinetobacter baumannii
atgggtcagaaggttcatccaatcggtatccgcctaggtgttgtgaaacgtcataacgctaactggtatgcgaatccgaaacaatacgctgaatacttgcttaaagatcttcaagttcgtgagtttttaactaaaaaacttaagaatgcgatggttagcaatattcttatcgaacgtccatcaggtgctgctaaagtaacaattagcacagctcgtcctggtatcgtaatcggtaaaaaaggcgaagacattgaaaaattacagcgcgaacttaccacatcatgggtgttccagcgcaagtaagcatcaacgaaattgatcgcccagacttggacgcgcgtttagttgctgaagcaatcgcttctcaattagaaaaacgtgtaatgttccgtcgtgctatgaagcgtgcggttcaaaacactatgcgtgctggtgctaaaggtatcaaagttgaagtttctggccgtttaggtggtgcagagatcgctcgtacagaatggtatcgtgaaggtcgtgtacctttgcacactcttcgtgcggacatcgactatgcaactatgcgtgctgaaactacttacggtacgattggtgttaaagtttggattttccgtggtgagattttaggtggcatgaaacaagtcatgaaccctgctcctgctgaagaacgtccagctaaacgcggtcgtggtcgtggt

SEQ ID NO: 8326 - DNA, 357 bp, Acinetobacter baumannii
atgttgcaacctaaacgtaccaaattccgtaaagtgcacaaaggccgtaacactggtctagcacatcgtggtagtacagtatcatttggttcgattgcaattaaagcaactgagcgtggtcgtatgactgcacgtcagattgaagctgcacgtcgtaccattagccgtcgtattaaacgtggtggtaaaatcttcattcgcgtattcccggacaaaccaattaccgaaaaaccattagaagttcgtatgggtaacggtaaaggtaacgtggaatattgggtttgtgagatcaaaccaggtaagatcctgtacgaaattgaaggtgtgaacgaagacttggcacgtgaagcttctttt

SEQ ID NO: 8327 - DNA, 684 bp, Acinetobacter baumannii
atgacagttcaaattattactattgatggtccgagtggttcgggtaaaggaacattagcggcgaaacttgctgcgtattatcaatttcatttacttgattcgggtgccttatatcgtttgttagggttgtcattacataaacatgatttattggaaaaattagatagccatttagatgagtgtgttaactatgctcgtcagcttaatattaagtttgaaacctcggcagagggaacattagttttcctcgatggggaagatgtaacccaaactatccgtacagagcgagttggagaatatgcatctaaagttgcagcaataccagagctcagacaagcactttttgagcgccaaagagcatttgcacaaactccgggattagttgcagatggccgagatatggcaacatcaattttcccggaagctaatgctaaaatttatttgactgcttcagctgagtcgcgtgctgagcgaagagtaaaacagttgcagggtatggggctagatgctaaaataaacgacattttagctaatatacaagcgcgtgacaaaagagacatggagcgagaagtagctcctctcaagccagccgcagatgcttatattattgatagttcggaattaacgatcgatcaagtatttaagttgatggttgattacgtcaatagccgtactgttagcaac

SEQ ID NO: 8328 - DNA, 594 bp, Acinetobacter baumannii
atgttaattcgtaagttatttaagtttgaaaatgcacacgttgtacgtaactgtacatcggatcgttgtaagcgatctattcatgggcatagttataaagtcgagttattacttaaagcttcgaaattagatcatggacaaatggtatatgattttgggctgttaaaaggcgtaattaaggaccttttcgatagctttgatcatgcgatttgtttctgggaaaaagatgatccgcaatatattgatgcttgtaagacttttagcgcgcgttggatctctttaccagtttcgccatctgctgagcaattttctcgaatcttcttctatttggcccagcaagtattacaatctactgttacccaaaatggggaaggtgatgttgaagtctattcagtgattgttcatgaaaccgatacaggttatgcccaaagttttcttgaagatattcaaaatgaacaaatggggctgttaaaccttgagggaattattttttcagaacaagtccaatccgaatgggctgatccagatatgtatgaaaatttaaaacaagggattaagtttcataatccgcatgttaacttacaagtagaagtg

SEQ ID NO: 8329 - DNA, 1415 bp, Acinetobacter baumannii
ttatataactctgagcaacgaaaaaaagttgaatttgtacctcgcaaagaaggtcacatcgatatgtacgtctgcggtatgaccgtttacgactactgtcatatcggacatgctcgagttatggttgcatttgactacattatccgttttttgcgtagtcaaggctggaaagtccgctacattcgcaacattaccgatattgatgacaaaatcatcaaacgtgcgaatgagaatggtgaaacaatccaacagctcaccacgcgtttcatcgatgccatgaatgaagatgcagcgaacttaggctgtttagcaccagatgaagcacctaaagcgactgaatatattgaccagatgcaaaatatgattggcaatttggtaaataaaggcgctgcttaccctgcttcaaacggtgatgtttattttgaagtcaccaaatttgaaaaatatggtcgcctctctggccgtaagcttgaggatatgcaagctggcgcaagtgagcgtgttgatgtagaagttgaaaagaaacatccttttgactttgtgctttggaaacatgcaaaagaaaatgaaccatcttggggcgtccccttggggtaatggccgtccaggttggcacattgaatgttctgcaatgtcgacttgctgcctaggcaatcactttgacattcatggtggcggttcagatttaatgttcccgcaccatgaaaatgaaattgcgcaaagtgaagcttcgactggtgagcaatatgtaaactactggatgcatgttggctttattaacgttgatggtgaaaagatgtctaaatctttaggcaacttctttacgattcgtgacgtaatggagaaattccacccagaagtgatccgctactttattgtgtcttcacactatcgtagccctgtgaacttctctgatgtagcacttaaagaggcaaaaacttctttaactcgtttctatcattcatttaaagcttatcaacaagtgtacggtcaaacgacaactgaagcgcttgatcaaagctttattgaacgctttaacaatgcaatgtgtgacgatttcaatactgccgaagcaatggctgtattgtttgaactgaacaaagagttaaaccgtgctgtaaaagaagagcaagctgaccaagcgactgtgctttattcgacattacgtcacctcaccaacattttaggtttggtacaacacaatgtagacgatttcttaaaatcagatatggacaagatgcacttgcttgtctgatgctgaaattgaagatttcattcaacaacgtgtgatgcgaaaaaagcaaaagacttgctaaagcagatagcattcgtcagtctttacttgagcaaggcgtagttcttgaagacactcgccaaggtacagttggcgtcgtgctgattaaacgttcaattag

SEQ ID NO: 8330 - DNA, 237 bp, Acinetobacter baumannii
gtgtcgttatatatcactgatgaatgcataaactgcgatgtttgtgaaccagtttgtcccaatgaagcgatctttatgggcgaagtgatttatgaaatcaatccggatttatgtacagagtgcgttggtcaccatgaccagccacagtgccaattattttgtccagtagactgtattccaaaagatccgcagcatgaggaaacggaagaacagttactcgacatactataaaagatt

SEQ ID NO: 8331 - DNA, 474 bp, Acinetobacter baumannii
atggcgaaagcaacagtagtaaagaaacataatggcggaaccattgcacaaaacaaacgtgcccgtcatgattattttatcgaagaaaaatttgaagctggcatgtctttactaggctgggaagtaaaatctttacgtgccggtcgtatgagtttgacagaaagttatgtcatttttaaaaatggtgaagcattcttatttggtgctcagattcaaccactcctttctgcatctacacatattgtgccggaagctacacgtacacgaaaattattattatctcgtcgtgaacttgaaaagcttatgggtgcagtgaaccaaaaaggttattcgtgcgttccattagcatgttactggaaaggtcatctggttaagcttgaaattgcactcgtgaaaggtaaacaacttcacgataaacgagcaactgaaaaagaacgtgactggcaacgtgataaagcacgtatatttcataag

SEQ ID NO: 8332 - DNA, 114 bp, Acinetobacter baumannii
atgaaagtacaagcttctgtaaagaaaatttgtggtagctgtaaagttatccgtcgtaatggggttattcgcgtgatttgtagcgcagaacctcgtcataagcagcgtcaaggt

SEQ ID NO: 8333 - DNA, 1356 bp, Acinetobacter baumannii
gtgtctatgtctcctagttcttcaggtcatgtcaacatgatgaaaggtcagccatttcacgtgaaatatcgtgaaattattcgccggatgagttttctaatcggtgcattgctggtctttcgactaggagcgcatattccagtaccaggcattaataatgctgcgttagaaaatttatttcatgcaaaccaaggaactattcttgggctattcaatatgttttctggcggtgctttagagcgaatgtcgattcttgctttagggatcatgccgtatatttctgcatcaattattgtgcagttaatgtctacagtgattccttctctcgaagccttgaaaaaggaaggggagcaaggtaaacgtaaaattaatcaatatacgcgtcagggtacattattacttgcagtggttcaggcagtaggtatgtgtgcaggtcttattggacagggtattactctatctagtggtcttgctttttatataccagcagttacatcacttgtcgcaggaactatgttcttaatgtggctaggtgaacagatcactgaaagaggtatcggtaatggtatctcaatgattatttttgcaggtattgttgctggtttgcctaaattaattatgcaatcagtatcatctgtcgataatggtcaaacaagtttaattggtcttgttatctttggtcttttgtctcttggtgtattggcagcgattgtgtttattgaaaaagcacagcgtcgtattccagtaaactatgcacagaagcagcaagggcgtcgtatatttacagctcagcaaacacatctaccgttgaaaattaatatggctggtgtgattcctgcgatttttgcgagctctttactcttgttcccagctagtttgggtcaatgggtaggaagtgcagatccgaatgctggtttaattaaacgtagtttacaagatttagctttagtattgtcgcctggacagcctttgtatttggtgctctttggtgcgttaattatctttttctgttacttttatacggctttagtatttagccctaaggaagtatcagaaaatctaaaacgcagcggagcttatgtgcctggtattcgcccaggtgagcaaactgctcgttacttagatcatattcttaatcgtttgacgtttattggtgcgatttatattacagtcatttgtttgatgccaatgattctacaaagttcttttggtattccattctatttgggtggtacctcattactcattgtagtcgttgttgttatggactttatggctcagctacaagcgcatttaacttctcatcaatatgacaatcaaacattaatgagaaaaacgactgctcatcctaaggga

SEQ ID NO: 8334 - DNA, 438 bp, Acinetobacter baumannii
atgactctgcgtttaaatgagcttgcacctgccgaaggtgcaaaacgtgaacaccgtcgtttaggccgtggtatcggttctggcgttggtaagactggtggtcgtggtatcaaaggtcaaaaatcacgtaaaagtggtggcgttcgtccaggtttcgaaggcggtcaaacagcgatttatcgtcgtttacctaaattcggtttcactagccaaatcgctttaaaaactgctgaagtacgtttgtctgagttaagtaaagtggaaggcgatatcgttagccttgaaactttaaaagctgcgaatgttgttcgtcgcgatcaaattcgcgctcgtatcgtgctttctggtgaaatcactcgtgcattcactgttcaaggtgttgcattgactaaaggcgctaaagctgcaattgaagcagctggcggcaaagtcgaggag

SEQ ID NO: 8335 - DNA, 459 bp, Acinetobacter baumannii
atggaaattcctcgcatcacaaaaatcactcttaacatgggtgtaggcgcagcagctactgataagaaattattagacggcgctgtagctgacatgcaattaattgctggtcaaaaaccagtagttactcttgcacgtaaatctatcgctggtttcaaaatccgtgatggttggccaattggttgtaaagttactttacgtggcgaccaaatgtacgaattcttggaccgtttgatctctatcgcaatccctcgtatccgtgacttccgtggtttctcagcgaaatctttcgacggtcgtggtaactactcaatgggtttgaaagagcaaatcgttttccctgaaatcgatttcgacaagattgatcgtattcgtggtatggatattactattactacgactgctcgcaccgatgacgaaggccgtgcgcttatgcgtgcattcggcttcccgttcaaa

SEQ ID NO: 8336 - DNA, 174 bp, Acinetobacter baumannii
atgaaaacgattaaagttacccagactaaatcttcttcacatcgcttgaaaaatcacaagctttgcttacaaggtttaggtctgcgtcgtattggtcatactgtagaagtgcaagatacgccttctaaccgtggtatgatcaacaaagtctactatatggttagtgtagaggaa

SEQ ID NO: 8337 - DNA, 495 bp, Acinetobacter baumannii
atggcaaaagttgaacaaaacgaaggtctcgttgaaaagctggttgccgttgatcgtgtagccaaggttgttaagggtggtcgtatcttctctttcacagcattaactgttgtgggcgatggtaatggtcgcgtaggttttggtcgtggtaaagctcgtgaagttccagctgctatttctaaagcacttgaagctgcacgtcgtaacatgatcactgtagaccttgctggtactactttacaacaccctgtgaatgctcgtcatggtgcaagccgtgtatacatgcaacctgcttcagaaggtactggcgtaatcgctggtggtgcaatgcgtgccgttcttgaagctgcaggtgtacataacgtacttgctaaatgttatggttctactaacgctgctaacgtagtaaacgcaacttttaaaggtttgcgtgatatgacttctcctgagaaagtcgctgcgaaacgtggtaaatcagtagaagaaattcaaggg

SEQ ID NO: 8338 - DNA, 348 bp, Acinetobacter baumannii
atgaacgaaaagaaacaatcccgtttgcgtcgtgcgaaaagcacacgcttgcacatccgtgcattgggtgcgactcgtttgtgtgtaaaccgcactccgcgtcacatctatgctcaagttatttcagcagatggtggcaaagttttagcgcaagcttcaactttagatgcatctttacgtagtggtactactggtaatattgaagctgcgacgaaagttggtgctttaatcgcagaacgtgctaaagcagctggcgttactaaagttgcatttgaccgttctggttttaaatatcatggtcgtatcaaagccttggctgatgctgctcgtgaaggcggcttggagttc

SEQ ID NO: 8339 - DNA, 531 bp, Acinetobacter baumannii
atgtctcgtgtggctaaagccccagtaactgtaccaaatggtgtaacagttactcagaacggccggcaggtcgaagtgaaaggcagcaaaggtacattgtctttcaacctgcatgcgctggtcgagctaaaacaggaagaaggtaaacttcaacttgctccagctaaagaatcgaaagatgcttggatgcaagctggtactgctcgcgctgtattgaacaaccttgttaaaggtgttagcgaaggcttcgaacgtaagttgcagctagttggtgttggttataaagctgcggttaaaggtacagttgtaaaccttaaccttggttactcacacccaattgactacgctttacctgaaggtgtaacagcggaaactccaactgctactgaaatcattttgaaatcagcaaacaagcagttgttaggtcaagtagcggcagaaatccgtgcataccgttctcctgaaccatataaaggtaaaggtgttcgttattcggatgaagtcattcttcgtaaagaagctaagaagaaa

SEQ ID NO: 8340 - DNA, 393 bp, Acinetobacter baumannii
atgagtatgcaagataccgttgccgacatgctaacacgtgttcgtaacgcacaaatggctaagaaacaaactgtttctatgccgtcttctaagttgaaagttgctattgcaaacgtacttcaacaagaaggttatatttcaaacgtagaagttgctcaagaagagacaaaatctactttgactattactttaaaatatttcgaaggcaagccagttatcgaaatggttaagcgcgtaagccgtccaggccttcgccaataccgtggtaaagataaacttccaagcgttaagcaaggtttaggtattgcaattgtttctacaagcaaaggcatcatgactgatcgcgctgcacgtgctgcgggcatcggtggtgaagttattgcttttgtttct

SEQ ID NO: 8341 - DNA, 303 bp, Acinetobacter baumannii
atggctaagaaaggtatgattaatcgcgaattgaaacgcgaaaaaactgttgctaaatacgctgcaaaacgtgctgaattaaaagctactattgcaaatgtaaatgcgagcgacgaagaacgtttcgaagcgatgttaaagttacaagcattgccacgtaatgcatctccggtacgtcttcgtaaccgttgtggtttaactggtcgtcctcatggttacttccgtaagttcggtttaagccgtaacaaattacgtgacacagtaatgcaaggtgatgtaccaggcgttgttaaggcaagctgg

SEQ ID NO: 8342 - DNA, 1137 bp, Acinetobacter baumannii
atgctcgcccaaggttttcaacctgtaggcaaagatttccctgtgtttcttcatcccgaaaccaaagaagaatacgcacttgcacgaaccgaacgaaagtctggacagggatatcacgggtttcaattctttactgatacaaccgttagtttagaagatgacttaattcgtcgagacttaaccattaatgcgattgcaatggatcaagatggtaaaatatatgatccatatggtggtcaaaacgacttagaaaataaaattctgcgccacgtttcagaagcttttgctgaagaccctttacgggtattgcgagtcgcgcgttttgccgcccgatatttcccatatggttttcaaattgcgccagagacattgcaacttatgcaaaccatggcagattcaggtgaacttgatgcactaacaccagagcgcgtctggaaagaaacttcacgcgctttaatggaaaatcatgccgatatttatttccaaactttgcgtgattgtggggctttaaaacatcttttccctgagattgatgctttattcggtgtgcctcaacgccccgaatatcatcctgaagtggattgtggcattcataccttaatgtcattacagcaagcttgtaagtcgaactactcgcttgatgtacgtttcgctgttttagtgcatgatcttggtaaggccctcactccagctgaagaacttcctcgtcatatcatgcatgaagaacgtggaattaagccagttacccaattatgtgaacgtttaagagttccgacacagaccaaacaattggcattatctgtttgtaaagaacatttaaaatgtcatcagattatgtccttgaaacctggtactttatggcgtctattgcaacgcttagatgttttacgtcgcccagaaagagtggaagcttttgtacaagcctgcgagtgtgatgcaaaaggcagattaggactagaagatcgtccatatcctcaagctcaatacatgcgtgaagcaatgcaaattgttcgctccattaaagttcaagatttaccagagaacattaagggtgctgaaattggtgaaatgcttattcaatatcgaattgaagctttagctgaatttaaaaatcagcatcaaagtcttagtcactcc

SEQ ID NO: 8343 - DNA, 773 bp, Acinetobacter baumannii
ttagatgctgcacatggttaatctgcgatgctccctgcagcagcaatgggtgcagaccaaattggtattgcactgcaaaccccgctcgttttaagtaaaaaccgtgcttttatcagcttaagccaaaaattaatttatcaactggctattcaagaaagcgataatgcacaaactaccgcccaaaaagttattcaatacattgaacaagatcatactctttctctagcccatgtatttaaacattcaatccatcattattgtttaagagaatggcttgccttggcagactctagaatagctcaaacgctcaaactcaaagcacttccgccaccgtatatggtcgaagctttagataaccatgtgattgatggtttttgtgtgggagagccttggaatactcaaggtgaacttttaggtttaagtaaaatcgtctgctcaagtcaagacattattcccaatgtggcagataaagttctcgcagtaactcaagaatgggctgaacaacatcctcaaaccttagttgcccttacaacggcaattatgaaagctcaaaaagaattgagtaatttaaaagattttgcacctatcttaaagttattggtcgagtttgggattgtccgatttcactgctctgaagaagtacatgtcgataaatattatatgattcaaaatattgtaaagtacttggttaaagaaaatgcggctccccaacctgaagatttccattggttatttcagcaaatgcaaaaatgggaaaaacttcaattagcccc

SEQ ID NO: 8344 - DNA, 417 bp, Acinetobacter baumannii
atggatatccgcaaaattaagaaactcatcgatttaatgattgagtctgacttgcaagcgattgaagttaaagaaggtgatcaatcgatcgctttaactcgtcgcaatcctgtcgttgctgcggctggtgtagcacttccggcagctcctgttgctgaagcacctgttgcaaaaacaccacgtggagcagttgaaacttctcctatggttggtgtgttctatgctgctccaagcccaggcgaagcaccatttgttaaagtaggtcaaacagtatctgctggtgagactttgggtattattgaagcaatgaaaatcatgaacccgattgaagcaactcaaagcggtgtgattgaagaaattttagtgaaaaatggtgaagtgatccaattcggtcaacctttattccgttatcgcgcg

SEQ ID NO: 8345 - DNA, 1368 bp, Acinetobacter baumannii
atgttgcaaaaagttttaattgcaaaccgtggtgaaatcgctttacgaattacccgggcttgcaaaacattaggaatcaaaactgttggtatctattcagatgccgataaagatttgatgcatttacgtttcgttgatgaagcagtatgtattggtccgggtgcaagtagtgacagctatttaaacatcccggcaattattactgctgcagaaattactggtgccgatgcaattcatccaggttatggcttcctttcggaaaatgccgagtttgctgaaattgtagaaagctcaggtttcacatttattggccctcgcccagaacatattcgtttaatgggtaacaaggtttctgcaattgttgcaatgaaaaaagctggcgtacctacggtacctggctgcgaccatgctgtaactatccataacgcattagctgaagcgaaagaaatcggtttcccgcttattgttaaagcggcagctggtggtggtggccgtggtatgcgtattgttgaacgtgtagacacactacttgagtcagttcaagcggctcaacgtgatgcagaaatgtggttcggcgatgataccgtgtatatggaacgcttcttacaaaaacctcgccatgtcgaagttcaagttttgggtgatggtaatggccacgcgattcatttatatgaccgtgactgttcattacaacgtcgtcaccaaaaagtgttagaagaagctcctgctccaaatctaccggaacaagcacgtgctgatattttacaagcctgtgtacacgcatgtcagttaatgcaatatcgtggtgctggtacgtttgaattcttatttgaagatggtgaattcttcttcattgaaatgaatactcgtgttcaggttgagcaccctgtaactgaaatggtaactggggttgacattattgaacagcaattacgtattgcagctggtttaggcttagagcttcaacaagaagatattgaagttcgtggtcatgccattgaatgtcgtatcaatgccgaagatccaacaacattcttaccttcaccaggtaaaattgaaagtttctatgcaccaggtggtgcgggtattcgtttagattctcatatctatcctggatatagcattccgccatattacgattcaatgattgcaaaattgattgctcatggtaaagatcgtgaaacttcacttgcccgcatgcgtcaagcgttagatgaaatgattcttacaggaattaaaaccaatattcctttacataaagatcttattttgcaggataaaaacttctgttctcaagcaatggacatccattaccttgaaaaacacttgttaaagcaagtggaagaagaaaagaaagctgaaactgct

SEQ ID NO: 8346 - DNA, 639 bp, Acinetobacter baumannii
atgaaaacacgtccttcaaaaatcgtttgtgtgggcagaagttatgctgatcatgtaaaagaactgaacaatgcaatgccaggacgtccggtgttatttatcaaaccaccaagtagtttgattggtttagatgaaggcatttcatggaatcctgcgtggggtagttgtcatttcgaatgtgaatttgttttacgcattgatcagccactaaaaggagaaactgatccgcaaaaagtattgcaggccattggtgcagtgactttaggattggatttaacattacgtgacttacaaaatgagttaaaagataaaggccaaccctgggaaagagcaaaggcttttgatggttcatgtgtgcttgcagactgggtagatgtgagtgaaatcacggactgggaagagactagatttactttccatattaatgatgaattacgtcaagatggtaatactgctttgctcatgtttaatattgcttatcttttagtagatattaatcaggtgttctcacttgagccaggcgatgtcattatgacgggtacacccgcaggtgtagggccattaaatgctggcgatcagttaaaaatgactttgaaaggtgctactcaagatttgttttgggaaacatttgttaaagca

SEQ ID NO: 8347 - DNA, 357 bp, Acinetobacter baumannii
gtgatgcctcgtattgccggtgtaaacattccggataacaagcatgctgttatctccctcacttacatctttggtatcggtcgccacactgctaagaacatcttagctgcagttggtattactgagactactaagatccgtgagttggacgatgcacagcttgatgcgattcgtgcagaagttgctaaggttcctaccgaaggtgacttacgtcgcgaaatttccatgaacattaaacgtttaatggatttaggttgctatcgtggccttcgtcatcgtcgcagcttgcctgtccgtggtcaacgcaccaaaactaacgcacgtacccgtaaaggtccgcgcaaaccgattaaaaag

SEQ ID NO: 8348 - DNA, 384 bp, Acinetobacter baumannii
atggctaaagatactcgcacacgcaagaaggtcactcgtaccgtctctgaaggtgttgcacacattcacgcgtcttttaataacaccattgttacgattaccgatcgtcaaggtaatgcattggcttgggccacctcaggtggacaaggcttccgtggttcacgtaaatcaactccgtttgctgctcaggtagctgctgaagttgctggtaaagcagctttagattacggtttgaaaaaccttgacgtccttgtaaaaggtcctggtccaggtcgtgagtctgcggttcgtgcattaggcgcagtgggttataagattaacagcattaccgatgtgactccaattcctcacaacggttgccgtccacctaaaaaacgtcgcgtg

SEQ ID NO: 8349 - DNA, 624 bp, Acinetobacter baumannii
atggctcgttatattggtccaaaatgcaaactctctcgccgcgaagggacagacctgcaacttaaatctggcgttaaaccatttgacgtcaaaactaaaaaagctaacaaagcacctggtcaacatggtcaggctcgcggtggtaagcaatctgagtattcactacaattacgtgaaaaacaaaaagtccgtcgtatttacggtgtgttagagcgtcaatttagtaactactataaagaagcagctcgtgttaaaggcgcaactggtgagaacttgttgaaattgcttgaaagccgtcttgataacgttgtttatcgcatgggttttggttctacacgtgcagaagctcgtcagttagtaagtcaccgtagcattactttgaatggtcgtcgtgtaaacatcgcatctattcaagttaaagctggtgatgtaattgcggttcacgaaggtgctaaacaacaattgcgtattaaaaacgcgattgaattggctgctcaacgtggtattccagcttggatcgaagttgatcactctaagcttgaaggtacgtttaaagctgcaccagatcgttctgatttacctgctgaaatcaacgaaagcttgattgtagaattgtattctaaa

SEQ ID NO: 8350 - DNA, 1005 bp, Acinetobacter baumannii
atgacgcgtactgcaaacgagtttctaactccgcaagcgatcaaggtcgaagcggtaagcgggacctcggcaaaagtgattctggaacctttagagcgtggttttggccatactctaggtaatgctttacgtcgcattctattgtcttctttgccaggcgctgctgtggttgaagtagagatagaaggtgtcgagcacgagtacagtactttagaaggcttgcagcaggacatcgtcgagctcttgctgaacctaaaaggattgtctattaagctgttcgatcaaaatgaagcttatttaacattagaaaaacaaggtcctggtgacattactgctgccgaccttcgtttacctcataatgttgaagtggttaacccagaacatttaattggtactttgagtgctacaggctcattaaaaatgcgcttgaaagtttctcaaggtcgtggttatgaaacatctgactctcgtttccctgaaggcgaaacacgtcctgtaggtcgtttacagttagatgcttcttatagcccaattaagcgtgtttcttacaccgtagaaaatgcgcgtgtagaacaacgtaccgatttagataaactggtaatcgatcttgagaccaacggtacggttgatcctgaagaagcaatccgcaaagcggcaacaatcttgcaacaacaaattgcaatttttgttgatcttcagaaagaccaaactcctgttgctcaagaacctcgtgaagaagttgacccaatcttgcttcgcccagtagatgatctagagcttactgttcgttctgctaactgtttgaaagcagaaaatatttactacattggtgatcttgttcaacgtactgaagttgagttgttaaaaactcctaaccttggtaaaaaatcgttaacagagatcaaagatgttttggcatcgaaaggtttacaactcggtatgcgtcttgagaactggccaccagctagtcttcgtatggacgaccgttttgcctatcgtagccgt

SEQ ID NO: 8351 - DNA, 375 bp, Acinetobacter baumannii
atgcgtcatcgtaatagtggtgtgaaattaggccgtacaagcagccatcgtaaagcgatgttccaaaacttggctaattctttatttgaacatgagttgatcaaaacaactttgcctaaagctaaagaattacgtcgtgttgctgagcctttaatcactctagcaaaaaacgatactgtagcaaatcgtcgtttagcatttgctcgtactcgtaatgctgcaactgttggtaaattatttaccgtactcggccctcgttacaaagaacgtaacggcggttatctacgtgttcttaaagcgggcttccgtgctggtgatgcagcaccgatggcttacgttgagcttgtagatcgtgaagtgaacacttcagctgaa

SEQ ID NO: 8352 - DNA, 765 bp, Acinetobacter baumannii
gtgactattcaaaatgaacaagaattccttgccagttatgatcgccgagattatgacgcacctttactcactgttgatatggctattttctcggtattgaatggtcagttgcaggtattactcattaagcgacccaactttccagctaaaaaccaatgggctttacccggcggtttcgccgatttaacccatgatcaagacttgatggcaacggcttatcgtaagctagtcgaaaaaacaggaattgcttcaccttatttggaacaagttgcctcggtcggcaattccaaacgtgacccgcgtggctgggctgtgacgattttgtattttgcattaatcgattttaatgcctatcaacaccaagcgttggctgaatacagtgaatgggtgcctgtagcaaaagcacaagatttagcattggcgtttgatcataatgagttgcttaacttggcattagagcgtttaaccaataaaacccgttatactgcattgccagctagtctcatgcctgaattatttacgctgaccgagctacaaaacatttatgaaattattcttgggcaatctttagataaaaaagcgtttagacgccgtatgatagaagcgggtgcagttgaagaaaccaaccacagtaaaattgtgggcaaacggccagctcagctttaccgctatgcactcgattcttttgattttatatttcctcgttcactcgaattacctagaaataaagagggtgaaggcaagcaaaacaatgagctttctgac

SEQ ID NO: 8353 - DNA, 1863 bp, Acinetobacter baumannii
atggcaattccacagcatacgattgatcagatcttagatcgcacagatattgtcgatctgattggtcaacgtgtgaaactgaaaaaaaccggacgaacttattctggttgttgcccttttcatcaagagaaaacaccttctttccatgtttaccgcgataaacagtattatcactgctttggctgtcaggcgaacggaaacgctattcgcttcctaatggacattgataaccgaaactttattgatgtgatgaaggaattatcgagtaatacgggagtcgaattaccaaaagataatactgataataaaaaactgtcttatacgcgccaagttacaaagccatcaacaccgcccaaaacggttgctgaaccgactactcaagcacctatagaagatcagtacaatacgtttgaacccgtatattttgatgatccctttgcccagtttgaacagccatttagctttgatgagccagtacaagaaggtaatttatatgaccttctagaaaatgttgcccagttttacgaacatcaattaccgactagtcaaaaagctaaaaattactttaagcaacgcggtttaagtgaccagactattcagttctggcgtttaggttatgctcctgaagactggcagcatctagaaaaagctttcccttatgatattgagggcttaaagcagcttggcctcatccgttcaagtgacagtggtcgtgacttcgaccttttacgtgatcgtgttatttttccaattcgggaccctaaaggccgtgtagttggctttggtggtcgtgcgctcaatgatgaaattaagcctaaatacatcaactcgcccgattcggaagtattccataaaaatcaattactgtatgggctatacgaaggccgaaaattaaaagcaaatgactggttaatggtcgaaggatatatggatgtcattgctttacagcaatatggcattactggtgcagttgcgactttaggaacggcaagtaataccgaacaccttaatatcttatttaaacaaaataaccggattacgattgcttttgacggtgatgctgcaggtcaaaaggccgcacgccgaactttagaaattgcattacccttactcaatgatggtcgtgagctcaaattctttgtattgccaaatgaccatgaccctgactctttaatccgccgtgaaggggtggaaaatttccagaagcttctacagcaagctcctttactttctgactttgtttttgctcatcttactgggcaacatgacattagtacgcccgaaggtaaaagtcttgttatgggcgaattaagagaattgactgagttattgccaaaacaagggtcttttcgctatctactaacccaatctttccgtgaaaaattaggcttaggtaagcgtttcactccacaaattagccacgatgcatccctatcttttaatattcaaacgaaagatgaagactttgcaattgcaattttgatgcatcatccgtttctttatattcattttgaaggattacgggcttatattccgcaagatgagttgttggctaaaatattagcaattttaaaccgtatatttgacgaattgcctgatgaccaagaactagctacctactatgttttaggtgcttgtagcagttattgccatgaaattgcagatattatgcaaaggaccaatattcaagccttaactcaagcaccggaagtagcagataaactcgcaaaagaatatgctttaggcttacaagaaagatatttacgtcaaaaactaaaatctaaaatctcattagttgagtcaagaaacttaagacaacaactcaatgaacttaccaaacagattagcttaagacttctttct

SEQ ID NO: 8354 - DNA, 1281 bp, Acinetobacter baumannii
atgtctttctttgcattgggtgtcaaccatcaaacagcttctgtagaactccgcgagcaaattgctttcaatgcagagcgattaagtaatttgcttgccgaacaacgtcatcacgagtctttaaaagacttagtggttgtctcaacatgtaaccgtacagaagtctacgccatggcggaagatgccgaaagccttctgaaatggttagctgatgccaataatattgatgtaaagcagttaattcatcatgtttatcgttacgaaaatgctcaagccatcacacatttaatgcgtgtagcaagtggtttggactcactcatgttgggcgaaccgcaaattttagggcaggtgaaaagtgctctagcattgtctaaagaagcgcaaacagtttctccagaattaaatagtgtatttgagtacgctttttacgccgctaaacgtgtgcgctctgaaacagctgtaggtagtcatgccgtttcaatgggttatgcagttgcccagctcgctttacaggtttttagtaaacctgaaaaactaacggttatggtggttgctgcaggcgaaatgaacagccttgttgccaagcatttagctgaaatgggcgtcgccaagatgattatttgtaatcgtagccgtgaacgtgccgatcaattggcccaagaaattgcacatcaagttgaagttgagattattgatttttcagatttggctgagaatctatatcgtgccgatgttgtttcaagttgtacgggtagtttgcatcaggttattgcttatgcagatgtcaaaactgcattaaaaaaacgccgttatcagcaaatgttaatggtcgatttagctgtaccgcgtgatattgaccctaaagtagagtcgcttgatggggtgtatttatacggtgtagatgatctacaaagtgtgatcgatgaaaacttggctcaacgtcgtcaagcggctgttgaagctgaggtgatggttaatcagctagccacccagctaattacgcatcaaaaagtcaaagaggcgggcagtacaattcatgcttaccgccaacatagtgaagaaattagtcagcgagagcttacccaggcattagaggctctgcatcatggtggaaatcctgagcaagtgttgcagcaatttgcccatcgtttgacgcaaaaactaatacatccgacctctatgttgttgcgtgaagctgcaaaagcagagagcccggactattttgaatggttacagcaacatttacaggatgtattcgatcatgagcgaaaacccaaacgt

SEQ ID NO: 8355 - DNA, 1713 bp, Acinetobacter baumannii
atgtcagaggtagttacgattgccgccgacgcggtaaatgccgtgctgagtcagcccagcacaaaagtaaaactaatcgttcaaaaggcgctttcgtaccaagttgacggcgctgaaacaatggctgtttttaaacagcataagtgggatggccgttcgtccttctttgtgtataaaaattgctccttccctgccggctttcttcatttcgtcgctgccaatcttcgccgtgaggggtacaaggtcaatattgttcgcaagcccttccctgcccctttaggccctgagcgcccacaggtagacgcttttggttatgactctaaatatgattaccaaccagaggttatggacaggttggtaaaacatggccaaatcattgctcagattgctacaggtggcggtaagtcacgtattgcccgtctttgtttcgctcgtattgctcgccctaccctctttctcaccacgcgctcaatcctgatgtatcaaatgaaggatgcgtttgagaaagatatgggcattccatgttctgtctttggtgatgggcaatttggcaacgtgaacgctcaaggtcagacgactatcaaaatgatgtcggttggcacagtacagacattcatgagcaagttggaagtcaccacaattcaggaagagttcaatgttctgttcaatgccgtgcaggagaagttcaaaaaagaaattgtggcattgaagggcaagttagcgaaagccaagaaaagtacagctgaaattacagctgctacaaatgatctgatttctaaacagcaggcatggttgaaggccaacaatcaagacatggccaataaggccaaagccaaatttgacgaaaagaatatcgagcgtcaaaaaaccatcaagcttctttccatgttcgagttcgtaattttggaagaggcgcatgaagcttcaggtaattcttactacgaaatcttgcgctattgtaagaatgctcattaccgcttggcattaaccggtacgccgtttatgcgtgagagcgaagagtcgaacatgcgtctaatggcatgctctggcccgatcgcaatcaaagtcactgaggaaatgctaattcagcgcggtgtacttgctaagccttacttcaaatatattgagcttcgcaaaaagccagatcaccttctccgcactactggttggcaatcggcatatagattgggtgtcacagaaaatgaagaacgcaatttagctattgtgagtgagattattcgagccaaagcttacggtttgacgtcgatgattcttgtgcaacatacatcgcatggcgagcatttaaacgagcttttaacgcaatatggtttacgtgctgagttcattaagggtgaaaacaatcaagctgagcgcaaactagcgttgaacaagcttgccagtggttcggttgatgcgctaattggtacaaccattttggatgtgggagtagacgttccagctgtgggtatgattattcttgcgggcggcggtaaggctgaaattgcattgcgtcaacgtattggtcgcggtttgcgtgcgaagaagattggtccaaatgtggcgttcattgtcgactttacagaccattggaatacacataccaaaaaacatgctacgcagcgacgcgagattgttttgcatactaaaggtttcggagagaacattgttaatgatttcaattttgaacaattaggcttcaccagattgtctgca

SEQ ID NO: 8356 - DNA, 147 bp, Acinetobacter baumannii
atggatgacttgggtgctgactctttagatttagttgaacttgttatgtctttcgaaaatgacttcgacatcactatccctgatgaagattcaaacgaaatcactacagttcaatctgcaattgactatgtaactaaaaaacttggt

SEQ ID NO: 8357 - DNA, 471 bp, Acinetobacter baumannii
atgggtctttttgattttgtaaaaggtattggtaagaaaaataccgcaccagcagaaccacaagcagctccagcaacaccagcagaaccttctgcacaagaaattgcgaataaattattgggattgattaaaagcttaggccttggggtggaaggcttatctgtaacatataatggctcaactgacactgctattattaaaggacaagtccaaagccaagcagataaagaaaaaatcattcttattgtgggtaatgtagatcatgtggcacaagtagatgaccagatgactgttgcaactcctgagccagaaagcaaattttatacagtgaaatctggtgataatctttcaaaaattgctaaagagttttatggtgatgccaatcaatatcaaaaaatctttgaagcgaataaaccaatgctgaaagatccagatgagatttttccaggacaagttttacgtattcctcaa

SEQ ID NO: 8358 - DNA, 294 bp, Acinetobacter baumannii
atggcaaacttcgtattaaacgctcaagcgcgtgctgaagacaaacaagggaaaggtgcgagccgccgccttcgtcgcgaatctttagttccagctatcatctacggtggtaacgctgagcctgtagcagttactttagaacttcgtgagcttgtaaaagctttagaaagcaacgctttctttgaagaagttgttgaaatcaaagtaggtgacaaagttgaaaacgttaaaatccaagcgttacaacgtcacccagctaaaaacactcctatgcacgctgacttcaaacgcgca

SEQ ID NO: 8359 - DNA, 941 bp, Acinetobacter baumannii
cgtattcttagtggaaatgctcatccacagttcgctcaaaaagtcgtaagtcacttacatatccctctaggtgctgcatcagtcgcgtcagttactctgatggtgaaatttcagtagaaattactgaaaatgttcgtggtaaagacgtatttatcgttcagcctacttgtgctccaaccaatgacaaccttatggaaatcttggttatggcagatgcttgcgtcgtgcaagtgctggtcgtattactgctgttatcccttatttggttatgctcgccaagaccgtcgcccacgttctgcacgtgtgccgatcacagcgaaagttgttgcagacatgcttaccactgtggtattgaccgtgtcgtaatgattgacttacatgctgaccaaatccagggcttcttcgatattccagtcgacaacatctacggtactcctgctttgcttgctgacttacgtcaacaacaacatgacaaccttatggtggtttctcctgacgttggcggtgttgtacgtgctcgtgccgttgctaaacagatgggtgatatcgatttagcaatcatcgacaaacgtcgtcaaaaagccaacgagtcgcaagttatgcacttgattggtgacgtaaaagatcgtgattgcgttatcgtagacgacatggttgatacagctggtacattgtgtaaagcagctgatgcgcttaaacaattcggtgcacgtcgtgttgttgcttacgcaactcaccctgtactttcaggcaaagcaattgagaacttacgtaactctgttattgatgagttagttgtaactgacacaattcctctttctgaagaagcattaaacttaggcaaaattcgccaagtttctgttgctagcatggttgctgaaacgattcgtcgtattaataacgaagagtctatcagcgcgatgttcgatagtttataatat

SEQ ID NO: 8360 - DNA, 873 bp, Acinetobacter baumannii
atgattaaaaaggcagttttacctgttgccggtttaggcacacgttttttaccagcaagtaagtctattccaaaggaaatggtaacagtagttgaccgtcctgcaattgaatatgtagtacgtgaagctgtagaggctggaattgagcaaattattttagtcactcattcatcgaaagcctcaattgaaaattattttgataggaactttgagttagaaacgactttagaacaaaagaaaaaattcgacttacttgcagagattacacaaattgtgcctgagcatgtaagtgtaatcagtgttagacagcctcaacctttaggtttaggacatgctgttttatgtgcaaagagtgttgtcggcgaagatgattttgcagtgctattaccagatgtactagtaaaagatggctctggacaaaatgatttatctcgtatgatttctcgttataactcaagccaagctgctcaaatcatggttgaggcagtgccagaccatttagtagatcaatatgggattgtcgatgtaaagcatagcccaaatgtgggtgaaagtattgccatgcagggtattgttgaaaagcctgcagtaggcgctgcaccatcaaacctatctgtggttggccgctatgtgttacctgccaagattatgcaattacttgagaacacgccgaaaggtgcaggtaatgaaattcagttaactgatgcaattgcaatgcttcaagacacagatactgttgaagcttatcgtatgcaaggccaaacgtttgactgtggtagtaagcttggttatttaaaagctgtattacattatggcttagaacatccaaaattaggaatggaatttaaacagctgattcaagaacttaaatta

SEQ ID NO: 8361 - DNA, 618 bp, Acinetobacter baumannii
atgatgaaacggatagttgacatcgtaatttccttaaccgcattaatcattttgtccccaatctttatttgggtagcatataaggttcgtaaaaatttaggttctccggttttcttttaccaagaaagaccaggaaaagacggaaaattatttaaaatgattaagttccgttctatgaaagatgcatttgatgcacagggtaatccattacctgatgaggagcgtattactccatttgggcataagctgcgctcaaccactttagatgaaatgccacaacttattaatgttttaaaaggcgatatgagcattgtgggtccacgtccacagttagctgactttctagaacactatacttctcgacaaatgcgtcgtcatgaagtcagaccgggtatgacaggtcttgctcaagtaagtgggagaaataatttaagttgggaagaaaaatttgaacttgatatcgagtatgttgaaacccataatttatctttagactttaaaattatgatgaaaacagtcttggttatgttgaaaaaagaaggaattaatgctccagatcagttagtaggtgcaagccgcttttctggttcagcgcgtgatgaagacaaagcaagttta

SEQ ID NO: 8362 - DNA, 1008 bp, Acinetobacter baumannii
atgaatgttattatatctttcatcattctttttcttatttcttttgtattaacttttagtgttcgaaaatatgctttaagaaaaaatattattgatttacctaactttagaagttcacatgtgaagcccacgccacgtggtggtggagtagccatagtgataagtattctagtggctttattatatagctatatatctcagtttataagtttgaatgattttttcattataggggggagttgtttgcttattgctctccttggtttttgtgatgatcatgctcatatcaattctatgttgcgcttaagtattcattttattactgcaacatttatcgtatttagtttaaatggctttgcccaagtctctgtttttaataatttaaacttaggtttttttaccaacattcttgctattctttttctggtttggatgcttaatttatataactttatggatggtattaatggtattgcaagtatcgaagcaatatcagtcgggctaagtctagctttattatacagttggtatgacatcaataattttatattacttgcaatcacttctattgtctgtggttttctcgtatggaattttccaaaagctaaaatctttatgggagatgtaggtagtagttttttaggttttttattcgctgtattagctttatatgctttaaaaatagactttaagttatttctagcttggatcatttgtctaggagtttttatagtagatgcaacctttacaattataaggagaatactaagaggggagaaaatatatcaagctcatcgaagccacgcttatcaatacgctgctaggtattttgatagtcatacacccgtaactttagcagttttaatcattaatcttatatggctcttaccttgtgcattttttgtattaaataaagcaatttctccattagtcggtttaataatcgcatattttcctttaataattttagctatttattttaatgcaggacagttagaacataaaact

SEQ ID NO: 8363 - DNA, 1185 bp, Acinetobacter baumannii
gtgaagaagaaggtctatttaatcacggaatattatcatccatatcaaaatacgacaggttacttgttaggaaaattgtatgacacgttgaatgtacaaagtgatatagaccttgttcttattgcaaaagaggacatgaattgtcctcaacatgcaaatgcacactttattaaagctaaaaagccaaataaggcaagtttgtttaaaagatttttatatgagctaattatcgcttttagttttttaatgaagactttgaaagtagtgaaaaaggatagtatcgtttttacaggtacgacacctattttactgcttttcgttttatttattattaaaaaatttctaaattttaaatggatattattagtccatgatgtatttcccgaaaatttagcagcggctaaaattttaaaaaaagatcattttttatttaaaatcttaaaaagtttatttgataggatttatgcaagtgctgatgaggtcattgtcattggcaaagatatgaaagagttagtacatcaaaaaacgcatcaaagtaacaatattactgtagtgcagaattggattgactcatctgatattggtacagagcccaaaactaataaccgaattttacaagaattgaactggttggatagtgaaactacgatttttcaattcttcggtaatattggtcgtgtacaaggcgtagaaaatattctgcatgctattcagaaaatgaaatatgcacatttggcaaaattcatttttattggtgatggtgcatatgttgctcgtcttaaagagcaaatacagtctttgggatctcaaaatattctttattatggatctttagatcagaaagaaaaaacaactggtttaaatgcgtgtgatgttgcattgattactttggctgatgggatgttaggtttaggggttcctagtaaatcttatttttctatggcggcagataagcctttgctagcaattatggatagtgagtcagaagtagcagatatgattaatactcatcatatcggttgggtagtcccacctaataatgaagaggctttggcaaaacaacttgatgaaattgtgttagcaaaacactgctatgcattcaattcatcaagagaagtattaaatgaattttattcagaaaaagtagcaatgagtaaaattctaaatattattagaaaatttact

SEQ ID NO: 8364 - DNA, 1128 bp, Acinetobacter baumannii
gtgaaaaagttaaaattaatgacagtggtgggcacacgtccagaaattattcgtttatctcgtgtaatggctgcatgtgatgaatattttgatcatattcttgttcatactggacaaaactatgactatgaattgaatgaaattttctttactgatttgggtatccgtaaacctgaccatttcttaaatgcagctggtgcgacaggcgcagaaacaatcggtaatgtaattattgcagttgataaaattttagaagaagtgcaacccgaggctctacttgttttgggtgacactaacagctgtatggcagtgctaccagcaaaacgtcgtaaaattccgactttccatatggaagctggtaatcgttgttttgatatgcgagtccctgaagaaattaaccgtcgaattgtcgatcatacggctgatattaatttaacctacagtacgattgctcgcgattatttattagcagaaggattgcccgctgatttagtaatcaaaacaggtagcccaatgttcgaagtgcttcatcattataaagcgaaaatcgaagcttctgatgtacttgaacgcttaaatttaaaagagcatgaatattttattgtgagtgctcaccgtgaagaaaacattaactcagatcagaattttttagatttggtagaaatgttaaatgcagttgcagataaatataaatatcctgtgattgtatcgacacatcctcgtacacgtaagcgtattgaagagttaaatgttgagtttcatcctttaattcaattgttaaaacctttaggttttagcgactataacaagttacagctttctgcaaaggctgcgttgtctgatagtggaacaattaacgaagaatcatcaatcttaaatttccctgcacttaatttacgtcaagcacatgagcgtcccgaaggaatggaagaagcggctgtaatgatggtagggttgaaagcggaacgcattttacaaggtttggcaattttagaaggtcaaactagaggcgaaaatcgtcttttgcgtttagttgaagactacagtatgccaaatgtgagtgaaaaagttgtgcgtatcattatgagttacacagattatgtaaatcgagtgatttggaagaagtat

SEQ ID NO: 8365 - DNA, 1033 bp, Acinetobacter baumannii
atgtttaaagataaagttttattaatcactggtggtacaggatcatttggtaatgctgttttaaaacgctttttagaaacagatattaaagaaatccgtatctttagtcgcgatgaaaaaaagcaagatgatatgcgtaagcaaatatcattcagcgaagctaaaattttatataggtgatgtacgcgactataacagtattttaaatgctacccgtggtgttgactatatttaccatgcagcagctttaaaacaggtaccatcttgtgagtttcacccaatggaagctgtaaagactaacgtattgggtaccgaaaatgtacttgaagcagctattcaaaaccatgttaaacgtgtagtgtgtttaagtactgataaagcagtttacccaattaatgcaatgggtatttctaaagccatgatggaaaaagttatggttgcaaagtcacgtaaccttgagggtttagatacggttatttgtggcactcgttatggtaatgtgatggcatcacgtggttcagtcattcctttattcgttgatcaaattcgtcagggtaaacctcttacgattacagatccgaacatgactcgtttcatgatgactttagaagatgcggtagatttagttctatatgcttttgaacatggtgaaaatggggatatctttgtacaaaaagctcctgcagctacaattgcggtattggctgaagcattgaaacaattactaaatgttgaagatcatcctatttctattatgggtacccgtcatggtgaaaaagctttcgaagctttattaagccgtgaagaaatggtacatgcttttgaccaaggtgattatttccgcgtaccagcagatcagcgtgacttgaactatgaaaagtacgtagaagatggtgacttaaaaattactgagttcgaagattacaattcgcataatactactcgtttagatgtagagggtatgaaacaattattgcttaaacttgattttgttcgcgcattaacaagaggcgaatatatttcaccagaggcg

SEQ ID NO: 8366 - DNA, 912 bp, Acinetobacter baumannii
atgggtaaaagtctaaataatgtgccccaagcgccacttgatgttcagtttgattcaaatgacgtgaaatgcagtgcctatttataccgtcccacaaccgaggtagctactccaatgattgtgatggcacatgggctgggtggtactcgaagaatgcgtttaacagcttttgccgaacgtttcgtggcagagggttatgcttgtttagtgtttgattatcgctattttggggatagcgaaggtcaacctcgacaattactagatataaaaagtcagctcgaagactggaaagctgccattgcctatgcacgtagcctagacaaaattgacccaaaccgcgtagttatatgggggacttctttcggtggaggccatgtgctggcaacagctgccaatgataaccggcttgctgctgttatatcacaatgccccttcactgatggtttctcatctagcatggcaatgaacccgataacgaccctcaagctcatgggactcgctttaaaagacaagattggatcaatactcggcgccaagccagtcatggtacctcttgcagcaccatcaggacatacagcattaatgaatgcacctgatgcttattcaggttatctcgcactcatgccttcaggttcaaatattccaaactatgtcgctgcacgttttgtactcgacatcatacgctattacccgggtcgtaagacatcacgtattcaagcgcccgtgttgttttgtgtctgtgataccgactctgttgccccctcaaaaacaacattgcgtcatgcgagccatacacccaatcatgaaattaagcactacgccgatggtcattttgaaatttacgttggagaagcttttgagcgtgttgttcgtgatcagatcgactttcttaaacgcatcgttccagtcaag

SEQ ID NO: 8367 - DNA, 1173 bp, Acinetobacter baumannii
atgaagtcggtactttgtcatcaagcaacattgcaagtagtggaccaaccgaacttaacacctgcaaaaggacaagttttattggaagtggtgcgatgtgggatctgtggttcagatttacatatgcagcatcactgcgaccacatgcatgatttggctgcacgtgtcgggtttaatggtttagcgaagtctacagacccatttgtacttggacatgagttttgcggcaaggttttagactacggtccaaaaacacgccataaatttaaagcggatacactcgtttgcgcaatgccgcttttaaatgtagatcagcatggttatttgtctacagggctttccccaaatgcttcgggtggctatgccgagcaagtattggctcaatcaagcttgatgtttgaagtaccgaatggtctagatgcggatagtgctgccatgaccgaacctatggcggttgcattgcatgctgttcgccgtagccgtgtaaaaacaagtgaacctgcgattgtgattggctgtggtcctgtcgggctaggtgtcatattaatgcttaaagctgctggggttaaaaccgtagttgccagtgacttttctccaaaccgacgtaagcttgccgagcaatgtggtgccgatattgtggtagaccctaaagagacatcaccatttgccaactggaaagaatttggtttgcttggcaatgtatcagatgcaattaacatgggtatgggactatttgataagttgcaagcgacacgcttaccgtggtggcatggatggcgcatgattgacaaattaggcgctctaccaaaacgtcctgttatttttgagtgtgtaggcgtaccgggtgttttgcagcaaattattgaaggtgcacctttgttttcccgaattgttggggtgggcgtgtgcatgcaaagtgataaaatagaacccgcacttgcaattaataaagagttagaaattcagtttgtgttgggctatacaccgcttgagtttagagatgcgctacacatgattgcagaagggaaagtgaactgttcaccgctcattacgggtgttgttggcctagaaggtgtaactaatgcatttgaagcattacgtgatcctgaacagcatgccaaaatcttgattgacccgaaacgtagcggttcagatattcaattaatgagtcat

SEQ ID NO: 8368 - DNA, 1320 bp, Acinetobacter baumannii
atgaacaatgacgttcaagtaatatcgaaagaattaagaaatacatttccaagtaaccttggaacatacgaaaggattggacctcatacatggaaatgggcgttgttatttgcctattttgcgatggtggtcgatggcattgatattatgctgctgtcttatagcttgaccagtttaaaggcagagtttgggttaactacctttcaagcgggtgccttaggcagtgcttctttagcaggtatggggattggcggtattttgggtggctgggcatgtgacaagtttggtcgcgtacggaccattgccaactcggtgactttcttttctgtagcgacttgtttgttaggctttacgcaaagcttcgagcaatttatggctctacgttttataggtgctttaggaatcggagcactctatatggcgtgtaataccttaatggctgaatatgtgccaaccacttaccgtacaacggtcttgggcacgttacagacgggccagactgtaggttatattgctgcaacgttattagctggcgcaattattccagattatggctggcgcgttttattcttcctgaccgtagtacctgctttcgttaatattttcctgcaacgatttgtgccggagccaaaatcttggcagctcaccaaaattgaaagcttacaaggcaacagacagcctaaagaaagagtggtggctgaaaagccaaaaagtagcagtatctacaaacaaatctttaataactttaagcaccgtaaaatgtttttgttgtggatgaccacagcattcttcttacagtttggttattacggcattaacaactggatgccaagttatttagaaacagaagtgcatatgaactttaaaaacttaaccagttatatggtgggttcatataccgcaatgattttaggaaaaattttagcgggctatcttgcagacaagtttaaccgccgtgctgtttttgtatttggcacaattgccagtgctgtgtttttgccaatcattattttcttcaatactcctgacaatattttgtatttattgatcacttttggcttcttatatggcattccatatggtgtaaacgcgacctatatggctgaaagtttttcaaccgacgtgcgcggaacagccattggcggtgcctataacattggtcgtgtcggagccgctattgcaccagctatcattggtttcttggcatcgggcggtacgtttaccatggcctttattgtgatgggcgctgcgtattttgttgcgggtgtattgcctggcttatttattaaagatcgtcagtacgatccacaaagacaatca

SEQ ID NO: 8369 - DNA, 255 bp, Acinetobacter baumannii
atgtctgaagaaatgaccttggaagaacgtaaagtaatctatcgcgcacgtcgtggtttaaaggaaattgatgtctattttgacccttatgtgaaaaattattatttaaaggcagacccggcagaaaaagcgttgtttgctgagttggtagaacaggaagaccctgatttactagattggtttatggaagtatcagaaccaccacgtaccgaattacgtgactttatctataaattaaaacactatgttcatggt

SEQ ID NO: 8370 - DNA, 117 bp, Acinetobacter baumannii
atgctgattctgacccgccgtgtcggggaaacattaatgattggggatcaagtcagtgttactgtgcttggcgtcaaaggaaaccaagttcgaattggtgtaaatgcaccaaaagag

SEQ ID NO: 8371 - DNA, 1683 bp, Acinetobacter baumannii
atgaaactcaaaagagtaagccagcttacattgggacttttttttgccagccaattgttttacacagcgcaagcagcatctccgaaaaatcaacaaccacctaacatcatgattattttggccgatgatcttggattttcagacattagtgcctatggcagtgagattaaaacacctcatattgacagcctgttaaagcaaggaaaaatgcttttcaattttcatgcttcatcaatgtgttcacctactcgtgcacagcttatgacaggtgcagataaccacttagtgggtttaggtgccatgtatgaaacttctaaacgacaagaaaaattggttggagccgatagcccacgtgcactccttaaaattgatggatattcaggtcacttaacacaaaatgcgtatacactcgcagagattttaaagactaaagattattacaccttcatggtcggtaaatggcatttaggctatgctcccgaccaaaatcctaaagcccgtggttttgaccaatcttttgccttgctcgatggcttcgatttacactttaaagaccaacctaaaaactatccgcgcaacactcaatacacggaaaatggtcaaaaggtcacactgcctgacaactactattcaaccgacttttttacacaaaaagcttttgagtacttagataagaataaagcgcaaaaaccattttttgcctatctagcttatacagctccacactggccgttacaggcacctgctcactatagagatttatataaaggtaaatacgatcaaggctacgatgcaattcgtaaacaacgctttcttagacaaaagcaattaggattaattccagcaaacgcagaatacccagtcgagcgtggcaaccaagctttaggcaccaaaagctggaatgaactcaccccccaagagcgcaaatatgaagcgcgtaaaatggaagtttatgcgggcatggttacccagttagacgaccgcgtgggtgatgtcattcaatatcttaaaaagcatcatttatatgacaacactttgatagtgtttatgtcagataacggcgctgaaggtggtgatcataatttcccaatgggtgatgccgacaatcgctatgaaaatataggcaacgccagctcatatgtttatatgggaccacgatgggccgaagtgagcagcactccatttacccactggaagtcagctgcttcggaaggcggtgtgcgagttccatttattgttaaatcacctgtgcaaatttctaaacaacgtggaatcaacaataactttgcgacagtcagagatatattccccactgtgatggaactcgcgggtattcaaaataatcaaatctatccagcttcaagcactaaaattaaaccatctggttttagcctaattcctgcttttaaggataatactgcccgtattcgccctgttaattattatgactttaaagaattacatggcagccgctacgccaaaactgacgaatggaaacttattgaaaactcaccttctaaatttaaaagccatggttgggaactctacaatttaaaaacagattttaatgagcaacataatgtttatgcagaacatcctgagatcgtcaaagtcttaaatgataaatatttaagatatgccgatgaaaatggtgttgtggattttgagcaatacaataaaaag

SEQ ID NO: 8372 - DNA, 1110 bp, Acinetobacter baumannii
atgcacagtaattcaagttctgggtcgaggcttggccttagctctttattttcttctctcccattgaaagttcttgcgctcagcactatgttttttccctttcatagtatcaatgcaggaaaaaccctacagtacaatactgtagttaacacaaacacattaacagtggttgctgtagaaagcccaacgactgtttttaaagaagaccagtttttacacggcttcggttatgacttagcgcgtaactatgcacaaagcttaaatgtaaagttggacttcaaaatcgtgacagacaatgccacggcgcttaagtgggttcagcaaggtaaagcaaatcttgccatgacaaccgcaagcttaagttcaatcgagaacaaaggtttaatgtctttttctgcaagttgtggtgatatcgtaaatttgcaaaaaaatggattaaatccgaatctaagctgggtgtttaaacaagcagatgatccgcttacacaaacagcaagcggttttgtttgtcaaagcaaacaaaatggtctaactcagcaacttgcttctttttataaccgtaatgttgtaaaaccagaagcttggtctacgattcaacgtgacttaagtgcacgtataccgatttacaaagcaagctttaaacaaagtgctgctcagtacgatttagactggcatttgcttgcagcgattggttatcaagaatcgtacctaaaaccggagtctgtttcaccaacaggtgtacgtgggttaatgatgttaaccaatagtacagctcgggcaatgggtgtgagtaaccgtaacgatccagcacagagtattcagggcggtgcgaaatattatgatctcatgttaagtgagtatgatgatattcctttcccagatcgcaactggtatgcgcttgtggcttacaatatgggaccgggtgcagtgaaccagattcaaaagcgcttgcaagcccaagggaaagacccgaaccaatgggttaatctctataattatttgcagagtaacaaaactcgcaatggtcgatacaaacaagcagttcagtatgtgactcgtatacgtgcttatcttgagcacattaaaacggcacaaacgcgaattaatatc

SEQ ID NO: 8373 - DNA, 1452 bp, Acinetobacter baumannii
atgttaacgaatcttcgagaacaatggttctctaatgtccgtgcagatattctttctgggcttgttgttggtctggctttaattccagaggcgattgccttttcaattattgcaggtgtagatccccaaatcggtttatatgcgtctttttgtattgcggttattatttcttttgtaggtggccgtcctgccatgatttcggcagcaacgggtgctatggccttagtcatgacaaccctagtgaaagaacatggtcttcagtatttattcgcagctactattttgacgggtgtcatacaaattatagtagggtatcttaagcttgctaagctcatgcgctttgtctctaaatcggttgtgattggttttgtaaatgctctcgccatactcatttttatggcccagcttccagaactagtcaatgtaagttggtacgtctatctattagtcgctattggtttagcaattatttatctattcccttatgtaccaaagcttggaaaaatttttccatctccccttatatgtattgttataatcacattacttgccttctttttaggccttgatgtgcgaacagttggcgatatgggagcattaccaaatactctacctatttttttaattccagatattcctcttaatttagatacacttcttatcattcttccttattcattggcgttagctgcagttggcttacttgagtcgatgatgacagccacaattgttgatgaaatgacggatagcccgagtaataaatttaaggaatgtaaaggtcaaggtattgccaatattgcctctggttttatgggtgggatggctggatgtgccatgattgggcaatcaatgattaatgttaaatcaggtggtcgcacacgcttatctactttatgcgcaggcatattcttgctgattttagtagtatttttaagtgattggttgaaagttattcctatggctgcgcttgttgctgtcatgattatggtatcaataagtacttttgagtggcgttcgcttacccaatttaaaactaatcctaaaagtagcaataccgttatgattgcaacggttgttgtagttgtagctactcacaatctagcattaggcgtattgacgggtgtactactttccgcacttttcttagccaataaacttgaaaatgatatacaggtaataagttcattagaaggcaacgctcgtttatatgatttaagaggacaaatcttttttagttcttcagatagattcatgcaaagctttaactttaaagaggaagtaaaagaagtcattattgatctgactcattcacatatttgggatgtcacttcggttgcaatgcttgattcagcagtagaaaagttccaaaagaatggcatacaagttactgtacgtggtttaaatgaagccagttcaatcatgattgacaagtatggtacacatgcaaaaatt

SEQ ID NO: 8374 - DNA, 4695 bp, Acinetobacter baumannii
atggctaaagagaatacacaacagaaagaaattaaaaaacaacctgctgttgaacttgctgtttttaacttaaatagcgtgacggatgtagcggacttgcaaatggtcgcaagtcaggttcagcgttatttacaagtgtgtggaaacacctcattagaacaaataaaaagtaaggccaatataaccacagttgctaatatctttgcattgacgggtagtgtactagatctaatgctctatgctacagataaaaaaactggtgatgctgctgtacaacgtggggcattacttgcggcaaatttaattggtttattttcagaaccgaataatgaagcacatgcacgaatggctttacgtccgatgtttggcttaatggcagagtgcttatatcgagaaaatggaaaaattaaagaaacggatattaagcgtttaggtttacatctcaatgcgatgatcgctggagatctagagaacttcttaaaagagactcaagcgaagttaagcagtttacttactagcgctacaacattgggtgtaaccattctacaaagcatggcgaccccagcaacaggtataaatgcaggaataaccactgcggcaggtgcaagtgcagaaaaacgagatccgaaactcaaatttaccaactgggctgttccactcattgatttattagggaagccgagccaagcaaatttaacccctaaaatacaaccaaatataacaagtcgtttgcaacaagaagcaactcaagctattgcggctttaagtcaaactttacagcaacaagcaaatgctggccaaaaatatactttggcatggctattacaagaaacactgaaagctatacaagcattagaaaataaaggtaatgcaagtgtgccagtcaaccagacgggtgaatatgaacggcatacgaaaggagacactttagaatttgtaagtttgcaggcagatgctttaaatgctcctccatgtgaaggtgctgattcacaatctggaaaaagtattagctattcaattggtgctgaacgggttcaacatgcagacttctatttaccaaaaataggtttttcttttacacggcaatataactcacaaatggatgagtttgatcaaagtatggtcggtgcacgttggatgatgccattttccaatatgattcaacaaaatgccaaaggctatctatttattgatagtaaagggcgaaagcatcaactgccagcttccattacatttgaaacatatgaagtgccttatgagggaataacaatacaacctcttaaaaatggagatctggttctaaactttgggggagactggacttttcaatttcatcagttttcagtcggacagccttatcaattgattcaacaattcaatgaaaaaacacaagaaaaaattgatttaagttatcttatttttgaaaaggttgcttatcttcaatatgttgtttttcagttagagcatgccaaacaccaattaaaatttgcttttaatgagcaagttaaaattatggcggtgtttttagatgataaagccgaaccattagcacgttatgaatacgatatccaagggaacttaattaaagctattgatcagaatggctatacaagaacttatgaatataacaactttcatcaactaacacgctatacagaccgtacagggcgtggacagaatattcgttatgaatcaacagacgccaaagctaaagcagtagaagaatgggcggatgatggtagtttccataccaaactaaaatggcacccgcgcttacgtcaagtggcggtttataacgcctatgatgtaccaacctactattactttgacctcaatgggtttacttatcgaactcgtttagcggatgggcgtgagtcatggtatagccgtgatgggaaaaagcgcattactcgacaaattgattttgaagggcgagagactcaacaggaatataatgatcaagatcaacttgttaaaattgtccagccaaacggcggagtaatacgttttgcatatgatgaacaggataacttagttgaaattaaagacccagaaggcagtatttggaaacgggaatatgatgaaaatggtaatcttaataaggaaatcaatccattagggcatatcacacagtacaaatataacaatgataatcaactggttgaagtcattgatgcaaaaggtggggttaagaaaattcagtataatgaattggggcagatgatttcatataccgattgctcaggtaagagtagtacatgggaatatgatgaagatggtgtactgacagctgaacaaactgcaaataataaagttgtacagtatttttacagtatcaaaggccgagataaaggacagctgcaaagtattatttatcctgatgggttaaaagaatactttgaacatgatgaagaaggacgcttacttaaacataccgataccaaaggtttagtaacggaatataagtacaatcaagttggcttattagagcagcgtattgatgccaatcgacatagtgtagcttatcaatgggacaaacaaggtcgcattcaaaagctaatcaaccagaatcaagccgaatatttgtttggatacaatccgtatggatatttgatacgtgaacaggcctttgatggagaggaaaagcactatagttacaatgagaacggaaggatatttcaaatccgtcaaccaaatatactgacccaatttgattattatgcagatggacaaattgcttcgaaaagctttacccatttacatacagggcagaaacaaacggaacaatttgactataacctcaatagccaactgagccgagccagtaatgaggttagccaaattgatttctatcgcaatgcacttgggcagttggttagagagcaccagcattataaaattccagaactgaaaccgctcacagcagtattacattatgaatatgatgagcttggaaatttaattaaaacaattcgacctgatggacatacactgaatcatcttgtttatggttcagggcatatttatgcaattggtttaaataaccaagaggttgtttcatttcagcgtgatgatttgcatagagaaacaacacgattactagcaaatgggctcatgcaaaccaaacaatataatgatgtggggttattgagttcacagttcattcaacctgagcaagaaactcaagactatttacaatatcaagcacatagaaaatatcactacgataaaaactatttgcttagtcaagttgaagatagccgtttgggtaaactcaattatcaatatgacccaattgggcgtttaattgcagctcaaagtttacataaaacagaaagctttaattttgacccagcaggtaacttaattgattctgactcggtattaagtcctgcacaaattaaaaataaccttattaaaagttataaaggtaaacactaccaatatgacgttcaaggtaatgtgacagagattattcaagcgggcaaaaaccttaaactgacttgggataatcaaaacagacttattcgaagtgataataatggtctagttacagaatatggttacgatgtctttggtcgtcgactctacaaaaaaacagccaaagaattaaccttatttggttgggatggagatttaatgatatgggagtcttttaaatctgcacagaccaattatacaaagcactatatttatgaacctgatagctttgttccactattacaaacaggttataaggatttcattcaactgatagaaactcctgattatcaggaatatcaaacaaaaccatattctatttataaagacccagtatggaatagtactactcggaaaaagcgtgctgatttagagcaaatcacattttaccattgtgatcaggtcggaacaccacaaaccatgactaatatccgaggagagtgtgtatgggaaattctccaagacacatggggcgcggtgtcgcaaattaaagcactaaatcaagataatccatttgaacaaaataatttacgctttcaaggccagtattacgaccaagaaacagaattgcactataaccgttatcgttattatgaacctcatagcgcaagatatgtaagtaaagacccgattggtttgagtggcggaattaatacctctgcttatgtaagtgatccaactcaatggatagatccgcgtgggcttgcatcgacgaattcgattggttcatatggaagtgtaaaatcagcatcagatacatatgaaaagtatgcaacaagtaaaagtttaaaagatgtagctgaaagatatgcagcagggaaatctgtaggcggctcagcgacagcaggagttggtgttgggatttacgctaattataaaggtaatggtgaaagtaccttaacaatggaacgaaaagtaggtttaggttatgagtatggggtttttgaacgtaattaccattatggggaaagacaggttaatagaggttatatagaagggtgtgcagcaacaggagaatctaaatactgtgcgggctcacacactgataaaataagcccttatatttataaagatgagtataagtcaaaaagtaaagcgagagggattactattagtcaaggtaaagaaatggttggtaatccaaatggcccatctattattcatggtcctggtcatagttgggatttgggagcacatggcttcccttcaacatat

SEQ ID NO: 8375 - DNA, 3030 bp, Acinetobacter baumannii
atgactgcggtgtcaagtgtttatgcacagcgcttattgatgacattattcttggtctcttttgggatttatatgtttctggcgacagtaacatatacaccatttgatccgggctggatgcatatttcaagtgatactcagcaagtatccaatgcaagtggtattgccggtgcatggattgcagatttgctgtttggctttttaggttgggcaagtttacttattccaatcttcctatttgttgaagcgattcaagtctggtggccacatagttttctaaaccgcccattccgttatgctgcgcagttcttcttaattcttgttgtttcgagtttgctttaccttcactggaatgtacctgcagatactttagataatgccgcaggtgggattattggttatgagttggggcaaagcttatctcaactgttaacaatttatggtgcgacattatttctacttgttttcggagtggtattgttcactttggcatttggggtgcagtggagcaaaacatgggttacgctcaaagcaatgcctggttatttacaagatttattctataaaaatgtatctcctaacgaatctgcttatgacttaaccacacagcctgcgaataaagcagcaacggtaaaagttgcagagatgcctaaagcagaagaagttacggatgaagtagagctaaatgcccaaccagaaaaagctcaaagcaaagcgagctctacacgacatgatgaaatagcagagcgtttatttgccgacgttttagctaaagaacaaagtcaacctgaaacaattgaagaaaaaccaactcctcagccagaaaactttgagcgtacacttgagcaagcccaacaacttaaaaaagacagtgagcgtttagtggctacgggggaggtttggcgtgcgttacagcgtgatgatgtaagccataaacaagaaattgatgcgctgttaagagctgctgatgattcaagtgaacagccttcgactcatgagcaatttcagcaaacagtttatcaggctaaacaaaatcaaccatcggatactcatcaaggtttagattggaatgatgatgagatttttgatgaactacttgctgcagttccaaatagtaaaacggcaactgacgtgcatacgccatttgttcaagatcatcatgttgaaccagaagttacaccgcaagcttctcaaacattagttgaatcatctgtacctgtaacgaatttaaatcagtcacctaaaaatttatcgaatgaagaagtctttgatgattttgatgacctattgattgatgaggatatcccgccagcaactcaaccgatcaaggcaagtagctatgcgcaatcttcggcttttgtaaaagcgcctattcaaactacgattggtgcagagaagctgtcaaaagaagaatttattgaagcttggcaggaaactgctggaaagcctcaggatgaccttgaggatgagtttgattttgatgcgcctctaacagatgcatcaggtcgaccaatgtctcgtgccatgcaagtggccaaaaaacgtttagatttaccaacattaccgggctttgaattgcttgataaggttgacccaaataagaaagttaactttaccgaggaacagctttcccgtttatctgaattgcttgagatcaagttacaagagtttaacgtgaaggctcaggtggttgaagctcagccgggtccagtggttacacgttttgaattagatttagcaccgggtgtgaaagcatctaaagtgactaatatttcccgtgacttggcacgttcaatgtctatggcttctgtacgtgtggtagaggttattccgggtaaaccatatattggtattgaagttccaaatagtgctcgtgaaatggtacgtttgattgaactattggaaacacccgcatatcgtgacccaagtgctctcattagtatggcaatgggtaaagatatttcaggtaatccggttctaacagacttggcaaaagcaccgcatatgttggttgcgggtactacaggttctggtaaatctgttgccgttaactcgatgattttatcgatgttacttaaatatacccctgaccaattgcgtctgattttaattgacccgaaacagctagaacttgcaaactacaacgatattccgcatttattaacgcctgtagtcactgacatgaaagatgcagtgagtgcattaaactggtgtgtaaatgaaatggaacgccgttataagcttatgtcgttccttaaaattcgtaagttaagtgactacaaccgaaaagttgaagaagcgcttgcaaatggagaagacttgattgatccaacatggaaaccaagtgattcagcgacacaagagcgtgcacctcgtttaacgccattaccatcaattgtgattgtggcagatgagttcgctgatatgatcatgcaagttggtaagaaagcagaagaaatgattacacgtttggcgcaaaaatctcgtgctgctggtattcacttattgcttgcaactcaacgtccatcggtagatgtcattacgggtcttattaaagccaatattccaacgcgtgtagctttacgtgtaaacagtaaaattgactcacgtactattttggatgcaggtggtgcagaagacttgttaggccatggtgatatgctgttcttagggccaggtaaaattgagccagaacgtgtgcatggtgcatttattagtgatgatgaagttaaccgtatttgtgatgcatggcgtgaacgtggcgaaccagactacgtagatgagatcttaactccatttgatgaggagcctgcttcgcgtggctttgaagaaggtgatggtggttcagaccgtgatgcactttatgatcaatgtgtatcgtttgttttagaaactcgaaaagcttctacatcttcattacagcgtaagtttagccttggttataaccgtgccgctcgtatcattgatcaaatggaagagaatggtattgtgagtgctatgggggccaacggtaagcgcgatattttagtt

SEQ ID NO: 8376 - DNA, 402 bp, Acinetobacter baumannii
atgttccgtaaacttcttgacgaaggccgtgcaggtgagaactgtggtatcttacttcgtggtactaagcgtgaagaagtacaacgtggtcaagtacttgctaaaccaggtacaatcaagccgcacactaaattcgacgcagaagtatacgtactttctaaagaagaaggtggtcgtcacactccattcttaaatggttaccgtccacagttctacttccgtacaactgacgtaactggtgcgatccagttgaaagaaggcgttgaaatggtaatgccaggtgacaacgttgaaatgtcagtagaattaatccacccaatcgcaatggacccaggtctacgttttgcgatccgtgagggtggtcgtactgtaggtgctggtgttgttgctaaagtaactgca

SEQ ID NO: 8377 - DNA, 855 bp, Acinetobacter baumannii
atgaattaccgtcaccatttccatgcgggcaactttgcagatgttatgaagcatgtgcttttgctacagcttctcaaccgtttaaatgctaaagataaaccttatcgttatatcgatacgcatggaggtgcaggaaaatatgatctatctcaggcacctgcacaaaagtcaggagaattcctaacaggtattcatcgtcttgtacagctttctgacatggaaaagcgccaagctcctgaagccatccagcaatacctaaaacttgtagaagaattacgtgctcaagaaggtaagggaagttatccgggctctccgtggtttgctttgcaaggtatgcgtgaaattgataaggctacaatatttgaaatgcagcgtgatgtatttcagcaattacgccataacattcatgataaacgtgcgggcttgcatgagcgtgatgcatatgaaggcttgcttgccgtaattccaccaaaggaaaagcgcggtttagtgatgattgatccgccttacgaattagagcgtaaggatttcccgcaattggttgaacttttacaaagcgcttataaaaaatggccaacaggtgtcttcgcggtttggtatccaattaaagatcgcgcaatgattgaacgttttgaaaagaaaatgtttaaaactggaattcgccgtcaattaatctgtgaaatttgtgtttggccagatgacacacctgtaggtttgaatggttgtggattattagtaattaacccaccttggcagttctccgaacaagcagatcaagccctacaatggttattccctcacttacgtatgcaagaaacaggtggtcatgccgctgtacgctggttagtgggtgag

SEQ ID NO: 8378 - DNA, 924 bp, Acinetobacter baumannii
atgaatttggctgatcgtgatggttttatttggcaagatggacaattaattgattggcgtgatgcaaagattcacgttttaacccatactttacactacagtatgggtgtgtttgagggtgttcgtgcttatgaaactcctaaaggtactgcaattttccgtcttcaagaccacacaaaacgtttgttaaattcagcaaaaatttatcaaatgaaagtgccgtatgatcaagcagcgcttgaacaagcacaaatcgatgttgttcgtgaaaataaattagcttcttgctatttacgtccactgatctggatcggttcagagaaacttggtattgcagcaacaaataacactattcatgccgctgttgcagcatgggcatggggtgcatatcttggtgatgaagcaatggcgaaaggtattcgcgttaaaacttcatcatttactcaccaccatccaaacgtgaccatgtgtaaagcaaaagcatctggtaactacacgttgtcaattcttgctcaccaagaagttgcacattctggttacgatgaagcaatgcttatggatccacaaggttatgtgtgccaaggttctggtgaaaacgtattcttgattaaagatggcgttttacacactccagatattgcgggtggtgcacttgacggtattacacgccaaaccgtgatgacgattgctaaagatcttggttatgaagttgttgagcgtcgtattacgcgtgacgaattctatattgccgatgaagcattcttcacaggtactgctgctgaagtaacaccaattcgtgaatacgatgaccgtcaaatcggtgcgggttgccgtggcccaattaccactgaaatccaaaagactttctttgatgcagttcaaggtaaaaatccaaaatatgaacactggttaacttacgtaaaa

SEQ ID NO: 8379 - DNA, 972 bp, Acinetobacter baumannii
atgagtttaagttatcaacctacttgttcaattgatgccttaaaggctcgtgccaagctttatactcaaatccgtcagttttttgcagaacgtgaagtcatggaagtcgaaacaccaatcgtttcacaagcaggtgtgactgacgtacatttagcctcagttcaggcgttacgtcatatcaatggcaaattgcagactcagtatttacagacttcgcctgaatttgccatgaaacgtttactggcaagtggcagcggaccgatttatcaaatctgtaaggttttccgagacgatgagcacgggcgcaaacacaacagtgaatttaccatgcttgaatggtaccgtccgggtctggacttaaaagcgttaatgcacgaaacagccgatttattacaaacctgtttgcagcatcgttttggcgaagttcgtccatttattttaagttataagcatgcttttcaggaccgtttagatattaacccgttgcaagcgactttgaagcaacttaaagacacagcaaatcgtgttgggttaaatctcgacttgggcgatgaccgtttagcttatatggatttgttgttttctcattttgttgaaccaagtttagggtttgatgcacctgtctttttaactgactttccaccagaaatggcatctttagcgaaagtgaaattagatgaagatggggaagaggttgcagcgcgttttgaggtttatatcgaaggcttagagctagccaatgcttacgatgaattgctcgattcagacgtgttgcgttctcgctttgaagcagataatgcagagcgagctaaacaaggacttcatatcatgccattagatgagcacttgttagcagcattgtctcatatgcctgaatgttcagggatcgctttgggaattgaccgattactcatggttgcaaccgatcaacttaaaattgaaaaagtcattgcttttccagccgaaattgcc

SEQ ID NO: 8380 - DNA, 1074 bp, Acinetobacter baumannii
ttgcagaccatgaaaatcgtcgcagatgaaaatttggcgtttaccgattactttttttcagagtttggcgatattcaatataaagcagggcgcaccttaacgcatacagacgtacaagatgctgaagctttattggttcgttcagtcaccgcagtaaatgaaagtttaattcaaaataccgccctaaaatatgtgggcagtgccacaatcgggaccgatcatttagatattcaagctttagaaaagcagggcattacatgggccaatgcagcaggttgtaatgcacaggcggttgctgaatatgtcattacagctttactgcatttagatgctagccttttagaacaacaagaaaaatttacgctaggcattgtggggcttggcaatgtcggtaagcgcttggcctatatggctcagttgcttggttggaaagtgattggcttcgacccctatgtacagttagattcaattgaaaatgtaagctttcaaaccttgttgcaacaagctaatgcagtttcaattcatgtgccgctgaccaaaaaaggcgaacatgcgacatatcatctgtttgacgaaaaagcttttgcagcgcttcaaccgaacacgattttaattaatagtgcacgtggtccggtcgtaaaagaagccgctttaatcgaagacattcaacgtacccagcgtaaagtggtactcgatgtatttgagcatgagccagtgatatctgaagagcttttaaatatgttggcgttggcgacaccgcatattgcaggttatagcttggaaggaaaagctcgtggtacgcaaatgatttatgaagcgttttgtcaaaaatttggatatgacattaataagcgtttcgaaacccagttgcctgcatgtgaagactatttttcaggacatgatttaaaagcagtgttaaagcaaaaactatctcaaatttatgatattgctcaagatgatgccaacatccgtgcctgtgttaaagagggcaaggtagagcaaaaagcatttgatttattacgtaagaattatccgctgcgccgtgaatgggcagctcacgggggaccacaggca

SEQ ID NO: 8381 - DNA, 636 bp, Acinetobacter baumannii
atgggttttgatgtcaatcataatcaatgtataataatgacgagcaaggtgaataaaagtgagcgcaccaacatgaaagttagtaaaactcaggtaaaagaaaaccgagataaaattgttgaaaaggcgactcaactgttccgtagtaaaggctacgacggggtgggcattgccgaattaatgtctagcgcaggctttactcacggtgggttttataaacatttcagctcgaaaacagaccttgttactattactgccaaacatggtcttgagcaggttttaaaaagaatagaaggtttaaacttaccccaatttattcaaatgtatgtgtctcgtacacatcgggacaaccgagatcagggctgtaccttaacagcgctatcttgtgatgccgctagacagcccgacgaagtaaaagtcgagtttgaagagggcattgagcagcttattgagttcattatgaatgaacgcgcaaaacaagtttctttagaaacagaagagctgagaaagcaagctattaatattcttgctcagtcagtaggggcaattgcattgtcacgtgcatgcccagaccaatcaaaccttagcgatgaaatcttggagagctgtagagagagtcttttaaaattaaccgat

SEQ ID NO: 8382 - DNA, 3934 bp, Acinetobacter baumannii
gatggcagctggtcagtaccaaacccaggtaacctggtggatggcgatacagtgactgcaacagcgactgaccctgcaggcaacacttcattgccaggtacaggcacagtttcagcagacatcacagcacctgtggttgcgctggatgacgtgttgacgaatgacagcacaccagcacttactggtacagtgaacgacccgacagccactgtagttgtcaatgtggatggcgttgactatccggcagtgaacaatggtgacggcacctggacgcttgcagacaatacacttccaacactcgcagacggtccacacaccattaccgtgactgcaacagatgcagcaggtaacgtaggtaacgatactgcagtggtgaccattgatacggttgcaccaaatgcaccggtgcttgatccgatcaatgcaacagacccagtgagcggtcaggcagagcctggttcaaccgtgactgtgacttatcctgatggcacaactgcaacagtggtagcaggcacagatggcagctggtcagtaccaaacccaggtaacctggtggatggcgatacagtgactgcaacagcaactgaccctgcaggcaacacttcattgccaggtacaggcacagtttcagcagacatcacagcacctgtggttgcgctggatgacgtgttgacgaatgacagcacaccagcacttactggtacagtgaacgacccgacagccactgtagttgtcaatgtggatggcgttgactatccggcagtgaacaatggtgacggcacctggacgcttgcagacaatacacttccaacactcgcagacggtccacataccattaccgtgactgcaacagatgcagcaggtaacgtaggtaacgatactgcagtggtgaccattgatacggttgcaccaaatgcaccggtgcttgatccgatcaatgcaacagacccagtgagcggtcaggcagagcctggttcaaccgtgactgtgacttatcctgatggcaccactgcaacagtggtagcaggcacagatggcagctggtcagtaccaaacccgggtaacctggtggatggcgatacagtgactgcaacagcaactgaccctgcaggcaacacttcattgccaggtacaggcacagtttcagcagacatcacagcacctgtagttgcgctggatgacgtgttgacgaatgacagcacaccagcacttactggtacagtgaacgatccgacagccactgtagttgtcaatgtggatggcgttgactatccggcagtgaacaatggtgacggcacctggacgcttgcagacaatacacttccaacactcgcagacggtccacacaccattaccgtgactgcaacagatgcagcaggtaacgtaggttacgatactgcagtggtgaccattgatacggttgcacctaaatgcaccggtgcttgatccgatcaatgcaacagactccagtgagcggtcaggctagagcctggttcaaccgtgactgtgacttatcctgatggcaccactgcaacagtggtagcaggatacggatggtagctggtcagtaccaaacccaggtaacctggtggatggcgatacatgtgatctgtcaacagtcatactgatccctgtcaggcaacacttcattgccaggtacaggcacagtttcagcagacatcacagcacctgtggttgcgctggatgacgtgttgacgaatgacagcacaccagcacttactggtacagtgaacgacccgacagcaacagtagttgtcaatgtggatggcgtcgactaatacgccactgcaaaatattagacggcacccaggatctcatacagacaatactacttggcgacactatcaggacgggacaccacatcgcagttccagtctgccacaaatgcagcaggtaacgtaggtaacgatactgcagtggtgaccattgatacggttgcaccaaatgcaccggtgcttgatccgatcaatgcacagacccagtgagcggtcaggcagagcctggttcaaccgtgactgtgacttatcctgatggcacaactgcaacagtggtagcaggcacagatggcagctggtcagtaccaaacccaggtaacctggtggatggcgatacagtgactgcaacagcaactgaccctgcaggcaacacttcattgccaggtacaggcacagtttcagcagacatcacagcacctgtggttgcgctggatgacgtgttgacgaatgacagcacaccagcacttactggtacagtgaacgacccgacagccactgtagttgtcaatgtggatggcgttgactatccggcagtgaacaatggtgacggcacctggacgcttgcagacaatacacttccaacactcgcagacggtccacacaccattaccgtgactgcaacagatgcagcaggtaacgtaggtaacgatactgcagtggtgaccattgatacggttgcaccaaatgcaccggtgcttgatccgatcaatgcaacagacccagtgagcggtcaggcagagcctggttcaaccgtgactgtgacttatcctgatggcaccactgcaacagtggtagcaggcacagatggtagctggtcagtaccaaacccaggtaacctggtggatggcgatacagtgactgcaacagcaactgaccctgcaggcaacacttcattgccaggtacaggcacagtttcagcagacatcacagcacctgtggttgcgctagatgatgtgttgacgaatgacagcacaccagcactcaccggtacagtgaacgatccgacagccactgtagttgtcaatgtggatggcgttgactatccggcagtgaacaatggcgacggcacctggacgcttgcagacaatacacttccagtgttggcagatggtccgcatacggtaagtgtgactgcaacagatgcagcaggtaacgtaggtaacgatactgcagtggtgaccattgatacggttgcaccaaatgcaccggtgcttgatccgatcaatgcaacagacccagtgagcggtcaggcagagcctggttcaaccgtgacggtgacttatcctgatggcaccactgcaacagtggtagcaggcacagatggtagctggtcagtaccaaacccaggtaacctggtggatggcgatacagtgactgcaacagcgactgaccctgcaggcaacacttcattgccaggtacaggcacagtttcagcagacatcacagcacctgtggttgcgctggatgatgtgttgacgaatgacagcacaccagcacttactggtacagtgaacgacccgacagcaactgtagttgtcaatgtggatggctttgcaatatcctggagtgtacaatggtgcacagttccttgatgtttgctaactctactctgtctgctactctcaggcggtcctataccatcagttaccgtgtttgtgcaacgggatgcagcaggtaacgtaggtaacgatactgcagtggtgaccattgatacggttgcaccaaatgcaccggtgcttgatccgatcaatgcaacagacccagtgagcggtcaggcagagcctggttcaaccgtgactgtgacttatcctgatggcaccactgcaacagtggtagcaggcacagatggtagctggtcagtaccaaacccaggtaacctggtggatggcgatacagtgactgcaacagcaactgaccctgcaggcaacacttcattgccaggtacaggcacagtttcagcagacatcacagcacctgtggttgcgctggatgacgtgttgacgaatgacagcacaccagcacttactggtacagtgaacgatccgacagccactgtagttgtcaatgtggatggcgttgactatccggcagtgaacaatggtgacggcacctggacgcttgcagacaatacacttcca

SEQ ID NO: 8383 - DNA, 4323 bp, Acinetobacter baumannii
cctgtggttgcgctggatgatgtgttgacgaatgacagcacaccagcacttactggtacagtgaacgatccgacagccactgtagttgtcaatgtggatggcgttgactatccggcagtgaacaatggcgacggcacctggacgcttgcagacaatacacttccagtgttggcagatggtccgcatacggtaagtgtgactgcaacagatgcagcaggtaacgtaggtaacgatactgcagtggtgaccattgatacggttgcaccaaatgcaccggtgcttgatccgatcaatgcaacagacccagtgagcggtcaggcagagcctggttcaaccgtgactgtgacttatcctgatggcaccactgcaacagtggtagcaggcacagatggtagctggtcagtaccaaacccaggtaacctggtggatggcgatacagtgactgcaacagcgactgaccctgcaggcaacacttcattgccaggtacaggcacagtttcagcagacatcacagcacctgtggttgcgctggatgatgtgttgacgaatgacagcacaccagcacttactggtacagtgaacgatccgacagcaactgtagttgtcaatgtggatggcgttgactatccggcagtgaacaatggcgacggcacctggacgcttgcagacaatacacttccaacactcgcagacggtccacacaccattaccgtgactgcaacagatgcagcaggtaacgtaggtaacgatactgcagtggtgaccattgatacggttgcaccaaatgcaccggtgcttgatccgatcaatgcaacagacccagtgagcggtcaggcagagcctggttcaaccgtgactgtgacttatcctgatggcattgaccggctcaattagtacagaggtcaacagatgtcatctggtctagttccgaatccagataagccagatcgacgagatatgcaatgatcgccacagcgactggacactgcaggcaacacttcattgccaggtacaggcacagtttcagcagacatcacagcacctgtggttgcgctggatgacgtgttgacgaatgacagcacaccagcacttactggtacagtgaacgacccgacagccactgtagttgtcaatgtggatggcgttgactatccggcagtgaacaatggtgacggcacctggacgcttgcagacaatacacttccaacactcgcagacggtccacacaccattaccgtgactgcaacagatgcagcaggtaacgtaggtaacgatactgcagtggtgaccattgatacggttgcaccaaatgcaccggtgcttgatccgatcaatgcaacagacccagtgagcggtcaggcagagcctggttcaaccgtgactgtctattccatcctgatgggcagcttctagctgctcgagtttctatgacgtgtcatgctaagactcgtatgtatcctgatcccatgatggtccatggtgtatagtgcgaaaccgtgtcctgcaaagaagcaattgaccctgcaggcaacacttcattgccaggttacaggcacagtttccggcagacatcacagcacctgtggttgcgctggatgacgtgttgacgaatgacagcacaccagcacttactggtacagtgaacgatccgacagccacagtagttgtcaatgtggatggcgttgactattcggccatcaacaatgctagactgacaccggcacatcgacagacaatccactccctacagtgacacccgcacctcacacctcatccccgccggcctcagaagcagcaggtaacgtaggtaacgatactgcagtggtgaccattgatacggttgcaccaaatgcaccggtacttgatccgatcaatgcaacagacccagtgagcggtcaggcagagcctggttcaaccgtgactgtgacttatcctgatggcaccactgcaacagtggtagcaggcacagatggcagctggtcagtaccaaacccaggtaacctggtggatggcgatacagtgactgcaacagcgactgaccctgcaggcaacacttcattgccaggtacaggcacagtttcagcagacatcacagcacctgtggttgcgctggatgacgtgttgacgaatgacagcacaccagcacttactggtacagtgaacgacccgacagcaactgtagttgtcaatgtggatggcgttgactatccggcagtgaacaatggtgacggcacctggacgcttgcagacaatacacttccaacactcgcagacggtccacacaccattaccgtgactgcaacagatgcagcaggtaacgtaggtaacgatactgcagtggtgaccattgatacggttgcaccaaatgcaccggtgcttgatccgatcaatgcaacagacccagtgagcggtcaggcagagcctggttcaaccgtgactgtgacttatcctgatggcacaactgcaacagtggtagcaggcacagatggcagctggtcagtaccaaacccaggtaacctggtggatggcgatacagtgactgcaacagcaactgaccctgcaggcaacacttcattgccaggtacaggcacagtttcagcagacatcacagcacctgtggttgcgctggatgacgtgttgacgaatgacagcacaccagcacttactggtacagtgaacgatccgacagccactgtagttgtcaatgtggatggcgttgactatccggcagtgaacaatggtgacggcacctggacgcttgcagacaatacacttcctgcgttaactgatggtccacacaccattaccgtgactgcaacagatgcagcaggtaacgtaggtaacgatactgcagtggtgaccattgatacggttgcaccaaatgcaccggtgcttgatccgatcaatgcaacagacccagtgagcggtcaggcagagcctggttcaaccgtgactgtgacttatcctgatggcaccactgcaacagtggtagcaggaccggatggtagctggtcagtaccaaacccaggtaacctggtggatggcgatacagtgactgcaacagcgactgaccctgcaggcaacacttcattgccaggtacaggcacagtttcagcagacatcacagcacctgtggttgcgctggatgatgtgttgacgaatgacagcacaccagcacttactggtacagtgaacgatccgacagcaactgtagttgtcaatgtggatggcgttgactatccggcagtgaacaatggtgacggcacctggacgcttgcagacaatacacttccaacattcgcagacggtccacacaccattaccgtgactgcaacagatgcagcaggtaacgtaggtaacgatactgcagtggtgaccattgatacggttgcaccaaatgcaccggtgcttgatccgatcaatgcaacagacccagtgagcggtcaggcagagcctggttcaaccgtgactgtgacttatcctgatggcaccactgcaacagtggtagcaggcacagatggcagctggtcagtaccaaacccaggtaacctggtggatggcgatacagtgactgcaacagcaactgaccctgcaggcaacacttcattgccaggtacaggcacagtttcagcagacatcacagcacctgtggttgcgctggatgacgtgttgacgaatgacagcacaccagcacttactggtacagtgaacgacccgacagccactgtagttgtcaatgtggatggcgttgactatccggcagtgaacaatggtgacggcacctggacgcttgcagacaatacacttcctgcgttaactgatggtccacacaccattaccgtgactgcaacagatgcagcaggtaacgtaggtaacgatactgcagtggtgaccattgatacggttgcaccaaatgcaccggtgcttgatccgatcaatgcaacagacccagtgagcggtcaggcagagcctggttcaaccgtgactgtgacttatcctgatggcacaactgcaacagtggtagcaggcacagatggcagctggtcagtaccaaacccgggtaacctggtggatggcgatacagtgactgcaacagcaactgaccctgcaggcaacacttcattgccaggtacaggcacagtttcagcagacatcacagcacctgtggttgcgctggatgacgtgttgacgaatgacagcacaccagcacttactggtacagtgaacgatccgacagccactgtagttgtcaatgtggatggcgttgactatccggcagtgaacaatggtgacggcacctggacgcttgcagacaatacactt

SEQ ID NO: 8384 - DNA, 2070 bp, Acinetobacter baumannii
atgagatccgtgcgtaaaattttagtcaccaatgccctcccttatgccaatggtccaattcatatgggtcatttactcggttatatccaggcagacatctgggttcgtgccatgcgggcaatgggtcatgacgtgacttatgtatgtgcggatgatgctcacggtacagcaattatgctacgtgccgaagcaaatggtattagcccagaagagcaaatcgcgaatgttcaaaaagaacacattcgtgattttgatggttttggcgtacatttcgatcattatgattcaactcatagtgatgcgaacaaagctcgttcaacagatatctatattaaaaaccgtgaagctggcaatattgcagtccgacctgtaactcaattatttgatccggaaaaaggtatgttcttatctgaccgtttcattaagggtacttgcccaaaatgtaagtcagaagatcaatacggcgactcatgtgaagtatgtggtacaacttataatgcgactgagttactcaatccgcgttcgactttaagtggtgcaacaccagttgaaaaatcatcagatcactatttcttcaagctcccaaactttgctgaatatttgcaaaaatggacccgcgatgaaggtcgcttacctctttcaattgctaacaaattggatgaatggtttgaagcaggtttagcagactgggatatttctcgtgatgctccttattttggttttgaaattccggatgcaccgaataaatatttctatgtgtgggtagatgccccaatcggttatatgtctagttttgaaaactatatcaaaactaagcgcccagatttaaactttgatgatttctggaagaaagatagtcaaaatgaggtttaccactttattggtaaagacattgtttacttccatgctttattctggcctgcgatgcttgaaggggcgaactatcgcactccaacaggcttattcgtaaatggtttcttgactgtaaatggacaaaaaatgtctaagtctcgcggtactttcattaaagccgagacatacttacaacatctaaacccagagtatttacgctattactttgcttctaaactttcagataaagttgaagactctgacttgaaccttgatgactttgttcagaaagtaaattcagatttagtgggtaaagtggttaatattgctagtcgctgtgctaagtttattaacagcagttttaacaatacgctatcaagtacatgtgctgaatctgacttagtacaaagctttattgatgctggtgattcaattgctgctgcatatgaagcgcgtgaattctctacggcgatccgtgaaattatggcgcttgctgaccgcgcaaaccaatatattgatgagaaaaaaccttgggctctggctaaacaagaaggtcaagaacaacaagttcttgatgtatgctctgtcggtatcaacttattccgtcaattagcagtgtacttagctccagtactgccaactttagctcagcaagttcaagatttcttaaaacttgaaagcttcgatttcgagtcacgtaaacaaattcttgtaagccatgagattgcacagttccaacctcttatgcagcgtgttgatccaaaagctgttgcagccatggttgatgcttctaaagagtctttaggtgctcctgctccacaagcaactaaatcagcgaaaaaagagaaatctgccgagaaaaaagcagcccctactccagcagttggtgaagctgaaattattggtattgaagacttcttaaaagttgacttacgtgttgctcaggtcgttgaggcaggtacagttgagggttcagataaattacttcaattgacgttagacgtaggtgaagctgaaccacgtaatgtatttagtggtattcgtagtcaatatgcgccagaagacctaaaaggaaaattggtcgttatggtggctaaccttgcaccacgtaaaatgcgttttggtatttcaaacggtatggtacttgctgccggaaatggtgaaggtattttcattatttcaccagatagcggtgcaaaacctggcgataaagtttct

SEQ ID NO: 8385 - DNA, 870 bp, Acinetobacter baumannii
atgcaatttaagtatagtttgggcgtaatcagtttatgtagcgctttatttttagttggatgtaatgatgacaactcatcagtttcacaaacaccaacagttcaggaacaaaaacagaaattacagccgattattattcagggtgctttacccgtagagtcggaaagaatggcttcaaagttagaaaataaaactgttgaaaaaataggtggctggaccttttggaaaggaacctacaatggctatccaatgattatttctaaaacacgtatggggatgagtaactctgctgccgcaactgctttggcaattgaacggtataaaccgattgccattattaaccagggaacagcaggggggcacgatcctgatctccatgtttacgatatcgttttaggaaaatatgcaaccaatattggcgcttttagaacgcctaaacagccattaggtggaggttcaaactcacttacatgggttgaggcttttgatgtcttaccaacagatgaatctgaccctgaacctattgcaattcgtaaatttgaaggtgaccaagagctattaatggcggcacataaagtacgttatgataaaggtgaagtggttgaaggaacgattggctcggcagatgtgtggaataatgaacttgaccgaattcaatttttccatgagcgttatggtacctcagttgaagaaatggaagcggcttctgttgcacaaattgcaagccagtttaatgttccgtttttaggaattcgaattttatctaataatattaccaataatggagcttatgaccctggtacaggagaagcttgccaagactacgtgcttaacgtagctgaagaatatatgaaatctaaactaccaaaa

SEQ ID NO: 8386 - DNA, 1257 bp, Acinetobacter baumannii
atgaatgagataacaactaaaaaggcaaatccgattttattaggcgtacttggtgtattcgttagcaatatcagtcacgcttcagcacttgaacaatcgggccaatctatcttgccatttcttgaaaatgggaattatgcagaagcaaatttatttgcagttgattcatctgtttctggtgtagtcaatgatagagccgatcttgtaagagatcatcaaagtcgagatacaggtgatattgcagaaagtacgcaattttatacagctgcaataaagttaaaactcacagatcgtttaggttttggtgtgctatatgatcaacctttttcagcagacatcaaatatccggcacgttctaataatagttactttgataatgatattagctatgaaggtacatcagtaaaagccgatactcaaaatttaagtttattattcggatattctccatatcagctttttcaaatttatggtggacctgtttatcaaactgtaaaagcaaatgtagcgcttagaggtaatgcctatactcaggcttttaatggctataatgctaagtttaaacaacaaggtgaggttggttggttgttgggagggagctatcaactacctgatatagcattaaaagcagcaattacatatcggtctaaaatcaaatataaatttcaagtggaagaagatatttttggtgaaccattaaaacttgttgaaaatgagaaaaccaaattagagactccagcatcattaaatattgattttcaaacaggtatttccgaaaaatcacttgtttatatgaatttaagatgggttaactggaaagaatttgagactcggccaccgcaatatggcgctctatctgaaattattatgaaagaggtaactggtggagcttatacccaaggttttaagctcgattcttatcagaatgatcaatatagtgcgactgtcggtctcgcacatcaatttaaagaaaaatggggtgcttcaacagatgtaagttgggactctggtactggtgatcctgcatcaacaatgggaccaatcaaaggatcatggtcgcttggtttaggcgtccagtttaatccagctaaaaactactttataactggtagcttaaaatatttttggctaggtgatactaaaactgaagatgggacttattacttaccaatagagggaatcaagccatacgcagaacaggcaaatttcaaaaataaccatgcaattgcttatggtttaaaatttggatattggttt

SEQ ID NO: 8387 - DNA, 1305 bp, Acinetobacter baumannii
atgaaaaagtatgattatgatatagcagtaattggcgctggatgtgcaggtgttgttgcagcacgggatttaagtaatgcaggtcataaggttgttttattagaggcacgtgaccgtattggtggccgaacctatacaggtgaagcatttggccgacaagttgaatttggtggtggttactcacactggactcaaccttatatttggagagaactacaacgctacggaattggcttaaatcctcctacagaagttgataaaacggtttggtttgcagacgggaaactacacacgggaactcaagctgaatatgctgctattgctgaaccattattaacagctttctttaatgacgctcgtcagtggtttcctcttccttatgatgtaaatgctatcgatacgagtgatattgaaaaacaaacattaagagatcgtcttgataccttaaatttatcaacttatgaacgtgacgttttagacggcctattatcaacacttgttcactcttgggatgagcaaggagtcgcacagctcttattctgggcagctacctattttggaaattggggtgcgttctttgaagtagcagggtcttggccaattgccggtggaacacaaaaactcgtaagagctatttataatgattcaggtgctgaattacgacttacaacttcagttgcagccattgatgatcaaggtgagcaggttgttattacgactcaatctggtgaaaagattgtgacaaaaaaagccctcgttgctgttccattaaatgttttatctgacatcaaaattacaccagaggttaataaacctgctcgagatatgattgttgcaaaacatccaatgcgtactgctaaattatgggcacgtgtacgtggaaaaatcgagccatttattggatttgcgccagttgagcaaaacccaatcaataccgttcgagttgaatatgaacatgaagatgactcaattttagtctgttttatttctgacgagtcaactatagatgtgaacgatattgaagctgttcaaaaagctttacagatgtttaagcctgacattgaagtgcttgatatcgcatcacataactgggctaaagacccttatgcacaaggcacatgggtacactatcgccctgggcatttgtccgatgcagctccgctcatgcgtaaacctcatgggaatatctatttcgcaggaggagatattgcaacaatgagcatgggcggtatcgaaggtgctctagagtctggtattgaaactgctgcaagcatcacacatgcattagctcaaaaattagcaggg

SEQ ID NO: 8388 - DNA, 3108 bp, Acinetobacter baumannii
atgatgtcacaattttttattcgtcgtcccgtttttgcttgggttattgcgatcttcattattatatttggattgctgagcattcctaaactgccaattgcacgttttccaagtgtggccccgccacaggtgaatattagtgcgacttatcctggtgctacagctaaaaccattaacgatagcgttgtaaccttaattgagcgcgaattatcgggtgtaaaaaatctactctactatagtgcgacaacagatacctccggtacagcagagattacggctacgtttaaaccaggcacagatgtggaaatggctcaggttgacgttcaaaataaaatcaaggctgtagaagctcgcttaccgcaagttgtacgtcagcaaggtttacaggttgaggcttcatcgtccggatttttaatgctggtcgggattaactctccaaataatcaatattccgaagttgatttgagtgattatttggttcgaaatgttgtagaagagctaaaacgtgtcgaaggtgtagggaaggttcaatctttcggtgccgagaaagctatgcgtatttgggtcgacccgaataagcttgtttcttacggtttatcgattagtgatgtgaataatgccattcgtgaaaataatgtcgaaattgcacccggccgacttggtgatttaccagctgaaaaaggccagctcattactattccattgtctgctcaagggcaattgtctagtctcgagcaatttaaaaatattagcttaaaaagtaaaactaacggtagcgtaattaagttatctgatgttgccaatgtagaaataggctcacaggcatataactttgccattttggaaaatggtaagcctgctaccacggcagcaattcaattaagcccgggtgctaacgccgtgaaaactgccgaagttgttcgagcaaaaattgaagagttgaagctaaatttaccggaaggcatggagtttagtattccttacgacaccgcgctgtttgtcaaaatttcaattgaaaaggtaattcatacattacttgaagccatggttctggttttcattgtgatgtatctatttttacataatgtccgctatacgcttattccagcgattgtggcgcctattgccttactcggtacttttaccgtgatgttgcttgccggcttttcaattaacgtactcaccatgttcggtatggtgcttgccatcgggattattgtcgacgatgccattgtcgtggttgaaaacgtcgaaaggattatggcgacagaaggattatcgcctaaagatgcaacctctaaagcaatgaaagagattaccagcccgattattggtattacgctggtattggcggcagtatttttacctatggcatttgcgagtggttctgtaggggtaatctataaacagtttaccttgaccatgtcggtatctattttattttcagcgctattggcacttattttaacaccggcactttgtgccacgattttaaaaccaatcgatgggcatcaccagaagaagggcttctttgcatggtttgaccgtagtttcgataaagtcactaaaaagtatgaattgatgctgcttaaaatcatcaaacatacagttccaatgatggtgatctttttagtaattaccggtattacctttaccggaatgaaatattggccaacagcatttatgccagaggaagatcaaggttggttcatgacttcgttccagctaccttcagatgcaaccgctgagcgtactcggaatgtagtcaatcaatttgaaaataatttgaaagacaatcccgatgtaaaaagtaataccaccattttgggatggggttttagtggcgcaggacaaaatgtagctgtggcttttacgacacttaaagacttcaaagagcggactagctctgcatctaagatgacaagcgacgttaattcttctatggcgaacagtacggaaggcgagactatggccgtattaccacccgctattgatgagttaggtactttttcaggtttcagtttacgtttacaagaccgcgctaacttaggtatgcctgctttactggctgctcaagatgaacttatggcaatggcagccaagaataaaaagttctatatggtttggaatgaagggttgccacaaggtgacaatatttctttaaaaattgaccgtgaaaagcttagtgcatttggtgttaagttttctgatgtttcagacatcatttctacatcaatgggttcaatgtatatcaatgacttccctaatcaaggacgtatgcaacaagtcattgtacaagttgaggctaaatcacgtatgcaattgaaagatatcttgaatctgaaagtcatgggttcaagcggtcaattagtctcgttatcagaagttgtaacgccacaatggaataaggcaccacaacaatataatcgttataacggacgaccatctttgagtattgctggtattcctaacttcgatacgtcatcgggtgaagcaatgcgtgaaatggaacaactgattgcgaaattaccgaaaggtattggctacgagtggacaggtatttccttacaggaaaagcagtctgaatcacaaatggcctttttacttggtttatccatgttagttgtcttccttgtcttggctgcactctatgaaagctgggcaattccactttctgtgatgctagttgtgccactcggtatttttggagcaatcattgccattatgtctagggggttaatgaatgatgtgttcttcaaaatcgggctaattaccattattggtctatcggcaaagaatgcgattttgattgttgaatttgcgaaaatgctgaaagaagaaggcatgagtttgattgaagccactgttgccgcagccaaacttcgcttacggccaattctgatgacatcacttgcatttacgtgtggtgtaattcctttggtgattgcctcaggtgcaagttcagaaactcaacatgctttaggcacaggggtttttggcggcatgatttcagccaccattctggctattttctttgttcccgtgttttttatcttcattttgggtgcagtagaaaagctattttcctctaagaaaaaaatctcatct

SEQ ID NO: 8389 - DNA, 1005 bp, Acinetobacter baumannii
atgccacagacagcaacggcactggctagctgggtgaaagcgattcaaaaagcgctcgaaaaagccggtgttgatagtcaacctttattagaacaagcaggtttagatattcaggctctgagtaatcctgatgcacgatattcattaaaacaaacagcaaatttatggaaattagcagttcagaaaactcaagattcatgttttggccttaaagttgccagccaagtcaatcaaaatacttttcatgtgttagggcattcactgattaccagcaccaccctaaaagagatgtttctaagaattattcgttattttcgtgtggttacggatattccagagctagagttttatgggcaaggaaataaccattatttcgttattcatgttcccgacgaagttcagcccgaatctatcgatgcatttatttccgtttttattcgctcaagtcgtgctttacaaggctctgttttttcgccattacgcattgaacttagacgttcagaacctgaagatttagaaacattccagaatattttaaaagctccgattgtgtttaatgcacccaaagacatgattgtgtttgatacagcaaccatagaacaaccactagaaggtgcaaatcccactctcacccaagaatatgatgaaattattaatcgttatctggcacggttcgataaagaaaatatattggcacgagtgaaagtaaaattaatcgaaaaattatctacaggcgactttcagcaacaagaaatagcaaaaagtttagggttaagtattcgtagcttgcaaaggaaactctcggcagaaaacacttcatatagtgaactgttagatgacacccgtcatgaactggcactttcttatataaaaaacacaggccatagtgtgactgaaattgcatatattttaggttttacagatgtcagtagttttacacgtgcttttcgacgttggaccgatttatcgcccatccattatcgagaaaaatatctagcttgctct

SEQ ID NO: 8390 - DNA, 1256 bp, Acinetobacter baumannii
atgaacttaactgaactcaagaaaaaaccaatcggcgaactaattaaaattgctgaatttatgggccttgaaggtatggctcgtaaccgaaagcaagatattatctttgccatcttgaaacgccatgcgatgaatggcgaagaaatttttggtgacggcgttcttgaaattctctctgatggttttggttttttgcgctctgccgcaggttcgtatttagctggtccggatgatatttatgtgagtccttcacaaatccgacgctttaacttgcgtacaggtgacaccatcacaggtaccattcgtccaccaaaagaaggtgagcgttattttgctttgctcaaagttaatcaaattaactatgacacgccagaaaattctcgtaataaaatcttatttgaaaacttaactccacttttcccgaccgaacaactggttatggaacttggtaatggtacaacagaagacttgaccgcgcgtgtagtcgatttagttgcaccatcggtaaaggtcaacgttctattattgtcgctccgccaaaagcgggtaaaacaatgttacttcaaaacattgctcaatctattgtgagaaacaatccggaagttttccttattgttttattaattgatgagcgcccagaagaagtaactgagatggagcgtaccgtacgcggtgaagtcgttgcttcaacatttgatgaagcaccagcacgtcacgtacaagttgcagaaatggtcattgaaaaagcaaaacgtcttgttgagcacaaaaaagacgttgtgattttacttgactccattacacgtttagcccgtgcatacaacacagtaattccttcatcaggtaaagtattaactggtggtgtggatgcacatgctttagaacgtccaaaacgtttcttcggtgctgctcgtaatatcgaagaaggcggttctttaacaatcatctctactgctcttattgagactggcagtaaaatggatgatgtcatttacgaagagtttaaaggtacaggtaaccaagaaattacacttgatcgccgtattgctgaaaaacgcgtcttccctgccatgaatattaagaaatctggcacacgtcgtgaagaacgtttaatggatgaagataaattacgtaaagtttggattctccgcaaacttcttcaccctatggatgagttggcagctatggagttcttacttgatcgtatgaaagaaaccaaaacaaatgatgatttctttgatcagatgaaacgtaaa

SEQ ID NO: 8391 - DNA, 819 bp, Acinetobacter baumannii
atgaaaaaagctactcagtccaaagcgtggacaacggttcaaattgcacgtcatcctgaacgtccgcagtttctagattatgtcggtgaaatctttacagagtttgatgcattgcatggtgatcgtttgtttggtgacgatggtgcgatggtaggtggtcttgctcgttttgacggtcaacctgtgatggtcattggacaacaccgtggtcgtagtacccgtgaaaaattaaagcacaactttggtatgtgtaacccagaaggttatcgtaaatctcagcgtcttttagatatggctgagcgtttcaatctaccagttttcacctttattgatactatgggcgcatatccgggtgttggtgctgaagaacgtggtcaggcagaagcaattgcgactagccttgctcaactttcaagcctgaaagtacctgtaatcgcaacagtacttggtgaaggtggttctggtggtgctttaggtattggtgttgctgacagagtaattatgttgtcacatagtatttattctgtgatttcgcctgaaggctgtgcatctattttgtggaaaactgctgagaaagcagctcaagcgagtgaagctttaggtttaacagcagataaactacaatcgctaggtattgttgaatacgtagtagatgaaggtgaaggtgcgcatttagatcctgagcgtgtgatgcaaaacttaaaagtagttttaaagcaggctttggatgaattgctaccaatggatgcaaatgaacgatgcgaagcacgttatcaacgtttaatgaagtttggcagcgaaaatttaggcgtggcgtct

SEQ ID NO: 8392 - DNA, 1281 bp, Acinetobacter baumannii
atggattcaatgctactactacatttaatggctcaaattttccctcaaaagatccgagcaatttatattgatcatcaactgcaagatcaaagtgcagagtgggcggaagtggttgccacacaggcaacaatattaaatattccttatattattcaaaaagttcagattgcaaacggcaatctggaagctcaagcacgtcaagcacgttatcaagcatatcagcaacatttacaagaaaatgaaattctgttgcttgctcatcatcaacaagatcaggcagaaacagttattttgcgattattgtcaggtgcgggagtagatgggcttgctgcgatgcaggctattgattaccgtaaagatatgacaatttggcgcccctttttggatttaacacgtgagcaaatcgctttatggaccgctcagcttgaagttaaatatattgatgatccaatgaactatgacacccattacgatagggtgtggtgtcgtgaagcactgtggccatttttaacaagccgttttccaaaaatgcagcaagctttgagccgaaccagttatctgatgcaagatgcttctgaagttttagaagaagttcttaaagatgattggcaatattctggttcagctgactatttagatctaacgaaattatccgagttatcttttgcgcggcagcgccagttactttctgcgtggatgaaaggccaagggcaatatcgacctgcatttgaaatggtcgaacggctaagaacagaagttattgagtctaagtcagatgctcaagccgctttacattggaaccagttttactatgtccgttatcaaaatatactctataggttgagtaaacagatttatttcgctgaaactttaaatccggttgatgctgaactagagcattcatttaaattagaagaaagatggcagggcgcagctggactattccatgttgagtgtaaaaaaattggtttaagtcattctttattgaataaaaaattaaaaatcattcgacgtcaaggtggggaaaagattcacctatatggtcgtgttgggcaatggcctttaaaaaaagcaattcaagaagcacatattttgccttggcttcgtcatacaattcaaatattagtcttagataatgttatgcttggggtttttacaccgaaaggattttggttggctcagtctccatattgtgaggaaggagggtggcaaccagatttaatttctcattcttgtaatctggtaaatggcgaatatagttatggcaacagcagtgaattg

SEQ ID NO: 8393 - DNA, 2769 bp, Acinetobacter baumannii
atgccaccatttgtcttggttgatgggtcctattttttatttcgtgcatatcatgcattaccaccattgacgacctctacagggttacataccaatgcaatacgtggagcaatttctgccattcaaaaattgatgcgtcgtatgcaaccgacacatatggctgtcatttttgatacgcctgagccaactttccgtcataagctttcacctatttataaaggtgaccgcccgactatgccggaagaattgtctcaacagattccatatttacatgcattgattaaggctcaagggattcctttatatagtcttccgggtgcagaagccgatgacattatcgggactctcgctaaacgcgccgtaaaagaaggtcatcatgtccttatctcaaccggagataaagacatggcccagctggttaatgactatgtaaaacttgaagatagctttaaagatcgagtgctagacaccgacggcgtatttgaaaaatttggcgtttggccaaaccagattatcgattacttaacccttatgggtgacgcatctgacggcattatgggtgtacctggcgtaggcgcaaagacggctgccaaattactgactgaatatgggacattggataatatcattgccaatgtagaccaacttaaaggcaaactgagccaaaatattaaagataatttagacaatattaagcttgatcaccagttggcaagcattgtctgtgatcttcctttagaactcgactggcatgaattaaaacttactgatccaaatgtagatgccttacgcaatctctatacggagcttgagtttagaaaccagttacagtctctcgatcatccaaacaatccaaatagctcaagctataagcagcaagcttcacaaactattgtccaaaatgaagttaaacctgctcaaacgattgaaacagaagatcaagcaagcttgactagtcaagatgaccagcttggaactgcaaactatcacactgttttaacacaagaagcatgggatcagctctggcaacgcatgcagaatgccgatcattttgctattgatacagagaccacaagtcttgattaccgtattgccgagatggttggtttttcaatcgcatttgatgcaaaagatgcctactatgttcctttggcacataattacgaaaatgcaccacaacaactggaccgtgaacaagttttagcgcaaatcaagcctatacttgaaaatgaagcagttaaaaaaatcggtcatcatcttaaatatgatgcgcacatttttgctaatcacggtattgaacttaaaggttggtatttcgatagcatgctggcatcttatgtactgaatgcagcagctactcgtcatggcatggatgatgttgctcgagtttacctaagccatttgaccactacttttgagcaaattgctggcaaaggtgcaaaacagaagacttttaatcaaattgagattgaagttgcagctcattatgcagctgaagatgctcatgtgacctatcgtttatatgaagtactttcaaataaacttaaagcacatcctgaattagaaaatattttatataacatcgagatgccagttgctcgaatcttatcgggtatggaagaagatggaatccgtttagatcatgctttcttagataaattaagtgttgaatttgcgaaaactatggaagaccttgaaaatcaggccatggaaattgcaggtgaaacttttaatattgcttcgcctaaacaagtaggtgaaattctatttgataagttaggcattaaaggtggtaaaaaaactgcaactgggcaatacagcaccagtgaaagtgttcttgaaaaaattgagcacccattaacggaaattattttagaacaccgtggattagcaaaattaaagagcacctatactgaccgtttaattgagcagtcgcataatgatacccatcgtgtacataccagctatcatcaagcactaacggcaacaggtcgcctatcctcttctgaccctaacttacaaaacattccaattcgtagacagattggccgtcaaatccgtaaagcatttattgcaccggaaggacgagttttgttagcagccgattactcgcaaattgaacttcgtttaatggctcatttttctcaagatgatgccttagttcatgcattccaacatggtcaagatgtacaccgtagaacagcggcagaagtgttaggtattgcaattgaagatgtgaccaatgatcagcgccgtcaggctaaagctgtgaatttcggtctactttacggcatgtccgagtttggtttaattcgtcaacttggctttactcgtgaagaatcgcaaaactatatcaaacaatacttccagcgctatcctggcatttacgaatacatgcaacgtactcgccaagtagcatcggaacaagggtttgttgaaactattttaggtcgccgtctgtatacaccggatattgacgcccgaaatgtgatggtacgtaaagctgctgaacgtgctgcaattaatgcacctttacaaggtagtgctgctgatattattaagttagcaatgattgaagtagataaaatcctgccaaaagatcaagcaaaactattacttcaagttcacgatgaattggtgtttgaagttgattcaaacattgcagatgaactttcaaaacaaattgcggatgtcatgcagtctgttctggaaatttctgtaccgttagtcgtagaagtaggccaaggtaaaaactgggatgatgcccat

SEQ ID NO: 8394 - DNA, 897 bp, Acinetobacter baumannii
atgaattattctaatttacttttgtcgagcttattaactgtaggtctttacacctcagcccatgctcaagaaaatcttactgaagaatctgccgctagttcggaagatgttacttcaacccagactcagcatagccgacctcacttacaaattattaaagatttgaaaggtataaaagttaaagatttaaagatcaacgcaaatgctgctcaaccggatacagtgaaagatccattacagtcactgaaccgtccaatttattcttttaacgatatgttagaccgccatgttttgcgtcccgttgctgttgaatatagagaaaagacgccagaagatgtacgtggttcttaccgacaatttcgtaaaaaccttggcgaaccatggaatgctgttaaccagctaattcaaggacgtcctggccgcgccgcaaaaactttaggtcgttttactattaatacgttaacaactttaggtttagccgatccagcgagccgcttaggcttacctcctgaagaagaaagttttggtgtaactctcggttactatggtgttccttctggaccatttcttatgctgcctttctttgggccaagcactttacgtgatggcgttggcttggctgtagatgctcaggcccgtccacaaaaatacattatggatgatcaagatggcctgtattggtcgactaatctattacaagccgttgatacacgcgctcaatatctagatttagaccaaactatacaaggcgatcaatatgcaatgattcgtgatttatatctccaacgtaaagcgttccagattgccgagaaaaaaggtgattcggcagatgtgtcttttattgatgatgacgaatccgaagatgtaccagaagataacactgataaaaccgaaaaa

SEQ ID NO: 8395 - DNA, 915 bp, Acinetobacter baumannii
atggccgattcaagtattccaaaagatatcgctgatagcctcaaaagcatatttaccaatatcaataccgaacgaattagtgaaattttagtcggtgttgtgctttgttttattggttttgtccttgcccgtattatttcaaatacatttattagaaccgttggctcacgttttaatgctcaccagcgtctggtatggcgccgcggtattttctattttattttcttactcttcattatgacgagtttaaaagaagccgggttcaaacttagtgtatttctgggggcagcggggatcttaacagtagcactcggtttcgcatcacaaacatctgccagtaacttgattagtggtttatttttgattggtgaaggttcatttgaggtcggtgatacgattcaaattacacttattcgagggaatacaatcgaaggcgaagttatctcaattgatttgctttcggtaaagttacttacactcgacaacgtctatattcgtttaccaaacgaacaactcattcgtgctcctgtacacaacttatcaaaatatccaatacggcgtattccaattactttggcaattaactttcatgaagacattattaaagtccgtgaggttctacttaacgtcgcagcaaattatccactcgtgttagatgatccaaaacctgctgttacagttactgccttcagggagtcatcgattgagcttttatttgcaatgtggtgtcgtcaagaaaactctttaaaagttcgagatgaaatgcaagaacgtatccgaaatggttttttagataaccaaattgagattcctgttccgaaaatgggcttaattgatcgaccatctactgcttttgctgaagatgatatcgatcaatacagcaatcaaaaagagttaaaacgagagcctaaagct

SEQ ID NO: 8396 - DNA, 1227 bp, Acinetobacter baumannii
atgaaacgtgttgtaatcactggtatgggtattaactcatgtatcggtaactctttagaagaagttactcattcacttaaaaatggaatctccgggacacgttttaacccaacttatgctgaactcaattttaaaagtcatgtcagcgctgcggcagaacaagattttgacaatattgatcgtaaattaaaacggttcatgggcgtatgtgcaatgtacgcttataactctgctgttgcagctgttgaacatgctggcttaaaagcagaagatttagcagataatccacgttatggtattgccggtggttcaggcggtggttcaactgcttctgttgtagaaatgactgaacttttagaaactaaaggtgctcgtaaagttggtcctttctttgttccacgtaacatgacaaatacaatcactgcaaacgtgggtgtagcatttaaacttcaaggtattgctcactcaattgcaagtgcttgtgcaacttctgcagacgcaattggttatgcatataaccttatcgctctaggcaaacaagatcttatgcttgctggtggtggtgaagaagatcactggtctcaaagcctattgtttgatgcaatgggtgctctgtgttctaaatacaacgacacacctgaaacagcgtctcgtccatattctaaagaccgtgacggtttcgttattgctggcggtggcggtttcgttgttcttgaatctcttgaacatgctcaagcacgtggtgcaaatattcttgctgaagttgttgcttatgctgcaaacagtgacggtgctgacatggttgctccaagtggtgaaggtgcaactcgctgtatcttgatggctcttgaagaagcgaaacaacacggcgtagataaaattgactatgtaaatacgcatggtacttctacaccagcaggtgacgtgactgagcttaaagcaatggaacgtgctttcggtgaaggtaaagttccacctcttagttcaactaaatctatgactggtcacagcttaggtgctgctggtgttcatgaagcaatttactctgtattaatgcttcaaaatgactttatcgcgccaaacatcaacgtgactgagcttgatgaaggtactgaaggctttgatattgtgcttgaaaaacgtgatacaaaattgaatactgtaatgagtaacagttttggctttggcggtgttaacgcttgcctaattttcaagaagtgggatgca

SEQ ID NO: 8397 - DNA, 1623 bp, Acinetobacter baumannii
atgaaaagttttaaagttgcccttgctcagttttctccgcatattggcaatattgactcaaacacccaaaagatgattgagcaagcaaatcaggcgaaaaaacaagacgctgacctgattatttttcctgagctttctgtgattggttatccagctgaagacttattgttacgtccaaatttaaataagcggatgcaaaaggcttttgctcaacttagtgaagttaaagatattgtgatggttttcggcttcgtaaaccagacagaagatggccaacgttataattcagctgctgtcatgaaagacggtcaggttttaggtgtcttcaataaacataacttgccaaactatggcgtttttgatgaaaaacgttatttccaaaaaggccatcagcacttggtgtttgagtatttaggccataagtttggtgtactcatttgtgaagatatctggtcaatcaatacagtaaaacaattaagccaattaaatgttgatactgtacttgtgcttaattcatcgccatatgaagtgggtaaaccacagcatcgtaaacagacattaagtgagcttgcaaagcagcttcatttaaatattgtttatgttaaccaagttggtggacaagatgatttaatttttgatggcacaagttttgtcagcaatcaaaatggtgaaattgctttacaagcacctagctttaaagaagatctctatattgctgaatttgaccgcgatacaaaattatataaagttgtcgagtctgctcctgcattagaaacttttgcagagatctatcaaggcctagtcatggcaacacgtgactatgtagaacgctcaggttttcctggagtaattttaggtctttctggcggtattgactctgcccttacgcttgctattgcagttgatgcaatcggtgctgagagagttcaagctgtgatgatgccatatacttacacatctcaaattagtgtagaagatgcagcggaacaagctcgccgtatgggcgtgactttcggtattgccgaaattcattcaatcgtaaatagcttcatgcaaactttgtatccgttctttggtaattcaccagccgatgcgactgaagaaaatttacaagcgcgtgctcgtggcacattacttatgggcttatctaacaagtttggtaatttagtcctttctacaggtaataaatctgaactttcagttggctattgcacactttacggtgacatggtgggtggctttgctgttctcaaagatgtttataaaacaatcgtgtttgaattagcaaaataccgtaatagcttaagtgaaactccggttattcctgagcgtgtaattactcgcccaccttcagcagaactacgtccagatcaaaaagaccaagactctttaccagcgtatgatgtattggatgctatcctttatgcatacattgaggaagatttaggtcaggcagacattattgccaaaggttttgataaagaagttgttgaaaaagtcatccgtttagttgatcgtaatgaatataaacgtcgtcaaggtgcgattggcccgagaattacttctcgtgcatttagtcgcgaacgacgttatccgattgtcaacggttggacagcgaatgac

SEQ ID NO: 8398 - DNA, 1356 bp, Acinetobacter baumannii
atgtatgaaccctaccccgtccccgaacaggtacgtgaacaaaagctttcccgctacagtagtttatggacgtttgctaaacaagatttacgacttttattatttttcctgattattgcaggtttagtcggtttaggaattgggtatttctggagctgtatttttattgcctttgtggtgttttttacacttcagttgcgttctttatatttggtcaatgactggattgccaataatccatacgatgtccctccgaacctcaacggaatttggggggcattattatttaacgtttaccgtgcccagcgccaagaacgtatcgttcaagcggaaatggtaggacttattgaccgcgctcaatcttcattagttgcactcgccgaagcggtagtcttgattgatgatcaacatcaaattgaatggtggaacccagccgcagagcgtttactaggaattagtccacttgaccgtggtcgcaacttattaaccattttgcgccagccaacttttattgaatattttaacaatattgatcaggcacccgatgggattaaactccattcaaatcttgatgatgaccgttatgtacaggttaagctcacacgatttggtggggaaagtcgcttacttgtggcatacgatgtgactcgtatgcataatcttgagcaaatgcgtaaagacttcgtcgataatatttcacatgaactgcgcacaccattaaccgtcctgagtggttatatcgaaacatttaccgaccaagaagatattaacccgcgctggaaacgtgcatttgaccagatgcaatctcaaaccaaacgtatgaatgcgttggttaatgatttactactgttatcaaatttagaaaataataagaaaatcgcaaaaaatcagattattgaaatgccgagcttaatgaatcaattatttgatgatgctcaggcctacaatgccgattatgggcatacactcaatttacatattgatagccactgtgacctcatcggttctgacatggaaattgccagcgcatttagtaatttaattactaatgccattaagtacacaccaaaaggcggaaccattaccattggttggcacgatgacggtgagcatgcttactttagcgtacaagataccggtatcggcattaaccctaaacatttaccgcgtctgactgaacgcttctaccgcgtggacagcgaccgtagtcgtcaaaccggtggaacaggtttaggcttggcgattgtaaaacacgtactcatgcaacacggcgcctatttagacgtgcaatctaaagaaaatgaaggatcaacctttaccgcagtttttccaaaagaaagactctataacatgact

SEQ ID NO: 8399 - DNA, 1479 bp, Acinetobacter baumannii
atgaataatactcaatcagcagcaatgccacttgttgaaaatgaagaagttaatcttttagattcgattgttgaacaaagccgtattgcacgaaatgaagaagaacattctcgtgctaaaagcttaattggtgagcttgctaaagaagtaatggcagggaccattactgtttctgaaaatatgactttatcaattgataagcgtattgcagaaattgatgctctgatttcaaagcagttaagtcagatcatgcacaatgaacaattccaaaaaattgagtcaacttggcgtggtctttattacttttgtcaggaaacgccttcaaatccgctcattaaaattcgtatgcttaatacgactaagaaagagttggtaaaagatttccaaggtgctacagactttgatcaaagcactttgtttaagaaaatctacgaagaagaatacggttcttttggtggtgcaccatactcagcattaattggtgattttgagtttgatcgtactccatctgatatgtatttgcttgagcaaatctctcatgttgcagcggcagcacatgcaccatttatttcagctgctagtccgagcattttaggccttgaatcatttacagatattgatcgtcctagagatgtttcaaaaatctttgaaaccgctgaatatgttcaatggcgttcgttccgtgatagtgaagactcacgttatgttgcattgactttgcctcatgtcttgggtcgtctcccatatcatccaaaagaaggtactgcgacagaaggctttaattttattgaagatgtttctggtgaaaaccacaatgaatatttgtggatgaatgcagcttatgcttttggtactcgcttaacaaatgcatttgatatgcatggttggtgtgctgctattcgcggtgttgaaggtggtggtttagttgaaggcttgccagtacatacttttaaaacacaagatggcgaagtggtattcaagtgtccaactgaaattgcaatcacggatcgccgtgaaaaagagttaagcgatctaggcttcattccgttagtacattgtaaaaatacagattacgcagctttctttggcgcgcaatcaactcaaaaacctaaaaaatatgacaatgatacagccaatgcaaactcggctttatcaagtcagattcagtacatcatggctgtttcacgtattgcacattacttaaaagcaatgatgcgagataaagtgggtagctttgcttctgctggaaatgttgaagcattcttaaatgagtggttgtcacagtatgtcttacttgacgatggtgcttctcaagaagcaaaagctcaatacccgttacgtgaagcgtctgtaaaagttgtagaagatcctgctcaaccaggtcactacaaatctgtggttttcttgcgaccacatttccagctggatgagttgtcggtttctttacgacttgtcactgagttacctcagtcctcaaat

SEQ ID NO: 8400 - DNA, 894 bp, Acinetobacter baumannii
atgcacgcttatacggttgagcctttatatgttccatgtgatcaggaaatgatcgcagctgacttttatattccaaaaacaaataataaatctgcggtaattatcatggcacatggttttgccggattacgtcaattcaaactcattcaatatgcccagcgttttgctcaagctggctatgcggttattttatttgattaccgatattggggtggaagtacaggtaagccccgagagatgatttctatcaactctcaactagaagactggaagaccatgatccaatacgcttctacgtgtaaatttatagataaccgaagaattgtattgtggggaacatccttaagtgggggatatgctttaagcctagcttctgaattaaagaatattcaggccattatggtacaaattccatatgttgatggtgcggaaacagcaaaattatatccactacagcgttatccccaagctttaaagttgtcgagccaagattatatgggttcaaaaatgggccttaaccctaaaaggttacctgtggtagatcaatataaattgtgctttatgccaacagcagatagctattatggttatttatcgattgtgaatccggattattactggagtggagaagtcccggcacgcgtgttttttaatttgatgcgttatcgcccaattcaacttgtacgtcaaattaatattccagttttatttattgcggctcagcatgattctttgattccaattgagtctagtcgtgaagctgcgactaatattgctccttttgtgagttatcatgaatgggatatgaaacattttgatatctatcacggttcatggtttgaaaaagcagtgacgacccaattagaatttttacatcagcatataggagtgatg

SEQ ID NO: 8401 - DNA, 849 bp, Acinetobacter baumannii
atgcaaggcatagatttacatacacatagcaatatttctgatggaactttgtctccggaattgctagtgcaagctgctgtcgatgtgaagttgcatactttagcgctaaccgatcacgatacgatggatggattgcagcgtgcaaaaaatgctgcacaaccccatgatttgcaaattatttctggtgtagagatttcaagccagtggtcacgaccaagcacgaaaaaaagctatggcgtacatattgtggctttaaatatgcaagatgaagctccaattttagaagcattagaacaacaaaaaagaattagagcacaaagggctgaagttatttgtgaactattaaaaaaatgtattggctttgatatttatcaagatgtgctcgataaagttgaaaatcaaccagaccggattaccagaacccatattgctaaagccttagttgaaaagaatgtagtgagccgtcctcaacaagctttcgatcgttttttaaaagaagggaagcgtgcttttgtaaagtttgaaggattgggtttaaaagaaaccattgaggttattcataacagtaaaggatttgcagttttagctcatccaacccgttatgatttatcggctacaaatacccggtatttgattgagatatttgcaagttatggtggagatgcggtggagctgccgcctcctgtagatcctttatctactcgccaaatgattgatcgtatgattgaacagcatcatttggctatttcaattggtagcgattttcatggtgaaaatatgccgtggattaaattaggaaacacccctaaaccagcgagtaaccagcaaggcatttgggaacgttttatc

SEQ ID NO: 8402 - DNA, 420 bp, Acinetobacter baumannii
gtgtcagaagcttataccaaaccagaaggaattttatccttacaaacgattgccatgccagcagatacaaactggagtggtgatgtgtttggtgggtggatcgtgtcacaaatggacttggctggagcaattcacgcggagcgttttagtcgtggtcgctgtgctacgatttccattaatcagatgacctttttggttccggtaaaagtaggctttgtcattagctgctataccaaaatcctaaaagtgggtaatacctctattcaaatgcaaattgaagtttgggatagccatgatgactctcgtgccccaattcgtattactgaaggggtctttacctttgttgcagtagatgtaaaaggcaacaaacgtcagattcctgaggaagcgaaacagaaatttcttgcctctcaagaatcg

SEQ ID NO: 8403 - DNA, 909 bp, Acinetobacter baumannii
atgattgttcgtgaacagcccagtatttttaaagttttattctcttggcgagggacgatattacctaaaattttgccctctttaggggtagtaatgctgatttcggcaatcattggtggggttgaatacattaacctttatcgttttccagaaattcctttagttggctttactttaattggtgtcgtactttctatttttttaggttttaagaatactgcatgttatgaccgctggtgggaagcccgaaaattatggggggtcctgattgcaacttcgcgtcatttcgaccgtgactgccgaattttaactcaagcccgccgtgaacgtgtcattcagcacgttattgtatttgccaatgtattacgtgaccgtttacgccgtcaaacagccaaccccaccgagctaatacaaaccagtggcatgagccaacaagcacttacccaactttaccaacaaaataacgcacctcaatatacgcttagccttattcaatgggaattattacaagcgcttaaagaaggggaaatttcagatattatttatgctcaaatgaataagaatgttgcagatctaagtgtcgtacaaactggctgtgaccgtattgcaaatactcctattccgtttgcttattcagttttgcttaaccgtactgtttattttttctgttttatgttgccgtttagcttaggatctttgcttggtttagcaacgcctttactggttggaattctggcttatacatttttaggacttgatgctttaagtaccgaaattgaagaaccatttggcacgcaaagtaatgatttacctttagatgcaatggtacgtagtatcgaaattgagcttttggggacacttggtaagcccacacctcctccaattcaagctcaagataacaacttgctc

SEQ ID NO: 8404 - DNA, 705 bp, Acinetobacter baumannii
atgaatacttctattaaaaattggccagaacaagaacggccaagagaacggttattacaacaaggccctcaaagcctttctgactctgaactactcgcgatctttcttcgctcaggttcacgtcaacattcagcagtagagctcgcacgtttactgattcaacagtttggtagtctaaacgctgttttcgatgcatcttacaatgaattagctcaatttaatggtattggagctaccaagtattcccaattactggccgtaaaagagcttggacggcgttatctcgactatcattttagtcagactgagctaagccttcattcttctcatttagttctagattatttacgttacgaattaaaaggtgaaaaacaagaagtctttgcggtactttgcttagatgccgagttgagaaaactacattttaaaaagttattttttggttcagttcaacactgcgctgtttcagtgaatcaaactttacgttatgccttacaacagcacgcttgccaattagtaatagcacataaccacccatttggttccgcacagccctctctcgaagatattaaactcacacaacaacttgaacaggcctgtcagcttgttgaaattcgtctgctggaccattttattatctcgccagaaggtagcttttcatttgctgaacaacaactgctcaaccctacctcaatagccgttcaa

SEQ ID NO: 8405 - DNA, 612 bp, Acinetobacter baumannii
atgaaagcactactggactttgttccattaattattttcttttatttatataagacagttgatccagccgatacacagcatcctttactcaaactgatcgggtctgctggcggtgttgataataataatattcttgtcgctactaccggtttaattatttcaatgctggtagtgtatggtgcgttgttcatcatgcaaaagttccgtctggataaacagcaatggattgtgctgttcatgacagtcatttttggtggtattacccttatgttgagcgatgatttttacatccgcttaaaagccgctattttgaatctagtttttgcaggtgctttcttagtttcaccttggtttggtaaagaccgtaagcctcttattcaacgtttatttgatccgattttagccttaagcgaaaaaggttggaaaaatttaaactttgcttgggcagctatgtttgtcgtgatgtctggtttacatgttttctttgcgtttttattccacggcggaaaatattggggtgaatttactgcatttggtgacatgattgtcatgttttcatttatcattattcagttcattattttacgtaaacattttaagtcaccagatgct

SEQ ID NO: 8406 - DNA, 1131 bp, Acinetobacter baumannii
atgaagtttgaaaaattaggtcagtcgggtcgtgcccgtcgtggtcgtttaactttagaacatggtgttgttgaaacccctgtttttatgccggtggggacttacggtacagtcaaaggcatgctgccacgtgatattgaagatattcaggcacaaattattttaggtaataccttccatttatatttgcgtccgggccttgaagtgatcaagcaacacggcggcttgcacgactttattaaatggaataagccaattttgactgactctggcggcttccaagtatttagtcttggcgctatgcgtaaaattaaggaagaaggtgttactttccgttctccgattgatggttcaaaagtctttttatcgcctgaaatttcaatggaaattcagcatgtattgaactctgacattgtcatgatttttgatgaatgtacgccttatcctgcgacacatgaagaagcacaaaaatcattacagctttctttgcgctgggcaaaacgctgtaagactcatcaccacgatgaacttaaaaataaaaatgcgttatttggcattattcaaggcggcatgtatgaagacttacgtgatgagtctttaaatggcttacttgaaatcggctttgacggttacgcaattggcggtttgtcagttggtgaaccaaaagaagagatgatcaaggttttagattatcttccaaacaagatgccgcatgacaaaccacgttacctgatgggtgtaggtaaacctgaagatatcgttgaagcggtgcgccgtggtgtcgatatgtttgactgtgtaatgccaacacgtaacgcacgtaatggtcattattttgtcactgatggtctggtacgtattcgtaatagtaaatatcgtcatgaccaaggaccacttgacccacactgcgattgctatacctgtaagaactttactcgtgcttacctgttccaccttgagaagtgtggagagatgttggcatctatgcttggtaccattcataacttacgttattaccaacgtttaactgaaggtatgcgtgatgcattagacaatggcacttttgatgaatttgttcaggacttttatgcccgccgcggattagaagttccaccatgccctgtcgatgaa

SEQ ID NO: 8407 - DNA, 1035 bp, Acinetobacter baumannii
atgcaactgtctgacttttcctttgaactacccgatgaacttattgcccgttacccactcgaaacacgtagtgcttcgcgtttattgcatttagatgctaagggccaatatcacgatcatatgttcacagatattattgatctgttcgaagaaggcgatttattggtactcaacgataccaaagtcatgaaggctcgactgaaaggaaaacgtgccacaggtggggcgattgaaattttggttgagcgtatgctgaaccacaccacagcatattgccatattaaagcaagcaactcacctaaagcaggggctgagctttttgttggtgaagacaatattcctgtgattgtgcgtggccgtcacgaaaacttatttgtcgttgagttttcacaaccaatcttgccagtacttgagcaatatggtcagttacctattccgccttacttcaatcgtgaagcagaagaaattgatactgaacgctatcaaacggttttccataatccagaaaaaattgccagtgtggctgccccaacagcaagcttgcattttgacgaagagttgttagcaaagttagaccaaaaaggcgttaagaaaacgtttgtgactcttcacgtcggtgcaggtacttttatgcctgtacgcactgatgatattacaaatcatgtcatgcacagtgaatggtgtgatgttcctcaagaaactattgatttaattttggcaactaaagcacgcggtaataaagtgattgctgtgggtacaactgcaacacgtgctttagaaagtgcagctcaagcacatggcggaaaaatcgcagcatggactggtgatacgcaaatctttatttatccaggttatgagttctgcatcgtagaccgtttaattactaacttccatttacctgagtctaccctgctcatgttagtttcagcattgtcaaatagagaaaatattttggctgcttacgaacatgccgttaaagatcgctatcgcttctttagttatggtgatgcaatgctgattgataaattagaagtt

SEQ ID NO: 8408 - DNA, 588 bp, Acinetobacter baumannii
atgcatcttaaaacattaagcttcggtttagcagtagcattggcaagtacagttacattagctgcaccagtggactataaaattgatccaacacatacagctactgttttctcgtggaatcacttcggtttttcaaccccaagtgctaacttctcggacatccaaggtgtaattaaagttgacaatgctaaaccagcaaactcatctgtaaatgtgaccattcctttaagcagtgtgaataccaatgtacctgctttagataaagagttccaagaagaagcttggtttaatgcggctaaatacccaaacattactttcaaaagtacgaaagtagaaactaaagataaaaaacattttaaaattactggtgatttgactgttaaaggtatcactaagccagttgtacttgatgctgtcttaaataagcaaggcgagcacccaatggcaaaagttccagcgattggttttaacgcgacaacttcgttcaatcgctctgactttggtttaggtaactatgtaccaaacgtgggtgataagatcactgtaaacattacaactgaagcaactgcggctagtgcagctaaaaaa

SEQ ID NO: 8409 - DNA, 1986 bp, Acinetobacter baumannii
atgacgacccctttaaacgaacgtcgtattgcaaacgcaattcgtgtattggcaatggatgctgtgcaacaggcaaactcagggcatccaggtgctccaatggggatggcagatattgctgatgtcgtctggcgcgagtttttaaatcacaacccaaataatccacaatgggcaaaccgtgaccgttttgttttatcaaatggccatggttcaatgttgcaatatgctttgcttcatttaacaggttatgatctttcaattgaagatttaaaacaattccgtcaattgcactcaaaaactcctggtcaccctgaatatggttatgctccaggaattgaaacaacgacaggtcctttgggtcaaggtattgcgaacgctgttggttttgcattagcagaaaaaactttagctgctcagttcaataaagatgacttaaaagtagttgatcactttacctattgtttcttaggtgatggctgtttaatggaaggtatttctcatgaagtatgttctttagcaggtactttacagcttggtaaattgattgcttattatgatgacaacggcatttcgattgatggtgaagtagaaggctggtttagtgatgacactgaagagcgtttcaagtcttatggttggcaagttcttcgtgtagatgggcatgatgctgatgcgattcgtcaagcaacagttgaagctaaagcagaaactcaaaaaccaacgattattatttgtaaaacaattattggcttaggttctccaaacaagcaaggtaaagaagactgtcacggtgcaccactgggtaaagatgaaattaccttaactcgtgaagctttaggttggactgaagaagcatttgttattcctgctgatgtatatgctgcatgggatgctaaagcaaaaggtaatgaagctgaagcagcttggaatgaagtgtttgctcaatatcaagcaaaatatccaacggaagcagctgagttacttcgtcgtattagcggtgacttaccaacagaattttcagctcaagcagatgcatttattcgtgaaacaaatgctaaagctgaaactgtagcaactcgtaaagcgagccaaaacacattacaagcatttggtcctttattacctgaattattaggtggttctgcggacttggcaggttctaacttaacactttggaaaggttgccaaggcgttcaagaaaacccggctggtaactacgtgtattatggtgtacgtgagttcggtatgactgcaatcgctaacggtgttgcattgcatggcggcttcattccttacgttgcaacgttcttaatgtttatggaatatgcacgtaatgcggtacgtatgtctgcattaatgaagcaacgcgtgattcatgtttatacacatgactcaatcggtttaggtgaagatggtccaacacaccaaccaattgaacaaattgcttctttacgtggcacaccaaacttaaatacttggcgtcctgctgatactgtagaaacagcaattgcgtggaaatctgctttagagcgtaaagatggccctacagcacttattttctctcgtcaaaacttaccattccaaacgcgtactgaagagcaaatccaaaatgcggcaaaaggtggttatgttcttgctcaagagaaaggtgagttgaaagcaattattattgctactggttcagaagtttctttagcaatggaagcttatgctcaacttgaaggtgttcgtgttgtttctatgccatgtgcagaagagttcatgaaacaagatgctgcatatcgtgaagcagtattaccagctcatattcgtgcacgtgttgctgtagaagctgctcatgttgactactggtggaagtttgttggtcttgatggcaaagtaattggtatgacaacttatggtgagtcagcaccagcaaaagacttgttccaattcttcggtattacaactgaggctgtagttgctgcggtaaaagagttaactgct

SEQ ID NO: 8410 - DNA, 1166 bp, Acinetobacter baumannii
atgcgcgagtacgctgtttttacctcggaatctgtaagcgaaggtcatcccgataaaatggccgaccaaattagcgacgctattttggatgcaatcttaaaagaagacccatacgcacgtgttgcttgtgaaacactggtaaaaacaggcgctgttgtacttgcaggtgaaatcacaacaactgcgaatattgatgtagaactgttgttcgccaaactgttaacggtatcggctatcaccattcagatttaggctttgatggttcaacttgtgctgtaatcaacatgattggtaaacaatcaccagagattgcacaaggtgtagaccgccaaaaacctgaagaccaaggtgctggagaccaaggtttaatgtttggttatgcaagccgtgaaaccgacgtgcttatgccagcccctatttcttatgctcaccgtttaatggaacgccaagctgaacttcgtcgttctggtgcattaccatggttacgtccagatgcaaaaagtcaggtaacttttgcttatgaaaatggcaaacctgtacgtttagacgcagtagtactttctacacagcatgatcctgaaattactcaaactcagcttaaagaagctgtaattgaagaaattattaaaccgatcattcctgctgaaatgttccatgcagcaactaaattccacattaacccgactggtatgtttgttatcggtggacctgtgggtgactgtggtttaactggccgtaaaatcatcgttgatacttatggcggtatggctcgtcacggcggtggtgcattctctggtaaagatccatctaaagtagaccgctcagctgcgtatgctggtcgttatgtagctaaaaatattgttgctgctggtcttgcggacaaatgtgaaattcaggtgagttatgcaattggtgttgcagagccaacgtctatttcaatcaatacttttggtactgcaaaagtttctgatgagttaattatccagttagtacgtgaacatttcgatttacgtccgtttggtattactcgcatgcttaacttaattcaacctatgtataaacaaacagctgcttacggccactttggtcgtgaaggttcagatactgcatttacatgggaaaaaactgataaagttgaagcacttaaagatgccgcaggcctttaa

SEQ ID NO: 8411 - DNA, 987 bp, Acinetobacter baumannii
atgactctacgtaatgattggactcgtgaagaaatccaagctctatatgaacaaccttttttggatttagtttttaaggctcaacaagtacaccgtgagcacttcactgccaatacaattcaggtcagcacccttttatctattaaaacgggtaaatgtcctgaagattgcaaatattgctctcaatctgcacattacgattcaaaattagaagcagaaaaacgtattgctgttgaaaaagtaattagcgaagcaaaagctgcaaaagattcaggttcatctcgtttttgtatgggtgctgcttggcgtaaccctcatgagcgtgatatgccttatgttttagaaatggtacgtgaagttaaagcattaggtatggaaacctgtatgactttaggtatgcttaatcaatcacaagcagaacgcctaaaagatgctggtttagactattacaaccataaccttgatacttctcgcgagtattattcccacatcatcagcacacgtacttttgatgaccgtttgaatactttagattatgtacgtcaagctggtatgaaagtatgtagtggcggtattgttggtttaggtgaaagccgtgaagatcgcattggtttgttacatgaattagcaaccttgcctattcatccagaatctgtgccaatcaacatgcttgttccaattgaaggtacaccattagctgatgttgaaaaactagatgttattgaatggattcgtactattgcggtagcacgtattattatgccgcatagttatattcgtttatctgctggtcgtgaatctttaagtgactcagatcaagctttagcatttatggcgggtgcaaattctctgttctctggtgataaattacttacgacgccaaatgcaggtgaaggtaaagaccaagcattatttaataaactagggttaacagctgaaaagccaaaaccaactgtttctgatttatcagttgatgcgatgagtgct

SEQ ID NO: 8412 - DNA, 738 bp, Acinetobacter baumannii
atgctttttcgtggtcgtaaatttttttggggaatggcttgtcttcaagcattaattgctactacagggcatgccgaaatagtacttcatggtacacgtgtaatctatccatcagatgctcgagaagtaaacttacaactcagcaataacggtacagcgccttccttggttcaagcttggattgatgatggaaacgctaaatcaactcccgatgaagcgaatgtcccttttatcattacaccacctatttcaagagtagaaccctctaaagggcaaactttacgaattactgcactacctaatgcttctcaattaaaccaaaataaagaaagtgtattttggcttaatgtattagatataccaccaaggccggaaggtaaaaaacaagaaaataatgaagtattaaccaataattttcttcaattagcgatacgttcacgaattaagttcttttatcgaccagtaagtctaaaagaaaatattaatacattaagtgaaaaaattcagtgggtaaaaaatggtgaaaacttgcttattaaaaaccctactcccttttacattacaataagctcaatttttcaagaaataaatcatcaaaaaacagatttattaaaacagggtttaatgctttctcctttttcagaagatcaaataaaacttaaaaatagcaatataacaaatatgagctttgtttatataaatgattatggtggaagaattgaacaagtaataaggttc

SEQ ID NO: 8413 - DNA, 2466 bp, Acinetobacter baumannii
ttaactgtatatgcatcagacaatatgaatagggaaaatattttaaaagctgactttgatactaattttttatgtgggaaatgcacagaaaattgatattggtcgatttaagtacggcaatcctattttaccgggtgaatatagtcttgacgtctatattaatgggcagtggttaggaaaacgaaagtttgtttttaaaagtactcgttcgaatgagaatgcaaagacctgttttaccccagatatgcttttagaatatggagttaaaccagaaattcttcatcatgaagtaagtagtacctttacctgtaatgacttggacaagtgggttaacgatgctttttatcaatttgatacttctcgtctgagacttgatatttcaataccacaagttgctttacaaaagaatgctcaagggtatgtcgacccacgtttatgggaccgcggtataaatgcagctttttttgcatacaatgcttctgcctatcgtattgtaaataataaccatgaaacaaatcatgcgtttatgggtacaaatgttggtctaaatctctatgattggcaattacgccatactgggcagtggaaatggcaagatcataatgaaatacaagaaaaggtttcttcctacacatcaaataatacatatgcccaaaaggcttttcccaagctcaatagtgttgttactttaggtgattattttaccaataataatttttttgatgccctaccttatcgtgggattaacatatcaagtgatgaccgcatgcttcctaacagtatgctcggatatgctccccaaattcgaggttatgccaaaaccaatgcaaaagtagaggtacgtcagcaaggaaatttaatttatcaaacgactgttacaccacggaacgttgttgaaatgaatgatctttatcccacaggcttcggtggcgaattacaagtctctatatatgaaacaaatggagaaattcacaagttttctattccttatgcttctgtcgttgagatgctacgacctaaaatgagccgatattcttttactttgggacagtttagagatgccaatatcaatctaaaaccatggctagtgcaaggtaaatatcaaagaggtatcaataactatttaacaagctatacaggctttcaggcaactgaaaactaccagtcttttttaataggtagcgcatttgcaaccccaatcggtgcaatttcatttgatgcaactcagtcatcagctgagttcgaacaaaagcccacccttaaaggacgaagttatcgtttaagttttaaccgactatttactccaaccaacaccaatttaactttagctacgtatagatattccacagaaaattatttgaaaattacgcgattcaatttttaattcgagacttgcaacaacaagatattgatagcttttccgtggggaaacaaaaaagtgaatttcagatcacattaaaccaaggccttccaaatcaatggggtaatttttatttagtaggctcgtggattaattattggaaccagcctaatcgtaatcaacaattccaatttggatatagtaatcaatttaaagatctgacttacagtatttctgcaattactcatgagtttgaccaagaaaatcaaaattctggtcacgaaacgcaatatttgttgtctttatcttttccacttcaatttaaaaaaaataccgttaattttaatagttctatttcagaagatagccgaactttaggaatgagtggttatatcggaaaccgctttgattatggctcatcaatttcatatcaagatcaagggcaaacaagcctaaatattaatggcacctaccgtactaactatacaactataggcgcttcttttggtcagtccgatacataccaacaagaaatgatcaatttaaatggaagcttggtcgctcactcacaaggtattttatttggcccagaccaagtacagaccatggtattggtatatgcgcctcaagcgactggtgctcgagtcggcaatatctctggtctaagcattaataaacaaggttatgctgtcattccttatgtaaccccctatcgcttaaatgacattagccttgaccctcaagggatgccatcaactgttgaacttacggaaacaagtcatcgtattgccccatatgcaggatcgatcactaaagttaacttttcaacaaaaacgggatatgcagtttttattagcacccaaacacctaatggcggccatttgccatttgcagcacaagtttttaatcaaaacaatgaaatagtcggaatggtagcccaaggtagccggatttatttacgtactcccctaactcaagatcatctttatgtgaaatggggacaaagtaatagtgaagaatgtcaacttgattatgacattcaatcaaaaatcttacaggaaaaacaattaattattatgacagaggcagtctgcaaatgaaaaaaa

SEQ ID NO: 8414 - DNA, 438 bp, Acinetobacter baumannii
atgaccgcaacgcaatcaaaatcaattatggcttttgactttggcactcaaaagatgggaatggcgattggtcagtctgcaattgaaagtgctaacccattaccactttttgtgatgaaagatggtattcccaactgggaccaacttttaaaaattgtgaaagagtggcagcctgatttgtttattgttggtcttccattgaatatggatgatagcgagtcagaactttcaacacgggcacgtaagtttgcacgtcgcctacgccatcaaaccaatattgaaacgtggatggtcgatgaacgactcaccactcgtgaggcaagagaagaacttggtttttatcaagaacaaggtcgtgccaagaagttgtcagccgatagttttgccgcagctttgctaattcagagctggtatcgcaatcctgttggtttaacgcca

SEQ ID NO: 8415 - DNA, 999 bp, Acinetobacter baumannii
atgaatcaattggagttgaaaaaagtcatccgtccagtgattttgattgtcgcattaatgattgctgtctataccattgtgcatttatggaactactataatgcagcgccgtggacacgtgatggtcgagttcgtggtgacgttattcaggtctcttcagatgtagcaggacttgtaacggaagtattggttcaagataaccagactgtaaaaaaaggtcaggtgctttttaaaattgatgtctctcgccgagctttagatgtagagcaagcaaaatctgatttggcaaaagcaaaagcggcctatgctcaagcacaagcaggtctagcccaagctaaagcaaacttgattaagtcaagtactaacattaagttagccgagaaaaacgcaaaccgttattcaaacttaatggatggtgcaatttctaagcaagaacaagatcaggtctttgcaactcgcgatcaatcacacgcggaacatgagcaactccaagctgctattcaacaagctgaagccactattaaacagcaacaggcattggttgaagcagcaacaagtaatttacatttagcagaactcaatatgcaccgtgcggctgttgtggcgccagcagatggaacattatctaactttgatttgcgtccgggtaattatgttcaagttggacaagcggttgcagcattgctagatcgtaagcagctttatgttgtgggatattttgaagaaacaaaattagaccgtattcatattggcgatgaagcaactgtgcaattaatgggtgatagacagaaaattaaaggccatgtgcagggtattgcatcgggtattgaagaccgtgagcgttcaagtagttcgaaactgcttgcaaatgtaaacccgacatttagttgggttcgtttagcgcagcgtgtacctgtaaaaattgtattagacgaagcaccaaaaaatgagttggcttttgtgtctggccgtactgctacagtacatattattgaaaaa

SEQ ID NO: 8416 - DNA, 2097 bp, Acinetobacter baumannii
atgttattaaagcaaatactggctttccgcccgagtaagcttgatctaatttttgcaataaagacatttattgccggtatgttggcattatttgtatcgttcgaattagacctgattaatccaatgtggtcgatcggtaccgtcctgattatcgccaatccttattcgggtatggtgtcgtctaagtgtgtttatcgtttattgggaacggtaggcggggccattattgccttaaccattactccgcatctgattaatacgccgtggatctttacggttgtgttatcactatgggtgggctttgcgctttatgtgtctttattagaccgtactcctcgcagttatgcatttatgttggcaggttattcaaccgcaatgattgtgtataacgcgattacttatattgatcagtacaatatttttgatattgctttggctcgtgtacttgagatttcaattggtgtgatttcgagtgcggttgtgtctgcgactattttgcccatgcatattggttcggcaatcaaacagcgtgtaacaaaaaccctcaaagatacagaaaacctgtttgctaatttgttaaatgcagatcaacagcaaaacaatacacagcttttagctgctattactcgtgatacgaccgatattcatgctctggcagttcacttgagctatgaaaaaggtgagttgcatgggatgaccaaacctttgcaagaaatgctccatcaaatgtcgatggtggtcgcgaacttggttgctttatctgaacgaattaaacaactgcaagaactcaattttattgaaagtcattcagataaattaaagcagctttcagggcatgtgattcattttctggaacaaaaagatcagatgactgatgaaaatattctgcagttacctgacgagtttgaaaatgatttcttgaacttaaatgattcggcttctgaacatcagcaagtgttattggctgccatgaaaatggatgtgcgtcatttcattagtaatgttttagctgtaaaagttttatggcaacgcatcaagcaaggtaataaagagattccagataacattaccccaatgactacgacctatccaagtttacaccgagatcatggtgtggcagtcagaggtggtattagtgcagtgctgattacatttattgtgactggtgtgtggattctttctggctggaaagctgggttcatgatggcacagatcggtgcagtcactgcctgtatcttaacagcactagataacccggttcctgtcttacgtatttttatatggggcagtgtggcttcggcggttttagtttttatttacgcgtttggtatttttccttatgtcacaacattttgggaacttggactcgtcttattaccaatgtttttgtttgcggtttccatgatggcgaatcaggcactcatgccagtgggcatggtgctaggtattaataccatgatggggctgaacttgcataatgcttacagtatggatgcagtgtcttatttagatagctcatttggtatggtcatgggcgtattggtgtcattagtcgttattgatgttgtgcgtgctatgtcacccgataccagtgcaaaccgtattttggctttacattaccgtgcaatgcgccaagccatatacattccttatggtattgaatttaaagttcacttacgggggatgttagaccgtgttggtgtcttaaatactaaaatggttcagtcagaagagattaaaaaatctattcaacaggctttggttgaatccagtgcgatcattgatttaagccgactacaagagctagcaaatcaagttccgacatcttcagaattggcccatcacattggccgtttgcaacaagatttagatgagctgtttagagctaaagaaaatgaaaaaggtgaaagtgatgtattggtacagcacattcaccaaaccttatttgaacttaaacaacttgcttcaaatattgaagatatgactctgcgtcaaagattatttatttcactaaataatattgcttatagcatgtgtcatgtttcatcaaaccaaatgaatgcagatcgtacgcttacaggagccacagcgcatggg

SEQ ID NO: 8417 - DNA, 585 bp, Acinetobacter baumannii
atgaccacagggcgaatcctgaatatcccaaatatcctaactttggcgcgtattgcgcttattcctgtatttttggtgattgcatattggccgcctgcaataggtattggtgagcacgtaggaagtatgacacgtcatattatcttgacggctattttcgtgctggctgccgtaaccgactggtttgatggctatttagcacgaactttaaaccagacttcagcatttggccgtttcctagacccggttgcagataaacttatggttgcagctgcacttattgttttagtgcagtggaaaccgacaattgcaatggctttcgctgcaattgttattatttcacgggaaattactgtgtctgctttacgtgagtggatggcagaacttggcgcgcggaccagtgtagccgtatcaacagtcggtaaatataaaactgcatttcaaatgattgcgattagtgtattcctgttgaattggcagcctttagaagtattggcctatgctttgttatataccgccgttattctgactttatggtcaatgtttatttatttaaaagctgcatggccatacctaaagcagcca

SEQ ID NO: 8418 - DNA, 1413 bp, Acinetobacter baumannii
atgagcatggcgaacaaggtccttcaactcatacaagaaagtggcgcaaaatgggtcgattttcgctttactgatactaagggtaaagaacagcacgtaacttacccagctgattctattgatgaagatacttttgaagacggtaaaatgttcgatggttcttcaatcgctggttggaaaggtattgaagcatctgacatgattttacgtccggatgcagaaactggtttcatcgacccgttctttgctgagccaacagtagttgtgacttgtgacgttattgaaccttcaactggtcaaggttatgaacgtgacccacgttcgattgctcgccgtgcagaagaatacttaaaatctacaggtatcggtgatactgcattctttggtccagagccagaattctttgtatttgacgaagtgaaatgggacatcgatatgtctggcgctcgtcatacattaatcgctgaagaagctgcttggtctactggtaaagattacgagtctggtaactcaggtcaccgtccacgtgttaaaggtggttacttcccagttcctccagttgactctgcacaagacatgcgtgcagaaatgtgtgcaaaaattgaagacatcatgggcccaggtcgtgtagaagtacaccaccacgaagttgcttcttgccaattagaaattggtgtgagcttcaatacccttgttcgtaaagctgacgaagttcaacagttcaaatatgctgtttggaacgttgcacatcaatatgcaaaaacagctacgtttatgcctaaaccaatggtaggtgataacggttctggtatgcacgttcacatgtctatctctaaagatggtaagaacttgtttgctggtgatgaatatgcaggcctttcagaaatggcgttgtacttcatcggtggtatcatcaagcacgctcgtgcattgaatgcaatcacaaacccatctacaaactcatacaagcgtttggttcctcacttcgaagcaccaattatgcttgcttactcagcgcgtaaccgttctgcatctatccgtattccttacgtttctaaccctaaaggtaaacgtatcgaagctcgtttcccagacccaatgatgaacccgtacttaggtttcgctgcgttgttaatggctggtatcgacggtatccaaaacaagatccatccgggcgaagctgctgataagaacttgtatgatcttcctccagaagaagaagcaaaaatcccaacagttgctcatagcctagatatggctcttgaagcacttcaagcagatcacgaattcttgttaaaaggcggcgtgttcactaaagaaatgcttgatgcatacatcgaacttaaaactgaagatgtacgtcgtcttaacacgactactcacccagttgaattcgatatgtactacagcctg

SEQ ID NO: 8419 - DNA, 702 bp, Acinetobacter baumannii
atgctgctggaaaaaattttacaatcacaagggtttggttcacgtaaatattgtcagcagttaataaaaaatggttcagtaagtattgatggggaggttgtgagtgatctcaaaaagcagttcgccccagaaaattttgagttttccgtttttggtcaaaattatcaatatagagaaaaaatttatattgctctaagaaaacctcagggtttcgagtgttctcatcatcctcagcatcatcaaagtgtttttagcctactgcctgagaccatgattcatcgtggtgtgcaggcggttggacgcttggatcaagacacaacggggctgcttttacttactgatgatggtaaatatctacaagctttaactcatcctcgtaaacatgtaccaaaggtttatcacgttacaacttacgaccccgtaacccctgagcaaattgaaatgcttattcagggagttaatttacaccaagaaaaaggggtatttgctgccacagatgtagcactactagaaactcatcaattaacgatgactattcatcaaggtgtttatcatcaagtcaaaagaatgattgcagccgtaggcaataaagtcgagaaattacatcgacatcaaattggtcaattggttctacctgaaattgaggacggggattgggtatatttgtcggagcaggaaaaacaactcgctcaaaatattatt

SEQ ID NO: 8420 - DNA, 633 bp, Acinetobacter baumannii
atgcgccactatactggaattgatcaacttattaactcttttgatcaagcattacgtagtcttgttccgggtgcaacagcagcgcagcgccaaaatccagctgaaacagtagaagcaaaacttggtgtagaagatgctcgccatgttgcaggtttaatgcgtgttaaccacagtggtgaagtgtgtgctcaagcactttatcatgggcaagcattgacagcgaaattgccaaatgtacgccgcgaaatgcaacaggcagcgattgaagaacaagaccatttagcttggtgtgaagaccgtttaaaagagctaaatagtcatacaagcttattgaacccgatttggtatggcctttcatatggtatgggtgctcttgccggtattgcaggtgataaatatagcttaggttttgttgctgaaactgaacgtcaagttagtctacatttgcaagatcacttaaaccagttaccagctcaagatgaacgctcgcgcaaaattctagagcaaatgaatgaagatgaattgcatcaccgtcatactgcacttgaagcaggtggtgttgaattaccatatgcagtaaaaatcacgatgactgctatttcaaagttaatgacaaaaacgagttattatctt

SEQ ID NO: 8421 - DNA, 1950 bp, Acinetobacter baumannii
atgactgatgaaaagctaacacaacgtcgtattcatacattagacgccgcgttagcgaaccagattgctgccggtgaggtgattgaacgtccttcatcggtcgtaaaagaattattagaaaactcaattgatgcaggtgcaaccgaattaattgtgcggattgcacaaggcggctcaacattaatcgagattattgacaatggacatgggattcatcctgatgatttaccattggcagtgatgcgccatgcaaccagtaaaattaaaacagcagaagatttacatgccattgttagcttaggtttccgtggtgaagcacttgcttctattgcagcagtttcacgattgactttaaccagtagccaagatgaaagcggaattggtcatcaggttgaggtgaatggtaccgcctttgatcatcaacaagtccaagctgttgctgcacaaaagggcacccatattcgagttcaggacttgttttttaatgtgcccgctcgccgtaaatttttaaaaaaaccaaccactgaatttgggcatattgaagaaattgtacgccgtttagctttaacgcattttgatatacgttttgtacttgagcataacgataatattcgaattaatttaccaatagcagatagcggtgaattaagatttcagcgtgtacagcaattattgggtcaacagtttgttcaaaatgcttactggatcgatgccgaaagtattaacatgcgtttgtcaggttggctagggcatccttcagatgcacgtgcccaagcagacttacaatatgtgtatgtaaatggccgaattgtgaaagataaaaccatttcacatgctttaagaatggcatatgacggtattttacatggccatcagcattcatcttatttacttttcttagaagttgatcctgaaaatattgatgttaacgttcacccgacgaaacatgagattcgttttctaaatcaacgtgaagtacatgagtttgtaagacattatgctaaagaaacgttagcacaatttcagacagctagtgctgatttagcacaagccatgaaagtggatgatactcaaaatctttcggtacaacctcagcctaaataccaagaacaatttacattgcaccgtacagcgcaagccgctgatacagcagtagacaagccaaatggttatcagccttctactgagcttttaactgattttaataatagtcgtccccaatctgttcattatgcggaacaaactccaaaatataatggttctgcgcagttaaataatgcattaaagacttacttggcaccattacgtgatcaacctgctaatttttcagttgatgaaagtattgagcctgtcgctaaggtagatgaatttccactaggtatcgcaattgcccagcttcatggaatttatattttggcgcaaaatactgaaggcttgattattgttgatatgcatgcagcacatgagcgtattttgctgcaacaaatgaaaaatgcttgggataaacctgagttttggacatctcaacagttgcttatccctaaagtgatctcaattagtcgtatgcaagctgttcgtgttgaggatttaaaacctcagcttgaacgcttagggttagagattgatttatatggcgatgagcaagtcattgtgcgtggtgtgccggctattttgcaaaaagcggattttgaaaatcttattcccgaacttctcaatgacttagatccaaatgatgaagcacaaggtttattgcaaaagcgtgatgaactgttagctggtatggcgtgtcatggtgcagtacgtgctcatcgacaacttagtctctcagaaatgaatgctttacttcgccaaatggaacaaaccgaatttgcgagccaatgtaaccatggtcgcccaacttggcgtgcatttccattatctcaactagataaattatttgctcgaggagag

SEQ ID NO: 8422 - DNA, 981 bp, Acinetobacter baumannii
atgcgaattttagcatggaagacagtacgtcggttcttctataacaaccttcataatcatgattacgaaacgacagtaagtagatgtattaactactttttagttttcttaattattgggaatgtagttgctgtattactagaaacagtaaatgatctgtattacagctaccgtatatggtttgactactttgaaaatgtttcaattgcaattttcagtgttgaatatctcttacggctctggagtatagtcgagcgtgattcgacacaagctgcatggaagcaacgtttcgcatggatgaaaagtggtgaagcactgattgacctcatggcaattttgcctgcgtatctaaatttctttgtacgaatagatcttcgtatgttaagaattttacgattacttcgactattaaaattaactcgttatttcatctcattgcaaatattgttatgtgtgattaagcgagaaaagggttcttttcaggcagtgatttttattttaatcattatgattattatgactgcctctggtatttatgtcgttgagaataaagcgcaaccggaagcttttagctctattcctaaagcaatgtggtgggcggttgtgactttaactacagtcggatatggcgatgtcacaccagtaactagtttaggaaagctattgggagccttaattacaattctaggggtagggattgctgctttaccggctggtattttagcttctggtttggccaatgaacttaaccagcgtaatcagcgccttgaacaagagttccgtgagttacttcaagtgcgtggtattgatatcatgcatgatgaagttgaaatagaacgtattcgacaaaaagtagggctaccaaaagaacaagcgcataatctgattattcaaattatgcgcgaaaaagtattagaagagaaagaagctgttagagagaagaaatgttattgcccgcactgtggtgaaaagttaacagat

SEQ ID NO: 8423 - DNA, 2637 bp, Acinetobacter baumannii
gtgctagaagcttaccgccaacacgttgctgaacgtgccgcactcggagtcccaccgaagccacttgatgatgctcaaactgctcaacttgttgagttattaaaaaacccaccggcaggtgaagaagcattcttggttgatttgcttgaaaaccgtgttcctgcaggtgttgaccaagcagcttacgtaaaagcagctttcttggcagcgattgcaaaaggcgaagcgacatctccgctagtttctaaagaacgtgcagtttatttactaggtacgatgcttggtggctataacgtagcgcctttagttgagcttctggatgatgctgaattaggtagcttagctgctgaagctttgaaaaaaacattacttgtatttgatgcgttccatgacgtagctgataaagctaaagctggcaatgcaaatgcaaaagctgttttacaatcttgggctgatgctgaatggttcactagtcgtaaagatgtaccagaagaaatcaaaatcactgtgttcaaagtaacaggtgaaacaaacactgatgacttgtctccagctcaagacgcatggagccgtccagacatcccattgcatgcaaatgcaatgttgaaaaatgagcgtgatggtatcaaccctgaaaaaccaggtgaagttggtccattaagccaaattaaagaactcattgctaaaggcaaccaagttgcttatgttggtgacgttgttggtacaggttcatctcgtaaatctgcaacaaactctgttctttggttctttggtgatgaaatcgctcacattccaaacaaaaaagacggtggtgtgtgcttaggcggtaaaattgctccgatcttctttaacacaatggaagatgctggtgcattaccagtagagatcgatgtttctaacatgaacatgggtgacgaagttactcttaaaatcgatcatgctgctgcaaaagtaactgcgttcaaaaatggcgaacaaatcgctgagtctgaacttaaaactccagtacttttagatgaagtacgtgctggtggtcgtattaacttgatcattggtcgtggcttaactgctaaagcgcgtgaagctttaggtttagctccatctacattattccgtactccagtacaaccagctgacactggcaaaggtttcactttagctcagaagatggttggtcgcgcatgtggtctcccagaaggtcaaggtatccgtccaggtacttactgtgaacctaaaatgactacagtgggttctcaagatacaactggtcctatgactcgtgatgagttaaaagacctagcttgcttgggcttctctgctgacttagtaatgcagtctttctgtcacactgctgcttatccaaagccagttgacgtacaaatgcaacatacacttccagacttcatcatgaaccgtggtggtgtatctttacgtccaggtgacggtattatccactcttggttaaaccgtatgcttcttccagatacagtaggtactggtggtgactcgcatactcgtttcccaattggtatttcattcccagcaggttctggtcttgtagctttcgctgctgcaactggtgtaatgccacttgatatgcctgaatcagttcttgttaagtttaaaggtaaaatgcagcctggtatcactttacgtgaccttgtacatgcgattccttactatgcaatcaaagaaggcgatcttactgttgagaaaaaaggtaagaaaaacatcttctctggtcgtatcttagaaatcgacttaacagaaatggaaactgacttaacagttgagcaagcattcgaactttctgatgcttctgctgaacgttcagctgctggttgtgcaatcacactttcagaagagaaagttgctgagtacttacgttctaacatcacaatgcttaagtggatgatttcacaaggctatggtgatgcacgtacgatggctcgccgtgttgaaaacatggaaaaatggttagcaaacccaagcttacttaaagctgatgctgatgctgaatacactaaagtgtatgaaattgacttgtcagaaatcaaagaacctatcctttgctgcccgaacgatccagatgatgcgaaacttctttctgacgttcaaggcgacaaaattgatgaagtattcatcggttcttgtatgactaacattggtcacttccgtgctgctggtcagttacttgagaaagtaccaagcggttcattaacaactcgtttatggttggctccaccaacacgtatggacgaacatcagttaatggaagaaggcttctataacacttatggccgtgctggtgcgcgtacagaaatgcctggttgttcattatgtatgggtaaccaagcacgtgttgcgccgaacacaactgttgtttcgacttctacacgtaacttccctaaccgtttaggccaaggttctaacgtttacttagcatctgctgagcttgcatctgttgctgctgtacttggtaaattaccaactccagaagaataccaacaatatgcagctcaaattgacagtatgtctgctgacatctacaaatatttgaatttcgaccaaatgggcgaatatacaaatgctgctgataaagtagatactaagaaaattgctgctgctcagttgact

SEQ ID NO: 8424 - DNA, 4503 bp, Acinetobacter baumannii
atggcggaagtagaacagcagcccacttcggcacctagctctcctaagaagcgacgtattttgcgtagcttcttgctgacaatcttgatcatacttttattacttgttgcttccatcattattatgatgtcgactgaccgtggaagtcgttttttattagatcgtgttttacaagctcagcaagtcattaaatacgagtatgaggggggtaatttactcaggggaattattcttaaaaatattattgttcagttaaaagaagttgacgttactttagatagagctgatgtccgtttagggtggcgttctttaatattagaaaaagaagtgcatttgagcaatgcagatgtccgtaacttagttattattaacaaagctccgccatcggataagccatttgagtttaaacccattaaattaccatttgtgcttcgtgtagatgttggagatgttgatcatttagaaattaaaaattcaggttctgtcgtaaatttccatgatgttcatttaaatgatgctttgtggtcagagacaaaactgaaatttgaaaattcaagtatggatatggggtatctttctgttcataacgcaacaggaaatatggactttagcggcaaatacccactgaatgcgactgcagatttaagaattccttctttaaaaagtttaaacatccaaaatattaaggtggcagcgcggggtagtttagataccttgcaagccggtgtagcaacgacaacaccagatttattaacaggttgggttgttttacatcctgttcgtcatgaagtgcctatgcaaggtgcattgttactcaaaaattatcacttgcctttactggttgagcaaaaattatttgctaaaaacggtgtaattaaatttcagggtgatattaagcaactcaacttagcacttgagacagatttaaaaggggagaatttacctgaaggccagtacaacgccttaatgaatactgatctggttcatcagttgaatattactgattttaacgggcaggtcatgaagggtgcagttaatcttaaaggattagtgaactggaaagatcatgtcacttgggacatcaaaggtcgcctagatcatgttaatcctaaagacaaagctattccacaggtcgttcaggatttcttgccgccaagtctagatgcagccgtttcttcaactggttctttggaaaaaggtacggaagtatttgccaatgtagactttgaccgctatgaatcttggaaacttaaactaaaccaagcacctgaaaagaataagaagccacaacctatgtttatgaatgtggcttgggcaaatatagatcgtgctatgccatatataggttggttaagtagtgatagtggtcaagttgatttgactttgcgagatggtcagcaagatattaaagtttcgacaaaagtatatcagcatgaacagaccttattaccggctggacaatatttagcaactttgaatgttaaagataatattcttaatgttcctagttttagttttgcggctcaaaagggtagcctcacaggtcaggccaaagtcttattaccaagtgaaaaacgtcagctggcatggaatgcattattaaatgcaaaagactttaatccacaaagtatacatacagcggcgccagttaacttgctcaacggatcaattaaagccagcggttttgcaaagccaaatcaacaaattattcagcttgaaaaaattgatttaaaaggtcgcttggctcaagcaggtcaagaaatggttgcgctagctggaaaaagtacagcagctttattatttaatgatgttaaagctggtggcggttttaaaggctttgcggtcaattatgacggatctttaaaagcgcttaatcaagctaatggactattaaagttttctattgcaggtaccccagaatttatccgaattagtcagttacaacatgatggtgttgctgggaaaatctatgcgactggggcattaaatttaaaagaccgtattgcttgggatattaatagctcgttagtacgctttaaacctcaatattttgcctctagtgtaaaaggcgaaatttcaggaaatgtaaaaacacaaggcatctggtctgacaagttaaagcgtattgatattcaacaattgaaccttgcgggttatttgaataataagccagtcagaggtaaaggtaacttatccatacttatggattcgaaccaaaaaggttttttacctcagcaatttgaggcaaataatctatttttagtttatgcacaaaaccagttgcaggcgactggtaatgcacagaatttaaaaattaagctgaatgcacctgcgctttatgagttgtatccgggtttaagtggacgtgcatatggagacttgagtgtccaatctcaaccgcgtttgaaagctacggctaatattgcggttgataattttgcatttaatacattagtcagtattaaaaaacttcgtatccagggtgaattgcctacttccgaaacaacaccaactcagttaacagcaaaattagacaatttacgtagtggtagccgtcaaattcagtctgctgaggtgaatttaacaggaacaagaaaagcacatttattaaaagtgcaaggaaataataatgtttctaaattctatgttcagttagcaggtggatttaatgcgaagaatgattggttagggcaaattcaaaaaggaagttttgattcacgccgaattcgtctagcacaaaatcaaaatgcaccagttgttttctcatcggcacgttctgaattatatgttggacaacattgctggcaaagtacaaatagccagttgtgtcttgaccagcctgtgcgtgtgagtaaagcgcaaggcaatatttcatttgttactcagaatctagatttaggcgattttgctgcgttcatgccggaaggtttggctatgactggtcaacttaatggttatgctaaagcttcttgggtaaatggtgggcatcctaagcttgatgcacgcttagtgacaagaaaaggtgaactgggcttagcagcggaagacccgcaagatccaccgactactttggcttatgatgaactgagtgtaattgcgaaaagtatttcagaaggcttattgttccgtgtcgatgtaaaaacacctgatattggtacaggatatgcgaatgttattattaatccttaccaatcatctatgccgatgcatggagaggtagcttttaacgatgtacagttaaaagtgttaaaaccattcattcaagatgtacgttcaatgagtggtaccttagccttagctggcaaagtgaatggtactttgacccagccacagtttacgggcgaaatgcgtttgaaaaacggggcaatcagtatgatttccctgccggttaatttaaccaatgtacaggtgtattcatctattcatcaggacatggcaacaattgatggtgcattcaatagtggacaaggtgtagggttacttaaaggtagttttgactggaaaaatgcaccgcgtctacagttaaacttaaaaggtgataacttacttgtacgtcaagctccattaattacggccattgcaaatccgaatttgacacttgatatgtatccttttgataagcgtttaagcttgaaaggatcagtagatgttcctcgtgcacgtatttcaatgcctgaaacaactgcaccagtggttaacacatcttcagatgttcgtattgttcgccaaggtcaggacccacttgcaattttacgtgcggcaaaaccgtgggatatccgtgcagatatttcggtaaatattggcaatcaagtcatcttccaaggctttaacagtaatattcctttagtggggcgtttgaatttaacccaacgcggttatgaaacagcaatgcgagcaatgggtgctattggtgtaagtcaaaaagtgaaaattgaggcctatggtcaaagcctagatttaaaccgtgcaattgcccgttttaatggcccattggcagacccgacgttagatattgatgcgaataaaaatgttcagggtagtatggttggggttcgtgtcactggtactgcttcatcaccaaacattcaagtttataatgatgcaggcctttctgaacaagaggcattaaatgcactcgtgacagggcgtattaatgaaggtgccagtggtttaagtaatgcagaaggctttaaatctgatgtgaacaatacaattgctgctgccggtattagtatgggcttgggtggtactcgtgctttaacgaatcaaattggtcgtacttttggtttgagtggtcttgcattagatgctcaaggtacaggagatgatactcaagtaagtttaactggttacattacacctgatttatttattcgttatggtgtgggtgtgtttactccagtcaataaactgacgttgcgttatcaaatgaaccgccgtttgtatttggaagcaagtcaatctttagaacgagcaatagatttattctataactggcgattc

SEQ ID NO: 8425 - DNA, 546 bp, Acinetobacter baumannii
atgacaccaacacagaatgttcccgaagatcgtattcagattggacagttacgttcagcttatggattaaatgggtggctctgggtgtattccaatacagaacccatgagcaatatgtttgactacttgccttggtacatcgagaccaaggccggttggcaaatcgttgatgtaaaacgttggaaaccacatggcaaaggcctggttgttgctctaaaaggtgtgagtgatcgcacaggagcagaaagcttggttggcgctaatatctggattgctaaatctcaactgccgaaagcagatgtagatgagtactactggtcagatttgaaaggcttaacagtgttaggtcttgatgacgacgaacaggaagtgaacttggggcaaattcatgagttgtttgaaactggagccaatgatgtgatggttgtacgcgctacaccagacagcattgattcagaagaacgcatgatcccgtggcataaagatgtggtgcaacgcgttgatcttgaagctggtcgcatttacgtcaattggggcgtagattat

SEQ ID NO: 8426 - DNA, 739 bp, Acinetobacter baumannii
gtgttttttgcagtcattacgctttttcctgaaatgtttgaagcgattacagcctatgggattagcgggcgtgcagcaaaacgtgacatagtacaagtcacttgtattaatccacgtgattttgctgaagggaattaccgaagagtggatgaacgtccatttggtggtggccctggtatggtgatgatggcggagcctttggcacaaagcaattaaccatgccaaacaacttgcttcgcaagcaggatgtgttcatgtacctgtggtgtatatgtctccacaaggcaaaactttaaatgaacaggcagtacagcagtttgtcgattatgatggcttaattgtattgtgtgggcgttatgaaggcgtcgatgagcgtttgatccagcattatgttgatcaggaatggtcaattggagattatgtcttatctggtggtgaactacctgccatggtgttgcttgatagtattattcgccgtttgccgaatgtaatgtcagatgagcaatcagcgatacaggattcttttgtagatggtcttttggattgtccgcaatacactaagccagaccagtttgaaggtttagatgttcctgaaattttaaagtcgggacatcatgccaatattgagaaatggcgttttttgcagcgttatcaacgaactttagagcgtcgacctgagttgattgaacaggttacgttgactaagcagcaaaaaaaatggctgtcagatgaacaaggg

SEQ ID NO: 8427 - DNA, 366 bp, Acinetobacter baumannii
atgagtggtaaacatcctttagttcaagctattgaaaattcacagttaaaaactgaccttcctgaatttgctcctggtgacacagtagttgttcaagttaaagtaaaagaaggtgaccgtgaacgtcttcaggcatttgaaggtgttgtaatcgctaagaaaaaccgtggtttgaactctgcgttcacagtacgtaaaatttctagcggtgttggtgttgagcgtgtattccaaactcactcaccagttgttgctaaaatcgaagtgaaacgtcgtggtgacgttcgtcgtgctaaactttactacctccgtgacttgtctggtaaagctgcacgtattcgtgaaaaattaccagctcgtaaagcg

SEQ ID NO: 8428 - DNA, 976 bp, Acinetobacter baumannii
atgaaaaggaacttaatatttttctgtgctgcaatactctcaggactgagtgtttcagcaacccatgccacaaatgccgagcaagtcaaaagctctttcgtctattcgacttatgcacaaaccaaatatccattggtttttaaccatggtatggcgggttttaatcgagttggaacagatacgcttggtctggactactggtatcagattcttcctgatcttgcacgtaacggaggaaatgtctgggcaacaagagtttctccgtttaactcaactgaagttcgtggagaacaacttgcccaacaagtagaagaaattattgccatcactggaaagcctaaagtcaacttgatcggacatagccacgggggacctacaattcgctatgtcgctgggatcatgcctgaaaaagtcgcttcgcttactactattggtgcacctcacaaaggatcgccaatggcagatgtcatcctgaatgttgagggtactcctctatccggactggcaacattagtaaactggttttccgcagcaattacttgggcaggaggtctagacccaaatagttatccgcatgactccttagcaggtgcccacagtttatcgactcaaggctctgcacagtttaattctcaatttccaatgggtgttcctaccacgtcttgtggtgaaggcgcttatcaagagaaaggaatctatatgtattcattctctggcaataaagcactcacaaatccattagatccttttgatattgcattaacaggaagtagtctagtggttgacccatttggggataatgatgggctggtttctcgatgcagtgccaaatttggtaaaactatccgtgacgactataactggaatcatttagatgaagtcaatcaggtcatgggaatacgttctatttttgcagcagaccctgtctcggtttaccgtcaacatgctaaccgtttaaaacttcaaggattataag

SEQ ID NO: 8429 - DNA, 249 bp, Acinetobacter baumannii
atggttgttattcgtttagcacgtggcggcgcaaaaaaacgtccattctatcaaatcgttgtgactgatagccgcaatgcacgtgatggtcgtttcatcgagcgtatcggtttctttaacccaactgcacaaggtcaagcagaaaaacttcgtttagacgcagaccgttttgctcactgggtttctcaaggtgctcaaccttctgaacgtgttgcttctttggctgctcaagctaaaaaagctactgca

SEQ ID NO: 8430 - DNA, 903 bp, Acinetobacter baumannii
atgacgacaaaaaatcaaaaaatttctcgtcgccatatcagtggtgtatttcttttaaataaaccattagggctaagttctaacgctgctttgcaaaaagtgcgttggctttaccgtgcccaaaaggcgggtcatactggtgcattagatccattagcaaccggtttacttcctatttgtttaggagaggccactaaattctcacattacttgctggactcgacaaagcgttatcaaactactgttcgattaggccaaactacaacaacaggcgatgttgaaggcgatattttacaagaacgtcctatcccggttcttagcaaagagcttattgagcaaactttagaaaagtttaggggcgatattcaacaagttccaccgatgtactcggcattaaaaaaagaaggtaagccgttatatgagctggccagaaagggtatagagattgagcgtgagacacgcccggttacgatttatgctttagaactcattgaatttactgaaaatagtatcactttagatgtaacttgttctaaaggaacatatattcgtgtgctaggtgaagatattggtgaggtacttggttgtggtggtcatttaaccatgcttcaccgtattcaaactggacattttgaactcatcccaagttataccattgaatatttggaaagcttaatggaagagcaaagagaagctttgctactgcccgtatatgctccaattgaccatttcttaaaaattcaggttcccgaaggacgggaaaaatatttttgtaacggtctagaaagcaatattgatcattctgcagaagcagaagtgttggttttttcgggtgaacgctgtctaggtttagctgaaattaccgataaaaaacggttggtacctaaacgtatcttaaatttg

SEQ ID NO: 8431 - DNA, 882 bp, Acinetobacter baumannii
atgtccagtccaagccagaaatcccagcttcatgctttgggctttcttattcttgccatgttaagtgtccaaagtagcgcatccttagctaaagtcctgtttcagaactttcctgtactgactgtttctgcaatgcgtttatgtatcggggcatttattttggctttcatttttcagatctggaaaattaattttagtcaggtccgatggaaagctattttgagctatggctttgctcttgctggcatgaatgctcttttctatttatcgcttgaacgtttacccattggtattgcggttgcatttgaatttattggtccactcagtgtggccctttaccatgctaaacaaaaatatgattttgtctgggtcactttcgcaattattggtctcattttattatttccttttaaccaagcacatagtttggactggattggagtcctatttgcgatgagtgcgggtgcttgttgggccctatatattattgcagggcaaaagccttctggtatctcaggtaaccataccgtttgtttgggcatgactgtaggtgcttgtatacttttacccattacttttttctcaggctcgattgggcaagttatagaactaccatactttttttattttattggtctcgccgttttagccagtgcacttccattctctttagaaatgttagctctacgcaatttaacacctttaagttttggaacattgatgagcctagaaccagctgttgctgcactttccggttttatcttcttaggtgaatacctgttatggaatcaatggttggcactcgccaccattattactgcttctgtgggttgtaccataaccacccaaagagcccgacaacaacgtgaaaaaacagtaagt

SEQ ID NO: 8432 - DNA, 1161 bp, Acinetobacter baumannii
atgcgcgctcttacttaccacggtgcagaagacgttcgagtagaaacggttgcagacccgattattcaagaaccagatgacattattttacgtgtgactgccacagcgatatgtgggtccgacttacatttatatcgaggcaaaatcccaaagactgaacatggcgatatctttgggcatgagttcatgggcattgttgaagaggtcggtccagccgtcaccgcagttaaaaagggcgaccgtgtgattgtgccatttgtgattgcgtgtggtgattgtttcttttgccaactcgacctgaccgctgcatgtgagaccaccaatacagggcgcggcgcgattatcaataaaaagcagattccaccgggtgcagctttatttggctatagccacttatatgggggggtaccgggcgggcaagcagaatatgttcgcgtaccaaaagccaataaaggaccttttaaagtgcccggctcactgtcagatgaaaaagtgcttttcttgaccgatattttgcctacggcttggcaggcagtgaccaatgcccaagtgaaacgtggctcaaccgttgcaatttatggtgctggtccagtcgggctattaagtgctgcttgtgccaagatgcttggcgctgaaaaaatatttatggtcgatcacaatgaatatcgattgaactatgcggcggcaacctatgacgctattccggttaattttgatgaagtcgatgcagccgaatttattattcaaaataccgacaattatcgtggcgtcgacgcggtaattgatgcgattggtttcgaggcaaaaggcagtgtcattgaaacagtcctgaccaatttaaaacttgaaggttcaagtggcgcagcgcttcgtcaatgtatagccgcggttcgccgtggtggagtagtcagcgtaccaggtgtctatgcaggcccgattcatggttttttatttggtgatgcttttgataaaggcttaacttttaaaatgggccaaactcatgtgcatcaatatttaccgcaactcttagaattgattgagcgtggtgaattaacacctgaaacgattattacccaccgaatgaaattagaagatgccgcagaaggttatcgcatttttaatgaaagagaagaggactgccgtaaggtgattctgcttcct

SEQ ID NO: 8433 - DNA, 2802 bp, Acinetobacter baumannii
ctatcagcatatcaatataacgaacaagatgatttaattaaggcaactaatgagtttgctgcttcttatgaatatcaataccaagctcatttattaactcgttataccgatcttactcatcgtgggatgaacctaaagtgggatggagttttacctagttcaaaagcgattgaggaatgggctgatgattatagttccgctactaaattagattgggatgaaaatgttcgcgtaacttcagtcatggatatcgatggtaacgtgactgaatattattatggtattactggttatacctatcgaattatttatccagataatttgcaagaatggttctttagagatcaagcaaaaaatataacatcgcatattgccacagatggaacagaaacatcatatacctatgatgaacgtggcaatgtcttaagtatggtccaggccgatggttcgactttctattatgaatacgatgaaaaagataatctgatcggttttgttgacgctgaacaggggcgttggtttaaagaatacgatgcttcaggaaatataattaaagaaattgatccgctgaagcgcgaaacagtctatgcctataatgcaatggggttggtaacttccattactgatgcgaaaggaggtaagaagacacttaaatatgatgatcgagggaatttaatcagttatacagattgttcaggtaaagagaccaagtggcactatgatgaccgcgggcgcgtcaaatttattgaaaatgctttaaagcaaaaagttgaatatttctatacggaattaactactgaactaagacagcctatagcaaaagggttaccgttgaatgcttttggtcagcttgaaaaaattaaacacgctgatggcgctgaagagcatttcattcatgatgcagaaggtcgtttattagttcatattgacccaaaaggtcagcagacacgttatgaatacgacgcagctggtttaattaccaagcgtactgacccattaaatcaaactttaaaatatcaatgggaccgtctaagtcgcttaaaacgtttaattaatgaaaatggcgcaagttatgaatttgtctatgatgctgcgggtcgattagtaaaagaaattgattttgatggcaaagaaactgtttatgcatacgatgaatataatggtcgtttaaccacaagtattgaagttgcttctacttatggtcaagatttcaaagaccgtgcggcacctaaagaccgtattcagcaatttatttttgacagtatgggacgtttagaacaacgtactgcaggatatggctatcaaggacaagagcttgaagaaaaacaaacagaagaattttcttatgatggcttaggtaatctagttcaggctaaaaatgccgaaactaacttgcagtggttttatgatgcagcaggtaatttaattaaagagcatcatcaagatgttgtgacacagaaaactgctgtgtggaaacatgtctatgatgaattaaataatcgaactacaaccatccgaccagacggacagaaaatagattggctgtcttatggaagtggacatgtctatggcatggcattaaatggtgaagatgttgttagttttgagcgtgacgatttacatagagagacgttgcgacactatgcaaatggacttagccaacaacaaagttatgatgaagtcgggcgcttaactcagcaattaatgttgagtgggcatgacaaaggctatcaggcccaaactcaaaataatgctatccagcataccaaccaattgattgaacgcttatatcactacgataaaactggtgagttaacgctcattaaggatactcgtcgtggggctattcattataaatatgatcctgttgggcgtttattagaggcaactagtaaacttgggaaagagacttttaattttgacccggcaagtaatattttagagcgatataacagtaccaaagagcaatcttcacagcatatttctgatgaaaaaggttatggctataatcgcttagtcaataacatcgtacaggaatatcttgaccaacaatatcaatatgatgcttttgggcaactgattcgacaaagtcatcacaggtgatttaaatcttgagtgggatgtatttggacgtcttgttcgtagccgaaacatcaatatacggcagaatatcgctatgatgctttaggccgacgtattcaaaaaagaagtaagcatcaccatacaggtcaagagcagaacattagttatggttgggatggtgatactttagcgtatgaatcgagtgctgatttaacaaaacactatttctacgaaaaagatagtttcgtgcctttgttacaagcggcgtatcatcaccccattgagctacatcaaacccaagactggtcagataaaacatatagtatttataaagaccctctttggaatacagtaaaacaaagtcaaggttttgatgatgtatggttctatcactgcgaccatttaggcacgccacaggaaatgagtgaccaaacaggtgccattatctggaaggctgaatataaagcttggggtgaatgtaagctagagcagactaactcagatttctttgaaaagtcagaaattattagcaataatatccgtttccaaggtcaatattttgatgaggaaacaggacttcattataaccgttatcgttattattcgccttatgttggacgttttatttccaaagatccgattggattattgggtggttttaatgtctatgcttatactgcgaaccccgtacaatgggttgatccatatggattagcacca

SEQ ID NO: 8434 - DNA, 762 bp, Acinetobacter baumannii
atgtttgtagatttaaatagtgatttgggcgaaagctttggctcatggaaaatgggtaatgatgaccagattttacctgttgtgaccagtgcgaacattgcttgtggttttcatgctggtgacccgctcggcattttaaaaacagttcgtaaagcggttgaacttggcgtgaccattggcgctcacgtgtcttatccagaccttgttggatttggccgtcgtaatatggatttgtcacgtgacgaactcattgccgacgtgctttaccaaatttctgcactcgatggtttagcgaaagtagctggctcaaaagtgcagtacgttaaaccacacggtgcactctacaacaccattgcccatgaccaagctcaggcagcagccgtaattgatgccattaaaatgtataaccctgaactggttttagttgctttggcggggtctaacttggtagagcaagcacgagctgctggtttaaaagttgtgtccgaagcatttgcagaccgtgcctataacagtgatggttcattagtttcccgtcgtctagaaggtgcggttttacacgactcggcatttgttgcgagccgtgtggtgtctatgcttaaaaatggtggggtcgagtcaattgatggcgtatttaccccaattcaggctgacacgatttgcctacatggtgacaccgacggtgcattagaaatgtcggctgccattaaagccgagcttgtaaaaaataatattgaaatccgcccatttgtaaataaagca

SEQ ID NO: 8435 - DNA, 1659 bp, Acinetobacter baumannii
gtggcccaatatatttatacgatgaaccgagtgtctaagatggttccgccaaagcgcgaaatcttaaaagacatctctttatcatttttcccgggtgccaaaattggtgttctcggtttgaacggtgcgggtaagtctaccttgcttcgtattatggctggcgtagataaagatttctctggtgaagctcgtgcacaacctggaattaaaatcggctatttagagcaagaaccgccacttgatccgactaaagacgttcgtggtaacgttgaagatggtgtgcgtgaagctttagatgctttagagcgtcttgatcaggtatttgcagaatatgcagacccagatgctgattttgatgcgcttgcgaaagagcaggaaaaattagaatcaattatccatgcttgggatgcacataacctaaataaccagcttgaaatcgcggcagatgccttgaaccttccagcttgggatgcagatgtaactaagctttctggtggtgaacgccgtcgtgtagcactttgccgtttattgctctctaaaccagatatgttgcttcttgacgaaccaacgaaccatttggatgcagagtctgtatcttggttagagcgattcttaaaagatttccctggcacaatcgtggcgattacgcacgaccgttatttcttagataacgttgccgagtggatcttggagcttgaccgtggacacggtattccttaccaaggtaactacacttcttggttggagcaaaaaaatgctcgtttagaacaagagcagaaacaagaagaatcttttgctaaagcattgaaaaaagaacttgaatgggttcgtcaaaatgcgaaaggtcagcaaaagaaaaacaaagcgcgtatggagcgttttgaagagcttaactcacgcgaattccaacagcgtaatgagacctctgaaatctatattccacctggtccacgtttaggtaacaaggttgttgaagtagaaaatatcagcaagtcatttggtgatcgtttactttacgaaaacttgtcatttaccgtaccaccagcagcaattgtaggtattgttggtcctaatggtgccggtaaaacgactttattccgtatgatgacaggtgagcaaaaacctgacaccggtactgtaacacttggtgattcagttaaagttgcttatgttggtcagattcgtgacactttagatgataacaaaacggtttgggaagaagtttctggcggtttagacatcttgaaagtgggcgattatgaaattgcatcacgtgcttatattggtcgttttaactttaaaggccaagatcagcaaaaacgcgtaggtgaattgtcaggtggtgagcgtaaccgtttacaacttgcgaaaattttacagcaaggtgcaaacgttatcttactggatgagccatcaaacgacttggacgtagaaactttacgtgcacttgaagatgcaattttggtattcccgggtacagtcatggttgtatcgcatgaccgttggttccttgaccgtattgcgactcatatcttgtcatttgaagatgaacaaccagagttctatacaggtaactataccgagtttgaagcttatcgccgtgctaagctaggtgatgacgctcagcctcatcgcaagaaatacaaaaaaattagcggt

SEQ ID NO: 8436 - DNA, 1455 bp, Acinetobacter baumannii
gtgagtttagagccaataccaccgcaaacctttaccgactacgttgcgtactcagagcgtaaacggacccgatgggaacgttttctcgataagattaagccacgttctgcggccatgcgtaccacaattttggtactgctggtggtactctttagcttatttatgtcattgtggtttttttggcgaaccctctatttacctgaaattcagcaacatgcacgctatctagcagttgaactagaactggtaaataaccctaatattcgtatttttcatcgcgatagcgaagttgacgtcgacacatggttacgcaatcgggttggcattgaatatgtcacgaaccccaaagaatatccaagtgtccgcgataaaattattgccgagttttttaccaaccaagttgagcaaaaactggcaaatgaaattggcgcaaaagacgttactgtctatttccaatttaaacctagcccacgtatctggattcaaacgccagaaatgcatggtaactgggttcgtgaacctttaaaaacctatgccaactatagccccgagctactggtaggctgggttgtgggtgtcccattagtttcggccatcattattttaattttggttcgacaaatgaaccgaccattacgtcgtttgcaaaatgctgccaacgaatacagtaagtctggaactgcaccttatttagatactaaccatggccctttagaaattcgccaagtaaaccaagcatttaaccgtatggtatatacgcttgaacaaacggagcgtgaaagacgaatcatgctagcgggaatttcacatgatttaaggactccccttacacgtattcgtttaactgcagaaatgctacctgatgagtttctacgtgaaggtctggtttatgacgtagatgatatggatgcgattctaaatcagttcatctcatatatgcgcgatggttcagatgaggaattaaaagacactaatatcaatattcttttacaagaattggtggttcagtttaaaccccttgatattcgctttaacatgcaggatgttcctatcattcctgcacgcagtctctctttaaaacgacttattgccaacctcattaataacgcaaagcgttatggtgctgaaccgatcgaactcagtgcaaaggttgaaaatgaacatattttaattacggttgctgaccatggtgaaggcattccagaagatcaaattgaagaattaatgcagccttttgtaagaggcaactcggctagaacgattcagggaagcggtttgggtcttgccattgttaaacgtattgtcgatattcaccaaggtgaaatacagattcacaatcgtgaacaaggcggtttagaggttattatttctttaccaattccaaaacccgcccctgaagaaaatacaacacacaatcctttagaaaaaatcaaacaaactttaagtgagcgcttt

SEQ ID NO: 8437 - DNA, 2346 bp, Acinetobacter baumannii
atgactgacttagttcagcagttggcaagtgagcttgccgtacgtccaaaccaagtagaagctgccatccgcttaattgatgaaggtgccagtgttccattcattgcccgttaccgtaaagaagtaacacaaggtttagatgatacgcagttacgccaattagatactcgtttagcgtatttacgtgatttatatgagcgccgtgaaaaggtcattcagtcattgcaagaacagaataaattgaatgatgacttgttggcgcgggtgaatgcagccgaaacaaaaaatgctttagaagaaatttatgcgccgtaccgtcctaaacgtacgagcaaatctttcaaggcgaaagaagcgggccttggaccaattgccgaaaaaattatttcagaacaaattgatccgacagaagcattggctggttttagtcatgaagactatccggatgttgaaagtcagttagacgcaatccagcatattctgattgatgactgggcacaaaacattcctcttactacagaattaaaagcgacttttgcaaaaacagcagtattaaaaagtactgttgcatctgaagagaagaaagaagtgggcaaaaagttccgcgattactttgaattctctgaaggcctaaacaaattaccatcacatcgtttattggcgatgttacgtggccgccaagaaaacgtacttggtttaaaagttgatggtgaagatgatgcaccactggcacgtattgaaactgaatacaaccttgatcaggttcagccacaaacacgtcaagatttcttaaaacaaactgcaaaattattctggttaggtaaagttcgtcctcaaatcgagcattcattacttacagaaaaacgtcttgctgctgaagcagaagcaatgcaggtgtttgctgaaaatcttcgtcacttattgttatcagcgccagctggtagccgtacgactttgggtgttgaccctggtattcgtactggtgtgaaactagccgtagtaagcgaagctggtgatgtacttgcacatagcacgatttatccatttgcgcctaaagaagataaagaaggttcaattgctgagcttgcacgtctatgtcgtgaatacaatgtcgagcttattgctattggcaatggtactgcgagccgtgaaacagaagctgtagtagctgaaatgatggctgcaaatacagatcttaaattaactcgcgtaaccgtaagtgaagcaggcgcctctgtttactctgcaagtgaacttgctgcggcggaactgccagagcttgatgtttcaatccgtggtgcagtttctattgcgcgccgtttacaagacccgttggctgagcttgttaaaattgatccgaagtcgattggcgtaggtcaatatcaacacgatgtgaaccaaactggtttggcaaaaacgcttgatgcggttgtagaagactgtgtgaatgctgtcggggtagatgtaaatactgcttcaccagcaatcttggcttatattgcaggtttaaacaaagcaattgcacagcaaattgttgaataccgtaaagagcatggccgttttgacacacgtcaggcacttaaaaatgtaccgcgtcttggcgaacgtacttttgaacaggcagctggtttcttgcgtatccaaaatggttcagagccattagatgcatctgctgttcaccctgaaagttatggtcttgttgagaaaattgttgcagcaaaagcgacaacggtaaaagacattattggcaataccgaaattattcgtcaggttaaagcagaagagtttgttgatgacaaattcggtttgccaaccattcaagacgttttagcagaacttgaaaaaccgggccgtgaccctcgtccagaattccgcacagctaaattccgtgaagacattactgaagttgctcagttgactgaaggtatgcagcttgaaggtgttgtgacgaatgtgacgaattttggtgcctttgttgatattggtgtgcatcaagatggtttggttcatatctctgaattagccaatgagttcgtttctgacccgcataaagtggtaaaaccaggtcagatcgtacaagtgcgtgttatgcaggttgatgttgaacgtaaccgtgtgaacttgagtatgcgtgcagaaggtgcggcacctgtgaaagcacagcgtccaccgcgtcgtgaacaaaataacgaacagcggtctgagcgtaaaccacaaggtaaacgtccacaaccgcgtaaagatcaagttgaacgtccgcagcgtagtaagcaagaaaaaccacaagagcaaaaaattggtggttttggtgcattattattgcaagcaggaattaagggttctaaa

SEQ ID NO: 8438 - DNA, 2139 bp, Acinetobacter baumannii
atgatgacaaaaataaattaccagccttggctacaggcggtcttaactattgctaaacattatcgaatagagccttcagaagaaagaatccgtttacaacttgattggaaccaaaatcagaatttagataacgtcttgcagttaatgacacgtcaagtcggtctgaatcttcgtaaggcaccattttccttagacttactcaacccatggcgtttacctgtcatggtggagtttaatgatggtcaagtcggtgtaatcgataaggctgatacccaaggaaatgtgagtatccagttcagtggagatcagggcctttcacaaagtttatctttagacgctttaaaaactacacttaaaaatgtctatatcttgcgtcctgaaacgtctattccagatgcacgtattgacgaatatatcaaaccttatgaagccaactggttctggtcaatcgttttaagagactggaaacgctacgttgatattatgtttgcctcgctgattgccaatgtgttggcactggcaaccattattttctcgatgcaagtgtatgaccgcgtggttccatcccagtcaattcccactttatgggttttggcgggtggtgtactgattgccgctctttttgagtttaccttacgtgtttcacgagtatatttatccgatatcattggtaaacgtgctgatttacgtgtgtcggatcgtgtatttggccatgccttaagaattaaaaataaagatcgctcgaaatctacaggtagttttatttcccagattcgtgaactcgaaggcgttcgtgaactggtcacctcaactacaattagtgcgattgccgattttccgttctttttcctgttcttagtaatttttgccattattggtggaaaactgttctgggtaatgctacttgttgtgccgcttatgatcttgccgggtattttggtacagaagaagttggctcaactggcacaagaaggcatgagagaatcttcaattcgtaacgcaattttggtagaagcggtacaaggtattgaagacattaagctcttacgtgctgaatcacgattccaaaaccaatggaaccatatgaatgaagtctcagccgacattggtatgagacagcgtaaaattgtgggtaccttaatggcttggacccaaatggttcagggtttaacttatgccattgtggtgttagtgggctgttttgcggtaatggacggtgaaatgaccacaggtgcgttagtcgcatgttcaattttatcttcgcgtatgttagggccaattgcccagattacgggcgtattaggtcgtctacaacaggcaaaagttgctaagcaaagtttagatgaacttatgcaacgtccgattgatcaggccgaccgttcacatctggtacacaaagctgttttaaatggcgactatgaattaaaaaatatcttgttccaatatggagaagaagatccgagaccaagtcttgcgatccgccatttaaaaattcgcgccggagaaaaaattgcgattttgggtcgtaatggtgctggtaagtcgacattgcttcagcttttatccggtatgcaggttccaactcagggagctgtgcatttagatggactcgatctttccttaattgatccatcagatgtgcgccgagatatggggctactcaaccagaatgcacatttattctacggaacaatccgtgaaaacctgactttaggtgcaccgcttgcaacagatgaagatattcttcgtgcattagtggtaacaggtgctttatcttttgttcaagagaaaaaagaaggcttggattacttggttttagaaggaggcgttggtttctctggtggtcagaaacaagcgttattattggctcgtttattgattcgtcaaccgaatattttattgcttgatgagccgacagcagccattgatgatgttgcagagaaacaattaattgatcatctcaaaggatggttagcacaccgaacgttggttgtggcgacccaccgccgagctgttcttgaactggtcgatcgaattattgtcgtcaatgaaggcaaaattgtgatggatggaccacgagatcaggtacttaatcaatctacagcccaacaaaaacaagtgagccaagggggcaattca

SEQ ID NO: 8439 - DNA, 2643 bp, Acinetobacter baumannii
atgaatagcgctgaaatcatggctgatctctccaaccacactccaatgatgcagcaatatctcaaagtcaaaaaagactatcaacatgcgttgctgttttatcgtatgggcgacttttatgaactgttctttgaagacgcgcatttagcagccaaacttttaggtattaccttaacccatcggggtaaagcaaacggcaacccgattccaatggcaggtgttccctaccattcagccgaaggttatttggcgcgtttagtaaaagccggccgaactgtagctatttgtgagcaagtcggtgaagttactggcaaaggcccggttgaacgcaaagttgttcgtattcttacaccgggtactttaaccgacgacgcactacttacaagttatcagtcctctaaccttgttgcgctatgtatccatcaaaaccagatcggttttgctttactcgacttaagtgcgggtatttttaaagttcaacaacaagactacaaaccggaacaacttccaattgaactggctcgcctcatgccaagtgaaattttgattgatgaagacctggttgacccgaatattatcgaacaaattaaaaaacatttagattgccctgtaaccaagcgcccaaatgtcgattttaatttaaacaatgcgcaaaaaaccttatgtgaccagttctctgtatcaacactctctggtttcggactagacccgttacctttggctaaggccgccgcggcagcacttattcactatgccaaagaaactcaaaaaacggcgttacctcatatccgttcaattcttttagaacaaagttctgactttattgcgctcgacccaatcacgcgccgtaacttagaaattattgaacctttgtttgagcatggaacttctttatttcagcttgtgaacgattgccaaaccgcaatgggtggacgtttacttagccgaacactcatgcaacctgttcgtgatacagcattacttgacgcacgtttagatgcgattgagcaattgattcaaggctaccatgaaagccctgttcgtctggtacttaaagaaattggtgatattgaacgtgttcttagtcgtgtggcgctgggtagtgcgcgaccacgtgatttagttcaacttcgtcatgcttgcgcgcaaattccatttttacgaaatgctttagcacctgttgtacaagcaaagaaatctaagttattaggacagctcgatcaggaattgggtgactttaaatcgcttcatcaacatttaatggctgcaattgttgaaaatccgcctgtattacttcgtgatggcaatgtaattgcagaaggttatgatgctgaacttgatgaattacgccaaattcgtgatcatgcaggtcaattcctcattgatttagaaataaaagagcgtgaacgtactggtattagcactttaaaaatcggttataaccgtgtgagtggttactacattgagctgactcgcgctcaagccgagcaagctcctgccgactatatccgccgtcaaacattaaagaatgccgagcgctacattacgcctgaactaaaaagttttgaagataaagttttatcaagtgagtcgcgtgcattagctcgtgaaaaagcattattcgaagctttacttgaaaaccttcgtgaaaatattgctcacctacaaatgatgagttcagcaatcgcgcaaattgatgtaattgcaaactttgctcatcaagcgcgtttaaacaactgggcacgccctgaatttacaccagaaaccggtattaagattcaaggtggccgtcatcctgtagttgaagcgttaagtaaagcgccatttacaccaaatgatactttccttgatgtgcagcaccgcatggcaattattaccggtccaaacatgggcggtaagtctacctttatgcgccaaacagcattaattagtttgcttgcttactgcggtagttacgttccggcacgagctgccaaacttggccccatcgaccgtatttttacccgtattggttcagccgatgacttatcaacaggcaaatccacctttatggttgagatgactgaaacttcacaaatcttgcaccatgcaacgaatcaatcgctcgtgttaatggatgaagttggtcgcggaaccagtacctacgatggtctttctttagcgtgggcttgtgtggttgatttaaccaaacgcgttaaatgtctttgcttgttcgcgactcactattttgaattaacagagttgggtagcgaacctggtattgataactaccatgtcactgctcaagagttaaacggtaatctcattttattgcataaagtccaacaaggaccagcgagccaaagtcatggtttacaagttgcaaaattagccggtattccagctaatgtgattaaagaagctcagaagcgtttacgtattttagagaagcaacaacagcagcatttacaaactagtgttcaaagtgatttgtttgcaactttagattcagaagttaccccaagcactcaagtcatagagaaagtgatagaagttgaagtctcttcacctgccctcgatttacttaagcaaatcgaagtagacaacctgactcctcgtcaggcacttgaacagctttatgagctaaaagcagcgcttaattca

SEQ ID NO: 8440 - DNA, 930 bp, Acinetobacter baumannii
atgacgaaacctgaagcgcagtatcaatcagggcaatttcaattttcctttctatcattaaaatattggggtatctggttcacagcttttattctaatgtttcttgcgtacttgccttgggcaatccagtggcgcttagcaaaactgttttcaaaaattgcttggacactattgggttctagaaggaaaacgactttaagaaatttaggtgcgtgttttccggaaaaaacacctgagcaaattgaagccaaggctaagtcggtttttaccgatacgatgattggtatatttgaagccttaaatgcttggtattgtcctgcatggtttaaaaaaagagttcatatagaaggcttggaacatctaaatgacaatcgggatcggggcattctgctgttaggcacgcatagcacattactcgatgccggaggtgctgcatgtacgttattttttgatatggatgtggtgtatagacctcaaaataatcctttcatggatttcctcattcatcgtagtcgcgctagggtttataaaaaccagattgcaaaagacaatatgcgtagcttaattgaaaaactcaaaaatggtcatgcaatctggtatagccctgatcaggactttggtttaaagcaaggtgttatggcttcattctttggaatacaggcagcaacagtcacggcacatcgaagactcatggatatttcaaacgctgttgcaatacctttatatttttacagaagcggggatattcgagatcctcaatacaatgtactggtagaacctaaacttgaaaattttcctagcgaatgcgaagtgaatgatgctgaacgcgtcaataaaattattgaaaaccagattcggatcgccccaacacaatacatgtggtttcatagaaggtttaaaactcgtcctgctggtgaagcgaagttttac

SEQ ID NO: 8441 - DNA, 321 bp, Acinetobacter baumannii
atgacctttgttgtcactgaaaattgtattaaatgtaaataccaagattgcgtagaagtttgtcctgtagactgtttttacgaaggtccgaatttcctagtgattaatccggatgaatgtattgactgtgcattgtgtgaaccagaatgccctgcaaatgcaattttctctgaagatgagctaccagaaggtcaagaagtatttattgaattaaatgctgaactttctcaaaagtggcctaacattacccaaattggtgaacagcctgctgaccgcgaagaatggaacggcaaaccagataagttacagtatctagaaaaa

SEQ ID NO: 8442 - DNA, 309 bp, Acinetobacter baumannii
aaagttggtgaattggctaagcaaacaggacttactgtccgtgctcttcatcactatgacgatatcggtttacttcagccttcggcccgttccgatgctggttatcgactatacacccctaaagacatcactcgtttgcatcaaattcaagcattacgagggctgggtatgtcgctagccgaaatctatacggttcttgaagatcccaatctagcacttttaccgattattgatcggcagattcaagcaattgatcaaagactggcagagcagaagaaattgcgaaatcagcttggacaattgaaatct

SEQ ID NO: 8443 - DNA, 822 bp, Acinetobacter baumannii
atgcctgagttacccgaagtcgaaaccactaaaaccagtttatttcccttattgaatcaaaaagttctaagtgttgaagtacgcaatcctagcttacgctggcctataccagataatgttcagaaacttgttgggcaacgtctcattgggttaaatcgacgttcaaaatatattttggcagagtttgaacaagatcaaatgctctggcatttaggaatgtcaggtagttttcgcctgtgtcaaccaaacgatgaattgagaaaacacgatcatctcattattcaatttgaagatcagcagttacgttaccatgacccacgtcgttttggctgtattctttggcttaatcctgaaactcaaggcaaactcatcgatactttagggccagagcctttaagtactgactttcatgcagaatatttagcttttaaactcaagaataaatctgtcggcataaaaattgcactcatggataatcatgtagtggttggtgttggcaatatctatgcaactgaaagtttgtttaatgttggcattcatccagcacagcccgctggtgatttaaccatgcaacagattgagaaactggttgttgagattaagcgaattttgaagtcagcaattgatttaggtggctcgactttacgagactacagcaatgccatgggtgaaaatggttattttcaacagactttactcgcttatggtcgtgccggtgaaatgtgtgttaactgtgaaaccacattagaaaacttaaaactcggtcagcgtgccagcgtattttgcccacagtgccaaccacttaaaaagctgagaaagcct

SEQ ID NO: 8444 - DNA, 1713 bp, Acinetobacter baumannii
atgcgcgcaagccgctttttatttgcaacgttgagagaaaccccaaacgatgctgaagtgatttcacatcagctcatgttacgtgcggggatgattcgtaaattggcatctggtttatatacatggctgccgatgggaacacgtgtgcttaaaaaagttgatgccattgttcgtgaagaaatgaaccgttcaggtgctatggaagtgttcatgcccgtaactcaacccgcaagcttgtgggaagaatcgggtcgttatgaacaatatggtcctgaattattacgtttcaaagatcgtcacgacaatccgtttgtgcttggtcctacacatgaagaagtgattaccgatttagcacgtaacgagctaaaaagttataaacagcttcctgtaaatttctatcaaattcaaaccaaattccgtgatgagatccgccctcgttttggtgtaatgcgttcacgcgagttcatcatgaaagatgcttattctttccatgcaactcaagaatcattacaagaaacttatgatgtgatgtatgacacctatagccgtattttcactcgtttaggtttagatttccgcccagtacaagcagatacaggttcaattggtggttcagcttcacatgaattccacgtattagctgcaagcggtgaagatgacattgcattttcaactgagtctgattatgcagcaaacgttgaaatggctgaagctgttttagtgggtgagcgtgcagcgcctacacaagaatttaaattggttgaaacaccaaatcaaaaaacaattgctgatgtttgccagttcttaaatgctgaccctaaacaatctgtaaaagccttattggttcaaggcgttgctgatgagaaaggcaatgtacctgtcgttgccctattcttacgtggtgaccacgaacttaatgaaattaaagccgagaagcatcctttagtggccgctcctctcgcgtttgccacagaagaacaacttcaagcatttggcttaactgctggcttcactggtccacaaggtttagttgaaaaaggcatcactgtaattgttgaccgtgctgcatctgttctttctgacttcgttgctggtgcaaatgaggcagacaaacatgctgtaggcgtaaactgggaacgtgatgcacagattactgaagttttcgatttgcgtaatgtggttgaaggtgacccatctccagatggtaaaggtacactacaaattaaacgcggtattgaagtgggccatattttccaacttggtactaaatactctgaagctttaggatgtaaagttctcggtgaagatggcaaaccatttacagtaacaatgggctgttatggtattggtgtgacacgcgtagttgcagctgcaattgaacaaaactacgatgacaaagggattatttggcctcaagcgattgctccttttgaaatcgcaattgttccaatgaatgcacacaaatcaccacgtactcttgaagcagcagaagcgctttatgcagaacttcaagcccaaggctttgacgtattacttgatgaccgtaacgaacgtccaggcgttaaattctctgaccttgaattaatgggtattccacaccgtattgtgattggtgaaaaaggtcttgatgcgggtacttttgaatataaaggtcgccgtgatgctgaagcgagcaatttaactaaagaagaactcttagctaaattagcgcgt

SEQ ID NO: 8445 - DNA, 3096 bp, Acinetobacter baumannii
atgtggtttacccgaattagtgtgaagtaccccgtttttaccatcatgatgatgctcagtctaatggtactcgggttagcatcttggaaacgtatgaccgttgaagagtttccaaatattgatttcccattcgtagtcgtcactacgcaatatgcgggtgcttcacctgaagcagttgaatcggatattaccaaaaaactcgaagatcaaatcaataccatttcgggtattaaacaaatcacttcacgctcaagtgaagggctttcgatggtgattgcagagtttaatcttgatacgtcttcggcgattgcagcacaggatgttcgcgacaaaattgctccagttattgcccaatttcgcgatgaaattgatacaccgattgtacaacgctacgatccatcatctagcccaattatgtcagtcgtgtttgaatcgaacagcatgagcttggctcaattaagctcctatgtagacaaaaaaattgtacctcagcttaaaactgtttctggtgtgggtaatgtcaatttactaggtgatgctaaacgtcaaattcggattaaggttcatcctgaacaattacaaagctatggtattggtattgatcaggtcattaacaccctaaaaaatgaaaatatagaagtacctgcaggaaccttacaacaaaagaattctgaactggttgttcagattcaatcaaaagtcatccatcctcttggatttggtgatttagttattgctaataaaaatggttcccctatttttctaaaacaagtagcaaccgttgaagatactcaagccgaactgcaatcaagtgctttttataatggaagaacagcggtttctgtcgatattttaaaaagttccgatgctaatgtaattcaggttgttgataagacttatcaaaccttagagaagctaaaagctcaaatgcctgcggctttgaattataaagtcgtcgctgacagctctaaaggtattcgtgcttcaattaaagacgttgttcgtaccattattgaaggagcagtcttagcagttttaattgttttactatttttaggttctttccgctctacagttattacaggtttaaccttaccgattaccctacttggcacattaacattcatctgggcatttgggtttagcattaacatgatgacactgttggccctgtcactgagtattggtctattaattgatgatgcaattgtggttcgggaaaacattgtcagacatacagagctcggcaaagaccatgtcaccgcggctttagacggtactaaagaaattgggttagcagtacttgcaaccacactcaccattgtggcggtatttttaccagttgcctttatgggaggcttaattgggcgtttcttctaccaatttggggtaactgtaagtacggctgttcttatttccatgttcatcagctttacactcgacccaatgctttccgcacactggaaagatcctgtaaagaaaaaagaaagtcgactgcaacgtttctttaactatatttctaatctattagatggcctaacgcatatctatgaaaagcttttaaagcttgccttacgctttcgtttcatcacagtcattattgcaattgtttcattggttgtggcattaggcttatcaaaaatgatcggaaccgaatttgtacctacaccagataaaggtgaaattcgtattcagttcgaaaccccagttgattcttctttagaatatacccaagcaaaattacatcaggttgatcagattattaggcaattccctgatgtcgtttctacttatggagtggttaacagtgaagtcgactccggtaaaaaccatgcaggtttaggagtcaccctaaaaccaaaacaagaacgtagtgcagacctgacaacactcaacaatgaattccgtgatcgtttacaaagtgtagctggcatccgagtgacttcagtcgctgctgctcaagactcagtgtctggtggtcaaaagccaatcatgatttctattaaaggatctgatctaaatgaactacaaaaaatctcggatcgtttcatggctgaaatggaaaaaattgatggtgtggtcgatttagaaagctctttaaaagaacctaaaccgactttaggtgtacatattaaccgtgtactggccagtgatttaggtttatctgtttctcaaattgcgaatgcgattcgaccactcattgcaggtgacaatgtcacaacatgggaagatcgtgacggcgaaacttatgatgtgaatatccgtttaaatgaaaataaacgtgtgcttccccaagatgttcagaacctatatctcaactcgaataaaaccaatgcaaatgggcaaaatattttagttccattaagcgccgtagccacaacccaagaaaaacttggagcttcgcaaattaaccgacgtgaccttgaacgtgaagttttaattgaagcaaacacttcaggacgtccaagtggggatatcggtcaagatatcgataaaatgcaaaaagcattcaaattgccagctggttatacctttgatactcaaggggcaaatgccgatatggctgaatctgcgggttatgcgttaacggcaattaccctttcgattgtatttatttatattgtgttgggttctcagtttaatagttttattcaccctgctgcgattatggcatctttaccattgtccctgattggtgtcttcctggccttattcttatttaggagtaccctaaatctattttcaattattggcattattatgctgatggggctggtaaccaaaaacgcgattttgcttatcgactttattaaaaaagcgatggaagatgggataagtcgttatgatgctattttacaagcaggcaaaacccgtttacgcccaatcttgatgacaacaagtgcgatggtgatgggtatggttccattagctctaggtttaggtgaaggtggtgaacaaagtgcaccaatggctcatgctgtaattgggggtgtcattacctctaccttattgactcttgtggttgtccccgtcattttcacttatctggatgacttgaaaaactttatgctgcgtcaaacccgacgattcatgtca

SEQ ID NO: 8446 - DNA, 720 bp, Acinetobacter baumannii
atgagtctgctcgctttctcctcatatgcattaaacggtgtagatgcacaaaagtttttacaaggtcaagtgactgtagatactgaacgtttagctgaaaatgaaacacgctatacagccatttgtgatcttaaaggccgcatccattttggcttgtggctaaaaaagaataatgcagaaagttttgaaattattgtcactcaagatcaagctgaagaattcgcgaagcacattaaaaaatatggtgctttttcaaaaatgaccttaagtgaacaaggtgctgtattcccaaaagttgtgaatggccatactgagttcagctctacagaaactgatatttccgaatggcaaaaacaagccatcatgacaggtcaagcatggattgctcaagcgactgaacatgagtttcagccacaagaattacgtttacatcaacgcgaaggcgtcaattacgataaaggctgttacttaggtcaagaaattgtggcgcgcctttggtttaaggcaaaaccaaaacactggttgcatttagttcaaggtacgggtgattcacctgctccagcaactcaattgcacaatgacgtagaagtggttaatagtacccaaactactgacggttatattgccttagttgttgcgaaacctgccgcccttcaagagttaggtcttcaagttttagatttaccagaagctttaagtggtgatgttgctagaccacaa

SEQ ID NO: 8447 - DNA, 534 bp, Acinetobacter baumannii
atggcagcgaatggatttatcgagttacttcgtttgtctaaacggggtaataagaattacgcttcagttcaaaatgaagcacagcgatggtcaggaattgcttttgaaatgagagggcaatacttcgtcgcaccacttggggaagtgtcagaagttatctatccaccgaaatatacaccagttccaaatactcaaagttgggtcaagggattggcaaacattcgtggaagattactttcggtatctgatttggctcattttatttcagggcagcggagttcattttcgtctacccaaaaagtgctgtgtattagccatcatgaccagtatgtggggttggttgtggatcaggttttggggattcagcactttaataaaaaaagttttttttccgagagtttagacttagaggaaaacctaaaagaatattgccaagggtattttcaccaacacaatcaacattggcatgtctttttatttagtcggttattgcaaaacccacactacatgaacgcatcgacaaaatttataaac

SEQ ID NO: 8448 - DNA, 1053 bp, Acinetobacter baumannii
atgactatgaatatccaacaggcgctcaaccacattaccaagaacattcatttgactcagcctcaaatggaagaaattatgcgcagcatcatgcaaggtgaggcaaccgaagcacaaattggtgctttaatgatgggcctacgcatgaaaggtgaaagcattgacgaaatgacagctgctgcacgtgtcatgcgtgaatttgcgatcaagatcgatgtgagtgatatcaaacatttagttgatattgtgggtactggcggtgatggacaaaatttatttaatgtctctacagcatctagctttgtgattgctgcagcaggtgcgaccattgcaaaacatggtaaccgtggcgtttcaagtaaatcaggttcatcagacctacttgagcaagcaggtattcatcttgatttagatatgcaacaaaccgaacgctgcatccgtgaaatgggtgtaggtttcttgtttgcaccaaaccaccacaaagccatgaaatatgcggctggcccacgtcgtgaacttggtattcgtagtatttttaatttacttggcccactgaccaaccctgctggtgtaaagcgctttgtcattggtgtgttttcagatgaactgtgccgcccgattgccgaagtgatgaaacaacttggtgccgaacatgtcatggttgtccattcaaaagatggtcttgatgaaatcagtcttgcagctccgacaactattgctgagcttaaagacggtgaaattacggaatggacccttaatcctgaagatgtcgggattgagtcacaaacattaaatggtttggttgtcgcagatgcaacggcgagtctaaagctcattaaagatgctttaagcaaaaataaatctgacattggtgaaaaagctgcaaacatgattgcgcttaatgcaggcgcaggcatttatgtagcgggcattaccaagacttatgctcaggctgttgcattcgctcaagatattatttacggcgggcaagcattagagaaaatgagtgttttagctgaatttactaaaacattaaaacaatctcaggcagat

SEQ ID NO: 8449 - DNA, 804 bp, Acinetobacter baumannii
atgattaatattcaaaataccattttaggtaaaattgttgaccgtaaacatgaggaacttgctgcgcgtttaaaacaacgtaatttgcaagatgtagaagagcttgcaaaagcagcgactccggtgcgtggctttgcaaatgctttacaacataaacgtccgggcgtgattgctgaaattaaaaaagcatctccatcaaaaggaatcattcgcgcagactttaatcctgccgaaattgcagagcaatatgaacaagctggagcagcatgtttatcggtattgaccgatgttgatttctttcagggtgcagatgaaaatattgcgattgcccgtaatcattgtgccctacctgctttacgtaaagactttttggtcgacccatacaatgtagttgaagcacgtgctttgcatgctgactgtattttattaattgttgcttgtttgtctgaccagcaactcgaagaaatgtctaaaactgcgtttgagcatcaacttgatgtattggttgaagttcatgacgaagaagagttggagcgtgccttaaagctttctgagcaatgtttattaggcgtgaataaccgtaatttaaaaacctttgatgtagatttaaatactactattcggttgaaaaaattacttccggcctcacgtttattgatcactgaaagtggtattgcgacaccagatgatgtacgtatgatgcaagagcatgatattcacagtttcttggttggcgaaagttttatgaaacaaccacgtccagatcaagcttttactgccctttttggacaacctcaaacggtt

SEQ ID NO: 8450 - DNA, 909 bp, Acinetobacter baumannii
atgtcaaaaaatttagcaaccttgattggtttaagtgccatcctaatgtgggcctctatggtgggttttgtaaaacatattacgactgcaatcggtccagatgttggcattacgctaatctattccttaagtgctttactcctgctcattatttttagggtgccaaattttaaattaatttctaaaaaatatttgattttaggggcaattttatttattgcttatgagctttgcttttcgtttgcacttgcctattcaaagacggcgcaacaagcgattgaagtaagtattgtaaactacctttggccaagcctgactgttttagcttttgttatttttagagagttaaaatttaatgtgtttattattttaggattactcatttcaatttccggtatcatttttattcagaccgggaacggagattttagtttaggtcgtgttgtcgataattttcatagtaatcctttaagttatattttggcctttataggtgccattatttgggctttttactgtgtgttgaccaagaaaatgggtaaaggacaaaaccctatttctattttctttcttggtgttgccctaaccttatggctaaaattgctttttagcggccaagtgagtttgccttcactcgatttaaatacaattttatctttaatcgttgcttctgctgcaattggtctcggttatgcagcatggaatattggcattattcatggcaacattaccatgctagtggttgcttcttattttacccccatcatttcatctttacttgccatgctggttttacagacagagttatcaatcagtttttggcaaggtacagccatggtcacggcgggttcactgatctgctggctttcaacaaattgggctgtgattcgttcgtatttcagaataaat

SEQ ID NO: 8451 - DNA, 2373 bp, Acinetobacter baumannii
atgaatcaaaccattgacttaaatatttctaaaaaatcagctaaagcaggtgattcgattccacacgaaagtgcacatttacatgtgactgggcaggcaacttatattgatgatttacccgagcttgaaaataccatgcatttggcagttggattttcaaattgtgccaaaggcaaaatcagtaagtttgatttggatgcagtacgtcaagctgatggtgtccatgcagttttttctgcaaaagatattgaggttgaaaataattgggggccaattgttaaagatgatccaatttttgccgaggaacaggttgagttttatggacaagccttgtttgtggttgtggccgagagttatcagcaagcccgtcaggcagttcgcttagcaaaaattgagtatgtgcccgaaaccccaattttaacgattcaagatgcgattaaaaaagaatcgtgggtgttgccgcctgttgaatttagccatggtgaagttgagcaggcatttcaaaacgcagcacatcaactttcaggtgctattgagctgggtgggcaagagcatttttatcttgaagggcaaatttcctatgcgattccacaagaaaatcagagcttaaaagtctattgctcgacacaacatccaaccgaaatgcagttactgatttgtcatgcattaggcatgaatatgcatcaggtcagcgtggaaagtcgccgtatgggtggcggttttggtggtaaagagtcacagtcagcgcagtgggcatgcattgcatctttggcagcaaaaaaaacgggccgtccgtgtaaattacgcttagatcgtgatgatgacatgagtgctacaggcaaacgtcacggttttgcttatgagtggtctgtagcttttgatgacactggtattttgcaaggcttaaaggtgcaattggcttcaaactgtggtttttcggctgatctttctgggccagtgaatgaacgtgcgatttgccatattggcaatgcctattatctaaatgcagttgagctacgtaacttacgttgtaaaaccaatactgtttccaatacggcatatcgtggttttggtggaccgcaaggtatgtttgtcattgaaaatattattgatgacattgctcgttatttaggttgtgatccagttgaaattcgtcagcgcaatttctttgccgagcagcccggtggtggacgtgaccgtatgcactatggggcagaagtccgtgataatgttgcgccaaaattggtagccgaactattgcaaagtagtgattacgcgaagcgtagacagactattcatgcctttaatcagaacaatgacatcattaagcgtggtattgcgttaaccccattaatgtttggtatttcatttaacgccgtgcattacaatcaggcaggtgcactggtctatgtgtatatggatggtactgtcgcgattacacatggtggtacagaaatgggacaggggctatataccaaagtacggcaggttgctgcacatgagttgggtttacccatcgatagcgttcgtttaattgcaaccgatacttctcgtgtgccaaatacttcggcaactgcagcatcgagtggcgcagatctaaacggtaaagctgttcaaaatgcctgtattaaaattcgtgagcgtctggcaaaacttgcagccgaaataagtcaaagtgaagctgaccaagtccagtttgaagatagtatggtttcaacagcgaatggtcattcatggacatttcctgacttggttcaacgggcatatatggcacgtgtacaactatgggatagtggtttttataaaacgccagaaattcactatgatcaggtcaaccatttagggcgtccatttttctattatgcctatggtgcagcggttagcgaggtcgcaatagataccttaactggggaaatgaaagtattacgtgctgacattttgcatgacgttgggcagtcaattaaccctgcaattgatattgggcaaattgaaggtgggtttgtgcaagggatgggatggctcacgacagaagagttgtattggcagccgcagggtccacacgcaggccgattatttacccatgcaccttcaacttacaaaatcccgaccagtgtggacattcctcatatttttaatgtcaaactatttaataatcaaaatcaggcagacaccatctatcgctctaaagcggtaggtgaaccgccatttatgttggcattatcggttttctctgcaattcgtcaggcagtacaggcggctattccagaaaatgcaccgctcgtactcaatgctccggcaactcccgaggaaattttacgtgcaattgctattggacggggacaagctttggctgctcgcccacaggctaaaatg

SEQ ID NO: 8452 - DNA, 732 bp, Acinetobacter baumannii
atgacacaagaacgcaaagttgcattagtaacgggcgcgagtcggggcattggcgctgcaattgcccagcaacttattcaagacggttattttgtcgtaggtactgcgacttctgaatctggtgcacaaaagctaactgatagctttggtgaacaaggtgcaggtttggctctcgatgtgcgtaatctcgatgagattgaagcagtcgtgtctcatattgaacagaactatggtcctgtacttgttctcgttaacaatgcaggtattacgaaagacaatttgttgcttcgtatgtcggaagatgattgggatgacatccttaatatccaccttaaagccgtttatcgtttatctaaacgtgtgcttaagggtatgacgaaagcacgttttggtcgcattattaatatcagttctgttgtagctcactttgcaaacccaggccaagcgaactattctgctgctaaagcaggtattgaagcatttagccgtagtcttgcaaaagagatgggtagccgccaaatcactgtaaacagtgtggcaccaggttttattgcaacagaaatgacagatgcacttagtgaagacattcgcaaaaaaatgagtgatcaagtggctttaaatcgcttaggcgagccacaagatatcgcaaatgcggtgagtttccttgcaagtgataaagcaggttacattaccggtacggtattacatgtaaatggtggtttatacatggcc

SEQ ID NO: 8453 - DNA, 984 bp, Acinetobacter baumannii
atgtctgctaaacgtcttgaacaagtagctttagccacaaaaactgcatttgtgtttccaggtcaaggttcacaaaaagttggtatgctcgctgaactcgcagaacagtttagtggagttgggcaaacttttgccgaagcttcagacgcgctaggatttgatctttggcacattgcacaaagtggtgaaggtttagaccaaacagaaaatacccagcctgtcttattaactgccagtattgctttatggcgtttatggttagatttaggtggtttagctcctaaataccttgcaggtcactctttaggtgaatacagcgctttagttgcagcaggttcaatgagtttggcggatgcagttaagttagttaatttgcgtggaaaactcatgcaaaatgctgttcctcaaggggaaggcgctatggctgctattcttggtttagctgatgataaagtagttgaattgtgccagagcgtatctgcattaggccaaggttcagttgaagcagcaaactataattcacaaggtcaagttgtgattgctggtagtactgcatctgtacagcaagttatggcattggcaaaagaacaatctgctaaagcaattgctttaccggtttctgttccatcacattgttcattgatgaagccggcagcagaaaaatttgcagaagctttggaacaaactgccattgagctacctaccattcctgtaatacaaaatgtcaacgcgggaattgctaccgatgttgctcaattacgtcaggctttaacagcacaattgtaccagtctgtacaatggacacgtaccatgcagtctctacaagaccaaggtattcagtacattgttgagtgtggcccaggtacagtattgagtaatctcgcaaagcgtttaccaaatattgaaaaagctttttctattgatagtaagagcaaaatggaagatgccctaaatgctgttttagtggcagaaggaaaaattgca

SEQ ID NO: 8454 - DNA, 1155 bp, Acinetobacter baumannii
atgtcattgctcgatcattttgctacagagttagatgagttaaaacgacaaggtaatttcagacaatttacccaaaatgtgcagcatggccgttttattacgattcaaaataaaacgatgctcaacttagcttcaaatgactatcttgggttggcggctgatattgatcttcgccaagaatttttagattactatccattagaacgcagctattttagttcttcatcttcacgtttattaacgggcaattttgatgaatatgaacagttggaaaatagcctaagccaagcatttggtggtcgggcggctctattattcaatagtggctaccatatgaatattggtattttgcccgctgttgctgatagtaaaactttaattctggcagataagttagttcatgccagtatgattgatgggattcgtttgtctggtgcccagtatgtgcgctatcgacataatgattttcagcatttagagcaacttctacaaaagtatcatgatgatgaccagattgaacgaattattgtggtcacggaaagtatttttagtatggatggcgatgaaacagatttaaccgctttagtccagcttaaaaaacgctttgctaaaaccatgttatatgtcgatgaagcgcattcaattggcgtacgtggacagcaaggtttagggtgtgccgaacaatataatgtaattcaggaaattgattttctagttggtaccttgggtaaagcgctagccgcagtcggtggttatattatttgccatccaattattaaagattatctcattaataaaatgcgtccgcttatttttagtaccgcacaacctccgattgttatggcatgggcaaattttatttttaaaaaagtattaatggctcaatctcaacgtgaacatttaaaaaatattagccaatatcttcaacaagcagtggtgcaaaaggggtatgtgagtccatcgaccagccatattattccagtgattgtgggagagagtcaggctactatcgataaggcgaaacaggttcaggaaagcggtttttatgccatgcctgtacgtccaccaacagtacctaaaaatagttcgcgtttgcgcatttccttaacatcaatggttgagcaacatgaacttgaagcattggtgagtttcctg

SEQ ID NO: 8455 - DNA, 1278 bp, Acinetobacter baumannii
atgaccgataattttgatttggaacatatttggcatccatatacttcaatgacccaacctttacctacatttaaagtgaagcgtgcctatggggcaacgattgaacttgatgatggtagaactttaattgatggtatgtcatcttggtggtgtgcaattcatggctataaccaccctgagcttaatcaggcagtgactgaccagctacaaaatatgtctcatatcatgtttggcggtttaactcatgatcctgctattgaacttggcaaaattcttttaaaaattacaccaccgagtctcgataaaattttttatgcagattcaggttcggttgccgttgaagttgctttgaaaatggctgtgcaattctggacagcacaaggccagccacaaaaaacaaattttattactacacgttctggttatcacggtgatacatggaatgcgatgtctgtttgtgatccagtgacaggcatgcatcagatttttggtacaagtttaccgaaccgtctttttgtagcagctccgcaaaccaaatttcatgaagagtggaaccaagaagatattgccgagctagagcaagctattcagcaaaatcatgaaaaccttgctgcactgattattgagccgattgtccaaggtgcagggggcatgcgcttttatcatcctgaatatttacgtcaggctaaagcgctttgtgaaaaatatcatctgttattaatttttgatgaaattgccactggttttggtcgtacaggtaagctctttgcttgggaacatgctcaagttgagccagatattatgtgcctaggtaaagggttaacaggcggttatatgactttatctgcgaccttaacgacaaagcatgtagcagaaaccattagtcgcggtgaggctggggtatttatgcacggcccaacttttatggccaatccactcgcttgtgctgttgctttaaaaagtacgcaattattaattgagcaagattggcaggccaatattaagcgaattgagcaacagcttagtcaatatttaatgtctttaaatcagcttgattatgttgccgatgtaagagtgctcggtgcaattggtgtggtagaactcacctttaatgtcgatatgaaaactttacagcaacaatttgtagagcgtggaatctggattcgtccttttggaaaattagtttatgtcatgccgccttatgtcatcactcaacaagagttaagtgacttgctcgaacagttggttgaagtagttaaaacgatgcagggggcacat

SEQ ID NO: 8456 - DNA, 1407 bp, Acinetobacter baumannii
atgtttgataccttaacagaacgactcacgcagagtttaagaaatgttactggctcagggcagctgaccgaagacaatattaaagataccttacgtgaagtacgtatggctcttcttgaagccgatgtcgcgttacctgtaactcgtgaatttatcgcgaaagttaaggaagaggcattgggccaagaagtgatgactcagttatctccaggccaggcatttgtaaaaattgtctatgatgaactcaccaagatgatgggtgaggccaatgaaacactggatttaagtgctaagcctccagttgtggtattacttgctggtttacaaggtgcaggtaaaacaactacagcagccaagctggcacgtttcttaaaagaacgtcaaaagaaaaaagtaatgaccgtttctgccgacgtttatcgtccggcagcgattaaacagttagaaactgtgtcagcagaagttggtgcaggctttattccatcagatccttctgaaaaaccaattgatattgttaaccgtgcaattgaacaggcaaaaatccagtttgctgatgtgttgattgtcgatacagcgggtcgtttgcatgtcgatgaagacatgatggacgaaattaaagaattgcatgcagcagttaagccgactgaaaccttgtttgtggttgatgccatgacaggtcaggatgctgcaaatactgctaaagcatttaacgatgctttagcgcttacaggtgtgattcttactaaaactgatggtgatgcgcgtggtggtgcggcactttctgtgcgtgctattaccggtaagccaattaagttcttaggtatgggcgaaaagcttgatgctttagaaccattccatccggaccgtgttgctcaacgtattttaggtatgggtgacgtactttctttagtcgaagaagttgaacgtaaaatcgacaaagaaaaagccgagaaaatggcgaaaaaattgcaaaaaggtggcagcttcaactttgaagatatgctgatgcaatttgagcaaatgaagaagatgggcggcatgatgggcttcttagacaagttgccaggcatgagcagtgcaggaattcagcaagcaattgagcaggcgaatcctgaaaagcaggtcaagaaaatggaagctattatccagtcaatgaccatcaaggaacgccgtaatccagacctgatgaacccaagccgtaaaaaacgtattgcagctgggtgtggtatggatgtagctgaagtgaataaactcattaagcaacaagcacaaatggctaaaatgatgaagaagtttgcgaatccatctggtatgagcaaaatgatgcgttcattaggcaatatgcaaaaacaatttggcggtggcggcggtatgggaccactgtttggtaataatgaccaaaagaaa

SEQ ID NO: 8457 - DNA, 807 bp, Acinetobacter baumannii
atgattagcctccccttggtttacacaattttggcactcatcgcatataccacttctttctggtatctgttcatacgtttaatgtcaaaacgtgaaccaaacccatggttatttgcttttgttacgaccttagcactgctgttacatggcacagttttatgtcatgccatgctgacgccatcaggaattaactacgatgtttttaatctggtgtcttttacatcaggacttatgttgttgttaagcttagtttttagtactttccgcccgattgtaccgttaaacttgctcggcattcctgtagcggcgattggtcttattttaggttttgcatttagccgtcccgatcagtttattgaacagcattcattaggtttagatactcatattattctttcactttctgcttatgctgttttactgatggcaaccatacatgcgatcttgatatggttccaaaaccgtgaactcaaaaagaaacaaaaaaaacgtatttgggtcaatttacttccatccattcaggccatggagtctttattatttgacctcatcattactggttttattttattaactattgctctcgcgtttggtttcttaacagttgatagcttctttgcccagcatctcgctcataaaaccgtatttagtattatttcatggtttatttatggctctttattgattggccactataaacttggctggcgcggacaaaaagcgattcgttttaccttaattggttttgcattattagcgatcggttttattggcagtaaatttgtgcttgagatgatattgggccga

SEQ ID NO: 8458 - DNA, 921 bp, Acinetobacter baumannii
atgagtgaaaaattgcaaaaagtattagcgcgaatcggattaggttctcgccgatatatggaagaggttattgccgcaggacgcgtgagtgtgaacggccgcattgcccaagttggcgagcgcattgaaccaggcgatgaattacgcattgatggccgtaaagttcagttccagatcgaagatgaaattcgtcgtcgtgtactgatttattataaaccagaaggtgaaatctgttcacgtaatgaccctgaaaagcgtccaaccgtatttgatcatttaccacaaattgcaaatgaccgttgggtaatggtaggccgtctagatattaacagtacaggtttattactttttacaaacgatggcgagcttgctaaccgcttaatgcatccatctaatgaaattgaacgtgaatacgctgtacgtgtaatgggtgaagtaacaccacaattacgtcaaaacatggtcaatggtgtagagcttgaagatggccctgccaaattcgaatctttctctgaaattggtggtgaaggtattaaccgctggtatcaagttgtagtgaaagaaggccgtaaccgtgaagtacgccgtatttttgaatcacaaggccttaaagtaagccgcttattgcgtactcgctacggtactgtcattttaccacgcgaattacgtactggtcgctggatggaactcgacaaaactgacatagacaacttggcaaaatctgttgagttaaaaccacgtcaaggtacaggcttatttggcatggcaaaacgtcgcaccgaacgtatgacagaaaagccaatggcagcacgccgtggtggttacttacgtcagcaacgtcgtgatgatgaaaaagaagcgccagctaacacaggcaatcagcgcaaatcgactggttttaaccgtggatttaaaaagttc

SEQ ID NO: 8459 - DNA, 2049 bp, Acinetobacter baumannii
atggtgaataaaataatggcaataacttccgtgatcgaacagatgcgtcagcttattcaactgattgcaaagcataaccatgcctactatgtcatggatcagccgacaatctcggacagtgaatatgatcatttatttcatcagttaaaagctttagaagaacaatatccggaacttgtacaagccgactcaccaacaacaaaagtaggtggtcaagcgctttcaaaatttgagagtgtgacgcatgtggtccccatgctttcacttggtaatgtatttaaccaagaagacttatttgcatttgcacgccgtgtagaagagcgacttccgaaccagaaagtacaatatgaagttgagttaaaactcgacggccttgcgatttcactatggtatgaaaatggtgtacttgttcgcggtgtaacccgtggggatggcgaaacgggggaagacattactcaaaacgttaaaactattcgtaacttacctaaagttctgcattcagaaaaatatgaaatacctcgtctacttgaagtacgtggtgaagtattgatgccaaagtctggttttgaaaaactcaatgctgaccaagaagcaaagggagaaaaaaccttcgctaaccctcgaaatgcagccgcaggaagtttaagacaacttgatccaaatattgctgctgctcgacctttggcattttatgcgtatgggattgcacagtgtgaaccgaatcatggcctgacaaccatgcatgatagcttacaatggttaacggaacttgggttccaaattgctgagcgtcagtacttgtgtaattcaattcaagaagtacagcagcgctatgagcaaattcagcaagaacgtccaaacttgcaagttgaaattgatggcatggtggtgaaggttgatgacctaaaacaacaacagcagcttggtttcttaagtcgtgaaccacgctgggcaactgcttataaattcccggcacaagctgcattaactacagttgagcagattgactggcaagtagggcgtacagggactttgacccctgtagcacgcttaaaccctgtttttgtgggtggtgtgactgtttctaacgtaacgttgcataatattggggaaattcatcgtctggatgtacgcattggcgatacggtaagtgtatatcgtacgggtgacgtgattcctaaagtagaaaaagtttggccggagttccgtcctgctgaagcagaagttgttcatttaccagagtcctgcccagtatgtgcttcgcctgtagtgatgcctgaaggtgaggctctcgcacgttgttcaggcggtttatattgtgccgcacagcgtattgaagccattcgtcactttgtatcgcgtaaagcgatggatatcgagggcttgggagatcgttgggtagaatctttattacgtctcgatttacttaaagatgttgctgatatttaccatttgcatgagcacagagaaactctcttgggcatcgaaaaaatgggagaaaagtcagtacagaacctaatagatgcgattgaagcaagtaagaaaacaactctagcacgttttatttatgcattaggtattcgtggagtaggtgaaacaacggctagaatgttagcaaatacatttcagacgctagaggcacttaaagctgcgaatgtagaagctttaaagaaaaccccagatgtaggggatattacagcagagtggattgctgactttttcttggcaccgcataacattgaagtactcgatcgtttaattgccgcaggaattcattgggatgcaccaacagcaccaacgcgtcaacctttaaatggtgaaagctgggtacttacaggtacattagaacaaatgacccgtgatcaggccactcaaatgctacaagcattaggtgcacgagtaagtgggagtgtttctagcaaaacaaaatgtgtagttgctggtgagaaggcgggttcaaaattagaaaaagctgcgaagttaggtattcccgtcatgaatgaaacagatttcttatcactcatggcaggctatgggcaaactttgagc

SEQ ID NO: 8460 - DNA, 3447 bp, Acinetobacter baumannii
atgcgtttaagcagtttaaaactttccggctttaaatcttttgcagatagtacaactttaaattttaaggcgaaccgcacagcagtggttggtccaaatggttgtggcaaatccaatgttattgatgcgatccgctgggtgatgggggagtcaaacgctcgtcagctgcgtggtggtagcatgcaagatgttatttttaccggaacatccaagcgtaagccagttggtgttgccagtgtagaactgcgttttgacaatacctatggcaaattaggtggagcttataatgcttataatgagctcgcagttcgtcgtcaggtgacccgcgaaggtaaatctgagtatttcttaaatggtacacgttgtcgccgccgtgatattactgacattttcttgggcacagggttagggccacgctcttacgcagtcattgaacaaggcatgattaaccgcttggttgatgccaagccagaagaaatgcgtattttcattgaagaggcggcaggtgtttcccgttatcaggcgcgtcgccgcgaaaccttgcagcaccttgaacatacggagcaaaacctttcacgcttggaagatattgcgcttgagttaaaatcacaacttaaaacgcttaaacgccagtcagaagcagcggttcaatataaaacattagaaagccagattcgtaccctaaaaattgaaattttgtcttttcaggcagagaaaagtgtacgcctacaagaagaatataccgttcaaatgaacgaactgggggaaacatttaaattagttcgttcagaattaagtacgattgaacatgatttagaatctaccagtgctttatttcagagacttattcagcaatcttcaccgttacaacaagaatggcaacaagctgaaaagaaactgtctgaactgaaaatgactctagagcaaaaacaaagtttatttcagcaaaatagtacaactctcgttcagttagaacagcaaaaagcccaaactaaagaacgtttacagctttctgaattgcaactcgaaacactgaatagccagttagaagagcaaaccgaagctttaactgcaattgagcatacagcagctgaagcagagcaaagttttgcaggtttacaatcacagcaacggcaagcgcagcaacaatttgagcaagtaaaagctcaggttgaaaaacaacagcagcaaaaaatgcaaatgtctgctcaaatcgagcaattaggcaaaaatgttcagcgcattgaacagcaaaaagaaacgctgcaacatcaagcaaaccagatccaatcgcaagtacacgaagatgaacaaggcgagcttgagcaattacagcagcagctttgtcgtgaaatctcaacgctagaagctgaaattgagcagtatgtgcagcgtattgaacaagctcaacaagcgcatcaggtaaataaaaaccagcagcaaacgttaaaaacagaaatacaggttttattatcagagcagaaaaacttaagccagcttgttgctaaacaaagtccaaagcaaaaccaagatacgctacgtttaatgcaggctctagagttaacagagcagggcaaaccacacgcacaaattattgaaaagtttttagcaaaatggttgcaggcacatattgttgaaactgaacaagcctttcaggaaggagttgctcgccagttaaagccttcagagcaatcaagcaaatttaaggggaacctgatttgcttgaatgattggattgcatcgccacagctatcaatattctcgaatgtagcgattgcacaagatttatctcatgctttaaatgaacaaaaacaactgcaatatggccagtctattttgactttagatggttatcatgtcgggcaagattgggtaattgctcttatgtatgatgacgaaagtcaaagtgcgcaaggtatgctcagtcatcgtattcgtctagacgaaattgaacaagttcttcaaaagcagcaaccagaattacaagcattagatcaaattatagttcagcaaaaagatgagctaggacagttacaagttgacctacagcaaaaacaacaagtcattaaacaaaaacaaaaagacttgcaacagcttgatgtacaaattgccaagcaacaaaccgcagcacaagcatttttattgcaaaaacagcaattgaaagatcaactcgctcaattagatacgcagcttgaagaagatgcgatgcaaaaagatgatcttgaaattgatttgcatgcattggcaatgaagctcgaaactattttacctgactataaaactttgcaatttcaggtagaagaattaacagagcagcttgaggaacagcaacaagtcttacaacagcaacaacaagaacgtgagattttacgacgtaatagtacgcagacaactcaacaaattgagctgcttgaaaaagatatttcgttcttgcagagccaatatcaacaaattacagcgcaaatggaacaggcgaaaaagtttgttgaccctattcagttagagttgccaaaccttgagtcagagtttcaacaacaatttgctcaaaccgaaaagctgcaaaagacatggaatgaatggcagattgagcttaatagtgtccaagagaagcaacaaacgcttacagaccaacgccatcaataccaacagcaagatgaaaagcttagagagcagcttgaagccaaacgtttagcatggcaagccgccaagtcggatcgtgagcactatcaagaacagctcaaagagttaaatgccgagcttcaaacgggtttgaaaatagatttaactgaacaccagcaaaaactagaaaaagtacagaaacagtttgaaaaaatcggtgcagttaacttagctgcttcacaagagtttgaagaagtttctcagcgttttgatgagttgagccaccaaattcaagacttggaaaatacggtaactcagttaaaagatgcgatgaagagcattgaccaagaaacccgtaagttgtttatgtcgacttttgatcagattaatcaagagttacaaaatctatttccaaaagtttttaatggtggtgaagccagtttaagtcttgaggatgattggcaatctggggttaagctcatggcgagaccaccgggtaagaaaaacagttctctggcattactttccggtggagaaaaagcgttaacagcgttagcattagtatttgctattttcaggttaaatccggcaccgttttgtgtactcgatgaagtggacgctccactcgacgatgcgaatgtacagagatattgtaatttggtaaaagagctttctgaacatgtacaattcatttacattacacataataagctggcgatgaccatggcaactgacttgttgggtgtaaccatgcctgaaccgggtacatcaaaattagtcactgtcaatttagaacaggcaaaagaatacgggttagtttcggagtca

SEQ ID NO: 8461 - DNA, 1173 bp, Acinetobacter baumannii
ttggcaaaccgaaaacttaaaataggcattgtagttggagaagtttctggagatacgctcggcgtaaaactcatgcgtagttttcgcgagcagggaatcgatgctgaatttgagggaatcggtggccctcaaatgattgcggaaggttttaacagttattacccaatggaaactctgtctgtgatgggcattgttgaagtattaaaagacttaaaaaaactattcgccgtacgtgatggcttaattaatcaatggactcagcatccagttgatatttttattggtattgatgcaccagactttaacctcagactttcgaaaagtatcaaagaaaagaatcttccaataaaaacagttcaatatgtgagtccatcagtttgggcatggcgccaagggcgagtacatggcatcaaacaaagtatagatttagtactttgcttatttccttttgaaaaagttttttatgaacaatatgaagttccagcggcatttgtaggccatccattagctaaacaattaccgcttgagaaccctattcaaattgctaaacaagaattgggtgttgatgaaaatcaaaaacatattgctttgttgcccggtagccgcaagggtgaagtagaaaggcttcttcctatgctattgggggcagccaatattttgcatacaaaatatccagatattcagtttttaattccggcaattaatgatgcgcgcaaacagcagattgagcagggggttgaacaattagcaccgcagttaaaagcaaaaattcatattttagaaaatacggatagtgaatcgaaaattggtcgtatggtcatgaacgcgagtgacattattgctttagcgtctggaacggcgacattagaagcaatgctcatgcatagaccaatggtcactttctataaactgcattggctaacttatttaattgctaaattcttggtgaaaataccttattactctttgccaaatatcatcgcgggtaaaaaagtaattgaagagctgattcaggcagatgcaacacctgaaaatttagcggctgaaatagaaaaactaatgaatgtagaaaccgctcaaattcaagtaatgcaacatttaactatgcataaacagcttatttctggaaatacagaagatccggttcaagccattttgcaatgtttgaatagc

SEQ ID NO: 8462 - DNA, 597 bp, Acinetobacter baumannii
ttggctaaatttaggattgatttgctcagacatggagaaagccagtatagccataccttacgtggccatttagatgatgagttaacagcaaaaggttggcagcaaatgcaggcaaccattgagcaagtttcaaatcagccatgggatgtcattgtaagttcatcattaaaaagatgtgtttgttttgccgagcaactggccaaaacagcagaactccccttacttgtaaatcatgacttaaaagaaatgtattttggtgaatgggaaggcatctcaactcagcaaatttatgaaacttcacccgaattactggcaaacttttggcaaaaaccaagtcaatattgtccacctcgcgcagaaacattagaccagtttcaaacaagggttcttaaaggctttcaagatttgctggagcatatgcaaaagcaaaacttacagcatgctttagttgttactcatggcggtgtgattaagctattggcttgtttagccagacaacagcctctagatgacttacttaaaatgccggcagagcttggaaaattatattcactcgaattttctgaaacagatggtcaattaacttttaagttaaga

SEQ ID NO: 8463 - DNA, 645 bp, Acinetobacter baumannii
atgtccagatctagacgaagtgatggtgacttaacaaagactaaaattattgaggcagcaggacccttaatcgcccaatatggttttgcaaaaacagcaaacaaaacaattgccaaagtagcaaatgtcgatttagcagcaattaattatcactttgatggtcgagatggactatatcaagcagtgttaatggaagctcatgcccattatctagatgaacaatacttactagaacttgttgaaagtacttaccctcccgaagaaaaattgagtttattacttgaaactttattacataagttgacggaaaaagatgtttggcatggcaaagtttttattcgcgaactgttttcaccttctgagcatttattaaattttattgaattaactggtatgagaaaattttttcttattcgaaagttgattagtcaagtggcgaacttagatgaaaatgatccggccgttttaccttgtattttaagcgtgatgaccccttgcatgatgcttattattgccgggcctaatgctcaagcacctgagccacttaaaaatattgctcagatgccattacatgatttagttgaacattttaaaaaattttcattagctggattaaaagcaattagccaatcaaatcttaaaaat

SEQ ID NO: 8464 - DNA, 1755 bp, Acinetobacter baumannii
atgattgatagtaaagcagtggttcaagcccataatttattcatgacttttaaagccgaaaataaaaattcagcagatattagtgcaattgttgatttgaatatgcaaatcaaaaaaggagaacttgccgctttagtcggcccagatggtgcgggtaaaacaactttattaaggttaattgcaggattatataaagcgagttcaggttctcttcatgtgctcgggtttgatattgaaaaacatcctcaagttgtccaagaccgtattagttatatgccacaacgttttggactctatgaagacttaagtgtacaagagaatctaaatttatatgccgacttacacggcgttccaaaaaatgtacgtaaccaaagatttaaacgtttattggaaataacggatcttactcagtttactcaacgtctagcagggcaactttctggtggaatgaagcaaaaactaggattggcatgtactctagttcgttccccagagttactcttgcttgatgagcctagtgttggagtagatcctttatcaagacgggatttatggatcattatcgaacaacttgttcaggaagaaaatttaagcgtaattataagtaccgcttatatggatgaagcagaaaagtgcgcttacgtatatatcatgcatgaaggcaaaattttaagacaaggttcacctgagcaattaaaagcgttagtacatgagcaaacatggcaaataaaaccttcagagcagattaagactcggattgtacaagcccagttgcttggaaattctggagagattattgatgcagtgccaaggggagagcaagtaaactttattagccgccaaaaagaactatcaacaaatattttacctctggggctagtggcaaataggcgaccacctgaactcgaagatgcttttatgatgttgttacagcaaaatcaaaaacaacaaatctctatttctcagcaggcttttcgatccgaacaaaacaataattcgcaatcagaccaagcggttattgtagttaaagatttagtcagaacttttggagattttactgctgttgccaatacgtcatttactgtacagcgtggagagatctttgggttacttgggccaaatggagctggtaaaaccacgacattccgcatgttatgtgggttactaccggcaagtagcggttacctagaagttgcaggtaaaaacttacggacggcccgtgctgaagcaagagctaaagtaggctacgtctctcaaaaatttgcactgtatagcaatttaactgttttagaaaatttgaagttttttggtggagcctatggtttatcgggcaaaaaactaaatcaacaaattgataaagctttacaacaatatgatttaaagccgcaaattaaaagcggtgatttacctggtggttataaacagcgcttatctatggcggctgcattattacatgaaccagaaattttatttttagacgaacctacgagtggaatagacccgcttgcacggcgtttattttggtacagcattggtaaactcgcaaatcaaggcattaccatcattattaccacccattttatggaggaagcagaatattgtgaccgcattgccatactagatgcaggaaagttactagccctaggttctcctcaacaggtccgcgaattggcaagtaaagataaacatattgttgatatgaatgaggcttttattgcaattgtggaacaagcacgtgcattaaggcatgcgggt

SEQ ID NO: 8465 - DNA, 2154 bp, Acinetobacter baumannii
atgcaaaggactacgaaacactttcaaattaatgcattagcacttgctatagcaatgagcacaatttcagcgcatgcagagactgatcagcagacttcggaatatggaactcttcctaccattaaagtaaaagctggaagtggccaagaaaatgaaaaaagttatatagcagggaaaacagatacagcggttccactgggtttatctgttcgtgaggttccacaatctgtttctgtcattactcaacagcgtttacaagaccagcaattgtcaactttagttgaggtcgccgaaaatgttacaggggtaagtgtcaaccgttatgaaaccaaccgaggtggaatctattcacgtggttttgtagtagataactatattattgatggtattcccaccacatatagcttgccttggtcttcaggtgaaattttctcaagtatggccttatatgatcatattgatgtagttcgaggggcaacaggtcttacatttggtgctggaaatccatctgctgcaattaatatggttcgtaagcgtgctacgagtacagagccaacagctaacgtagaagtgagtgcaggtagttgggataattaccgtgttatgggcgatattgccaactcccttaatcaatcaggaacagtacgtggacgagcagtggcccaatatgaacaaggcgacagctataccgacttgttgtctaaagaaaagctatctttattgttaagtgctgaagcagatttatctgaaaatacccttttatcgggtggggtaacttatcaggaagatgatccgcgtggaccaatgtggggaggtttacctgtctggtttagtgatggcacaaaaacgaactggtctaaaaatatcactacaagtgctgactggacacgctggaatgttaaatataccaacctatttgcagatttaactcataaatttaatgacaactggtcagctaaactgtcttattctcatggtaagcgtgatgctaattctaagcttttatatgtttcaggtagtgtagataaaaatactggtctagggctatctccttatgcatcagcgtatgaccttgaggtagagcaagataatgcttctttgcagctcaatggtagttttgatttgtggggcttagagcaaaaggttgttttgggttatcaatattccaatcaggactttacagcgtatgctcgttcaactgatacaaaaatggaaattggcaatttctttgaatggaacggcagcatgcctgagccagtgtggaatgcacctacactcaatgaaaaatataatattgaacaaaatgcactattcgctgcgacttatttaaatccgattgagcctctaaaatttattttaggtgggcgttttacaaattatgaaaagaatatatatggtcgtagttcatccataaaatatgaccacgaatttgttccttatgcaggtattatctatgatttcaatgatgtctatactgcatatgcaagttataccagtatttttcagccccaagataaaaaagactttgatggtaactatttagacccggttgaaggaaacagtactgaagtaggcctaaaatccgcatggtttgatggacgtttgaatggtactttagcactttatcatattaagcaagataatttagctcaggaagcaggggacgtcactcgtaacggggtaaaagaaatctattatcgggcagcaaaaggtgcgacgagtgaaggttttgaagttgaagtaagtggacaaatcacaccagactggaatattacagcaggttatagccagttctctgccaaagatacaaatgatgtcgatgttaatacccaacttcctcgcaagatgattcagacatttaccacctataaattatcgggcaaattagaaaacataaccgtgggtggcggggtgaattggcaaagcagtacctatattaatgccgaaaatcccaaagaagttattgagaaagtcgagcaaggagattatgcacttgtaaaccttatggctcgttatcaaattacaaaagatttttcggctcagcttaatattaataacgtatttgataaaaaatattacggtgttttcccggcgtatggccaaattactttaggtgcccctcgaaatgcggcgctaacactacaatataagttt

SEQ ID NO: 8466 - DNA, 2604 bp, Acinetobacter baumannii
atgaatattgcggcgcagcctccagttcaggcagatcaaacagtttatttaaaagattatcaaaaacctgcgttcttggttgaatcaattaatcttgatattcaagtctatgacgataaaacaattgttgattcaacattggtcatgaagcgtcaaactgctggagacttagtgctactgggccgtgatcttgagttgcaatctattcagctcaatggccaagatcttactcctgcacaatattcactcgatagtgaacaactggtgatcactgatgcaccagatgaagtcattttacaaactcaagtgattattcaccctgaaaccaacactcagcttgaaggtttatataaagctggcgacttatttgtaacgcaaaatgagcctgaaggtttccgtaaaattacgttctatccagaccgtccagacgtactttcagtttttactacacgtgtagaagcagacaaaaaatatccggttttacttgcgaatggtaacttgcttgaaacaggtgaagttggtgaaaaccgtcactttgcgatctggcaagatccaactaaaaagccaagctatttgtttgcttgtgtgattggtgatttagctgtattgaaagaccgctatacgacttcggaaggacgtgatgttgctttagaaatctatgccattgagaaagacattccaaaatgccatatcgcaatggaagctttaaaacattctatgcgctgggatgaagagcactatggccgtgcctatgatctcgacaactatatgattgttgcggtgagccagttcaacatgggtgccatggaaaataaaggtttaaatatctttaacacctcatgcgtacttgccgatgaagaatacacaactgacgcagcgattatgcgtgtacagtctgtgattgcccatgaatatttccataactggacagggaaccgtattacttgtcgtgactggttccagttgtgcttaaaagaaggcttaacggtattccgtgatcaatctttctcggaagatttacaatctgctgcggttcaacgtattgacgatgtcgctgttcttaaatcgcatcaattcccagaagatgcaggtccattgtcgcaccctccacgcccagaccactttgtcgaaattaataacttctatacagcgactgtttatgaaaaaggtgcggaaattaaccgcatgatgtcgacattactgggtaaagaaaaattccgtcagggaacggatgaatatttccgtcgtcatgatggacaagccgtaactgttgaagactgggttgctgcactctctgcgggttcaggtgttgatttatctgcattcttaacttggtataaccaaccaggcacaccaaagcttgaagcgaaaggtgaatatgatgcagcagcgcaaacttatcgtctaagctttaaacaaagcctaaaagcgcatccgaaatatccaaacttaaaagctgtcccaattcctgtagcgttggcattatttaatgctaaaacaggtgaacaatatacgctccaaaacgaaagcctatttgtaaatggtgttaaagatggtgtgtacttatttgatcaagatgaagcaactattgagtttacaggggtaactgagcaacctgttgtttcactactacgtaatttctctgcacctgtaaatctggtatttgattacagtgatgaagaattagcattcttaattcaacatgaaacaaatggttttaaccaatggcaagcaacacaaaccttgcttgaacgtattttgttagaagatcactctgcggatacctatattcaagctattcaaagtacattgcctgaattagttggtcgtgatccacttttagcatcgcgtttgtttgatgtaccgactgaaggttatttgggtagccgtattgatcaaaactatgcaccagccgatattcatgtaaaacgtgaagccttactcaatcgtttggcacaagagttgggttcgttctggaaagatacgtaccttacattggaccctgacttgcaaaaagaattttctttagcgatgggtgtacgtgcattaaagaacattatgctcatgatgatggcgcgtcagggtgatcaaagtgcatttgaattggcttacgatcaatatcaaagcacagggaatatgtctgaacgtttaggcgcgctgcgtgtactagtgtggcaaagtgcgcctcaagcacaagaagccctagctgatttctataaccgctttaaagacgaagcattgtctttggaccaatggtttatgatacaggcagcaaacccaaatgccacagttgagacaattgaatatctaactcagcatcctgattatgacttaaccacaccaaaccgtattcgcgccgtgagtggtggtttgtcaaataaccctgaaaatacatggggctttggtgtagctcactttattaatcttgcagaatatctggacgagaaaaacccgattttaggttcacgcttattacaggtgttatctcgctggtatacacttgccgaacctcagcgcactcaagtgcaacaggctttacaagcgttgcagcctaaagtgaaatctaaaaacgtttctgaaactttaaatagtatgctgagcgtt

SEQ ID NO: 8467 - DNA, 2007 bp, Acinetobacter baumannii
ctagatgaaaaacaaattgaacttttaagaaatggttcatctggaaatattgcaactgttttagctaaagccgtaccgggcctttccgactcaagccgaaccattaccgattatggtcaaactttacggggccgtaatgccctcatcttggtcgatggtgttccaatgaacctgacacgtgacacatcaagaggtctttcagctatcgaccctgaaagtattgctaacattgaagtcattcgcggtagtaacgcaatttatggcggtggcgcttctggcggtattatttcaattaccacaaaagcggctggtagcgaacctacagctaaaacagtcgttggacttcaaacacctttaacaaatttccgttctaatgctttaagtggcgatattcatcaatatttcacaggcagctttaacgcttttgactatgcactcgactttggttatcagcgtattggtagcccgtacgatgcaagtggcgaccgtgttgctccagaaccaagtcagggcgatttatatgattctgacggctatagcatcggcggtaagcttggttatcatattgatgacaaccaatatgtccagtttgctgcaaactactataatgccgagcaagattcagattatgcatctgacccaagtgtgaagaatgcccctgccggaaccgtaccagccaaagccattaaaggcttaaagctcaaagaccaaaataaaaacgaaaaccagatctacaatttaacctataaccataaagacttttttggcaataaggttgatgctcaaatttattaccgcgacttctttacccgtttttcaccatttgatgcacgtaaaaatccgaatcggggtggaaacgtagaccagatctatcaagaaaataacatactcggtagccgtttaactgttaccacaccgcttgagtttttaggtgacacctcactggtttggggtggtgactttagccgtgaaaaaagcgaaatgcctttagatactttcaatcctgatatttatgaccaatctggtggcctagattttgtaaaaactggtaagctcatttatttacctgaacttaccacacaaagtgttggtggctttgtacagctaaaacatcgctttaatgaccaatggtcggctgaagcaggtacacgctatgaagatagctatgcccaaattgatagttttattccattatcacaatttgatcctaagacacaatcatataagccaaacccttatgtatatcaaggtggaaaagtaaaagctgatgcatggttgtacaatgctaatgtaactttctctccaaatgaccagcactcgatttatgcatcgtttaaccaaggttttcaattacccgatgttggtgtaattattcgtaatgcagataatactgataaggaaaaaaattatgaattatcatcttcatttttagaacctgtaaaagttgataactatgagttgggctggaaagggaacttcaataacttttcatcaagcttagcagtcttccactctacttctgatctaggcgctgtgcagtctttcagcaatggtctggcacttactagaaccaaagagaaagtcactggtcttgaagcaacttttgactatcttgacgatgccaatgtttggggaactggtggtagcgttacgtggatgaaaggccgtgaaaaaccgcaaaatggtgctgagcaagacatgacaggcttccgtattccgccattaaaactcacaggttatatttcttatagcccaacagaaacttggacaaaccgtttacaagccacttacttcggttcagaagattaccgcctaaacggcaagaatagttttggtcgctacgatgtaaaatcttatacaacagcagatttaatcagtagctttgcacttaataaaaaagacaccatgacgattggtttagagaatatgtttaaccgcaagtactatcctctatatagccaattattaagaacaagcgataataccagtcacttagttgcaaatggt

SEQ ID NO: 8468 - DNA, 825 bp, Acinetobacter baumannii
atgacttcgacatccaacctcattgaacaggtgattgaagcttggcaaaacatgcaggcaaaaacgccgctggtacaatgtattaccaacagcgttgctgccaactatacagccaatgtattacttgcttccggtgcttcacctgccatgattgataatccttatgaagcagaaagctttaccaaaatttcatcggctttaagcattaatttgggtacaccgacttcagagcaaatgcaagccatgcaaatctctgccaaaacagcacagcttaacaatattccttgggtacttgatccggtaggctatggcccaattttagcttggcgcagtcaaatgacagacgagcttttacaattcaagccaagtgttattcgtggtaatgcttcagaaatcagtacgcttgcaggcaatcaagttcaatctaaaggtgtggatagtaccttaagtagtgatcaggcctatcaacaggcttatgcactattagcacatgcagactgtatcgctatttcaggtgagtcagattatatattgtctaatgaaatagatgctgtgattcaagtaaacggcggaagtcctttacaacctaaaattactgcaacaggctgtgctttgggtgcattaattgcagcatatagcgctgtggcaacaccaaccattgcggctctttcagctcatgttcattttgcaattgcaggtaaacttgcagcaaatcaggcgcaaactatgggaagctttagtagcatctttatggattatatccatatgttagatgacaacctgattgaacaatatgcagatatcaaacttttaaacatacaggca

SEQ ID NO: 8469 - DNA, 1383 bp, Acinetobacter baumannii
atgagttatcgcaatattgtcgccaatcaacagtatcactttgctgacctaaaaacgttaatggccaaagctacaccgttacgttcaggcgatgagttagccggtgtagctgccagagatgcaaccgaacatgttgcggcacaaatgactttggctgatgtgccattaaaaacctttttaaatgaagttgtggttgattacgatactgatgaaattacacgactgattattgatgaacatgatctggcagcctttgcccctatttcacactttacagtaggcgattttagaaattggctacttggagaagatgccactccagaaagcttaaaagcattagcatcgggtttaaccccagaaatggtggctgctgtcagcaaaattatgcgcaatcaagatttgatttatgtcgctagcaaatgtgaagtggtcacccaatttcgcaacacaattggtttaaaaggacatctttctacccgtttacaaccgaaccaccctaccgatgatgtgctcggtatttcagccagtattttagatgggttgatgtatggcaatggtgatgccgtaattggcattaaccctgccacggataacctgcataatttgtcagagctactgaaattgcttgatcatgtcattcaggaatatcaaattccaacgcaatcttgtgtacttacgcatatcagctcaggcattcaactggctgaaaaaaatgtaccgattgatttaatgttccaatcaattgccggcacccaactggctaatgaaggttttggaatttcacttgatttactacaagaaggatatgaagccaccctcgcacttaaacgcggaaccattggacaaaacgtcatgtactttgaaacgggtcaaggtagtgccctatcaagcaatgctcatcacggcgttgaccaacaaacattagaaactcgtgcctatgcggtggcccgtaaatacaatccgcttttagtgaatacagtcgttggttttattggccccgaatatctctttaacggtaaacaaattatacgtgcaggactggaagatcacttctgcggtaagttacttggcgtgccaatgggctgcgacatttgttataccaaccatgccgatgccgaccaaaatgatatggatgtacttcttactctatttggcgccgcaggcattaactttattatggggattcctggttcagacgatgtcatgctcaactatcaaaccacttcctttcatgatgctctctatttaagacaactcttaggtttaaaacccgctcctgagttctccgcttggcttgaacaacaagggatttttaaacagcaaaactctcaaatttgttgggcagaccatatgcctgaccaattctctcgtctgctcatgaat

SEQ ID NO: 8470 - DNA, 849 bp, Acinetobacter baumannii
atggctgtatatactcaaaagctgcaactggtttgcgattatattcaaagacatttagatgaagacctagatgtcgatcggttgagccagattgcggccttatctaagtttcattttcatcgtatttttgccattcacgttggtttaaatgtgatgaagtttatccaactttctcgtttaaagcgggcctcttttcaattggcttttgaacccgatctcaaaattattgagattgccttgcaagcagggtttgacagtcccgaggcatttactcgtgcatttaagcgttcatttgatcaaactcctcgggcttttagagataaaccagactgggaatcttggcaccagaagtttgtttttacgattccaaaaagtgagctaaaaatgaatgtaaatattgttgagcgacctgctgaaaagattgcctatctatcacatttaggaagtcccgataaagttttggaaactgctgcgcagtttattgcttggcgtaaagaaactggcttatcgcctgtaactaagtctaaaacttatggtattccttttgctgaccccgatcagacaccagctgacgagtttcggtttgatatagcaggttcaattgaaaaggcggtacctgaaaatagttacggcgtacaaacaggtgaaattcctgcggggcgttatgcaaccgtaagacattttggtagccatgaccagattaaagatagcgtctattacatctttagaaactggttacctgagcaaccagaagaagcaggggattatccggttttctttcactatcacaactttgtgcatgaagtgaacgagtgcgaccttattaccgacatttacttacttttaaag

SEQ ID NO: 8471 - DNA, 1173 bp, Acinetobacter baumannii
atgcgcaatggtgaacttaaagagggtgaagctgttttacgcgccaaaattgatatggcaagcccgaatgtacatatgcgtgacccaattttgtatcgtgttttacattcagagcatcaccaaacaggcgataagtggaaaatctacccaatgtatgactatgctcatccattgtctgatgcaatcgaaggaatcacacattcactttgtacattagagttccaagaccaccgtccgttttatgactggattgttgaaaaagttaagtctaaagctgtgccgcaccagtatgaatcttctcgcttaaacgtagattacaccattacgtctaaacgtaaattacgtaaattggttgaaggcggttatgtgaatggatgggatgatcctcgtatgccaacggttgtgggtatgcgtcgccgtggtttcacaccagaaggcctacgtgatttctgtaaacgtgtaggtgtgtctaaaactgacggtattgtagatgtcgcaatgcttgagttctgtattcgtcaatctttagagaatacggcagcgcgcggtatggcagtgttaaatccattaaaagtaacacttacgaacttatcggaagatttagaccttacccatgctcgtcatcctaatgtcgatatgggtgagcgcgtgattccattaactaaagaaatctatattgaccgtaaagatttcgaagaagtaccgccaaaaggctttaaacgtttaattcctgatggtgaagttcgtttacgccatgcatatgtgattaagtgtgatgaagtcattaaagatgcaaacggtgaagtcgttgagctgaagtgttcgatcgatccggatactttaggtaaaaatcctgaaggccgcaaagtaaaaggcgtaattcactgggtatctgcaactaaaggtattcctgctgaagtacgtatttatgatcgattgtttacagaagctgaccctgaaactggtgatgatttcttagcaaacttaaatccagattccttgaaagtggttcaagctgtgatcgaacctgctttagctcaagcgaagccagaagatcgcttccagtttgaacgcgaaggttatttcgttgctgatcaatacgatcatactcctgagaagcctgtgtttaaccgtgttcttgacttaaaagatagcttcaagcctgagaaaaag

SEQ ID NO: 8472 - DNA, 684 bp, Acinetobacter baumannii
atgtcggatattattttgcatcaatgggaaatttctccattttgccaaaaagttgcaagagctttgaaatttaagggaatcccatacgaaacgattaattacaacggcattcttggagcgaaagttcctttgctcagtaaagtgggcaaagtacctgttattgaccataaagggcagcgtatacaagacagtacccgtatcgctcgctacctagacgaaacttttccggatacacctcgactttatcccgaagacgcaaatcaaaaagcacttgcagaactttgggaagactgggcagatgaatcactctatttttatgaagtatatttaagagtaaatgattcggaagctttagaagaagcaattcgtattagcagtattggccgtcctgcatatgaaaaacctatggtgaagggttttattttagctgaactaaaaacacagcttttctttcaaggcttgggcagaatgaaggctgaaaatgttgaagaagaatttatacgacacctcgaccgtgttgagcaggttttatcacaaagtgaatggttagtgggtgagaatcaaacgattgcagacatagctgtagttgctcaacttggtgaagtcattcgtacaagtaagaagtttggtaaggaaatcttggatcgtccatttatggcagaatggtataaaaaacaaacaggt

SEQ ID NO: 8473 - DNA, 1227 bp, Acinetobacter baumannii
atggtgaggctcacctgtaataacaaacaatggatttatggaaaaaggaatcactccatggcttttaaaaatattgcagatcaaacaaacggtttttatattccttgcgtatcactctttggaccaggatgtgccaaagaaattggaacaaaggcgcagaacctcggcgcaaaaaaagcattaattgtgaccgatgaagggctatttaaatttggcgttgcagatcttatcgcaagctatttaaccgaagcaggcgtagcgagccatattttcccgggcgcggaacctaacccaaccgatattaatgtccacaacggtgtgaatgcctataacgaaaatggctgtgactttattgtgtcgttaggcggtggctcatctcatgactgtgcaaaagggattggcttagtaactgcgggtggtggtcatattcgtgactacgaaggcatcgataaaagtaaagtcccaatgacgccattgattgcagtgaatacaacggctggtacggcatctgaaatgactcgtttctgtattattaccaataccgatactcacgtaaaaatggctatcgtggactggcgttgtacccctctcattgcgatcgatgacccgaaacttatgattgcaaaaccggctggtttaaccgctgcaacaggtatggatgcattaacccatgcagttgaagcatatgtatctacggcggcaaacccaattaccgatgcttgtgctgaaaaagccatcaccatgattagtcaatggttacaacctgctgtcgcaaatggcgaaaacatcgaagcgcgtgatgcgatgagctatgcgcagtacttggctgggatggcatttaacaatgcatctttaggttatgttcatgcaatggcacaccagttgggcgggttctacaacctacctcatggtgtatgtaacgcaatcttgctaccacatgtatgtgaatttaacttaattgcttgtccagatcgttatgcaaaaatcgcagaattaatgggtgtaaatacgcacggtctcaccgtaacagaagctgcgtatgctgcaattgatgccattcgtaaactgtcttcttcaattggtatcccatctggcttaacagaacttggcgtaaaaaccgaagaccttgcggtgatggccgaaaacgctcaaaaagacgcatgtatgctcaccaacccacgtaaagcaaaccatgcacaagttgtggagattttcaaagcagcactt

SEQ ID NO: 8474 - DNA, 1509 bp, Acinetobacter baumannii
atgcgctatatcgatccaaatcaaccaggttcaaaagttcaatttaaatcacaatatgaaaattttattggcggtgaatgggttgcacctctaaagggtgaatattttgataatgtgtcaccagtggatggaaaagctttcacacgcattccacgctctagtgctgaagatattgaacttgctttagatgcagcacacaaagcgaaagcttcatggaataaatcttcaccgactacacgttctaatatacttttaaaaattgctgatcgtttagaagcaaatcttgaaatgcttgcggttgcagaaacttgggacaacggtaaagcagttcgtgaaactttagcagctgaccttccacttgcaatcgaccatttccgttatttcgcaggatgtattcgtgctcaagaaggcggcatctctgaaattgatgaagataccattgcctaccatttccatgaaccactaggtgtggttggtcaaatcattccatggaacttcccgattttaatggctgcatggaagctcgctcccgctttggcggctggtaactgtgtggtgattaagccagctgagcaaactccggtaggtattttgttggttgccgaactcatccaagatatcttaccgccgggcgtacttaatattgtgaatggtttcggtgcagaagttggccgtccgttagcgacaaacccacgtattgcaaaaattgcgttcacaggttcaactcaaactgggcaaatggtgatgcaatatgcgaccgaaaatattattccagtcacgctagagcttggcggcaagtcaccgaaccttttctttgaagacatcatggataaagaagatgacttcttagaaaaaacgctggaaggttttgccatgtttgccttaaaccaaggtgaagtatgtacttgcccttctcgtgctttagtacaagaaagtattgctgatcaattcttagagttggccgtcgaacgtgtaaaacgtattaaaactggtcatcctctcgatactgaaaccatgattggtgctcaagcatctttgcaacaacaagagaaaatcttacgttgtattaatacgggccgagaagaaggtgcagaactcttacttggtggtagtggccgtaaagaagtaggtgatggtttctatgttgatccgactatttttaaaggccacaatagcatgcaagttttccaagaagaaatttttggacctgtactggctgtgacaacatttaaagactttgacgatgcaatcaaaattgccaacgacaccatgtatggtttaggtgcaggtgtttggtcacgttcagcacatatttcttaccgtgctggtcgtgctattgaggcgggtcgtgtctggacaaactgctataacatctaccctgctcatgctgcatttggtggttacaagaagtctggtattggtcgtgaaaaccataagatgatgctggatcactatcaacaaaccaaaaacttgttggtgagttattcaaccaaaccaatgggcttcttc

SEQ ID NO: 8475 - DNA, 653 bp, Acinetobacter baumannii
atggtgaaacagcgtactctcaatcgtgtggtaaaagcgagtggaataggtcttcatagcggtcaaaaagtgatgatcaatttcattccacataccgtggatggaggtattgtatttcgccgtatcgatttggatccacctgtcgatattcctgctaatgcattgctgattcaagaagcatttatgtgttcaaatcttgtcactggcgatattaaagtcgggacaatcgaacatgtgatgagtgcgattgccggtttaggaatcgataacttaattgtggaagtgtccgcatccgaagttccaattatggatggtagtgctggtccatttatttatttgctcatgcaaggtggcttgcgtgaacaagatgctcctaagaaatttataaaaatattaaagccagttgaggctttaattgatgataaaaaagcaatattcagcccgcataatggctttcagcttaactttacgattgattttgatcatcctgcatttgccaaagagtatcagtctgcaactatcgatttttctactgaaacgtttgtgtatgaagtcagtgaggcacgaacttttggttttatgaaagacttggattatctcaaagcaaataatttagctttaggagcagtctagataatgcattggtggtaatg

SEQ ID NO: 8476 - DNA, 1173 bp, Acinetobacter baumannii
atggcctcatttgaatttatagaagatgaactaaacgatggcaacggtcaagcccgtttcactgtatttggtgtaggtggcggtggcggtaatgccgttcagcacatggtacagtctgatattcagggtgttaaattcgtttgtgctaatacagataaacaagcacttgactgtatgaatgcccctttcaaaattcagttaggtgagcaaagtacacgcggtctaggtgcaggtgctaaccctgaagtaggccaggtagcagcagaagaaagccgtgaaattattcgtcagcaccttgaagggactgacatggtgtttgtaaccgctggtatgggtggtggtacaggtactggtgcagctccggttgttgccgaagttgctaaagaaatggggattttgactgttggtgttgtaacaactccatttaactttgaaggccgtcgtcgtcaaaagtctgctgagcgtggtattgaagcgctggaagctcatgttgattcattgattattattcctaaccaacgtttattaagcgtttatggtgatatttcaatgaaagatgcctataaaaaggcagatgacgtattgttaaacgctgtacgcagtatttttgaccttgtagttaaccgtggtcatattaaccttgacttcgcggacttgaaaactgcaatgagtactcgtggttacgcaatgatgggtgctggtttgggccgtggtgaagaccgtgcgcgtcaagcagctgaacaagctatccgtagcccattgcttgataatgtgaatattattaatgcgaaaggcgtgttaattaacattactggtggtgatgacatcacattacgtgaaacagaaatcattactgacgttgttaaccagattgttgacctcgatgaaggtgaaatcttctacggtacagtatttgacccagatgcacgtgatgaattacgcgtaactgtgattgcaactggtttaactcgtaatgcagctgatgcagagccaagaaagcgtaatacagttagtcatacatcaactcaatctgctcaatctgtagatgaagatgatgttcctgcaattaataaacgccaaaatgctgaaaatgacgtgaataatgcgccaagttcaactccgcgttcttcgccaatgagtatccaagattacttgaaaaatcagcaacgtaag

SEQ ID NO: 8477 - DNA, 1260 bp, Acinetobacter baumannii
atgagtgaagctgttccctcagttgttgcgattgacattgggacgcataaagtttcagttttgattggaaaaattcatgcgccggataacattcaggttatcggtatggcaactgctcgcaatcgaggcatgaacaaaggaaaaattgtaagtctcgataaagtcattgctgcgattaaaaacgctgttgctgaagcggaaaatatggccgaatgtcgcattcatagtgcgtgggtatctattccgagtaccgagctacaaagtttctatgcttctggacgcacacctgttgctaacccggcacatgtgattacaaccaatgaagttgtacgtgcattagagttggcaaaagcaagccatgtgacttctgactattatctagcgagtgcagtcccattaggatttgaattaggcgactcatctgaatgggttcaaaacccaatcaatatgaccgctcacagcatgactggtcattatcagcttatgatgatgccgattgccactatgcaaaaccttgatcgtgcgatgaaaggcgcgaacattggagttgagaaaatggtggtttcttgcttggctacggctgaggcaagtttgcttaaagatgaaaaagaatatggtgtctgtcttgtcgatattggtgcaggtattaccaatctggcagtttatttagatggccgtttggctttagcacgcaccttacagcgtggtggtgagcatgtaacacgtgatattgctgccgtgttacaaacaaccactgaagaagctgaacgtattaagattctgcatggctgcgttgatctaagtgctgttaagcctgaccatatgattcaagtacagggtattgatggtccgcaaacgattagccgaattgagttggcggaaattattattgctcgttatgaagagattttcagccagattcgcgaagaactcgaacaaagcggtgcaatccatggtctatatcatggtgttgtattgactggtgatgcttgccagattgaaggtatggtaagtttggcgcgtcgtatgttaggtgtgtctgcccatctaggtaatcctccattacaggtgtatgctgatgatcagcatcaagctgcattacgccgctcaatgtatgcaacagcagctggtttacttatgtttagccaaagtgaattacaagaagctgttgaggagcctgaagagggaaatgaccgttcggtatgggaacgaatggtgaatggctggaatgcttttaatagcaaacttaaagccattttt

SEQ ID NO: 8478 - DNA, 852 bp, Acinetobacter baumannii
atggcacaacttccggcatccatgcgccgtaaacgtgcggcaattacctccattcatgaaaaaccgcctacgcgcaagcaaaaacttgccaatgctggcggatgggtgttgctggttattgcctttttagtcttggcggtcggaatttacggactatataaagttattactgatgcaactgttgcaaaacttgaagttgtaggttcaacaactccagttgagactcagcaagtgatgcgatatgtgcagccgattgtaaaagataactactttacatctgatttagagcagattcgtgataaagcattagaaatttcatgggtagatcgagtcgtcgtatctcgtgcttggcccaatggtattcgcgttcgtgttatgcctcgacatgctatcgcccgttggggaacaggtcgcttattgagcgatggtggcgatgtatttagtgaagcagagccgagacttcatcctgagcttccgttactacacggtccggtaagtcagtctaaaatgatgatgcgacgctataatgaaattaatcagttattccatcctgttaatttgcgtttaaaagagttatatctaacagagcgaatgacttggtttatgcagtttgactctggtttacgaattattgttgaccaagatcaaacgatgaataaattgcaacgtttaagtcatttggcacaatctgacctaaaacctgtgtggccgaaaatctcagccattgatttgcgatatcgtaatggattatctattcaatggaagaatgcaaccccacctaaaatcgtgaatggtcagtttgttgtaacgagtgatgacacaagcattgcaggtggtacaaaagcaaagcca

SEQ ID NO: 8479 - DNA, 648 bp, Acinetobacter baumannii
atgacaacgcctgtgtcatttcacccgcaagcatttatcgaactcgcattatcacgcggtgtgcttaaatttggtgagtttactttaaaatctggacgcgtgagtccttatttttttaatgcaggcctactcaacgatggtgaagctttatctcttttagcacaaggctatgccgataaattaacacaatgtgaaaatgttgatgtgatttttggaccagcttacaaaggtattccatttgtagctgcgactgctgttgctttatcgcaaacacataacaagagcgtgccatggggctttaaccgtaaagaagcaaaagatcatggtgaaggcggtgttttagtcggtgctgcggttgaaggtaaaaaagtctggatcattgatgacgtgattaccgcaggcacagcgattcgcgaagtggtaacgattttgaaaaatgccggtgcaactattgcgggtgtgttggttgcgctagatcgtcaagaacgtgggcaaggtgaactttctgcaattcaagaagttcaaaaagaattagaaatacctgtacatgctcttattaccatgaaggacttaatggattatttagaagcaaaaggcgaaaaagaagcgctagcaaacatgcaagcttatcgcgagaaatatggtatc

SEQ ID NO: 8480 - DNA, 924 bp, Acinetobacter baumannii
gtgtcaaatgctacaaaattcggcaaagttgccgtgttacttggtgggaaatcggctgagcgtgctgtgtctttagatagtggtcaggcagttttggacgctttgttacgttcaggtgttcaggctgaggcatttgatccgcaagaccgtagcgtgactgaacttgtaaactatgaccgtgcatttattgtattgcatggtcgtggtggtgaagacggtcaaatccaaggtgtacttgagtggttgaacatcccttatacaggaacgggtgtacaaggttctgccattggtatggataaagtcaaaaccaagcaaatctggcaaggtagtgatttaccaaccgcaccgtatcgcattattactaaagaaactgacttggattcagtgattgctgaattggggttgcctgtcattatcaagcctgtacatgaaggttcaagtgtaggcatgagtaaagttgagaaagctgaagattttgcggcagcaattgaaaaggcaactcagcatgatgctgtagttatggcagaaaaatggattacaggacgcgaatttacgatttcattcttaaatggtcagcctttaccagttattcgtttgcagccaccagcagatgttgctttctatgactacgaagcaaaatatcaacgtaatgatgttgagtatggcattccttgtggtcttagcgaaactgaagagaaaaaactacaagctctatgtttacgcgctttccaggccgtaggtgcagaaggctggggacgtattgatgcaatgcaggatgagcaaggtaacttctggcttttagaagtaaatactgtgccaggcatgaccagtcattcgcttgtaccaaaggctgctaaagcagtaggttatagctttgatgaattgtgtgttgcaattcttgagcaaactttggaaggtacggct

SEQ ID NO: 8481 - DNA, 1446 bp, Acinetobacter baumannii
atgtctccaacaacagctgcgaaccaagcaaaaaaactgattaaagtgcctgaaatgcgccgtatcaaacacattcattttgtgggaattggcggtgcaggtatgtgtggtattgctgaggtgttagctaaccaaggatataaaatttccggttcagatattaaggcatcaaaaaccacacaacaattagaagaaaatggcattaaggtctatatcggacacgaagcagaaaatattaaaaatgcaaatgtgcttgtcgtgtcaacagcaattgacccggaaaatccggaagttaaagctgccattgaacaacgtattccgattgtacgtcgtgcagaaatgctcggtgaacttatgcgttaccgtcatggtattgctgtggcaggtacacatggtaaaactacaaccacaagtcttttgacgacaatgttggcggaagaaaacctcgacccaacttatgtgatcggtggtttacttaacagtacaggtgtaaatgcagcgcttggtgaaagccgctttattgttgctgaagctgacgaatcggacgcatctttcctttatttacagccaatggcagcgattgtaaccaatatcgatgctgaccatatggatacctatgaaggcagtttcgataaattaaaagataccttcgtacagttccttcataacttaccattctacggcttggctgtggtttgtggcgatgatgcgaacatccgcgagattttgccacgtgtaggccgtccggttattacttatggttttaatgaagataatgacatccgtgcgattgatgtagagcaagatggtatgcgttcgcactttacggtattacgtaaaggacgtgagccgttacgtctaaccattaatcaaccgggtttacataacgttttaaatgctttggctgcaattggtgttgcaactgatgaaggcgtttcagatgaagcaattagccgtgcattaaaaggttttagtggtgttggacgtcgcttccaagtacaaggtgaatttgaacttggtgaagggaatgtaaaattagtcgatgactatggacaccatcctaaagaagtggaagctacgattaaagctgctcgtcagagccatcctgatcgtcgtttagttatgcttttccaaccacaccgttactctcgtacacgtgattgttttgatgactttattgaagttttatctcaagtcgaccaattattattactagaagtttatccggctggggaaaaaccaattgttggcgcagatagccgtactttggcgcgtagtattcgcttgcgtggtcaggttgaaccgattttgattgatccggttgaaggtaatttgcaaaacatcatgcaaaatgtgttacaaccaaatgacttgttattaacgcaaggtgcaggtaacgtgggagcaatttcagtagaacttgcacagcaccatttgtatgtgaaa

SEQ ID NO: 8482 - DNA, 1095 bp, Acinetobacter baumannii
gtgaccgattcacagcaaagcaaacctaaacatgtcatgatgatggctgccggtactggtggacatgtttttccagccctcgccgtagccaaacaacttcaacaacaaggttgtcaagtttcatggttagccacgccaacaggtatggaaaatcgtttattaaaagatcaaaatattccaatttatcaaattgatattcaaggtgtgcgtggaaacggagtgatccgtaaacttgctgcaccttttaaaattttaaaagcaacttttagtgcaatgcgctatatgaaacagcttaaagtggatgcagttgcaggttttgggggatatgtggcaggtccgggtgggctagcagcgcgtttattaggtattcctgttctcatccatgagcaaaatgcggttgcaggatttaccaatgcacagttatcccgtgttgctaaagtggtatgtgaagcgtttccaaatacatttcctgctagcgaaaaagtagtaacaaccggcaatccggtacgtcgtgaaatcactgatatcttaagtccaaagtggcgctatgatgaacgcgagcaagcgggtaagctgttaaatattttaattgtgggcggatctttaggtgcaaaagcactgaatgaacgcttacctccggcattaaaacaacttgaagttccactgaatattttccatcaatgtggtcagcaacaggttgaagcaactcaagctttgtacgcagacgcaccagcaaatttgaccgtacaggttttgccgtttattgaagatatggcgaaagcttatagcgaagcagacctgattatttgccgtgctggtgctttaactgtgacagaagtagcaacagctggtgttgcagcagtttttgtaccgcttcctattgcggtggatgaccaccaaactgcaaatgccaaatttctggccgatgtcggtgctgcaaaaatttgccagcaatcgactatgacaccagaagttttaaatcaattgtttactacgctgatgaatcgccaattacttacagaaatggcagtgaaagcgcgtcaacatgcccaaccaaatgcaactcagcatgtggttgatcttatccaaaaaatg

SEQ ID NO: 8483 - DNA, 765 bp, Acinetobacter baumannii
ttggttttatttgaaagaaaaattgtttatagcgcttttatacctgcaactattattctagcggtatgtacatatttaagtatgacgggggttatttcatatgctcccctatttaattttacagcgatacggcatgcccaaaccaatccattttggctaggaagtatgctgttttttattatgcccattttagtggcgtgttttattttatttgaaatattgctgacccaatggcgtcaacgagaaacctatattcaacgtttaagccaaatcgacccgttaactaatgtcttaaatagacgaagcttaaacacccatcttgaagcacttcatgaacagcaatttgattatgccgtgatacttcttgatatcgatcattttaaaaaaattaatgatatatacggacatcaccaaggtgatcaggttttgattgaaattgctcaatgtctttctgaaaatttacgtaatgaagacatcattggtcgatttggtggagaagaatttattttattacttcctcataccgatattattcaagcagaaaaaattgccgaacgttgccggcaagctttacaagaattgactatcttcaataatcaaaatatccaaattcatgtaagtgccagctttggcatcagcagttccgcatttgcaaatgacccctatcttgtgattagacaagccgatcaagcgctctatgcggtaaaggcctctgggcgtaatcaagtacgcacttttcaccaactacctcagatcaaatcaatt

SEQ ID NO: 8484 - DNA, 1395 bp, Acinetobacter baumannii
atgaataatgatagaacaaaaaaattaggcgaaggactttcaaatcgccatatcacaatgattagtattggcggtgttattggtgctggtttatttgtcggttcatcttctgcaattgccaaagcaggcccagcggtgattcttgcgtacctgattaccagcattatggtttttctagtgatgcgcatgttaggtgaaatggccgttttagagccggacactggttcattttctacctatgcccgtaaagcaattggcccgtgggcaggctttaccattggctggttgtattggtggttttgggtacttgcgattccggtagaagccattgcaggtgctgaaattttacattcgtggtttccgagcgtttcagtttctatctatgcgttttgctttattgtgttcttaagcttagccaacttttttagtaccaaaagttttggtgagtttgagttctggttttctttggtcaaagtggttgccattattggtttcattattattggtattttggcaatttcaggtatttggcctttagctaaaaatgtcagtggtgttgctaatttatacaacaacgctggttttatgccgcacgggatgggaggcattttagctgccattttaattacggcattttcattctttggtgtggaaattgtctcgattgccgcagcagagtcatctaaccctaaacagaaaattagacgtgccaccaatttggtgttgtaccgtattattctttttttcgtggtctcaatgtttattgcggtttcacttgtcgattggcgttcaccggacttacaaaagtacgggacattccaatacgttttaatgagcttaaacgtaccgggcactaaacttattattgatacggtcgtgtttatcgccgtagcgagctgtatgaatgcggcaatttatacgtcttctcgtatgttatttcgtttgggaacacgcaatgaagcaccgcaggcagtcactaaagtgaactatgctggtgtaccagcaattgcggtgttttcctcaacttttattggtttagtgtgctgtgtcataaactatgtatttcctggaaaagtctttggcttattgctctcaagcacagggtcaattgctttactcgtgtacttggttattgcgttttcacaactacgtttaagacataagctagaagcagttggagcggaaattccatttaaaatgtggttattcccatggctgacttggtttgtgattatcattattttaagtgtattggcttatatgttcttctcaccagcctatagttatgaaacgactctatctttaggtgtaaccttaggtgtggtggtttgcggtttgtttgtgacccgaaagcgtaaagcaacccgttcggttgcgatcaatcagagtaattta

SEQ ID NO: 8485 - DNA, 279 bp, Acinetobacter baumannii
gtgattcaggtgatgcaggctttagaagagcgtttagaagatatccgtacaccaatggacgtttcggttattggctgtaaggtaaatggcccaggtgaagcaaaagaagcagatatcggggtcgttggggctgcgcctcgttcattggtttatcgtaatggtgagaaaagccatttaattgataccaatcaattggttgatgaaatcgaaactatggttcgtcaacgtgttcaagagcttgaagaagctaaatctaaagaaattattcgtagttcatca

SEQ ID NO: 8486 - DNA, 651 bp, Acinetobacter baumannii
atgtcggtcgaaaacacctcaattcagggaattaccctttacagccatgctgatgatttccgttcacactggatccgttttttattggcagaaaaacaaattaaatatcaattaatcgtaactgatcacgaagatgaagatctggcaagcttaaatccttataatcaattgccaatgctggttgagcaaaatcttaaattattttcagcacctattattgctgagtatctcgatgaccgatatcgtcagaataaactatatgccgatgcccctatggcacgtgcagagcaacgccaatatatttggcgtcttgaaaatgattggtttaagttggccgatcatatgctcagacatgcagatacgttaaatgtagaacaaaaacaaaaagcacaaaaagaattgcgtgataccttaatatcacttacccctttatttcagcatttcccttattttatgtccgaaaatttttcaattctggactgtatgcttgctccaatttttgtgaggcttaatagcatgggaattgatttaccaaagcagcagtgtcgacctatatttttgtattgtaaacgtatctttaaccgcccttcttttgttaaatcaatgacgccccaagagaaaacccgttacaatgaactattaaatatggaa

SEQ ID NO: 8487 - DNA, 384 bp, Acinetobacter baumannii
atggctactaattatggtacaggtcgccgtaagaccgcaactgcacgtgttttcttgtcagctggtacaggtaaactcgttattaacaaccgtactttagagcaatatttcggtcgtgaaactgctcgtatggttgttcgtcaacctttagagcttttagaagctactgaaaaatatgacctttacatcactgttaaaggtggtggtatcggtggtcaagctggtgcgatccgtcacggtattactcgtgcacttatcgctgctgacgaaactttaaaacctgttcttcgtcaagctggtttcgttactcgtgatgctcgtgaagttgaacgtaagaaacttggtttacgtaaagctcgtaaacgtcctcaattctctaaacgt

SEQ ID NO: 8488 - DNA, 426 bp, Acinetobacter baumannii
atgaaaactctcagcgcaaagcctgctgaagtacaacacgattggttcgttgttgatgctacaggtaaaactcttggtcgtttagcgactgaaattgcacgtcgtttacgcggtaagcacaaaacttcttatactcctcacgttgacactggtgactacatcatcgttatcaatgctgaacaagttcaagtgactggtaacaaagcgcttgacaagaaatactatcgccacactgaattcccaggcggtttaaaagaaactaatttcgaaaaattagttgctcacaaacctgaagaaatctttgaacgtgctgttaaaggcatgttgccaaaaggtcctcttggttatgcaatgatcaagaagatgaaagtgtacgctggtagcgagcatccacacgctgctcaacagccacaagttttggacatc

SEQ ID NO: 8489 - DNA, 810 bp, Acinetobacter baumannii
atgtatcaaattaatgccctaaacccgaaagatgaagggcataaagctcgtaaacgttttggtcaaaacttcttacatgatcaacgagtcattgccaaaattgtacgctcagtcaatccgcgtacgggtgataatatcgtcgaaattggtccaggtttagctgctttaacttctcctctaattggagaatgtgatgcattaactgtagttgaattagaccgtgatttagctgctggcttacctgaacgcgtgccacatccagaacgtttaactatcgtagaagctgatgcattaaaatatgattttagtcagcttgtaaaagatgggcgtccattacgcgttgtcggcaatttgccttataacatttctacaccattactttttcatctcttggaatttggtagccaagttaaagacatgcacttcatgttgcaaaaagaagtggtagaacgtattactgctgaaccgaatacaaaagaatatggccgtttatcagtcatgatccaatattattgtcagcctacctttttatttgaagttccagcaggcgcatttaacccgccaccaaaagtgacaagtgcagtatttcgcttggttccttacgaacaaaaaccaattacggcgaaagatgaaaaagctttagctcgcttggttgcccacgtctttactcagcgccgtaaaacgctaagaaacagtcttaaaggcatgttggcagaggatggtttcgagaaagcaggagtcgacccaatggctcgtccagaaacgttaactcttgcagagtttgtggctttggcagatcaaatggtggca

SEQ ID NO: 8490 - DNA, 1407 bp, Acinetobacter baumannii
atgaaacccgttattgcgctcattggtcgtccgaatgtcggaaaatcaacgttatttaaccagattaccaagagtcgtgatgcacttgtagccgacttcgcgggtttgactcgtgaccgtaaatatggtgatgcgacttatcaaaataagtctttcattgttgttgatactggcggtattggtgaaagtgaaggcggtatcgataactacatggccgagcagtcgaaaacagccatcaatgaagcagatattattatttttgtagttgatgcgcgtgccggattgttagcttccgatgagcaaattgcccgtgaattacgtactttaggcaagaaaatttatcttgttgccaataaggttgatggtgttcatgctgaagctgctttggttgagttctacaagcttggtatgggtgaaccattacaagttgcagcgagccatggccgtggcgtacaacaaatgcttgaggatgtacttcaagatattccagaagatgaaaatcctgaagagcatgataaagataccggattgcgtctagcaattattggtcgtccgaacgtgggtaaatcaacgttagtaaaccgcttacttggtgaagaccgtgtggtagcgtttgaccaaccgggtacaactcgtgactctatttatattccgttcgagcgtgaaggtcgtaaatacactttaattgatacagcaggtgtacgccgtaaaggtaaagttgatgaaatgattgagaaattctcaattgtgaagactttacaagcgatgaaagacgcacatgtggtggtggttgtagttgacgcccgtgaaggtattgttgagcaagacttacatttaattggctatgcgctggaagctgggcgtgccatggtcattgcgatcaataaatgggacaacatgagtgaatacgaccgcaagcagtgtaagcttgatgttgagcgccgttttgactttattccttgggctcgaattcaccttatttctgctctacatggtactggggtgggtgagttatatccatcaattcaccgtgcttatgagtctgcaaacttaaaggtatctcctgcgaaattgacacaaattttgaatgatgcaactgatcagcatcagccgccgacagttcaaggtcgtcgtattaaaatgcgttatgcgcacatgggtggacaaaatccaccgactatcgtgattcacggtaacaaggtggataagactcctgcagattaccgccgttatttagagaatgtgttccgtaaggtttataagcttgaaggtacaccagttaaaattgaatttaagacttctgaaaacccgtttgaaggtcgtaagagtcaggtcgatgaacgtacagctgcacgtcgtcgtcgttatattcagaaattcaaaaaagcagaaaagaaatttaaacgt

SEQ ID NO: 8491 - DNA, 1143 bp, Acinetobacter baumannii
atgaatcagaaattcaaactgcctttggcaattgcaatcgcatcggctgtattggtcggatgttctagcaacaaagtaaaagaagcaaaaccaaatccactaccgaaattgactgagtcaaataagagtttggtgcccgtgttttcacgcagtgtttcttctacgaataaggcagatccattacgtttacaacttgatgctagcgaaggtgttgtttttacccttgatcctaaaggtgaagttgctgcataccgtggtaaacaacgtctttgggagaaaaaagttagtaaattgggcttaagctctggtgttgaagcagctgaaggtattgttgttgttggtaacagtaaaggtcagttatttgctttagatcaggcaacgggtgaacaaaaatggactgcacaattatccggtgctttattaagtccttctttagttcagtctggccgcgtgattacaattgcaaatgacggtactgtatttgcacatgatgtatcatcaggacaacaagtttgggcatataaattgccaaatgttcagttcagtttacgtggtcaaccatcgccagtgagtcttgaccctcgcacggttttaattgcttctgcaaatgcatatgtttatgcaattgatacgattagtggtattccgcgcttccaacgccgtgttgcagtaagtgaagggcgttcagatattcagcgtttaattgacattgatggtgatccggttgttgcgggtcaactcatggtaacgactagtttccaagggcaagtaactgttactgatcttgcttctcaacgtgtggtttggagtgaagattcaagtagcaccaagcgtccagaagtttatgataataaagtgtttgtttcgtcaactgacggcaagcttactgcttatgacttaacaacaggcgaacagctttggcaaaatgatagtctcttaaatcgtcatttaagtaatcctgtcgtgttgggatcggaccttattgttggtgatttggatggtgttttacacttaatcgacccgacaacaggtaagttgattggtcgttctaaaacaagtggtgaggtcaatacattacgtgtgattgagaatcagctctatgtttcgacccgaaaaggcgatttaagtatttggcagaatcgt

SEQ ID NO: 8492 - DNA, 1290 bp, Acinetobacter baumannii
atgagttcaattgtcgcaatcaaaggttttaatgacgttttaccaacgcaaacagcagcgtggagacgtctcgagcagcatttagcatctttaatggatgcttatggttaccaacaaattcgtttgccgatcgttgaacaaacgggactgtttaaacgtgctattggtgatgcaactgatatcgtagaaaaagaaatgtacacattcttcgataaaggaaacccacctgagtcactgactttacgtccggaaggaacagcgggttgtgtccgtgcgttggttgaacataatttgttgcgtggtgctacgccacgtgtgtggtatatggggcctatgttccgttatgaaaaaccacaaaaaggccgttaccgccaattccaccagtttggcgtggaaacttttggtgtagcgactcctgatattgaagctgaagttatcttaatgacagctcggttatggaagcgtatgggcgttgcacatatggttcaacttgagctgaatactttaggtgaaaaagaagagcgtacggaatatcgtaatgctttggttgcgttcttgaatgaacataaagatgctttggatgaagattcacagcgccgtttaacaacaaacccattacgtattttagattctaaaattgaatcgactcagaaaattctggaaaatgcgccgaagttatatgacttcttaaaagaagacagtttaagccacttccaacaattacaagattatttgactgctgcaggcattaaatttgtaattaatcaaaaattggtacgtggtctagattattacaataaaactgtttttgaatggacaacaactgcacttggttcgcaaggtacagtgtgcggaggtggacgttatgatggtctggttggccagttaaaaggaaaagcagatcagtctgtacctgccgttggttttggcatgggaatggagcgtttattgcttctaattgagcaagtcgaacaagctgaaattgtacgtgactgtgaagctttcttggttgcagagcctgcttatcaatctaaagcattagttttggcagaacaattacgtgaccaattagaagctgcgaatagtaacatccgcattaaaactggttcacaaggcagcatgaagagtcagatgaaaaaagctgatcaggctggggctgtttacgccataattttgggtgaacgtgagtgggaagcacagcagcttgctgtaaaagagttggcaacagctgagcaatcacaagttgcattggctgaacttgtaccattcttaattgaaaaatttacaaaa

SEQ ID NO: 8493 - DNA, 690 bp, Acinetobacter baumannii
atgaattacctgcaagatgcgcgacagcacgtattacagcaaatcagaacagcttgtgaacttgctcagcgtgcgcctgaaaccgtgcaacttttagccgtatcgaaaactcatccgagtgaaagattgcgtgaaatgtatgcagcagggcaaagggcattcggcgaaaattatttgcaagaagctttagataaaattgatgctttacaggatttggatattgaatggcatttcattggtcatgttcagcggaataaaactaagcatttggccgagaagtttgattgggttcatggagtagatcgtttaattattgcagaacgcctatctaaccaacgtggtgatgaccaagctgcacttaatatttgtttgcaagtcaatattgatgggcaagagagtaaggatggttgtgcaccggaagacgttgccgagttggttgctcaaatgagtcaactaccgaaaatcaagttacgtggtttaatggtgattccggctcctgacaatacaggtgcttttgcagatgccaaaaaattatttgatgcggtaaaagtccaacatgctcacccagaagactgggatacattgagtatgggaatgtcgagtgatttagaagccgcaattgccgctggttcaacaatggtacgtgtaggcacagctttatttggggctagagactattcgcaaaaaggc

SEQ ID NO: 8494 - DNA, 1062 bp, Acinetobacter baumannii
atggaatatccgccaacctatcctagtgtaataccgaacatcgagattgttatgacttatacgttcaatcgtcctgcatttccagctactcgcatgcgccgtatccgtaaaaatgaccagttgcgtgcgatggtcagcgaaacacagctcactaccaatcacttgatttatccagtatttgtattaccgggacaaaatcaaacccaagatattccaagtatgccaaacattcagcgtttgtcggcagatttattactgaaaaaagctgaaagacttctggaattaggtgtatccaaactggctcttttccctgtaacacctcaagaagataaaagccttaccgcagaagctgcatggcgtgaagatggtttagttcaaaccacctgccgtttgcttaaaaaagaattgccagaaatggtgttaatcaccgatggtgccctcgacccatacacgactcatggtcaagacggcattattgatgaaactggctatgtgctcaatgacgagactgtagaatgcttgattaaacaagcattaagtcacgctgaagctggtgccgaagtgattgcaccaagtgacatgatggatggccgtattggcgcgattcgtcaggctttagaagccaatggtcacatctataccaacatcatggcctactctgcgaaatatgcgtctagcttctatggtccgttccgcgatgctgttggctctgcatccaacctcaaaggtggtaataaatataactaccagatggattttgccaaccgtgccgaagcattacatgaaatcgcgcttgatattcaagaaggcgccgacatggtgattgtaaaaccgggcatgccatatctggatgtggtacgtgaagtgaaagatacctttggtattccgacattcatttaccaagtgagtggcgaatacgcaatgttagctggcgcaattcaaaatggctggttatcagactcagtgattttagaatcgctcatgtgctgccgccgcgctggtgcagacggaatctggacttactttgcagaaaccgctgctgaaaaactcaaggaaatgaac

SEQ ID NO: 8495 - DNA, 1110 bp, Acinetobacter baumannii
gtgttggtaagcctcggtgaaagccgtatattattctacaaaataatgacatattttgatttacttggggaaattatggatattacagagctactcgccttctctgtgaaaaatggcgcgtccgatttacatctttctgctggcatgccaccaatgattcgtgttgacggtgaagttcgtcgtattaacttaccagctctagaacataaagatgtccaccgtcttgtttacgacatcatgaatgataaacagcgccgtgactatgaagaaaaactcgaaactgacttttcttttgaagtacctaatgttgcgcgtttccgtgttaacgcatttaaccaaaaccgtggtgccggtgcagtatttcgtaccattccatctaaagtcctcaccatggaagatctaggtctaggacaaatctttaaagatatttgcgactatcctcgtggcattgtactggtgacaggaccaacaggttcaggtaaatcaactacgcttgcagcgatgctcgattatattaacgaaaaccgctatgaccatattttaacggtggaagatccaatcgaatttgtacaccagtctaagaaatgtctcattaaccagcgtgaagtgcatcgtgacacacacggctttaatgaagcacttcgctcagcactgcgtgaagaccctgatattattttggtcggtgagatgcgtgaccttgaaactattcgcttggcattaaccgctgccgaaacaggtcacttggtgtttggtacactacacaccacgtcggcagcaaaaaccattgaccgtgtgattgacgtattccctgccgaagaaaaagacatggttcgtgccatgctgtcagaatctttacaagcggttatttcacaaaccctgcttaaaaagaatggtggtggccgtgtcgcagcacatgagatcatgattggtattccggctattcgtaacttaattcgtgaaaacaaagtcgcacaaatgtactcagccattcaaactggtgcaaatcatggcatgaccaccctcgaccaaagcttaaaaggcttagtcgctcgcggtgtgattagcccacaaaccgcacgtactgcggcaaaacagcctgaatccttccta

SEQ ID NO: 8496 - DNA, 2037 bp, Acinetobacter baumannii
atgtcatctgccagtcaactgaacaacaagcaagaagaagccatgaaatatactcaaggccctttattggtgcttgctggcgctggttcaggtaaaacatcggtaattacgcgtaaaattgcttatttggtgcaacattgccgtattcctgcgcatcgtattacagcgatgacctttaccaataaagctgcacgtgaaatgaaagagcgtgtcactaagcttttatcacgtgaagaagcaaaaggtttgtccgtttcgaccttccatacttttggtttaaatcttttacgtttagaacttaaaaatttacctttaaaagctaatttttcgattttggatgcagatgactgtaaacgtattttgatggatttgatgcatcgcgataatttatcgggtgcagagagtaaagaactaattgccaaggcaatgaagaaaatttcagattggaaaaacgatctgattttgcctgaacaagcacattcgacgtgtgaaactcctgaagatgtccagtttgcccatctttatcaactttatgaacgtaatttacgtgcttacaatgcagttgactttgatgacctcattgttatgcctacccgcttattgcaagaaaatgcagaagtacgtgacaaatggcaaaaccgtgttcgttacttgctagtggatgagtatcaagataccaacaccgcgcaatatattttggtgaaactactagttggcgtaatggggcagtttactgccgtaggtgatgatgaccagtcgatttatgcatggcgtggggctaaacctgaaaacatggctttgcttaaacaggatttcccaaatctacatattattaaacttgagcaaaattaccgctcgaccagccgtattttgaaagctgcgaactgtgtaattcaaaataacccgcatatttttgataaaaaattgtggagtgataaagggcatggtgaggtcatcagaattattacctgtcgtaatgatgatgatgaagcagaacgtgtagtcaaagacttactgactcacaaacttatgaatggtaagaactggaaagattacgctgtattgtaccgtggtaacttccaggcgcgtgtattggaaacacaacttcgccaaatgcagattccgtacaaactctctggcggtacatcgttcttcgctcgtgcagaaattaaagatgtaatgagttatttacgtcttattattaacccagaagatgacagtgctttcttacgtattattaatacgcctaaacgtgcgattggcccagttactcttgagaagttaggcctatttgcacaagaaaataatttgtctttacttggtgcttcttctgaccagcgcttaagtatggtacttcctaaaaaggcagaaactcaattgcatgagtttgctgactttatctcgacgtttacacgtgagttgttggaagatgatgagcctgtgcctaaagttcgtcaaatgatgaatgaagcgggttatatcgactatattcgtgagcaatccgcaacgcctgctcaagagaaaagtaagctcgataatatcgagaacttgtttagcagtattcaaaacttaattaatcgtgctgaagatgttgatgaaaagaacattgaaagtgtgattcgaaaactagtcttgcttgatatgttagagcaacagcaagaggaagaagacactgataaagtgaacttacttactctacatgccgctaaaggtttggaattcccatatgtctatattatgggtcttgaagaagagctgttgccgcataagaactcaattgctgctgaaactattgaagaagaacgccgtcttatgtacgtgggaattacccgtgcacgtcaaggcttaactttgactttggcagagcagcgtaaaaatggtggtcaaatgaaacagatgaccccaagccgtttcctcgatgagcttccgcaagatgagctcgaatggttagggcgtaaaaagaaaattgcagcaaatgttgatcctaaagaacaggctcaacaatatttggcaaatttaaaagctttattaaagcgt

SEQ ID NO: 8497 - DNA, 887 bp, Acinetobacter baumannii
aatgtattaatcacaggtgccagtggctttattggaacgcatttaattaggttcctgctacaaaaaaattataacgtgattgctgtgacacggcaggctggaaagaaatctgaccatcctgccttgcagtgggtacaaaagttcgaagatatttcgatccgtcaaattgattatgtggtgaatttggccggtgcaaatattggtgagaaacgctggaccgagtcacgtaaaaaacactcattaaaagccgtgtaaatacgacccgaaaattgtatgtatggctcaagcaatctcaaatttttccggaagtaattgtgtctggttctgcaattggttattacggaatagatgctcaagaaaaatgggcagaggtgtgcactgaacaaagttcgccacagcctatttttatgtctcagctttgccaagagtgggaactcgcagcgttagcagatcctcagcaaaatactaaaattattcgtttaggcgttgtgtttgggcagggtggcggcatcttgcctaaaatgttgcttcctattcgactcaatttagtcggtcaaattggtcatggccgtcaacctgtggtttgggtacatattgaagacgtattaaacgcaattgagtttatatttcagcatcctcaatcagctcaaattcataatgtggtggcgccagaaaatgtgacccaaaaggtatttgttgaacaagctgccaaagttttgaataagaaaccaatgttgtcggcgcctagtacagtttttcgctgtttgttaggagagcagtcgcaattgatcttaaatgggcaatacgtcaaacccgcagccttacaagcagaaggatttgagtttgcttatcctcaattaaaaatggctttagaaaatatactcgcc

SEQ ID NO: 8498 - DNA, 1254 bp, Acinetobacter baumannii
atgtccgtacattttctacatacttctgactggcatttggggcagtttttttataatcactcacgacactacgaacaccaacaatttttaagctggttgctcactcaaattcaagaaaaacaaccacatgccctgcttattgctggcgatatttttgatgtcattaacccgggttcacaagcacaaaaacaactctaccaatttttagcagatgcccatcgtattgcaccgcacatgcaaacactcatgattgcgggtaaccatgactcaggctaccgtattgaacaggttgaaccgcttttagaaaaatacaatgcaaaaaccgtaggtgtggttcgctggaatgaagataaaaccctagacctcgatcgactgcttttacctatttataatcaaaatcaagatattgtggcgtggtgccttgccctgccttttttacgttcggctgaaattactggctttaacgaacataccaccaatagcaaaaatgcgattgcctatttgcaccagcaactcattgccgaagccaaacgtcgcaagacaccggaccaagcgcttattttgatgtcgcatgcacatatgcaaggtggagaaacatctgactctgaacgtccaattattattggtaatgaagaggcactttcgacgactttatttgaagatgctgtcgactatgtcgctttaggacatctacataaaccacaaaaagtaggtcagccacacattcgttatagcggttcacccattccgctttcttttagcgaaattaactataaacaccaagtagttgaggtcaaaatcgacccttctcaagacactgacagccgtttgcaatttgaagctgtcgaaattccgcgttgcatacaattgcaccgcattcgtggtgagctaaacgaagtgctgcaacaactcaaagccttgcctcacggtgtgattgaaaatattgaccaccgtgaatatgtcgatattgaatattatagtttaacgccgccacagccaaatttacgtcagcagtttgaagcagctctgccacctgaccgctatcgtttagtgcgtatttcacgtcaatacgtgaacaaagacacgactaattcaaatactacccagcacattgctcttgagccaccaacaccagaaaaactctttcaaaatatttgggaaaaacaaggttacagcgccgatgatgcggtcttaaaagattttctgagtctggtacaagaagcacaaaaacatcttgaaaatgatgcaagccat

SEQ ID NO: 8499 - DNA, 453 bp, Acinetobacter baumannii
atgaaaatgaaatgggcttcagaatataatactggtattgacgttattgatgagcaacataaacgaatactggattatattaatgagattgatgatgtaaaagatgatgaggatagacgtcgtattaaagatgtcttagacaatattattgattatacacaatcacattttacctttgaagaaagtttacaagaggaagcggattataaatatagagtgcctcataaacgtgtacatgacttatttattaaaaaaatagagttatatcgtgaacgttttgaaatgggccatacgattgaagcagaattacaagagatcttggctaaatggttaattaaccatattcaacatgatgatgccgattatgtgggggcagtaaaagaaaatatgatggggattattagagaaaaagaaaagaagaaaggaaagaactggttcgcccgttttttctca

SEQ ID NO: 8500 - DNA, 200 bp, Acinetobacter baumannii
atgtctaaccagagaattcgtatccgtcttaagtcttttgatcatcgtctgattgatcaatctgctcaagagatcgtagaaaccgctaagcgtaccggcgcacaagtgtgtggtccaattccgatgcctactcgcatcgaacgcttcacgttcttacttcaccgcacgttaacaagatgcgcgtgagccagtacgaatcc

SEQ ID NO: 8501 - DNA, 732 bp, Acinetobacter baumannii
atgaaattgaacagttataattttttgttaggtttggcgtttgcttcatctgttgctgctcctgccgctcaagcagaaattgtaattcatggcacccgtgtaatttatccgtcggatgctagagaagttacgctacaagttagcaataacggttcaaagccagcacttgtccaagcttggattgatgaaggtgatccaaaaagtactccggatcaatcaaaagttccttttatgattgctcctccaatttctcgtgttgaagcgacaaaaagtcagacgctccgtattactgcccttccaaatgcttctcaatttaaccagaagcaagaaactgttttgtggttaaacgttttggatattccaccaagacctacctcaaaaaatgcagatacgacacctgataacttcttacaacttgcaattcgttcccggatcaaattcttctatcgtccggcttcaattaaagaagatgcgaatttagcagcagataagcttcaatgggttaaatctggtcagaatttaacggtaaaaaatccaactcctttccacattacgatgacttctgtttatcaaaaggttggagataaaaaagttgatttattgcctcaagggctaatggttaagcctttttctgaagcttctattcagcttaagaatagcaatcttcaggatatgagttttattaatgtcaacgactatggtggtcgagtcgaacaccaaataaaacttcag

SEQ ID NO: 8502 - DNA, 2396 bp, Acinetobacter baumannii
gcagctgcgagtgcgcctgtagaagctgaatttgattctgcttttttaattggtgacgctcagaaagtcgatatttctcgatttaagtacggcaaccctgttttaccaggtgaatataacgttgacgtttatgtaaatggtcaatggtttggtaaacgccgcatgattttcaaggcattagatccaaatcaaaatgccgtaacttgttttactggaatgaaccttcttgaatacggcgtaaaacaagaaattttaaccaagcacgctccccttcaaaaagaaaataatagttgttataaaattgaagaatgggtagaaaacgcattttatgaattcgatacgtctcgtttacgtgtagatatttcaattcctcaagtcgcattacaaaaaaatgctcaaggctatgtcgacccaagcgtatgggatcgcgggattaatgccggctttttgtcttatagtggtagtgcgtataaaacttttaatcagtctggtgaccgaagcgaaacgaccaatgcttttatgggggttacggctggactaaatttagcaggttggcaattacgtcataatggtcagtggcaatggcaagatacgcctgcggaaaatcaatctaaatcagactatcaagaaacaagtacatacttacaaagagctttccctaaatatcgtggtgttttaacacttggggatagttttacaaacggcgaagtatttgactcatatggttatcgtggtatcgatttttcaagtgatgatcgaatgctaccgaatagtatgcttggttatgctccacgtatccgtggtaatgcaaaaaccaatgcaaaagttgaagtacgtcaacagggccaattgatttaccaaacaactgttgcaccaggtaacttcgaaattaatgacctttaccctaccggctttggtggtgaaattgaagtttctgttatcgaagcgaatggtgaaatacagaaattttctgtgccttatgcctctgttgtacagatgttacgtccaggcatgaaccgttactcattaactgtaggtcagttccgtgatcaagacattgatctggacccttggattattcagggtaaataccaacaaggtattaataactatttaaccggctataccggaattcaagcatctgagaattacgctgcaatattgcttggtgctgccgttgctacaccaattggagcaattgcattcgacgtgactcactctgaagctgagtttgaaaaacaggcttcacaatcaggtcaaagtttccgtttaagttatagtaagttaattacgccgaccaacacaaacttaacacttgcagcttaccgttattcaaccgaaaacttctataaattgcgcgatgccctgcttatacgtgacttggaagaaaaaggtgtaacacttatgctgctggtcgtcaacgtagtgagttccagattactttaaaccaagggttacctgagggttggggtaacttctatgtggtaggttcatgggtagattactggaatcgtagcgagagtactaagcagtatcagattggttatagtaataactaccatggtttaacttatggtttatctgcaattaaccgtaaggttgagtacggctcaaatgatgcgtcgcatgatactgaatatttaatgacgctttcattcccaattaactttaagaagaattcagtcaacgtcaacgttactgcttctgaagacagccgtactgttggtgcaagtggaatggtgggtgatcgctttagttacggcgcttctgtgtcacatcaagactatgcgaacccaacatttaacgcaaatggtcgttaccgtactaactatgcaactgttggcggctcttatagtattgctgattcttaccagcaagcaatggtaagtttaagcggtagtgttgttgctcactcagatggtattttatttggacctgagcaaggccaaaccatggtacttgtgcatgcacctgatgccgctggagcaaaagtgaataacacggttggtctaagtgtaaataaagcgggttatgcagtagttccttatgttacgccataccgccttaatgacattactcttgacccacaagaaatgtcgagcgaagttgaacttgaagaaacaagtcaacgtattgccccatttgctggtgcaattgcgaaagtagattttgcaactaaaacaggctatgcagtttatattaatagtaaaactgcagatggcaacagtttaccatttgcagcgcaagtctttaaccagaaagatgaggtctgtaggtattgttgcacaaggtagtatgatttacttacgtactccactcgctcaagatcgtctctatgtgaaatggggcgatgaaagtaatgaacgtgttcggttgagtacaacatcagtaatgag

SEQ ID NO: 8503 - DNA, 444 bp, Acinetobacter baumannii
atgactactttaaaaaaccaaattactgatgcattaaaaacttctatgcgtgccaaagatatggcaacagtgacggttttgcgtagtctacaagcagcaattaagcaaatcgaagtcgatgagcgcatagagcttgacgacgctcaggttcttgcggtcattgaaaagcaaattaaacaacgtaaagaatcgatcaaagccttcgaaggtgctggtcgtgatgatttagctagtaaagaacaagccgaagctgaggttttatctcagtttctaccagaagctatgactgaggaagagcttgattctctcattgagcaaacgattgctgctcaagaagcaactagcatgaaagatatgggtaaggtgatgaattctctacgtccgatcatagccgggcgtgccgatcctgctcaagtttcagcaaaaattaaagctaaattagct

SEQ ID NO: 8504 - DNA, 1071 bp, Acinetobacter baumannii
atggctgaatttaagtttacagatttggtggaacctgttgcggtcgataaaaaaacggcattacgtattaccgttttagggggcggtagctttggtacagctatggcaaatttagctgctcgtaatggctgcgataccatgatctggattcgtgatgccgaaacagcagaagaaattaataaaacccatattaataaacgttatttaccagacttcactttagaatcttcattacgtgcagtttctgatcttgagcaagcggtatgtgatcgagatattattttagttgcaattccaagccactcattccgtgatgttttaaaacaaatagcgccttatattactgcacaagctgtggtgtctttaaccaaaggtgttgaagctaaaacatttagcttcatgagcgatattattcgtgaagaattaccagaagtgccgtatggcgtattgtcaggaccaaatctcgctaaagaaattatggcaggtatgccttctggtactgtaattgcaagtgattctgaactcgtccgttatgccgtacaacatgcacttcatagtgcgttattccgcgtttttggtagcgatgatgtgcatggagttgagttaggcggtgcgcttaagaatatttatgccgttgctatgggaattggagcagcatataaaattggtgaaaataccaagagtatgattttaacgcgtgctttggctgaaatgagccgtttcgcggtaaaacaaggtgcaaacccacttacgttcttaggtttatctggagtaggtgatttatttgcgacttgtaatagtccattaagccgtaattatcaaattggttatgcgctaggttctggtaaaacgcttgaacaagcgagtaaagaattgggacaaactgcagaaggtattaacacgattgttcaggtgcgtggcaaggcgcaagaactagacgtatatatgccaattaccaatgctttatatgaggtcatttttgaaggcgctccaccattaaatattgcactttctcttatgaaaaatggacaccgtagtgatgttgagtttgttttacctcatcatgaagtc

SEQ ID NO: 8505 - DNA, 783 bp, Acinetobacter baumannii
atgcaagacacccctctcattattggttcacgttcttttcaatctcgtttattggtaggaacagggaaatataaagacttaaatgaaacggatttagccattcaagctagtggtgcagaaatcgtaactgtcgcaatccgccgtgtgaatattggacaaaatccagatcaaccgaatttactttctgtcattccaccagaaaaatatacaatcttgccaaatactgcaggttgttttgacgctgacagcgcagtacgcacgtgtatgctagcgcgcgagctactggatggtcacaacctagtaaaacttgaagtgttgggtgatgaaaaaaccttatatccaaatgtaaccgagactttaaaagccgctcgcactttgattgatgatggttttgagattatggtctatacctctgacgacccaatcattgctcaagaacttgaaagtatgggctgtgttgcaattatgcctttaggtagtttgattggttcaggcctaggtattttaaacccgcataccatttcaattattaaagaaaatgccaaagtaccggttttagtagatgcaggtgttggtacagcaagtgacgctgctattgcgatggaacttggttgtgatggcgtattgatgaacacagcgattgcagcggctcaaaatcctattttgatggcttctgcaatgaagaaagctgttgaagcaggacgtgaagcatttttagctgggcgtatgccacgcaaacgcatggcaaatgcaagttcaccagaaacaggttatttctttaaa

SEQ ID NO: 8506 - DNA, 1356 bp, Acinetobacter baumannii
atggctaaaaaaccgatttataaatcactttattttcaagtgattattgcgattattgcgggtgttttggtagggcatttctcaccaagtacaacgcaaattgttaatggtgttgaacaacatattccaggtttaggtgagcaactcaagccattaggtgatgcttttattcgtttgattaaaatgatcatcgcacctgttattttctgtacagtagtaagtggtattgctggtatggaaagcatgaagtcagttggtaaaactggcggtgttgcgttgttatacttcgagatcgtttcaacaatcgcgcttctgattggccttgtggtgattaacattgcaaagccgggcgtaggaatgaatgttgatcctgcaactctggacacttcaggtatccaaaaatacgtcacttctggtgagtcacaatctaccattgatttcttgatgcacatcatcccagatacggtggttggtgcatttgcaaatggtgaaatcttacaggtccttctttttgcaatcctatttggttttgcgctccataagttaggtgatgcaggacgcccagttttaaagttaattgatcaaattgcacacgtgttcttcaacattgtgaatatgattatgaagcttgcgccaattggtgcatttggggcaatggcgtttactatcggtaaatatggtgtaggttcactggtacagttaggccagcttattatctgtttctatattacgtgtttactctttattttcttaattttgggtacaatcagccgcattagtggattcagtattctgaaaatgattcgcctgattcgtgaagaactattaattgtactgggtacatcttcttctgaatcggtcttaccacgcatgctccgtaaacttgaaattgcaggttgtgaaaagtcggttgttggtttagttattccaacaggttattcatttaaccttgatggtacgtcaatctatttgactatggctgcaatctttattgctcaggcaacgaatacacagcttgatattcaacatcaaattactttgttgttggtactcctaatctcatctaaaggtgcagcgggtgtaacaggctctggctttattgttatggcagcaactttatctgcagtaggacatattccggtagctggtttggcattgattttaggtattgaccgcttcatgtcagaagcacgtgctttaaccaatcttgttggtaactctttggcaacgattgtagttgcaaaatgggtgggtgctttagacaaagataagctcaatgatgctttaaacaacccagatgaagttgacagaaaaatgttggctccaaaaaatcctcaggttgcagaaggtttagat

SEQ ID NO: 8507 - DNA, 1920 bp, Acinetobacter baumannii
atgaatgagcgcatacatattttaagacaagcaattgtcgtcgttacccaagcactgactaactctgatattgcagtaacgcaagaaggtattgaggcaggtgtgcataaggatccaaagacaggcaaacctgtgcgaattaaccttccatatcttccggacaattcaccagattcgctgattgatgcggttcaaggttttcttgatcaagaggtagcgaagtatctttttaccgatttttctctcaagctaaaaggatctgaagaggtaaagactttaacttcattgttagaagaagcgcgtgtagaacgttgcatggctgaaaaatatcgcggttcaaatatcaatatgaaaaatgcgagccaatttttcattgatgaattgattgacgataaataccaaaaacttgtaaaggaaaaagcttctgatgaagaaattacgcaacatttaatgttgccaatgttacgtgcgttaagtggtcaggaagtctttgaacattacttaaaagacaaaatgaagcatattaaacctgtgtgggacatgcttactccttttaagccagagattgaaaaattaaagtccacaaaagacacaatggatttggctcagcgtatctataaggtactgaaagatgagcctgaattgccagaactccctgacagcgagcatgatgaagatagcgacagcttaccagagccaaaatcgccaggtaaaagcgctggtgtaggcaatagcgaagatgagaatgaagaagatgatgatgaaggtggttctctaggtggagctgttggtgccgatgagggcgaagatgaagaaggcgaaggcggtagtggtggaaaagctaaacaacggcctaatgcagttaagcattcactagaaagtgacgataagaagagtgcccctcctcgtagtgaatttgtggccgcaattctggactcgttaaaagacaccgaaaacaactacagtgagcaactaagcaagaagattgcacaacgcacagcagcggacgttaaaaaatctaaatacgcagtatttaccaatgaaggtgatgtcattgaaccgcttgaagttcctaaacttcattacgatgacaagatgtttaaacgtcttgaagacaaggtagcttcaatggttggtcctatgcagaaagatatggagcgggcaattcaggcacgaagtaaatctgtatgggaaaatggattaaaacaaggaaaattaaacagttcatctttagcacgactggcttcaactggtgattgtcgaatttttcgtaagcgcgttgaatcaaaaaccaaagacgttgctgtgagcttggtcgtcgatatgtcaggttcaatgtgcggttctaaaatccatactgccgctgctgcgagttacgcactatcaaacgttctggatcgtctcaagattcctcatgaagtgatctgctttactactcatacagactcagccacttaccacaagcgtttaaagcaaattcgtgaagcagaaaaaaaatatggcgttagttattcacgctatgaaaacctttatatgcctgtcattaaaggctacaacgagcgcattaatactgaaacaaaacgtcgatttggatggcttcctcactcaggtttaatggcgagtaacattgatggcgaatgtgtagaaattgctgcacgtcgtctaatgggtcgtaaggaagcaggtaaaattatgatggtgctatctgatggctcacctgcgggtggaggtaacagtcgagatctggaatatcatttaaaagaagtggtgaagaaaatcgagaagagcaaggtagacgtcattggtattggaattgaagatgattctgttcgtagattctatgacaaacatgtggtgattcatgacgttgagcaattacctagccttgtaatctcgcgtttacgcagtatgttgttagct

SEQ ID NO: 8508 - DNA, 1685 bp, Acinetobacter baumannii
gtaacaatcgcttatgacgccgtaaatgccatcctacacaagcctcctgttgaggcgaaacttgaagtacagtcggcgcttagttatttggtggatggcgccgaagaaactctagcgtttagacagcaccgttgggatggcagatcgtcattttttgactttgccaagtgctcttttccagcaggatttgtagtccatgttacggatcgactcaagaaggcaggttttgaagtaaaactcgcacgaaaacccctccccgctccacttggacctgcccgaccagtggtagatagttacggatatgaccctcgttacgattaccagccggaagttatggatcgtcttgtacgtcatggccagattatcgctcaagtcgctactggtggcggtaaatcacgcattgccatgttgtgtcaggcccgaattaaccgccctaccttgtttttaacaacccgttcgattctgatgtatcagatgaaagatgcattcgaagcaaatggcgttgcatgttcggtcattggtgatggcagttttggacaggtgaatgaaaaaggtcagctctccatcaagaaaatgacggtcggaatggttcaaaccctcgccgccaagctggaagagacgactttagagaaggaatttcagatcctttatgacaacgtagtcaaaaaacacgaaaaagagatttcggacactaaaaaacagctaattaaggtcggtaaagtcgagtccgaaatcaaaaaagtgcttcataaccttgcactgcaacatgaaaaggagcttcaggacaggcgccagcgatgcaagctaaggcagaagcaaaattcaaggaaaaatcactcgtaagacagcaaaccatcaagcttttggagctttttgagttcgtaattctcgaagaagcacatgaggcaggtggaaattcgtattacgagatcatgcgccactgtaaaaacgcctattaccgcttggcattgaccggaacgccgttcatgcgtgaaagccaagagtcaaatatgcgtttgatggcttgttccggaccgattgccatcaaaggttacggaaaaaatgctgattgatcgcggaatccttgctaagccttacttcaaaatcgtcgaattgaagaaaaagccagccaaattacactctattaccccttggcaagctgcctatcgcttgggaatcgtgcaaaacgaagagcggaacatgccatctgtatggaaattctcaaagcccgtgaatatggcatgacggcgatggttctcgtccagcatacctcgcatggcgacaccctattgaagctgtttgacgatataggtatcagagcgagatatattcgcggtgaagatgatcagggagaacgtaaatctgcgctcaccgaacttgccaataaggatattgatgtactgattggaacaacaattcttgatgtgggtgtggatgtccctgctgtcgggttgattattcttgccggtggtgggaaagcggaagttgccttacgccagcgtattgggcgcgggttacgtgctaagaaattcggtccaaacgttgcgtttattgttgatttcacagaccagcacaattcaacgctcaaatctcacgctagacagcgtttacagatcatcagagaaacacccggctttggcgagaatatcgttgcgaatttcgagtttgaaaagctcggtttcaaa

SEQ ID NO: 8509 - DNA, 6309 bp, Acinetobacter baumannii
atgaacgctaaaattaagaaatttggttttcctttaccaattgcaggggcttctggaggcagcaaaagcccttccgtgccgagagaagatccagataaccttcaatctagcgcgtatgtaaatatcattgatctaattggcgaaggtcaaatcggtggtctggtcgataacgttgacggcgacagtcttaccgaaaaagaaaaatcaatcttttttgatggaacacgcttacgtcatacaaacggtgaactgaacttcgcgaatgtgtcttgggcggaacgggtcggtttacagcgacaagactacatcgaaggatttggcgaaggggtagagactcctttttacaaaaacgtacagcttaaatccggcatccctagcgcatttacggtttcaaacccgaatgcagatcgcgttcgcatcattttggccgtgaactctcttttgtctaccgatcgcagctccggcgatacctatggcacttccgtagagttccaaatcaagttgtcggtaaacaacggcccttatgaaatccttgcaactaaaaaaatcactggtaaaacaacatcacgttatcagcgttctttctctttcgaccttccaaaaaagaaagctgacggtacaccaattaccgcttggtcattccagatcacaagaacaaccccagattcaaattcatcgtaccttcaaaacacaacattcttcgagagttactcggaagttgaattaaccaagttttcatatccaaacgttgcattggtcgctacccgattcagttcagaaacgtttagttcaattcctaaacgtgagtatctggtagatggtctattaatcaaggttccgtcaaaccgcaataaagacgggtcatacacagggccttgggatggtactttcaagcttgagtcatcaagtaaccctgcatggattctgtatgacctgttacttagcaaacgttacggtctaggcgaatacattacgcctgaaatgatcgacgaaagccgtttgtatgtaattggtcagtattgcgatcagcttgtagacgacggttttggcaacaaagaaccgcgatacacaattaactgcgttatcaatactcgtgttgaagcgtatgacctcattgtcgatatttgctcggcatttaacggcatggcgtattgggcaggccatatggtgggctttaccatcgatgcgccaggcactccgcaaatgctgttcaacaataccaatattgttggcgatttctcttatcagggaacttcgaataaagaccgtcattcagtcgcggtagttacatggaatgatccgaatgacgactacaaacaagttccagaagtagttgaagaccctgaactcattgaacgctatggcattcgcaaaacagaagtcatggcattcgggtgtacgtcacgcggtcaagctgctcgttatggccgttggttgctatacagcgagcaccaacagtcagaaacaatcacattcaatgtcggcattgatgcagctctcctattgccgggtgatttgatttacgttcaagaccgtgaccgcgcgggtaaacgttttggtggacgtttactagattgcacagccaaacaggcagttcttgatgatctggttgattttggggaatttactgatttgacgcttgtgatccgtttagaagatgggtcattagcagagcgcgtaattgcttctcataccaaaaagacagtaaccgtttctggacacaccaaagaagtaacagtggtggaatgggctgaagccttgacggttatgcctgtcaaatacgctttatggattatcaaagcggcagaattacaaccagtaatcgctcgcgttgtaaacgttgctcaaggtgaagaaaagggcacttataacattactgccgttcctcacaatcctaacaagtatcaatctattgaaaatgatttgatgcttgatgttccgccgacttcaatcttgaactctcgcaatcaggaacctcctgcaagtgtcgagattaagagtgaaattattaccactcaaaatgtcgcaaaaactcgcctcgttattagctggaaagaagcgaaaaatgcagcgcgttatgaagtcgaatggaaacgcaatgatggcaactgggtcaagcttccacagaccacttcattaagtattgaggttgaggatgtatacgcgggagcctatacagctcgcgttgttgcgtacaacctttttggcgcacgttcttatccgaagtattcaacaagcaccgacgtaaaaggaaaagttggcaagccaactaatgtcctttctttgacaaccacgccgttattgttcggcatgaagctcgattgggtttatccggcaggtaactctgacctatcacatgttgtcattgaagtgagtgatcgggctgatggttcaaaccctagattgctcggtaatgtttcatatcctacaaacaccttgactattcagggattacagggcggtcttgatcaatggtacagaacgaaaaccgttgataagtctggcaatgaaagtgattggtcgaacttcgttaaaggcacgactggaaatgacccagatcaggtacttgatctaatctctggtcaaattggagaaagcgaccttgcaactgaattacagggcaagattgaaaattcagtaaccgtatctgaagccgcaaagattgttgctgacaacgctcaaacggcagcaacaaacgcacaaacagcagcgacagatgccaaaacagcagcttccgaagctcaaaaagcagcaagctctgcccagacacaagcgtcatcggctcaacaaatcgctagtgaagcaagtgcaacagcggctaacgccaaaaatgcagcagaccaagcggtaacggctgcaaatcaagcaaaaacagccgcagataatgcagcgacaacggcagctacggcaagttctactgcatcaaaagctcaaactacggcaaacgatgcagccgcagccgcatcaaaagttgcttctgatttaacaacctcaacaaatcagttgaataagaaaattgctgatgaaactgatgcacgcacagtggcaatttctaaactgaatgatggcctgacaattgaaacatctcagcgtaagacagaagatgcggcgctgttaagcaatattgagacctataagtcgagcacaaatggcactttgtctagtctgcaaacgcaaattaataccaacgcgacaaatacaagcgcaaatacatcaaaaatttcttcgcttgactctcgtttaaccacaaacgaaggcaaaacagcagatgcgattaatgcagcggcaacagctcaacaaaccgcaagttcagcggtagacaaggctaatgctgttgcaaactccgttactgctcttaaatcagaattaagcagcggaaaaggcattaataacattgtagctcccttctcggatccgcaagaacttccagctcttggtggggcgagtcgtaccgtagctttggtggactctgcgttacgtcgaaacggcaaggcttacaaagtgtcattcacggcggcggctcattatgtgtatttcggcaccgctcaagccgctctagcaccatcacaaatggcgatgcaagttgaagcggggcgcgcttatacatttagcgtttggttgaaggctttatcaacagccgttccgtcattccgtttcaacatcctgtggtttattcgtgaccctagcactggaaacatcacaacaaatgccggaatcatttttccacaaggtcaaacagattcttacattgctccgaacgctaacggccaacgatactcatttagaccagtcaactcacctgcaaatgcaatcggcgctaccgtctatgtcgtaggtaacccttcagggccttctgccggcgaatacctcatcgatatgttgatgcttgaagagtctgtcggttccgaaaagcctgcttctacgtggacggcgggtcctgctgatctaaatgcgattaagaatgccttagatacaaacgctgtagcaatcaacaacctaattacacgcgtttcgaacaacgaggggaaaattacatctcaaggcaatttgatcacgcaactaaacaacagcattaatacgattaatggaaccctttcaaacaaagcggatgctacagctttaaatgcattaacaactcgcgtttctaatgctgaggggcaaatttcatcacaagggtcgtcaattgtctctcttcaaaacgatctagcatctaccaacaaagccgtttcaaccaaagctgactcaagcgctctcaattctttggattcaaaagtctcagaaattgatggccgagtaacaagtaatgccaacgctgttacatctcttcaaggtagtgtttcgagcattgagaaaggactttcaaccaaagcagacgcatctgcattaaacaactactacacaaaaactgaggctgattctgccgcctctggcgcaatcgacaagttcaacagtcaattgacgattggtggtgtaaacgttgttgcgaactccgaagctcctcgcacttcaactgccgcaacgaatcgcgaatatttactgtatgaacgtagcgccgaattaaaagcgttctatgacgaaaaccttgagaagccaatcacgatttcgtttgaaatgagcgttcctgtggctggaccggttcaagtttattcgtcaaatggttctgctcaccaattcgttacttccgttaatgcaattatcgtaaatcaatttgccaaatattcagtaacagttagtccaaaagcgcatacggcaagtacaactgtttcgacaattgagttctatggaacgtatggaactggccgtatcccgacgattcgtaaattacaaattgaagcgggcacaaaggctaccgcttggagtccaagccctcgtgatacaaaggctgcaattgacgccaatgcttctgcaattcaaacgacccaaacaaaagttgacaatatcgatggtcggctaaccactgctacagattcgattacgtcactaaattcgcgcatgtctacagccgaaggaaatatcaacagcacaaatactgcggttggtggactttcgacacgcatggcaaccgctgagggcaagatcaccaatcaaagtgattcaattgcatcgctacaaaatagcgtcacctcaatcaatggaacactggcaaacaaagccgattcaagcgcggtcaataacttaactagccgagtggaaacagccgagggcaagatttcaagtcaaagcgggcagattacttcgcttagcaatagccttgatctaacaaacagtaacttgaacgacgtaaacgttctggcgcgactgttatctcttggcaagcctctacgcgacgatccaactttcaaaacgacctctgctggtggtttatctgcatacagtttccctgcgggaacttcatgggttaagcaaactaagtcaacagacaacccaactggctcaacccatgaaatgttgatcaaagcaactcaagcgttgggtggtggttggtatccaactgcacctacgcttgtactcactgcaaataaaaccttcttaattaaacaaattattaagatgccagtgggtacaaaattacaagccatcggtaatgctacgggtacgggtggatacatccgaatcttgggtaatgatctaggaactggcaaatttgaaacgtactactctgtcgtacaaggtggggctgatttaagtggctctactattcaaggtcatttccgcgtaattgccggtactaacccgccagtaccaacggttgataatccagtctttgtgattcttgcttcatacgaagtatttgatgtaacggctgtaaacgacaccattccaaaagcttatagcgatgctattgcagccaatgcgaatgcgattaacaccctgtcaaacactgtcagccagcagggtaataccattacttcccatagtaattctattactcaactaaataacagcatttcaagcatcaacggcgcactttcgagtaaagcggatgcgagcgcattacagtcgcttgattcaaaagtaacactaatcgacggcaaagttacatctaactcttctgcattaacagcgttgcaaagcagctttgagggaattccaaatcaaggcgtgaacttgctcggcctgaaatttccacacccaatcgaaaagccaaaatggatttcaggtcttccatttgaagttattcaatcaccagatacggtgaatgtgcgtgcgttccaattcacgatgcctgccaacacactagcggcacttacttcaacattggtggcggcaagttccgcgacagtggctcacagaaggtacatacatatt

SEQ ID NO: 8510 - DNA, 2754 bp, Acinetobacter baumannii
atgaaattctggcaacgactcttcacatcatttttacaaagatttcatttgatgcgttttttcggtcgtaatcgatcttttaaagagctacatcaatctagttatgctcaagaaattagcaaaaatttatctaaacgtttgcttaatgcatcaagggctcaaacgaatgatctattaaaacaattcgatactcatttgacggggcttacagaagagcaagcgcatacccaacaaatgacggtggggcttaatgaagttactcatgaaaagccattaacttggtggcaacacctttggtattgctaccgtaatccgttcaatattttacttagcctgttggcattgattgctttctttaccgatgatctaacgggttcaaccattattagtgtgatggtaattctttcaacactacttcgttactggcaagaagcaaagtcaaatcaagctgcggatgccttaaaggtaatggtgagtaatactgctactgtattgcgccatcaagtcagtgcagaagatttagaacttatgcatgagcgttatggcattgatactaaaaaccaaaccactcaccaatttgaaataccaattcagtatttagtgccgggtgatgtgattttattatctgcgggtgacatgattcctgcggattgtagaattttgtctgctaaagatttgtttgtctctcaagctgcaatgactggtgaatcaatgcctgtcgagaaatttccgttgcagaaaaatcttgaagaaaccagcgctttagagctagataatattgtattcatggggaccaatattgtttctggttcagctcaggcagtggttttaagtacgggtattcaaacatatttcggtgcattggctcatcgagttacggctactgatcggagcacgactgcatttcaaatgggtgtcaacaaagtaagttggttgctcattcgctttatgttggtgatggcacctgttgtacttttcattaatggcttcaccaaaggcgattgggccgaagcatttttattcgcattatctgtagctgtcggtcttactccagaaatgctaccgatgattgtgacttcaactttggcaaagggcgcggttttcttatctaaaaagaaagtgattgttaaacgtctagatgcgatacagaactttggtgccatggatgttctatgtaccgataaaactggaactctgactcaagacaaaatctttttatcccaacatattgatgttcaaggcgggaaatcagactttgtactcatgcaggcatttttaaatagttattatcaaacaggcctaaaaaatttgcttgatgtggctgttttagaagctgttgatgatcagatcaaaatacagaagttacgttacaagaagttagatgaagttccttttgattttgatcgccgccgtatgtcagtcgtggtacaaacgcctcaacaaaaagcccgtatgattaccaaaggcgcagttgaggaaatgttaaaggtttgccgttatgtcgaggtaaatggcaaagtagagcctttaacaaagcaatgtgaagtagcaattgaggcattaactcaacgctataaccgagatggtttaagagtggtggcagtagcgtatcgtgagtttaaaaatcatcaggaaaattattcagttgttgacgaaagtgatctgattttaataggttatattacttttcttgatccgcctaaagagtctgccaaagaagctgtacagagtttacatgcccatggtgtaacggtaaaagtgctgactggggataatgagtttgtcacccaaaaagtgtgccgagaaattagcctgaattatgatcaagttttattgggcggtgtaattgaaaccttaactgatcaacaactcaaaagagcagtagagcaataccacatttttgcgaaattaagtccggttcacaaagaacgtattgttgagcagttaaaagcaaatggtcacgtggttggtttcttaggagacggtattaacgatgccgctgctatacgtgctgccgatattggtatttcagtagataccgcagtagatatcgctaaagagtctgcagatttaatcttgcttgaaaaaagcctgatggttcttgaaaaaggtgtgattgaaggccgtagaacttttgccaatatgctgaaatatatcaaaatgacagcgagttcaaattttggtaacgttttttcggtacttattgcgagtgcttttattccatttttaccaatgctgcctattcacttactcattcaaaacttactttatgatgtttcacaaattgtgattccttttgacaatgtggatgaagagttaattgcaaaaccacagcgttggcaacctgaagaagttggccgctttatggtggtgtttggaccgattagctccatttttgacatgattacttttgggttaatgtggtttgtattttcagcaaatactcctgaacatcagacgctattccaatcaggctggtttatggtgggtttacttacccagacattaattgtccatatgatccgtacagctcaaattccatttattcagagtcgtgccgcgactccattattaataatgacagcggtgattatgtgtatcgggattttcttaccaatgggtcctttagcaagctatttaaaactacaagctttacctttaagttatttcttatatttacctgtaattttaggtgcttatatgtgtgttactcaatgggtaaagaaaatctatatccgccgttatggctggcaa

SEQ ID NO: 8511 - DNA, 1059 bp, Acinetobacter baumannii
atgtttaaaaacaggtttttcaatacaatgcaaattcaaaatcaagtacagcttaagccattcaatactttaagtttagatgttacagcttctcattacactaaggtcaaatctattgaagatattgaagaagctttagcttttgctaaagagcatgagctaaatgtacttgtattatctggcggtagtaacatgctattaccgcaacaaattaatgctttagttattcatcttgatattcagggtatagacgttttatctgaagatcaggattttattcgagttaaagtcggtgcagggcaggtttggcacgatttcgttttatatagtacaaagcaaaattggtttggcttgcagaacttggcacttattccgggcttggttggtgcttcaccagtgcaaaatattggtgcttatggtgttgaggttggtgagtttattgagtcggtacaagtctatgaccgtctattaaaacaaaccggatcaatttcggcagcagattgtcatttttcttatcgacatagcatttttaaagatgacccagctcgttacatcattactcatgtcacctttaagctgcttaaacaagccaatctaaagctaaattacggtgatttaaaacaggcagtaggagataacctgactgctgaaaatttacaaaatcaggtcattcatattcgtcaaagtaaattacctgatccaaaagaatatccgaatgtaggaagtttctttaaaaatccgattgtaaatactcaagaatttgaacgattaatcgcacaattctcaacaattccacattatcctcaagcgaatggtaacgttaaaattgctgctggttggttaattgatcaggctggatggaaaggtaaacagcttggtgtagtgggaatgttccataagcaagccttggttttggtgaattatgccaatgcatctcttgcggatgtaaagaaaacttatcaagctgtacaacatgatgttgaacagcgtttccaaattatgttagaaccagagcctgtgctttataacaatttaggtttaattgaaaatcatacggaa

SEQ ID NO: 8512 - DNA, 987 bp, Acinetobacter baumannii
atgactcatacagcacttgaccaattaaaaacattaacgaccgttgttgctgacagtagcgaccttgaagcaattcgtaaatttcgtcccttagatgctacgacgaatccttcgttaattaccgctgcagcagagcaaccagaaagtaaagagctcattgaagatgcttattatcaagccaaagaagaaggctataaaaatgatgaactgattgaaagaaccattgatattttaaccgtaaaatttggtgtagaaattttaaaactcattgaaggccgtgtttctacagaagtcgatgctgcactttcatatgacaccgaagcgaccattcaaaaagcacatgaattatgtgagctttataaaggttatgggattgatcagtcacgtattctgattaaaattgcatcgacttgggaaggtattcaagcggctaaagtgttagaagctgaaggtattgcttgtaacctcactctccttttcggtttacatcaagcccaagcgtgtgcagatgccaaagttactttaatctcaccttttgtaggccgtattttagactggtacaaaaaagctgaaggtgtagattcttacccaatcgagaaagatccaggtgtggtttcagttaagaaaatctacacttattacaagcagcaaaatattccaactcaagtcatgggtgcgagcttccgtagcatcgaccaggtgcttggccttgcaggatgtgatttgcttacgatctctccaagcttgctaacgcagcttgaacaagatacgcgtacagtcgatgcagcacttgatgcaaacaaagcaaaacaggcagaagcgattgttagaccagctcaagatgagcaaagttttaaagatgaacttaaccatgacttaatggcattccaacttttacaaggtggtgttgatggctttattaaagcgcgagatcaattaagtcttttattacgtcaatcttttggaattgatgcagaaattaaatct

SEQ ID NO: 8513 - DNA, 1476 bp, Acinetobacter baumannii
atgcaaaaaaaatggttaatcctcacaattatcgtcctcatttatttacctgttacgattgatgcaacggtgatgcatgttgcaacaccatctttaagtgcagcattgaatttaactgccaatcagcttttatggattattgatatttattcgctgattatggcgggtttgattttaccgatgggtgcactcggtgatcgtattggctttaaaaaattattatttattggaaccgcagtttttggtgttggttctttagctgcggctttttctccaactgcctatgccttaattgcttctcgtgctgtcttaggtctaggggcagctatgcttattcctgccactttatcaggtatccgtaatgcttttaccgaagaaaaacagagaaattttgcacttggtctttggtctacagtaggtggaggtggagcagcttttggtccactagttggtggttttgtattagagcatttccactggggagctgtattcctcattaatatcccgatcattttagtggttctagttatgatcgtgatgatcattcctaaacaacaagagaaaactgatcagccaattaacttagggcaagctttagttttggttgtagcaattttaagcctcatctattcaatcaaatcggctatgtataacttctcggtgctcacggttgtgatgtttgtggtgggtataagcacattaattcacttcattcgaagccaaaaaagagctacgacaccaatgattgatctggaattgtttaaacatcctgtgatttctaccagtattgttatggcagttgtgtccatgattgctttggttggctttgaattattactgtctcaagagttgcagtttgtacacgggttttctccattacaggcggcgatgtttattattccatttatgattgcaattagtttaggtggtccattagcaggtatttgtttaaataaatggggtttacgtagagtatcgagcctaggtattttagtgagcgcgctcagtttatgggggcttgctcagctcaacttttcaaccgaccactttttagcatggacgtgtatggtctttttgggctttagtattgagattgccttactggcctcaactgctgccattatgtcatctgtgccccctcaaaaggcgagtgcagcaggtgctattgagggaatggcctatgaacttggcgctggtttgggcgttgctatatttgggttaatgttgtcttggttttatagccgctcaattattttgccagccgagcttccgtcaaacttaattgaaaaagcgagtatctcgattggagaaaccatgcaattagcctctaatcttgaaaatcctttaggagggcaattagttgtagtggcgcagcaagcttttagctatgcacatagttgggtacttaccatctcagcgatctgtttcttccttttaactgtatttgtctggtttagttttccgaagaaagtaaat

SEQ ID NO: 8514 - DNA, 1086 bp, Acinetobacter baumannii
atgcaagaccaagctttgccatcattccctcaagatttaaatgaggatcaaagtattacacgtccaccaatttcatactcaggtattcatcattttaaatttcacggtaatgcctcagaatattttggaatttggatcgttaatattcttttaactattattactttaagcttatatgcgccttgggctaaagttcgtcgtttacgttatttctatggaaatacagagttttttgaacgtcgttttgattttactggtattccaaccaagattttgattgggcgtttaattgcattaggaatttacgtagcattttcaatttcatcacagtattcaatgattgcaactgtagttggaatagttgtgttatatatggctgtgccttggctaattcgcgctactttacgttttactgcaagaaatagtaagtatggtaacgcacgcttttattttggtggcactataaaagaatcttataaaattttccttttaagtatattggtatatatctttacattaggaatttttacgcctgtagctatttggctatataaaaaatattatcttaatcacctatatgctggacaattaaattttaaattaaacgcgacctggactgcatatatggctgcagtttatgtacccatttttattgctcttggcatcattgctatcttttcaattatttattttagtattttaggaacactttccgggttctcatcgaattctgtaatctttgggatatttatgatgtatgccattattggattatttatttatccattaattgctgcgcgtcttttcattactacatggaacaatactacagttggaaacagtcaatttaaaacagactgtaatcaatggcgttttgcatggattgtagcatcaaactgggtagtaaaaatcttaaccctaggtttaatgtctgcttgggccgctgttcgcattcacaaatatcaggttgaatcaatgagcttaatcttgctagatgatccagataaaatgatgaatctagctcagcaagaacaaagtgctttagctgaagaaatcagtgatatttttgatattgatatctcccta

SEQ ID NO: 8515 - DNA, 1260 bp, Acinetobacter baumannii
gtggcgaataggggaaatgtacatcaattactcaaatctaaagaagaaatcgagtatttggtcactctacatacccatcgttatgccaatatgcctttgcccaaacaactggaaaaaaaattctggtgtttaaatcttgatcgaactagacagaacatttcaaagtttctagcaagtggtgtactcacttatttaatttttattttattggccctgccgaccgactatttagtgattggggtaccttatattactttggactttattcattgcttacttagtgcaatgaatattgcacttgccctgttattgttctgggtttttgccaaatttacaaaactctccgagcacttttatttagctgcatgtggcattgtatttttaaccattattattaatgcgatgttattgcttagtgtcggaaatatggcgcttaagaaccagtctatgttgcttctttcatttttatatatgctcgggttcatattaagcggtattaaacctttgcatatgctttgtgttggtttattggcagcatttttagtttttgcttttcttattttgttagacgtaaattgtgactatattgcactgggtcgtgctttgttcggtagttgtattttaggtttctcgattagcagtatgctcatctcaagagaaagaagcctttttttaaataaccagcttgctgaaattaatgaacagatcttacggattgaagcgtcggagttattgcatttaagccagcaggatgccctgactcaaatttcgaatcgacgtacatttgatgagatgtttgattttttctactaccgagcaaatcaagagaagcgtcctttagctgttttatttattgatattgatttttttaaaaactataacgatttttacgggcaccagatgggagataaagtcatctctagcattgctgcagcaattaaaaactcaattcgtcatgtcgactttgttgcgcgttatgggggcgaggagttcgttgtacttttacctgaaacacctgcacagggtgcttattcagtggctgcaaatatctataaagccattgagcggcaagcgattcctcacgcagcttctttagtgtcgaagtatgtcactatcagtttagggtttaccgtatatacgggtgggctaaagatgggacaagataggcttattcatgcggcagatcaggctttatatcgggcaaagcaactcggacggaaccaaatttattatcaaccgttacaagttgccgaaattgcc

SEQ ID NO: 8516 - DNA, 1032 bp, Acinetobacter baumannii
ttgaactctattaccctgctccagccagatgattggcatgcacatttacgtgatggtttagcattaaaacgtactgttccagatttggctaaacaattcgcccgtgcgatttgtatgcctaaccttgtaccgcctgtaaaaacagtagaagaagctttagcttatcgcgaacgcattcttgctcatgttccggaaggcaataattttgaccctcgtatggtgctttattttactgaccacacttcaccagatgaagttcgtaaaattaaagaatcagaacatgtaaatgcgattaagctttatcctgctggtgcgaccacaaactccgataatggtgtgagtgatattcgtaaagtttatgcagtcattgagcaattagaagagcatcaagttccgttattgcttcatggtgaagtaactcacaatcatgtagatatttttgatcgtgaaaaacgcttcctagatgaggtattatcacctctattgaaacagttcccgaaacttaaagttgtgcttgagcacatcactaccagtgatgcagcacactttgttttagaacaagaccgtaatgtggcggcaacaatcactccacaacatttattatttaaccgtaatgatatgttggttggtggtattaaaccgcacttttactgtttaccaattttaaaacgtcaaacacatcaaacgactttgcttgaagtggcgacaagcggtaatcctaaatttttcttaggtacagacagcgctcctcatgcacaaaatgcaaaagagaatgcttgtggatgtgcaggctgctatagtgcaccaaatgcaattgagctttatgcacaagcatttgaccaggtcggtaaattagagcgtctagaaggttttgctagccattttggtgcggacttctacggtctaccacgtaatacttctaccattactttggttaaagaagataacctcgttccagaatcttttgattatttagataatcaaaaaatcatcccgctgcatgccgggaaaacgctgcaatggagaaaagtg

SEQ ID NO: 8517 - DNA, 1701 bp, Acinetobacter baumannii
atgccttatgccaacccgaatgcacctaaaggcggagtattgagtcaggctgcgcaagggacatttgataacttaaacagtatgaacggtaagggaaatgcgacagaaggggtaaattatctttttgatactttaatgacccagtcacttgatgaagtgggcgtgttatatccactcttggcagaaaaagtttcgtatgatcctataaaaacccagtcagttactttttatttaaacccaaaagctcgatttagtaatggactgcccgtaacagctgaagatgtgaaatttagctttgatacctatcaaaccaaatctaattttggtctacaaatgtatcttgcagacttagcgaaaacagaagtgataaacccacatcaagttaaattcacttttaagtccagccataatcctaaaatgccatttgttgtggcgagtttaccgatttactcaaaagtagattggcagaaacgcgattttacccgtattagcttgcaatcgattataggttcagggccttacgtggttgagaaaattgatgcaggtcggagtattagttataaacgtaatccaaattattgggcaaaagacttacctattaataaagggcgctataacttcgatcatttaaagtatgtttattaccgaaattgggatattgcattcgaaggttttaaatctgggcaatataccttgcatgaagaaactaatcctaaaaaatgggttactgactatcattttccggctgtaaaagcaggcttgataacgcaatataaatttagacatcataaccccattgcaaccgagagttatgtttttaacacacggcgcaaacctttcaatgacatccgctttagacaagctttaacttatgcctatgattttgaatggcaaaataaagctttgttttacggacaatatcaaagactacaaagttattttgaaaatagtgatttggcagcgacaggtcgtccttcaaacaatgaaatggccatattaaagcctcttttgccaaagctttctccaatcatgcaaaaagctgttttggctgattggaaatatccagcttcagatgccagtggttttaaccggcaaaacctattacttgctagacagttgctgattgaggcgggttataaaattaaagaagggcaattatatacgcccgaaggcaaacctgtacaaattgagtttctcattcagcaagatggcaaacaaagaacactgatgccatttgtaagaaatttaaaaaaattaggaattaatattaatttacggcaggttgatgcgccgcaatatttagaacgtacacgccgttatgactttgacatgactacgatgaatttgccgcaatctttaaacccgggcaatgaacaggctcagttctggggaagtgcagcagcagttcaaaatggcaactataactacgctggtattcgtaatccggtaattgatgaggtgatttcaaaactggtcactgccaaagaccgtgaacagcaaatcacttatactcatgttcttgaccgattgcttcgtgcaggatattaccagatcccgacttatggaaaaggggattattggtatgcgtactggaatatgtatcagcagcctaaagtgaaacctgtgctctctgccggtatagagtattggtggagtaatgcaaaccaagctaagaaagttgctcaatatttacatcaacaa

SEQ ID NO: 8518 - DNA, 834 bp, Acinetobacter baumannii
atgagtgctcagttatttgttgtagccacccctatcgggcacttagatgatatgactttccgtgcaattgatatcttaaaatcagtttctgttgttgctgccgaagatacacgccaatcagctcaattattcaaacactataatatatctaccccacttaccgcatgccacgaccataatgaaagcaacaaaattgagcagttagttcaaaagctacttgctggtgaaaatattgctttgattagtgatgcaggcacaccacttattagtgaccctgggtttaaactggtccgtgctgctcaagaacatggtattagggttgtacctgtaccgggtgcatgtgctgcaattgcggcgttaagtgctgtgggcttaccaagtgaccgctttagttttgaaggttttttaccatcaaaagcttctcaacgtattacgcaacttgaaaagcttaaaaatgaaactcaaaccttaattttctatgaagcaccacaccgtattttagaatgcgtaaaaaatatggctgaagtatttggtgaaaaccgccctgtgggtttcgcacgtgaaattaccaaaacttttgaaaccatcaaaaaaatgactttaaaagatttggttagttttattgaaaatgaccataaccaagaaaaaggtgaaattgtccttgtggttggtggtgcagcagaaaaaaccgatctggaacaagaaaaactagatgaacttttaaagcgcttacttcaagatctatcagttaaagcagcatctcaactggctgctgatttaacgggtattaagaaaaaagtcgcttatcaacgtgcgcttgagttaacacaatct

SEQ ID NO: 8519 - DNA, 1230 bp, Acinetobacter baumannii
atgagtgaagtgttagatgtcgtcattgttggtggtggactagttggtggcttaactgctttattacttgcacaaggtggtgtacagcctaccgtgcttgatgctgcccctgtacttgatgttgaaaaaacattaagcgtgatgaatccacgtgttttagcacttagccaagcgacgattcatttacttaaagcagtcaatgtttgggatgatctggcacgtcaaatgccttataccggcatgcaagtgtggaatttaaatggctatggtgaaattaattttggccatgagtctgtacaaagaccaatgccagagcaagccttgggttctatggttgagccaagtgtattgaatgttgctattcaacaaaaaatgcttgagcagttaacagactatcgtactcaagttcgtgttacccgtattgaacaaggtgtcgggtgctggcatattcaattggcagatggcacggcacttaaaactaaactgcttattggtgctgatggcgccaattcatttgtacgtgagcaagcctttattgatctagatgtactagattacaaacaagcagcgattagctgtgcgataaaaacgtctaagcctcatcattatgttgctcggcaaatctttttgcctactggacctttggcatatttgccgatggcgagtcttgaagaaagtgaaaacggttattggcagtccattgtctggacactgccagatgattataccgatgaatattcggctttaagtgatagcgagtttatgcagcttttaactcgagaaagccaacatatgttgggtgaagtgttagatgttcgttcaagagcacaatttccattgaaagcgcgcgctgcaaaacaatacgttaaagctggtctagccctaatcggtgatgcagctcatgtgattcatccacttgctggacaaggggtgaatattggttgtttagatgcagcgatactctgtgatgcactattgcatgatttaggccgtggcgtatgggcacatgaacaaaccttaatgcgttatgaacaccgccgtaaaggacaaaatgatgcgatgatgcatagtatgtcggcaattggttggctagaaagcagtgagctatttccattgatttgggctcggaacgtgggactcaagcaagttgaacaaatttcgttcttaaaagagagttttatgcaacaagcaaatggtttaggggctttacaaaacacccagtatagtcgt

SEQ ID NO: 8520 - DNA, 771 bp, Acinetobacter baumannii
gtgtttgttgatacccattgccatttaacaatgttagatttaacgccttataacggtgatttagatctcgcacttgctgctgcgcgagcagaaggtgtttctaagtttatggcaatttcagttgaccttgatgatcatattgctttagctgaaatcgcaaagcgtcatgaagatgtggggtatacggtaggcgtacatccgtgtgaggatgttgatactatggctcgagcaacgactgagtatttgactgaattggctcaatcagaaaaggtatgggctttaggtgaaacaggtttagactattaccacagcactgactttattaacgagcaaaaagattgttttgctcgtcatattcaagcctctaaaaatgttaaaaaaccagtagttgttcatacacgttcagcaaaacatgatacggtggatattattcgagctgaacaatctacacatggtattttgcactgttttactgaggactgggaaacagcaaaagctgtattggactgcggttactatatttccttttcaggaattgtttcatttaaaaatgctcaagatctacgagatgtagccaagcaagttcctttagatcggcttttgattgaaacagatagtccttatttggctccagtaccatatcgtggtaaaacgaatgaaccaaaatatgtaccttatgtagcgaaagcactaagtgaggtatatgataaaccagttgaggaaattgcaagaatcacctcgcaaaattttgaaaatttacttaaagcgatt

SEQ ID NO: 8521 - DNA, 780 bp, Acinetobacter baumannii
atggctcaaattattgcgattgcaaaccaaaagggtggtgttggtaaaacaacgactgcagtaaatcttgcagcgtcactagctgtattgaaaaaacgtgtgctacttgtcgatatagattcgcaaggtaatgctacgatggggtctggtattcaaaagaatgatctactttattcaattacggatgtgttattgggtgaagtgccaatcgaaacggcaattcaaaaagctgaggttggatataaagttttgggttcaaaccgtgaactttctggtgtcgagcttgccattgccgagcaagaaggtcgtgagttcattttaaagaatgctttgaatgaaattcgggactcattcgattacattattgttgattgcgcgcctagcttaagtttaattaccgtgaatgctttagctgcagtagatggtgtaatcattccaatgcaatgcgaatactatgcattagaaggtttggcagatttaactcaaacgatcgatcgtattcaaaaagcgttaaatccagatttggaaattattggtgttttacgcaccatgtatgatgcgcgtaatgccttaactcgcgatgtatctgctgagttggaacaatattttggtaagaaactctacgacactgtgattccacgtaatgttcgtttggctgaagctccagcacatggtttgccagtgatttattttgaaaaaagttcgaaaggtgcagttgcatacttaaatcttgcggctgagatgttaaagaaaagtaaagtgaagaaaggaagtaaagta

SEQ ID NO: 8522 - DNA, 630 bp, Acinetobacter baumannii
atgcatccgttttttcaagagttacaacagggtagtcaaaaattaggtttatcgcttagcgatgaagctttgacattattgttgaagtatcaagatgctttggtactttggaacaaagcttataatctaacagcgattcgtgatcctaaagaaatgttagtaaagcatttgttggatagcctaagtattttgaaagatttgccagcaggtcgtttgctcgatgtaggtacaggtggtggcatgccgggcatgatcattgctttatgtcagccagaacgctcttgtgtattgcttgattcaaatggtaagaaaattcgttttttgaaacagtttattgctgaccttaagcttaaaaacgtaatagctgtgcaaacgcgtgttgaaaatcaagatacaattgatgaacttggccaatttgatgtaataacaagtcgtgcatttgcatcattaacagattttgttgaggctgcacgtccatatttacatgagcagagtataattgccgcgatgaaaggactgattccagttgaagaaatggaagagcttaagcaggaattttcatgtaaagtgattgaactgcatgtaccgagacttgatgaacaacgtcatttacttttacttcaacgaatt

SEQ ID NO: 8523 - DNA, 1725 bp, Acinetobacter baumannii
gtgaatcaagattttaaggtttatttacgtctcatatcctatttaaaaccttattggggcgtggccttattagttcttatcgggttcggtatgaactcagcgacggaggtttctgttgctaagctcattaaatttattattgatgcaattcaaagtgccagtagagcggatctagattggttccctttattaatcattttattggtattcttccgtggccttggcctatttatgggagggtactatacggctgtgatctcgcgcagtttggtttttagtattcgccaagaagtttatgcaaaacttctaagactgccggctcaatattatctcgataactcttcgggtcatattactgccaaaattatgtataacgtcgagcaacttacagctgcttcatctgaatcattaaaaaccattgttcgagatggcatgattacgttggggttgttaggttatttgttctataccaattggcgtttaacaatttgtattatggtgttcttacctgtaattgggattttggtgcgtaaagcttcaaaaagaatgcgcaaactctcgatgcaagttcaggatactatgggtgatgttaaccatgtagtgcaagaaagtattaatggtaatgcagttgttaaaagtttcgctggtgaagagtcagaacaagagcgtttctataagtcatcggaagaaaacttaaaacgtggtttaaaaatggtgattgtgcaaaacctaaatagtcctgttgttcaagtggtaatggcttgtgcaatggctctaattgtatggttagcattaagaccacaaattttagggaatacaactgctggtgagtttgttgcatatattacggcagcagggttactttcaaagcctgttaaaaacttgacagatgtgaatgaaaagttacagcggggtttagcagctgcacactcagtttttgaattattagatttacctgaagagcaaaatagtggtgaacttaaaccgcagttgcaaggtgcaattcgttttgaccatgttgtacttaactatgctgacggtacgcaagcgattaaagacttttctttagatattcgtccaggcgaaactgttgcattggtagggcgctctggtgctggtaaaacttctttagtgaacatgttggtacgtttccaagaagtctcaagtggtcaaatttatttagatgatttgccaatacgtgatattgagctttcaagtttgcgtacacaaattgcaatggtaaatcagcaagttgttttgtttaaccgaactgtacgtgaaaacattgcttatggtcagttacataatgcaagtgatgaagacgtaatagctgcagcaaaggctgcttatgcccacgactttattatgaacttaccaaatggctacgatactgttttgggtgctcaaggtctaaatttatcgggtggtcaacgtcaacgtattgcaattgctcgtgcaattttgaaaaatgccccaattctgattttggatgaggcgacaagtgcgcttgataatgaatctgaacactttattcaacaagcatttgatgaagctatgcaagatcgtacaacgattgtgattgctcaccgtctatcaaccattgaaaatgcggatcgtattgttgtgatggaccgcggacaaattgttgaacaaggtactcatcaagaattacttgctaagcacggtgcttattatcaattacatcagcgtaattttgaggaccat

SEQ ID NO: 8524 - DNA, 306 bp, Acinetobacter baumannii
atgaaagatggactccaaattgaagaaatgaaaaatgcggcggattcagtcgtaggaacattaaaatctttagctaacactgaccgtttattaattttatgtcacttagcccatgaggagttaaatgtctctcaaattgaagagaaaacacaaatcacccaacccaccctttcacaacaattgatgatgctacgtaaaagtgatgtcgtttcaacacgtcgtgatggcaagcaaatcttctattcaatcaaggatgataagatgcattcaattttaaatatgctttaccagttatattgcatagaa

SEQ ID NO: 8525 - DNA, 1035 bp, Acinetobacter baumannii
atggcactcatttcaatgcgccagctcttggatcacgctgcggaacataactacggcgtaccagcatttaacgtaaataacttagaacaaatgcgtgcaattatgcttgccgcagatgctaccaattcacctgtaattgttcaggcatctgctggagctcgcaaatatgcaggcgctccattcttacgccatcttattttggctgcaattgaagaatggccacacattccagtggtaatgcaccaagaccatggtacaagccctgatgtatgccaacgttctattcaacttggttttagctcagtgatgatggacggttcattgggcgctgatggtaaaactcctacaacttacgattacaacgtagatgtaactcgtcaagtggtagcaatggctcatgcttgtggtgtatctgttgaaggtgagatcggttgcttaggtagccttgaaacaggtatggctggagaagaagacggtgtgggtgcagaaggtgtactagaccattctcagcttttaacctctgttgaagaagcaaaacaattcgttgctgatacaaatgttgatgctttagcaattgctgtaggtacttcacacggtgcttataaatttacacgtccacctacaggggatattttagcaattgaccgtattaaagaaattcatgcggcattgccaaatactcaccttgtaatgcacggttcaagctctgtaccacaagaatggttaaaagtaattaacgagtttggtggtaatattggtgagacttatggtgtaccagttgaacagcttgtagaagcgattaaacatggtgtacgtaaaatcaatatcgatactgacttgcgtttagcttcaacaggtgcaattcgtcgtttcatggcggaaaacccagctgaatttgacccacgtaagtatttcgctaaaactgtcgattcaatgaaacaaatttgtatcgatcgttatgaagctttcggtacagctggtaatgctgacaagattcgcccaatttctttagagaaaatggttgatcgttataaa

SEQ ID NO: 8526 - DNA, 1185 bp, Acinetobacter baumannii
atgaattttcagcgcatgactgaccttaatttagcaggtaaacgtgtccttattcgtgaagatttaaacgttcctgttaaaaatggtgtgattactagcgatgctcgtttacgtgccgcacttccaacaataaaagctgctttagaaaaaggcgctgctgtaatggtattttcacatttaggtcgtcctgtggaaggtgagccaaagcctgaacaatcacttgcaccagtggctgcatatttaactgaagcattaggtcaagaagttaaattatttactgattatttaaatggggttgaagttgaagcaggacaagttgttttgcttgaaaatgttcgttttaatccgggtgaaaagaaaaataatcctgaacttgcacaaaaatatgcagctctatgtgatgtgtttgtaatggatgcttttggtactgctcaccgtgcagaagcttctacagaaggtgtagcacgttttgcacctgttgcagcggcaggcccattattggctgctgaattagatgcacttggccgtgcaatgcaaacacctgaaaaaccaatggtggcaattgtcgctggttctaaagtttcaacaaaacttgatgtgttaaattcattatctggtatttgtgaccaactgattgtaggcggtggtattgcaaatactttcttggcggctgctggttacaatgttggtaaatctttatatgaagctgacttggttgaaactgcaaaacaaattgctgctaaagtaagtgttccacttcctacagatgtagttgtagctgatgcttcacaaattaacttcgaagatttcttaggttctttggcagcagcgcaagcagtaattaagaaagttgaagatgtcacagcaaatgatatgattttggatgttggtcctgaaacagctaaagcatttgcaaatattttaacaacttcaaaaacgattctttggaatggtcctgttggtgtatttgaagttgatcaatttggtgaaggtactaaagcactttctcttgcagttgcacaatctgatgcattctcaattgctggtggtggtgatactttagctgcgattgataaatataatgtagctgatcaaattggttatatttcaacaggtggtggtgcattccttgaatttgttgaaggaaaaacattgccagcagttgccgttttacttgagcgtgct

SEQ ID NO: 8527 - DNA, 591 bp, Acinetobacter baumannii
atgaaacaacccaaaattattttggcatcaagcagtcagacacgtaaagatttaatgaatcgtttaggaatcgaatatatctgcattagtccagatattgacgagagtccttgtggtgaaacgcatgccgatgatttagcaaaaagactggcatttactaaagcacaagtaattgcacaaaaaaatcgtgaagcaattgtaattggatcagatcaggttgcatggcgagagcatgctcctcatgattttattggcaaacccttaacaattgaaaatgccaaagctcaattagcagcaaactctggccgaatagtcttttttagtactgctttaagtgtgcagtgccttgaaaaaagttttgaacatacgcttgttgagcattatcaagttaagtttcgcaatttaagcgcgcctgaaatcgaaagatacgtcgacttagatctgcccttagaatgcgcaggaagttttaagtgtgaaagtctcggcattagtttatttgaaaaaatgataggccaagaccaaaccacgctgatgggtttacccatgattcagctttgtcagattttaagacaactcaatctccaaattcct

SEQ ID NO: 8528 - DNA, 1455 bp, Acinetobacter baumannii
atgaaagttcgtactcgtattgcaccgtctcctaccggtttcccacatgttggtactgcctacatcgccctattcaatatgtgttttgcgaaacagcatggcggggaattcattttaagaatcgaagatacagaccagcttcgctctacgccagaatctgaaaaaatgattttagactctctacgctggttaggcttaaattggtctgaaggtccggatgtaggtggtcctcacgctccttaccgccaatcagagcgcatgggaatttataagcaatacgcgttagaacttgttgaaaaaggtcatgctttttattgttttgctacagcagaagaacttgaccaaatgcgtgccgagcagcaagctcgtggcgaaacgccaaaatacgatggtcgtggtttaaagctgtctcaagaagaagtagctcgacgtcttgaagcgggtgaacctcatgttatccgtatgaaagtgcctgaagaaggcgtgtgtaaatttaacgacttactccgtggggaagttgaaattccttgggcacaagtcgatatgcaagtgcttcttaaaacagatggtttaccaacctaccatttagctaacgttgttgatgaccatttaatggaaatcacccatgtattacgtggtgaagaatggcttccatctgcgccgaaacatcagttgctttaccaatactttggttgggaaatgccaacgctttgccatatgccattgcttcgtaatccagataaatcgaagttatctaaacgcaaaaacccgacctcaattaactactaccgtgatatcggcgttctaccagaagccttactcaactatttaggccgtatgggttggtcaatgccggatgaaagagaagttttcacattacaagacatgatggataactttgatattcaacgcgtatcactaggtggaccaatttttgacgttgaaaaactcaattggttaaatggtcaatggattaaagggttaaccccaggacaactattagaccgtttattgacatggaaaagtgatcgcagcactttagaagacattgctgccgctattcaaccacgtattaatttactttctgaagctgtaaattgggctggtttctactttaaccatatgccacaaattacggctgaaatgtttgaaagtaaaaaattgactcaagagcaagttcgtcaaagtttacaattcgcaatttggcgtcttgaaagtcagtttacttggaataacgacacagttagtcaaactttaatggatttggcaaatcaaatgggcattaaattacgtgacttcatgccaacgttctttattgcaattgctggctcaacaagttcaacaccagttatgcagtcaatggttacgcttggccctgacttaacctttgctcgcttacgacatgcactagaaattgtgggtgcaccgagtaaaaaagaggtaaaaaactgggaa

SEQ ID NO: 8529 - DNA, 921 bp, Acinetobacter baumannii
atgtcgcatatttctgtcttactttttgagaccgttgaaagcttattggcagatcgcacaactggggtgtatatcgatgcaacctttggacgaggtgggcatacgcgcttgttattgtcgaaactcgatgaaaacgcccgagtatatgcttttgataaagaccctcaagctctggaagttgcggctgctttagcacaagaagatccaagatttacgattattcatgcaagttttgctgatattaaggaaaaaatgcaggaaattggggtgcaaagtgtcgatggaattatggcagacttaggtgtgtcctctcctcaactcgaccaggctgaacgcggctttagctttatgcaagatggcccgttagatatgcgtatggataactctaaggggttgactgctgccgaatggttacttgaggttgaagaggaagatttggcaaatatcatttatcaatatggtgaagaacgatatagtcgccgtattgctagggcaattaagcaggccggaaaattggatactacggcgcaattggctgaaatagtaaaaacagcccatccaaaatgggaaaagcataaacatccggcgacacgtacgtttcaggcaatccgtattgctattaacaaagaactagatgatattgaagtatttttaccgcaagctgtagacttgcttaaaccaaaagggcgtttgtctgtgatcagcttccattcgcttgaagatcggttgatcaaacagtttattcaaaaagaatcaactctagcagaagattctggttgggggatgcctcaacagcaggttgatacgagaagattaaagaaaatttcacgggttcgtgcgagtgaagaagaagtaaaagcgaatccacgttcacgtagtgcatggcttcgggttgctgaacgcttggaacaaaaaggcgcg

SEQ ID NO: 8530 - DNA, 1497 bp, Acinetobacter baumannii
atgactgtttcttttcaagaaattcatccaatcgaaattgatgctcaatggcctcaacagccatttcacggctttagtttagatagtcgtaaagttgaaacgggccaaatttttattgctttgacaagttatagccagcctgaaaaaacgcgtacatttgctgaagcggctttagcaaatggagcgttggctgtcattagcgaaaccgaattaggtgtagcaaatgaatgggtatgccctgatgtgcgtcagcgcatgggagagtggcaaaaacgttatttgcaacaggctgatgtagtaaaacctttacggattatagctgtaacaggcacaaatggtaaaacaacaatttctcgtttaattgctgagttaattagttcacaacagcagcgctgtgcagtgatggggacaacagggaatggtattttacctaacttaacgccttctacgcatactaccctcgacgctctacagttacaaaatgcgctacatgattatgctaaacagggagcaacttttgcttctttagaagcaagttcacatggtcttgaacagggtcgattaaatggttgcgatattgaaattgctgtttatagcaacttaagtcgtgaccatctggattatcatggcactttagaagcttatgcagaagcgaaggcgcgtttatttcagtttaattcgttaaaagtcgctgttattaatttagatgatgcccatgctgacttgatgattaagtctgcccaaaataatccagcacaacctaaaattttgacttactcactaactcaaaatacagctgattattacattaccgatttaagctatagcttggcgggtgcaacttttaatttagtaagtcagcaaggttcatttgcggtagaaagcccattattaggtcatttcaatgttgaaaatttaattgccgcactcatcgctgctgagcaagctggtttcgatttacaggcattggttaattttgttcctaaactaattggtgcgccaggccgaatgcaagttattcgtgatgatgagcgattatttgtagtggattatgcgcatacaccagatgcattgattcaagtgcttaaaacattaaagcgtcatgtttcgaatcagctttgggcggtgtttggatgtggtggtgaccgtgaccgtggtaagcgtccactcatgactcaagcagctttagatggcgcaaaccctgttattctgacttcagataatccaagaacagaagaccctgaacaaatttttgctgatatgaagcaaggaatcgatttttcagggcatcgtatgcatgaaattcatgaccgccgtgaagcaattaaatttgttgcagagcaagctcaagctggtgacattgtagtgattgctggtaaaggacatgaaaattatcaagaaattaatggtgtgcgtcactggtttgatgatgtggttgaagtgcgttccgcgattgatgcccaacatcatacggtagatgctgcttaccctgcacaa

SEQ ID NO: 8531 - DNA, 1398 bp, Acinetobacter baumannii
atgcatacttcaaccaccagtaccgtgcctttggaaccgtggacagctcaacaattacaacaggcaacacagggttactggcataaagaccagatccctcaaactgaaattaaacgtattttgactgactcgcgtcatgcagaaagtggggatgcctttttagcactaaaaggtgaacgtttcgacgcgcataattttgtcgggcaagtggctgcaaatggctgccaagttgctattgtcgagcggcctatagatgcagaaattgctcagcttgtcgttgccgatacccgtttggctttggggcagcttggtgcgtatcgtcgtgaacaaaatgctcaattgaaagtaattgctttaacgggtagtagtggtaaaaccaccaccaaagaaatgctaggaagtattttgtctcgtttagcacctacattgattacccgaggcaatttaaataatgaccttggtgtgccgatgatgttgcttgagcttcgaaaggaacatcaatatgcggtgatggaacttggtgcaaatcatcaaggtgaaattgattacacatcaaaacttgttcaaccgcatgttgctggcattttaaatattggaactgctcatttgggtgagttcggcgggcgtgatggcatttgccgcgctaaatcagaaatctatcgtcatattttacctcagggcgttgctattgtgccgcaacaagatgactttaccgctgagattcgtgaagcagccaaaagccatcaaatcatgagctttggtgctggtggtgatgtctttgctacagagattgaattgttgccacaatctgtcaatttccagttacatacgcctcaaggttcaagttttgtaagactgccgtttgcgggtgagcacaatgtgcaaaacgcaactgcagcagtagcatttgctttggcgttaggtgttagcttggaagatatcgtaaaaggtctagagcaagcacaaggtgcaaaaggtcgtttgaattttattcaaaaagcgcctcatttatttattgatgatacttataacgccaatccaacatctatgcgtgctgcggcacaagtattacttcagcaaaatggcattaaagtcatggtgatgggggatattggggagttaggtgatagcagttggcaagaacatcacgatttaggtcgcgatcttgctgagcttcctttagaccatattgttgcagttgggcagtttgcctcagcagctctcgaaggcgcaggtcttcattctactaaattgaaagcatttcagactcaagctgaggcgcttccatttttaatcaatctaatccaaacacatcaaccccagtccatgagtttcctgtttaaaggttctcgctttactcatatggaaacgttgatggctgatttgatggagaaactt

SEQ ID NO: 8532 - DNA, 1116 bp, Acinetobacter baumannii
atgctgttatggttgtttgaacaacttgcgggctatcacagttcgtttcaggttgttcgttatttaacattacgttctttactcagtgtattaacgtcactgaccattggtttggttctcggaccaatcatgattcgtaaattacaagcgttaaaatacggtcaggcagtaagttcatttgctcctgaaaatcatgctaagaaaatgggtacaccgaccatgggtgggattttaattctgctctcaattggtattagtactttattgtgggctgatttatctaacccttatgtttggattgtacttggtgtaatggttgtgttcggtgcggttggctgggcagatgactggattaaaattcgctataaagataatgcaggtctacctgcccgtaagaagtttttctggacttctgtcgcatcgctcggtgctggtattgcgttatatttaattgctacccaacaatctaatgcagaatacacagcaaatatgctggatttattgattcctttctttaagaatctttcaattccgctttctattgttcctttaggtttagcatttattgtatttacctatttagtaattaatggtgcctctaatgcggttaacctaactgatggattagatggtttagccattatgccagtagttatggtagcgacgggcttaggcgtatttgcttatttatctggtgatattcgttttgccaactatttgcatattccttatgtgaaatatacctctgaacttgtggtgatctgttctgccatgattggtgcaggtttggcatttctttggtataacgcacatccggcgcaagtctttatgggtgatgtgggcgctttagctctaggcgcaatgcttggaaccattgccgttatggttcgccaagaaatcgtattcgcaattatgggcggtgttttcgttatggaagcggtatcggtattcctgcaaatcggctcattacgaatgcggaataaacgcgtattcttgatggcacctttgcaccatcactatgaaaaacaaggctggaaagaaacccaagtggtcatccgtttctggattattacgattatgctggttgttttaggcctaatgaccttaaaattgcgc

SEQ ID NO: 8533 - DNA, 2463 bp, Acinetobacter baumannii
atgtatctctatattgccccaacgcttccggaaatgagttcactaaaaaaagcaccgcttttaaaaccattgcaagtctatacagccgacaatcaactcattgctgaatacggtggtaaactttctattccggttgaatacaaacaaattcctcctaattttattcatgcatttctagcagcagaagattcttctttctttgaacatagtggcattagttttaaaggtttaggtcgtgctttgagtgaaagtgtaactggttctgatgtacaaactggtggttcaaccatcacgatgcaggtcgcaaagaactattatttaagtccagaaagaacactaaaacgcaaaataacagaaatctttttggctcgaaaaattgagcaaaacttatccaaagaagacatcttgagcctctatgtgaataagattttcttaggtaaaaacgcttacggtatcgcagcggctgcaaagatttactacaacaaaagcattaatgagctcagcattgcccaaatggccatgattgccggcttgcctaaagcaccatctaaatataatccagttgttaaccctgagcgtgcacttgaacgtcgcaactggattttaggccgaatgcttcaacttggttatatttctcaagcagaatatcaaaaggccgttgcagagccaatcaatttgaatatgcccaaccgtgacctaaataatattcacccctacgcaggtgaaatggtccgctcagagcttgtaaaacattttggtgaacaagcaattgattctggttataaagtctacacaacaattaatgcgaaacgccaagcgattgcggaaaaagctgtgcaggacggtcttgaagcttatgaccgtcgtcatggctggcgtggtgcagaagcacatgataagccattaagcgaatttagagcatatgccaacacttatccggcgcaagtcaccaaggtaaatagcagctcttttgaagcattaatgcaagatggctcaacagtaaccgtgcaatggtccggcatgtcatgggcccgtccctatcgcaatgcaaatagcgtaggggcagcgccttctcgtgcatctcaaattgttaaagttaaagatattgttcgtttacgcccaaatgaagctaaaactgcgtggtcactagttcaagtaccaaaagttcaaggtcagctcattgcaattaacccaaacgatggctcaattgaagcaattgtaggtggttataatttctatcaatcaaaatttaaccgtgctttacaaggctggcgtcagccaggttctaccatcaaaccattcctctatgctttagcattagaacgtggcatgacaccttatagtatggtgaatgatagccctattacgattggcaagtggacaccgaagaactctgatggtcgctacctaggtatgatcccgttacgccgtgctttgtatttgtctcgtaatacggtttcagtaaggctcttacaaactgtaggaattgaacgtactcgccaattattcatggattttggtttacaagaggatcaaattccacgtaactacaccattgctttaggtacgcctcaagtattaccaattcaaatggcaactggatatgcaacattcgcaaacggtggttaccgcgttcaaccgcattttattcagcgtattgaagatgcatacggtaaagtcatttacgaagccaaaccagaatatgcatgtattccatgtattaacgctcctgagacaactgacgatgcacaggtaactactccagatgatcaagttgttgaagttacaaataaagagctagagcagaaagaaaagacaaccaaacaacttaatcttaaacagacggacaaaaataacagtcaatatcgtcaagctcagcgcattttaaaatcaagctctgcttatgacatggcaaatatcttacgtgacgtaattgagcatggtacaggtcgtgctgcactcaagattggccgtagtgatttaggaggtaaaacaggtacgactaacgatgcaaaagatgcatggtttgcaggttttaatggcaagttagtaactgtaacatgggttggttttgaccagccgactacacttggtcgccgtgagtatggtggtattgctgcactaccaatctggattaactttatgggtcaagcattgcaaggtacaccagctgcttgggttcgtttagaaaaagatgctcaggcacctatttctcgcgataagcaagaagtcacaactgaagtaggcgataagaaaacctatcgtgctgcccctccattagcacgcccactctatcgtcctgcaccaccacaacctaaaaccaccaataatgacttcgatgacttaccgggtgaggaaattgtgattccttccaagacaacacctccagcgatgaaaccttcgcaaggggcagcgccgaagcgtgaaaaagatgaattagaaaacttgattaatcaaattgag

SEQ ID NO: 8534 - DNA, 1419 bp, Acinetobacter baumannii
atggcagagcgcctaaataatgactttcaatttctggatgtaccacgtcaagatccagagaaaaaagatattactgtccgcaaagcagagtttgtggaaatttataaaccttttacttcggaaactgtaaccaatcagacgcaccgttgtttaggttgtggtaacccatattgcgaatggaaatgtcctgtacataactacattccaaactggctaaaactcattgctgaaggccaaattttccaggctgctgagctttgccatcaaacaaatactttacctgaggtatgtggtcgtgtatgtccgcaggaccgtttgtgtgaaggtgcttgtaccttaaatgatggctttggtgcagtaactattggtaatgctgaaaaatatatcaatgacacggcttttgctttgggttggcgcccagatatgtcacatgtgaagtggacaggtaaaaaagttgcaatcattggtgcaggtccagcaggcctaggctgtgccgacattttagctcgtggcggtgttaaaccggtggtatttgacaagcgtcctgaaattggtggcttactaacatttggtattccagaattcaaaatggaaaaagatgtgatgaagcgccgccgtgaaattttcactggcatgggcattgaattccgcttaaatactgaaattggtaaagatgtcacgattgatgaattacttgctgaatatgatgcagtattcatggggatgggaacttatacctacatgaaaggtggtttcccaggtgaagaccttgacggtgtttatgatgcgcttgatttcttaatctctaacgtgaaccgttgtcagggatgggaaaaggacccaagtgaatacattagcatggatggtaagaaagttattgttcttggtggtggtgatactgcaatggactgtaaccgtacttcattacgtcaaggtgcccacgacgtaacatgtgcataccgccgtgatgaaagtaatatgccgggttctgcacgtgaagtaaaaaatgcgtatgaagaaggcgtaaagttcttatttaaccgtcaaccaatcgagattgttggcgaaaatggtaaggtaacaggcgtaaaagtggtaacgacacaaatgggtgaaccagatagtcgtggtcgccgtagccctgagccaattccgggttctgaagaagttttaccagctgatgcagttttgctagcgttcggtttccgtccaagccctgctgactggtttggtagtgtgaatattaatcttgatggttctggtcgtgttgttgcacctgaacagcaggaatttaaattccagacttcaaacccaaaaatctttgctggtggtgatatggtacgtggttcagaccttgtagttacagcaatctgggaaggtcgccaagctgctgaaggtattttagattaccttggtgtt

SEQ ID NO: 8535 - DNA, 631 bp, Acinetobacter baumannii
ttaaccttggcactgagtaaaggacgtattttaaaagaaacattacctttacttgctacagccggtattaacttgcttgaagacccggaaaaatcgcgtaagttgatttttccaaccacacataagcaggttcgtattttaattttacgtgcgtctgatgtgccaacttatgttgagaatggtgcagctgacttaggtgtagcaggtaaagacgtacttatggaacatggcgctcagcatgtctatgagttattggacctgcagattgcgaaatgtaaattaatgactgctggtaaagtaggaatggaacgcccaaaaggtcgtttaaaaattgccactaagtatgtcaatcttacacgtcaatattatgcgagcttaggcgagcaggtggatgttattaaactttatggttctatggagttagcaccattagttggtttgggcgattatattgttgacgtagtggatactggaaatactttacgagcaaatggtcttgagccattagaagaaatttgcaaagtatcttcagcgtcttattgtcaataaagcgagctttaagcgtaaacaggttttattgaacccaatcatttcccaacttgaacaagctgttcaatcacgttaaaagtaa

SEQ ID NO: 8536 - DNA, 1230 bp, Acinetobacter baumannii
atgtgtttaggttttgtgatgtcaaatttcttgcccgccgaagaacagcttgccctcatccaacgaggcacgcacgaaattatttcagaagaagatttactgaaaaagcttaaagagaatcgtcctcttaaaattaaagctggttttgaccctacagctccagatttacatttaggacatacggttcttattaacaaactaaaaacgtttcaagatttgggtcatgaagttactttcttgattggcgactatacagccatgattggtgacccaacgggtaaaagtgcaactcgtccgccgttatcacgcgaacaagttgaagctaacgctaaaacttatcaagaacaagttttcaaaatcttagatccgaataagacaaaagtacgttttaattcagagtggtttaaccaaaagtctgctgcggatcttattcagttggcaagccagcaaacagtatcacgtatgttagagcgtgatgacttcactaagcgttataacaatcatcagccaattgcaattcatgagttcttatatcctttagttcaaggctatgactctatcgcacttgaagcagacgttgagttaggtggtacagaccaaacctttaacttacttatgggccgtacattacaaagccgttatggccaagaatcacaagtatgtatcactgtaccaattctagaaggtttagatggcgtaaataaaatgtctaaatctttaggtaactatattggtgtttttgatgcgccaggtgcaatgtaccaaaaagtattatcaatgcctgactctttaatcgaacgttatttcgatttattaagttttaaatctctagatgagatcaaagctttattagatgaaatcgcggctggtcgtaatccacaagaagtaaaacgtattcttgcactcgagttggttgaacgcttccatgatgctgaagctgctgctaatgctcataagagtgctggtaaccgtattacagaaggtgaggtgccggcagatactcctgaagtaactatttcacgtggtgagtttggtggtgaaatctttattgccacgattcttcgcgtagcaggattaaatccaaatgcagcagctgcaaaagatgctgttgcacgcggtgcagtaaaagtagactggaatgtagtagatgcaagtttctctgtaaaagaaaacgggactttcattattcagtctgggaaaaaagcaattgcacgtgtaactttcactgac

SEQ ID NO: 8537 - DNA, 1146 bp, Acinetobacter baumannii
gtgcgtttgaaaatcgctaaagaaagtttactcaatgttttatcgcatgtggtcggtgcggtagaacgtcgtcataccttgaatattctttcaaacgtcaaaattcagactaatgctcaagcgctcactattacgggttccgatttagaagttgaactcgtagcgagcaccgctttatcagaaggggcgtgccttgaggcaggcgagacaactgttcctgctcgtaaattgatggaaatttgtaaatctttgcctacagctgcattgattgatttacaaattactgaagatcaaagatgtattttaaaatctggtaatagccgttttgtgctaggtacactaccggctgaagattatccattgttaaccactgagaatagccaaggtacgcaagtacaggtgactcaacgtgaattaaagcgtttatttgaaaaaactgcttttgcaatggctgtacaagatgtacgtttttacctcactggtactttattagaaattgatgaaaatcaattgcgtgcagtaacaactgatggtcaccgtttagcactttgtgaaattttggcttcctctacttcatctcagttggtacaagcgattgtgcctcgtaaagctgtgggtgaattacaacgtttactcagcattgaagatgaacagctcactttgcttattggccgtgaattattaaatgtaacgattaatacgccaagccgtgataaagaacaaggtgatattacagttcgttttacaactaaattgattgatgggaaattccctgattatcgccgtgttattccacgtggtggtgataaacatgttttgattggtcatgacgtatttaaacaatcattacaacgtgtagcaattttaagtaatgaaaaattgcgtggtgttttcctaaacttcaatcaggattctttacagcttcgtgcaaataaccctgaacaagatgaagcaattgaagatttagcgatccaatatcaaagtgccccattagaaatgtcatttaatgctcaatacctactcgatgtgttgggtgtattagatggtgatgatgtaaatatgagcatgactgaggcgaatcagtctgtattggttcaagatccggctcatcctgaccagacctatgtggttatgccgatgcgtgtt

SEQ ID NO: 8538 - DNA, 1929 bp, Acinetobacter baumannii
atgattcaatttgaccaagtttctttacgccgcggtggacgtgttctatttcaaaaagcgtctatgcaattacacccaggttggaagattggtctgactggggtcaatggtgcaggtaaatcaacactatttgcagcattactcggtagcttaggagcagatgaaggctcgcttactcgcccttctgtatggactgtggcgcatatggcgcaagaagttaaagccctagacatgcctgctatcgactttgtcctttctggtgatgaagaatattgggatattcaaaataaacttgctcaaccagaacaattaactgactcggatttggctaaattacatggccgttttgatgaaattcatggttattctgcgccatctaaagcagctcagctgatggctggcttagggtttctagaacatcaattacgtttaaacgttgctagtttttctggtggatggcgtatgcgtctgaatttggcgcgtacattgatgagtcgttctgacttactcttattggatgagccaactaaccacttagatttggatgcaattttatggttagaagattggctcaaagcttatgagggcaccctcattttaatctcgcatgaccgagatttcttagatgcaattacagaccatattcttcatattgagaatcaggaacttactctttacacgggtaactactccatatttgagaccactcgaagtgaacgtttagcacaacaacaacaagcttttgaaaaacagcaagaagcccgtgctcatttacaaaagttcattgatcgctttaaggctaaagccactaaagctcgtcaggcacaaagtcgtattaagcaacttgaacgcatgcagcaacttgcacctgctcatgtagatacaccgtttacttttagtttccgtgaacctaccaaaatgagttcaccgttgctgaccctagaaaatgccagcataggttatggcgataaaaaaattgctgaaaaaattaaacttcaaattacgccaaactcgcgtattggtctgcttggtatgaatggtgcaggtaaatcaacattgattaaaagcttggtgggagatttaccattactggcaggtgaacgtaaagcttccgagctacttaacattggttactttgcacagcaccaaatggacgctttagatggtcaagccagcccaatgcttcaactcgcccggatagccgataaacaaattagtgaagcaacattacgttcttttttaggtagttttggctttagtggcgaacgcatggatactccatgtgaaagcttctctgggggtgagcgcgctcgtttggccttagcactcattgtatggcagcgcccaaatgttttaattctggatgaaccaacgaaccacttagaccttgatatgcgtcatgcgcttagtatggccttacaagattttgagggtgcagttgttctggtttctcacgaacgtcaacttattgccagcgtttgtgatgaactccttttggtacacggtggcaaatgtaccgagtttgaaggtgatttgcaggattatgctaaatggctacgtgaagcacgccagcaacaaatcaatgctcagactgctgtagcacaaaataattcatcttctgccgctccagctcccgctaaagtcgataaagaagcacagcgtaaagaagcagctcgccgtcgtgaacaaactcgaccaatccgtaaaaatattgaaaaggttgaatctcaaattgaaaagcttcagccacgtcttgctcaaatcgaagaagctttagcagatacttcactatatgaagctaatcgtaaggacgatttgcttaaactgatgaatgagcaaaccgaactcaaagctaagcttgaacaatatgaagagcaactcttagaactcatgatggaacttgaggaaatggaagcctcatttgaaaac

SEQ ID NO: 8539 - DNA, 1400 bp, Acinetobacter baumannii
ctttggacagactgcttaactcgcttgcgacaagagctctctgataacgtctttgcgatgtggattcgccctttagtagctgaagaagtagaggggatactacgtctctatgctcctaatccttattggacgcgttatattcaagagaatcatttagagttaatttctatattggctgaacaaattgtcagaagggcgggtgcgtcaggttgaaatcttgggtagattctcgtcctggtagtattttgtcctctagtgaacagcctgcaacaactacagcagctttacaaactgcccctatacctcaacctgctaaggttaaaagagaaccggaacctgttgctaatactgcagttagttctaagagttcaaaaaagaaactattaaatccacaatttactttttcactatttgttgaaggccgttctaaccaaatggcagcagaaacctgtagaaaagtattaacacagttaggtgcttctcaacataaccctttatttttatatggtccgacaggtctaggtaagactcacttaatgcaagcagttggtaatgccttactgcaagcgaagccgaatgcaagagtcatgtatatgacttcagaaagttttgtacaagattttgtgagctcattacaaaaaggaaaggtagaagagtttaagaaaaattgccgttctttagacttgttattagtagatgatattcatcttttggcaggaaaagaagcaagcctcgttgaattcttctatacatttaatgccttacttgatgaatccaaacaaattattttaacttctgatcgataccctaaagaattaacagaacttgatcctcgtttggtttctcgtttttcctgggggctatcagtaggtgttgaaccacctgatattgaaactcgaatcgaaattctgcttaaaaaagctgaaaatagtggcgttgatttacctagaaactgtgcgttgtttattgcccaacaagtcgtagcgaacgtacgtgaacttgagggcgcactgaataaagttgtcgcaatttcacgttttaaaggtgctccaattgaccttgatgtcgtacgggaatctttaaaagatgttttagcgatccgtgctcgtacaattagtgtagaaaatatccagcgtgtagtgagtgaatatttccgaattccattaaaagagctggtaggtccaaagcgtacccgaatttatgctcgaccacgtcagttggcgatggggcttgcccgtgaattaacgggagatagttttcctgaaattggaatggcttttggtgggcgtgatcacagtacagtgatgcatgcttgtgaaaaagtcgtcagtttacgggaagaagacccaatctttgatgaagattataagaacttattacgtttgcttcaaagttaatga

SEQ ID NO: 8540 - DNA, 132 bp, Acinetobacter baumannii
atgaaacgtactttccaaccatctgaattaaagcgtaaacgcgttcatggtttccgtgctcgtatggcaactaaagctggtcgtcaagtattagctcgtcgtcgtgcaaaaggtcgtcatagcttaactgtt

SEQ ID NO: 8541 - DNA, 399 bp, Acinetobacter baumannii
ttgggtgtgatggcactttacagttttagcacagatcttcgtatacgctgtgctgcagattataaaagtgtatttgatggtgcgctttttaaagtgcatcaaccccattttttatttcttgcaaaattaaccgaacagcctaacagccgtttgggtattgttgttgctaagaaaaaagtgcgtcgtgcgcatgaaagaaatcgaataaaacgtcttgctcgtgagagctttcgtctacatcagccgaaatttgggtcagacatagatgttgttgtgatgcctaaagttggtatagaaacgattacgaatgctgagctatatcaacaattagattttgcttggcaaaaattacaacgcttagcgaaaaaacattctaaagttgtcccaacctcgcagaat

SEQ ID NO: 8542 - DNA, 2466 bp, Acinetobacter baumannii
atgagttcagagtctcaatcagcctctcaaacagaacaaaccaatgaaaaggcttatgattcctctagtattaaagtattacgtggattagatgcagttcgtaaacgtccgggtatgtatattggggatacagacgacggtaccggtttacaccatatggtgtttgaggttgtcgataatgcaatcgacgaagctttagctggccactgcgatgaaattattgtcacgattcacgaggatgaatcggtcagtgtttcagataatggccgcggtattccaaccgatattcaccctgaagaaggggtttctgctgcagaagtaattttaacgattctgcatgcaggcggtaagtttgacgataatagctataaagtttcaggtggcttacacggcgtaggtgtttcggttgttaacgcactttcaagtaaattgcatctaacaatttaccgtgctggtcaaatccatgagcaagaatatcatcatggcgatccgcaatatccattgcgtgtgattggtgaaacggataataccggaacaactgtacgtttttggccaagtgcagaaacattcagtcaaaccatttttaatgttgaaattctagcacgccgtttacgtgagctttctttcttgaatgctggtgtacgtatcgttttacgtgatgaacgtattaaccttgagcatgtgtatgactatgaaggtggtttatctgagtttgtaaaatacatcaacgaaggtaaaaaccatctcaacgaaatcttccatttcacagctgatgctgacaacggcattgctgtagaagtagcattgcaatggaacgatagttaccaagaaaatgttcgctgtttcacaaacaacattccacaaaaagatggtggtacgcacttagcaggtttccgcgcagctttaacacgtggcttaaaccagtatcttgaaaatgaaaatattctcaagaaagaaaaagtgaatgtgactggtgatgatgcgcgtgaaggtttaacagccattatttctgttaaggttcctgatccgaaattctcgtctcagacaaaagaaaaattggtatcaagtgaggtaaaaccagcggtagagcaagcaatgaacaaagagttctctgcttacttacttgagaatccacaagctgcaaaatcaattgcaggcaagattattgatgctgcacgcgcacgtgatgctgcacgtaaagcacgtgaaatgacacgccgtaagagtgcattagatattgcaggtttgcctggtaaattggctgactgtcaggaaaaagacccagcgctttctgaattgtatcttgtcgagggtgactctgcgggtggtagtgccaaacaaggccgtaaccgtaaaatgcaggctattctacctttaaaaggtaagatcctgaacgttgagcgtgcgcgctttgataaaatgatctctagtcaggaagtgggtacattaattacagcacttggctgtggtattggccgtgaagaatataaccctgacaagctccgttatcataaaattattattatgaccgatgccgatgtcgatggttcgcacatccgtacattgttattaacattcttcttccgtcaaatgccggagttggtggaacgtggtcatatttatattgcacagccacctttgtataagctcaaaaaaggtaagcaagagcaatatattaaagataacgacgcattagaaacttacttgatttcaaatgcgattgatgagcttgctttatatattagtgctgatgcgcctgcaattacaggtgaagcgctggcaaaagtaattcaagactatcaagtttcacaaaagagcttacaacgcttaacgttacgttatccagcaagcttacttgatgcattactcgaagtcgacgcatttaaagcagatcaaaaccatgatcaagcttatgtacaacaatgggcggatcaagtacgtgaagctgtacaaagactacagccaagtttgcgccctgaaattacgcttgaaacatttgaacgcgagaatgctcaaggcgagaaatctgcgcattactggccacgtgtaactgtatatgttcataacttgccacatgcttacttacttgacgcaggtttattgaattctgcggaatatgctcgtttattgaagaactcgaagagttggttcaagttaattgaagatggcgcatacttgcaaaaaggtgatcgtcgtattcaagtcgctaatttccatcaggtatggcagcacattctgcaagattcacgccgtggaatgatgatccagcgctataaaggtctgggcgagatgaatgctgagcagctttgggaaaccacaatggaccctgaaaaccgtaatatgttacaggtgactattgatgatgcaattgaagctgatcgcatgttctcatgcttaatgggcgatgatgttgaaccacgtcgcgcctttattgaagaaaatgcattaaatgcggatattgatgct

SEQ ID NO: 8543 - DNA, 1758 bp, Acinetobacter baumannii
atgcaacaatgggccaggtttgcaattctcggggccatgtttgtcaccgcatatttgctcattttggcttggcaaaaagattatggaaatgctgcaactgcaccgcaacaacaagcggcggctgtaagttcacatgaagtatctgctgatttgccaaatgctaaaactgcaacagtggcttccgatgtgccacaagcaaatattgcgcagtcacaaaccacagatgcaactgcacctgtgaatcaacagcttatttcagtacaaactgacctttatcatctttggatcaatccaaaaggtggtgatattgttcgtattgaattactctctcacgacaagagcaaagacagtaatcaaccatttgttatgcttgaaaatgatgccaagcgtacttatgttgctcagtctggcttaattggtttgaatggaccagatagcagtcgtggtggtcgcccattatatgctgttgaaaaaacatcatatactttagctgatgctaaaggggtacaagatcaaagtggacattctgagaaagttttaacagttcctatggtgtttaagacaccagaaggcgttgaaattattaaaacttttacatttactcaaggtcaatatccaattgttgtcaaacatcaagttgttaaccgtagccaacaaaactggcaaggtcagatgtttggacagttgaaacgtgataattcggaagatccaggtaagtcttctcagggtattttcactttaggtacgttcttaggtggtgcatggggtactccggatgctcactacaacaaacttaagtttgcgaatttctctgaagaaaaactcaataccgaagctaaaggcggttgggttgcaatggttcagcactactttgtaagtgcttggattccaggaaaccttaaactgactcaagcaaatggtcagccttatgtcgctaaacttgaatctcgtcagtctgcggatcatatgaatattattggctttacttcgccagtaattaatgttccggcgggtacttcgatggaagtcgatgcgaagctttattcaggtccaaaagtacaatctgaattaaaagatttagcggtaggtttaaaccagactgttgactatggttggttatggccaattgcgaagttattgttcctaggtcttcaattcttccatagcattgtaggcaactggggatggtcaattatcttacttaccattatggtgaagatgattttatggcctttatcttcaaaaagttatcgttctatggcgaaaatgcgtgtgattgcaccagaaatgcaacgcatgaaagaagaattcggtgaagaccgtatgcgcttctcgcaagaaatgatggcgctttacaaacgtgaacaggttaacccgctttctggttgtttaccgttattgctacaaatgccaattttccttgctttgtactgggtactcatggaaagtgtggaattacgtcatgcaccgtggttaggctggattcaagacttgtctgcgatggacccatggttcatcttgccattaattatgggtgcgacaatgtttgctcagcaaatgttgaacccgcaaccagctgatccaatgcaagcgaaagtattccgcattatgccgattatgtttacggtatttatgttgttcttccctgcgggtcttgtgttgtactggattgtgaacaacagtattacaatcttacagcaatggtttattaacaagagcgttgagaaaagtcgtatcagtaaagctgaatcggcatct

SEQ ID NO: 8544 - DNA, 1353 bp, Acinetobacter baumannii
atgcatagtcaaaccacaattgccgcaattgcaacgccaccagggcgtggtggagtgggcgtgattcgcttatcgggacctaaggcctatgatattgctcaaaaactgacgcaaaaaaacttacctgaagctcggatggcgggtttccgtaagttttatgatgctgatggaagtattatggatgaaggtattgtcttgtgctttccaaatccacattcttttactggtgaagatgttgtagaacttcaaggccacggtggtcctgtcattcaaaatgccttacttggccgtttatttgagcttggggcaattgctgcaaaagctggggaattctccatgcgagcttttgaaaatggcaaaatggacttggtacaagctgaagcaattgccgatttgattgatgcgacctctcaagctgcggctcgttcggcagtccgttctttacaaggcgctttttcaacaaaaattaatacagttttagaaaaactgattcatttacgtctgcacgtagaagctgcgattgattttccagaagaagaaattgattttttggctgatggcaaaattttagctttgttggaagatgttcaacaatctgtacatgccgttcaaacctctgcacgacaagggcaattactccgtgaaggtctacaggttgttattgcgggtaaaccaaacgcgggtaagtcgagcttgttaaatgcacttgctggtgttgagcgtgcaattgtgactgatattgctggtacaactcgtgatgttttacatgaaaaaattagcttaaatggtttaccaatcaccttaacggatactgcgggtcttcgtgaaacgggagatgtagtcgagaaagaaggcattcgtcgtgcaatcaaagaaattgagcaggccgatttgttgttattggtctacgatttaaatcaaggtgatgaccctttaaaactggctcaagaatactttgccgaacatattgaaccgcgtcgtctcatgttaattggtaataaatgtgatttaactggtcaacctgccgaaataagcgattatcaagggttccgtcatatcacagtttcagcaaaacaagagatgggtgtacaaggcctcgtagatgcgattacagcgcatgcaggatttcaccctgaggaagatacatttattgcgagaacacgtcatttagacgcaatgaagcgcactcagctctatttggcagaggcacgtgagcaacttgttgtatttaacgctggtgagctcgttgctgaatcactacgtcttgctcaaaatgctttaggtgaaattacgggtgactttagtgccgatgacctattaggcaaaatctttggttcgttctgtatcggaaaa

SEQ ID NO: 8545 - DNA, 909 bp, Acinetobacter baumannii
atgattgttcgtgataaaagcaatgtatttaaattattatttgcttggaaaggaacaattttgccgaaggttttgcctgcactgagttttgttgtacttatttcagcctgtgtggtctggctctcttattatcattggattcaaattcctaccgtacccgcgatcggatttaccatctttggcgtgattctttcgatttgtacaggctttagaaataacgcatgttatgaccgttggtgggaaggccgcaagctctggggtgctttaattgccaatgccagacatattgttagagatagccatgttttatctaatgaacaacgtgaacatttaattcatcaggtcttaatttttagtaatttattgcgtgatcgtttacgtcaacaaacagtcgaacccacaaaatttcttgagcatgcctatttaaataactcttcacttaattatttaaatgagcatattaatgcacctcaatttgtactcgaaaatattcaaaaagatttagtcaaagctctaaaagacggcgaaattagtgacattatctatggcactctgacacgccatattgttgagctcggcaatatccaagcaggttgtgaccgaattgctgggacacctttaccctactcatattcagtacttttgcaccgtgctgtttattgtttctgcttcatcttaccttttagccttgaagctgctttaggcatttggacaccgcttattgtcggcttaatcgcttatatgtttttaggactagatgccttaagtgctcaaattgaagaaccttttggcttgcaagaaaatgatttaccgctcgattctattgtgcgtttaattgaacgagagtctctaagctctttagggcagccattaccgcctattattgaagcccaaaacaacaatttactt

SEQ ID NO: 8546 - DNA, 1056 bp, Acinetobacter baumannii
atgaaagcagcgcgtttttatgacagaggtgatattcgtattgaagatatccctgaaccagaagtcactcccggcactgtaggcattaaggtagcttggtgtggaatctgtggtacagatttgcacgaatttatggaaggaccaatttttattccaccgtgtggacatccgcatcctatttcaggcgaatctgcgccgattactatgggacatgagttttcaggtgtggtttatgccgtaggtgaaggtgtcgatgatattgaaattggtcagcatgtagtcgtagagccttatattgtggctgatgatgtgccgactggaccgggcgataattatcatctttccaaaaatatgaactttattggtttaggcggtcgtggcggtggcttatcggagaaaattgcggttaaacgccgttgggtgcatccaatttccaataaaattccattagatcaagcggccttaattgaaccgttatcggtgggtcatcatgctttcgtacgtagtggtgcaaaggccggtgatattgcactggttggcggtgcggggccaattggtttattgctttcggcaattttaaaagcgaaagggcttaaggtcatcattaccgaactaagtgccaaacgtaaagaaaaagccaaagagtcgggagttgcagattatattttagacccgtcagaagttgatgttgtttctgaggtcatgaaaattactaatggcgatggtgttgatgttgcgtttgaatgtagtagcgttaacaaggtgttagatactttggtcgcggcagtgaaaccaacaggcgttatagttattgtttcgatttggagccacccagcatcaattaatgtgcacagtgtggtaatgaaagagcttgatgtacgcggcacaattgcctatgtaaatgaccatcaggagactattaaactggttgaagaaggtaaaataaatcttgaaccttttattacgcagcgcattcaacttgatgatttgatttcacaaggttttgaaaccttaattcataacaatgagtcagccgttaagattattgtacatcca

SEQ ID NO: 8547 - DNA, 1017 bp, Acinetobacter baumannii
atgccaaataaaagttttcgtaatgcaattaaagaagccattgaatcagaaatgcgccgtgatccaaccgtatttgttgttggtgaagatgttcgtggtggacacggcggtaaaaacactgaagaaaaccagttagaaggtttcggtggtgtattgggcgtaaccaaaggtttatggacagaatttggttcggaacgtgttattgatacgccaattaccgagtctgcaattatcggtatggctgctggtgctgcagcaacaggtttacgtcctgttgccgatttaatgtttatggatttctatggcgtgtgtcatgacatgctctataaccaagccgctaaattccgttatatgtttggcggaaaagcaaaagcaccaatggttgtacgtggcatgattggcgcaggtttctctgcggcagctcagcattctcagtcaccatataacgtatttgctgcggttccgggcttaaaagttgtagtaccatctagcccatatgatgtgaaagggctgttaattcaggctattcgtgatgatgaccctgtagtgttctgtgagcataaaatgctttatgacattaaaggcgaagttccagatgatgcctatactattccttttggtgtagcaaattatacccgtgaagggacagacgtgaccattattgctttaggcttgatggtacatcgtgctaatgaagtggcagacaaattggcaaaagatggtatttcggttgaagtggtagaccctcgtacaatttcacctctggatgaagaaggaattttagagtctgttgcgtcgactggacgtgtggttattgtggatgaatcagctgcacgttgtggttttggacatgatgttgctgcactagttgcacagaaaggtttccactatttgaaagcacctgttgaacttgtaacgccaccacatacgcctgttccattctctccagttttagaaaaagaatggattccaagtgtagagcgtattgagcaagctgtgcgaaaaacattggaggct

SEQ ID NO: 8548 - DNA, 960 bp, Acinetobacter baumannii
atgcaattaacggaagagcaattactcgcagcatataaacgcatgcgtgatattcgtgaatttgaagatcgacttcatgaagaaaataccaatggtgatattccaggctttattcacttatatagcggagaagaagctgtagcagtcgggatttgcgaaaacttaaccgacaaagactatatcacttcaacacaccgtggacatggacactgtattgcaaaaggctgtgatattcacgccatgatgctggaaattttcggtaaagatgacggactatgccgtggaaaaggcggttctatgcatattgccgatttagataaaggtatgctcggtgccaacgggattgtgggtggtgggcctcctttagcaattggtgcagcgttgacagcgaaaaccttaaagactggtggcgtcggactgtcttttacaggtgatggtggttcaaaccaaggccttacttttgaagcgatgaacatggctgttgttcttaaacttccagtaattttcgtttttgaaaataacggctttggcgaaggtactggtcatgattacgcagtaggaagtaaagacattgctggtcgtgcagcaggctttggtttaccggcagttaaagttgatggtacagacttctttgctgtctatgaagccgctcaaactgccattgaacgtgcgcgccgtggtgaaggtccaagcgtgattgaaaccatcacaaaccgtttttatggccacttcgaaggtgatcctggcttgattcgttctaaagaagaagtcgagttcatcaaagaaaataaagatcctttgaaaattttccgtgagaaagtcaaaggcaaaattgatgaagccaaactagacgagattgatgcagcttcaaaggcaaatgttgatgatgccgttgctaaagcccgtgctgcggcatatccgaaaccagaacaactccttactgacgtctatgtctcttac

SEQ ID NO: 8549 - DNA, 984 bp, Acinetobacter baumannii
atggacttaaaaaggcaaatagagacaggtattaagttaagaggaatagataaagtttctcgtattcctattaaaattttacctaccgaagaactacctaaaaaacctgaatggattcgagcaaaaataactgatttcgaagaaattcaacgtatcaaaaatttattacgccaacaaaagctacatagtgtttgtgaagaggccgcatgtccaaatctacctgaatgttttggtggtggtacggcaacatttatgattatgggagatatttgtacaagacgttgccctttctgcgatgtagcacatggtcgtccaatgcctttagatgaaaatgaacctaaacatctagctgagacggtcgctaacctaaacttaaaatatgtagtcattacctctgtagaccgtgatgatctacacgatggtggtgcagcacattttgtgaagtgtattgaagaaatcagaaaccgttgtccagatacgctaattgaaattttagttccggactttcgtggccgtttagaaacagcactctctacattaagcttatcaccacccgatgtgtttaatcataatattgagacagtgccgcgtttatataaagcaatgcgccccggttcggactatcagcattcgttaaatttattaaaacgttttaaaaaatactgtcctgatatcaaaactaaatgtggcctaatggtagggttaggagaaattgaagctgaggttattgctctactcaatgatttaaaagatcatgatgtagatttagtgactattggacaatatttacagccctctaaatcacatgcccctattcaccggtttgtgaatttacaagaatttgaaagatacactcagcatggccagcgtttaggctttaaaaatatctggagtgcgccaatggtccgttctagctattttgccgatcggcaatatttcggtgaatctgcaccaaagccattttcaagagaggatgttttgtca

SEQ ID NO: 8550 - DNA, 1170 bp, Acinetobacter baumannii
atgagttcaattgttatagtttcaggtagccgtactgcaatgggtggttttcagggtagtttatcttctctaactgctccagaacttggcgctgctgtcatccgtgaatcgatccaacgtgcaggtgttaaacctgaacaggtagatgaagtgattttcggttgcgtactcagtgcaggtattggtcaaggccctgctcgtcaagccatgcgtaaagctggcgtgcctgatcatgtcggagctgtgaccattaataaactttgcggctctgcaatgaaagctgtgttaatggcatcagataccttaaaagcaggcagtgccaatattattgtggctggcggcatggaatctatgacgaatgcaccttatattttgcctaaagctcgcggtggttatcgtatgggacacggcgaaattaaggatcatatgtttttagatggtctcgaagatgcagaaacaggtcgtttaatggggtcttttgctcaagacatggcaaataccaaaggctttacccgtgagcaaatggatgactttgcaatttcttcacttaaaaaagcgcaaactgcgattacggaaggttacttcaaagaagagattgttcctgttgaagtaaaaacccgtaaaggtgtcgaagttgttgatcaagatgagcaaccattaaaagctaatcttgagaagatcccaacattgcgtccagcttttagtaaagatgggacaattacagccgctaactcaagctcaatttctgatggtgctgctgcgttagtacttaccactgaagaatatgctcaaagtcacgggttaaatactttagcaaaaattgtggcaacttcgactcactctcagcatccaagcgaatttactattgctccaattagtgcaattcagaaagtacttgagcgtgctggttggtctgttgatgaagtagatgcttgggaaattaatgaggcttttgcgatggtggcaatggcaccaattcatgagctaggaattgatgaagcaaaagtaaacgtccatggtggtgcatgtgcattaggccatccaattggtgctacaggttcaagaattatcctttctcttatttatgcattaaaacgcttaggtaaaaagaaaggtgttgctgccctttgtattggtggtggtgaagcaacagccgttgcgattgaaatt

SEQ ID NO: 8551 - DNA, 1074 bp, Acinetobacter baumannii
atgattagctatgagaaaaccgatatgaaccatggcacatttcctgtttttgatggccataatgatgtactaacccgattgtggttaagtgattataacaatcctgctcaagcttttattcaagaaggtttagccggacatctcgatttaaaacgttgccaacaagccggttttgttggcggtatgtttgctattttcttgccgccttttcattatgttaagcagcatcatcccaacaaactatttgaccaagacgcatctgacttcacgcaacagcaaattgaacacatttgtttggcacagctcgatttagcaaaacaacttgccgagtactctaacgacattcaaatttgcacaactgttcaggatatccagcactgcctaacacagcaaaagttagccattgtattgcatatggaaggtgctgaagcattacaacataatccagatttactcgatgtattttatgatgctgggcttcgtagcatcggtccactttggaatagaccaagtcgttttggacatggtttaaatgccaagtttccgcattcacctgataccggagcagggcttacaaacgaaggtaaagcatttataaagcgctgtgctgataaaaaaatggtgattgatgtttcccatatgaatgaacgagctttttgggatacagctaacattcttcagcagccaattgtcgcaactcactcaaatgttcatgctttatgtccacaagccagaaacttaacagataaccaacttaaagcaattaaggactctaaaggcatagtcgggttaaattttgatgtcgcatttttgcgtaaagacgggcagcgtgatgcaaacacatccattgaggtaattttagaacatcttgaatatttaatagatcaaatgggagaaaatcatgtcggttttggttctgactttgatggagcactgattagtcatgaaattgaagatgtaaggggactacacctactgattgaagcaatgcaaaagcgacattattcgaatgagattatagaaaaaatttgtttttctaactggctaaccgtgctcaatcgcatcctaagtaaa

SEQ ID NO: 8552 - DNA, 909 bp, Acinetobacter baumannii
atgcatatttatattttaggttcagcagctggaggcggtttccctcagtggaactgtaattgtcctaattgtcatggtgttcgtacaggtacgattaatgccaaagtgcgtactcaatcttcaattgcaatttcagaaaacggcgtagactggattttattaaacgcatcaccagatatccgtcaacaattatttgattttaaagcggctcaaccagcacgaaaattacgtgatactggtattaccaatgttattttaatggatagccaacttgaccataccactggacttttaactttacgtgaaggctgcccaatgaatgtgtggtgtactgaaatggtctatcaagatctcaccacgggttttccggtattcaatatgttgaaacactggaatggtggtcttcaatatcatcaaattgatcctaaacaagcttttaaaattaatggtttcgaaaatttagaatttttaccattaattattcaaagcgcggcacccccatattccccacatcgccatgatccgcatgagggagataatattgctttaattattaaagatcataaaacacagaagcagttattctatgcgccaggtcttggaaagattgatgatcaaatcatgcagattatgcaagattctgactgcgtcatgattgatggcacactatggacagatgatgaaatgcagcaaaccggtgtagggaaaaaaactggccgtgaaatggggcatttatacattagtggtgaaggcggttcgttgtcttatttgaaccaactcagtacaccaaagaaagtgctaattcatattaacaataccaatccgattttaaatgaaaactctgctcaatttgctgaactaaaagcaaatggtgtagaagttgcctttgatggcatgcaaattgaactc

SEQ ID NO: 8553 - DNA, 783 bp, Acinetobacter baumannii
atggtaagtgatacgaagataaaaaatttggctttcgcctgttcagtcctcagcataggattggtctttaatgttccagccaaggctgaatcagttactgtttatgcagcagcaagcttaacgaatgcaattaacgatttagaaaaaatttacgaaaaacagaataaagtagaagttaaaacttcatatgcaggttcatcgaccttagctaaacaaattgaagctggagcaccagctgatatttttatttcagcagatacccagtggatggattatctacaaaacaaaaaattagttgcaacaaatgaccgtataaatttattaggtaatcgtttggttctaattacccctaaagggcaatcattaaacataaaactagataaaacgaccgatcccaatagagtgtttacaggaaagatttgtacaggagataccaaaagtgtgcctgtaggcaaatatgccaaacaagcttttactaatttaggttggtggagtcgtattgagccaaagttagttgaaacagaagatgttcgagctgctttaaactttgttgcgcgtggtgaatgtcaggtcggtattgtctatgcaaccgatgctgcgattagcaaagacgtgaaggtagctggcatatttccggaaaatacacattcaccaattatttatcctttagggttgattaaaaagaatccgaactcaacaaagttctatcaatttttacaaagcaatcaagccaaagctgtttttaaaaaatatggctttagcgtgttggctccagtcaagcca

SEQ ID NO: 8554 - DNA, 1779 bp, Acinetobacter baumannii
atgacgactttaaacatactatttaagacaacatctttatgtctggcaatggccttattggtaggctgtaatgataatgatgacaatgattcaagcacaccagcaccgcgaagtaaccaaactgtaaatattttagctttcaatgactttcacggaaatttagaaccacctaaacgttacgttgaagcagcgaatccaaatgatgcatctcaaactgtacgtattcctgtcggtggtgtgagttactttgcagatgcaattaagaaacttaaagctcaaaatcccaataatgctgttgtgtcagcaggtgacttaattagtgcttccccactcacttcttcgttatttctagatgagcctactattgaagtcatgaatgatattcaaattgacttcaatgcggttggaaatcatgagtttgaccgtggtacagatgaattgcgtcgtttacaaaatggcggttgtcaacaatataccagcactgccccatgccaaattaataaaaactttagcggcgcaaaattcaatttccttgcagctaacgtggcaatgaaaaatgatacaagtaaaacgatttttcctgcctataaagtcaaaacttatggcgggattcctgtagcttttattggtttaacactcaaagcgactccaagtattgtttcagcggtgggtattaaagatgttgaattccgtgatgaagcagatacggtaaatgctttaattcctgaactccaaaaacaaggtattgaagcgattgtcgtcgttgtccatgaaggtgcagcgccaagtacgaaactcaatcaaaaaacatgtgatggcttaagtggaccaattttaggtattttagatcggttaaatccggcagttgatattgttgtttcggggcatacacatcagtcttatatttgtgattatgcaaccaagaatccagctaaaccatttttactaacctcagctggccaatatggcactcttattaccgatattaaggtggagttggatggtaaaactggcgatatcattaaaaaggatgctaaacaaattccggttcaaagtgaggcctatacttcgggtacaaccactgtaagtctgacagacctctatcaaaaatttagtaagacaccaagtatcgaagcgattttagataaataccgtcaagcagtaaccacaatttctgggcgtgttgttggaacttctactgccgttgtgagccgtacgcaagtcgaaagtggtgaaagcccactaggtgatatgattgccgatgcgcagcaagctgccgctcttcaagcaagtaatcaaggttcggattttacgttaatgaacccgggtggtgtacgtgctgacctactgattaacagcaataaccagattacgtttggtgatatttttgcagttcaacctttcggtaactcgattgtgactttgagcttaaccggtaaacagattagagatgtgcttgaacaacaatggtctggtgcaaatgcaaattcgcctagaattttacagccgtctaaagagttgagttatcaatatgcggcaaatacatctgtttcaccacgagcaagtaacatcatggttgctggttcaccattagttgacactaaagtatatcgcgtgacggtaaatagtttcttggcagatggtggtgacaactttacggtattaaaagaaggccaaaaccgtgtcggtggtggtcaagatatcgatgcgcttgaaagctatgttgctaagaactcaccgttaattattccggctacgactcgtattaaagtcattaaa

SEQ ID NO: 8555 - DNA, 1026 bp, Acinetobacter baumannii
atgggacattcagttgcacttaactttgccgatggcaaaacctttttcatttcagtgaataacgatgaattgttgcttgatgcagcagttcgtcaaggaattaacctgccgttagactgccgcgaaggtgtttgtggtacctgtcagggacagtgtgaaaccggtatttatgaacaagaatatgttgatgaagatgcattaagtgagcgtgatttggccgagcgaaaaatgttagcttgccagacccgtgtaaaatctgatgcagctttttatttcgatcatgattctgctatctgtaacgctggtgataccttaaaaattgaaaccaaagtgactgcggttgagctggtttctgaaacgacagcaatcttacatcttgatgcaagcagtcacgctgaacaacttcagtttttgccgggtcagtatgctcgtttgcaaataccggatactgaagactggcgttcttattcttttgcaaatagaccaaatgcgaccaatcaattgcaatttctcattcgtctcttaccagacggtgtgatgagtaattacttacgtgaccgttgtcaggttggacaaagcctacttattgaagcaccgcttggtagtttctatttacgtgaagtagagcgaccgctggtttttgtggcaggtggaactggtttatcagctttcttgggaatgcttgataacttggttgaacagcctaactcacctgcagttcagttatattacggcgtaaatagtgaaaccgacttgtgtgaacaacagcgtttacaggcctatgcagaacagctaccaaactttagttatcacccgattgtgactaaggcaacggaaacttggcaaggtaaagccggttatatccatgagcacttaaataaagatcaactggccgaacaagcttttgatatgtatttatgtggcccaccgccaatgattgaagccgttaaaaattggttagatgagcaagctctgcaaaactaccgtatctacagcgagaaatttttacagagcaatacctcacgt

SEQ ID NO: 8556 - DNA, 447 bp, Acinetobacter baumannii
atgtctcaaacactgcaagccgcttatgcagcaaaacgtaaagcacgtcgttttgctgtacaaggtatttatgagtggcaaatgagtcacaaccctgtacatgaaatcgaagcgcgtacacgtgctgaaaatgcaatgcacaaggtagacttgaactattatcacgaactacttactcaagttatcgctcagcacgaagaccttgatgcgttacttattccggtacttgaccgtgaaattgacgcgctagatggtgtagagctcgcaaccttgcgtttaggtgcttacgagttacgtgatcatctagaaattccatatcgtgtggtacttgatgaagcaatcgaacttgcgaagcattttggcggagcagacagtcataaatacatcaatggtgtattagaccgtttaagttcgacactgcgtagcgcagaaaaacaacaagcaaaa

SEQ ID NO: 8557 - DNA, 1362 bp, Acinetobacter baumannii
atgtcaactactgtcattattcttgctgcaggcaaaggaacgcgaatgcgttctcagctccctaaagtactacaacctttagctggtcgcccgctactaggacatgttattaaaacagcaaaacaactattagcagaaaacatcattaccatttatggacatggtggcgatcacgtaaaaaagactttcgcacaagaaaatattcagtgggttgaacaagcagaacagttagggaccggtcatgctgtacagatgactttaccggtacttcctaaagacggcatttcattaattttatacggtgatgttcctttagtccgtcaaacaacacttgaacaactgattgaagtatcaaataaaaccggtattggcatgattactttacatgtcgataacccaacaggttatggccgtattgtccgccaagacggtaaaatccaagcaattgttgaacataaagatgcaaccgaagctcagcgtcaaattcaagaaatcaacacaggtatttactgtgtcagcaatgcaaaacttcatgagtggttgcctaagctttcaaatgaaaatgcacaaggcgaatactatttaactgatatcgttgcgatggctgttgctgatggtctagaaatcgcctcaattcaaccagagctcgcatttgaagttgaaggtgtaaatgaccgcctgcaacttgcagcacttgagcgtgaatttcagaagcaacaagcaaaagaacttatgcagcaaggcgtaacttttgctgatcctgcacgttttgatttacgtggtacagtaaaagttggtcatgatgttcgtattgatgtgaatgtcattattgaaggcgactgtgaactcggtgactttgtcgaaatcggtgctggctgtatcttaaaaaatacaaccattgcagcgggcactaaagtccaagcatacagcgtttttgatggagcagttgttggggaaaatacccaaattggtccattcgcacgcttacgtccaggtgctaaattggcaaacgaagtacatatcggcaactttgttgaagtcaaaaatacaacgatcggtctaggcagtaaagctaaccatttcacctatttaggtgatgccgagatcggtgctgaatcaaatattggggcaggtacaatcacctgcaattatgatggtgcaaataaacacaaaaccactattggcgatgcagtttttatcggttctaatagctcgctggttgcgcctgtgactattggtaatggagcaacagtcggtgcgggttctgtgattacgaaagatgtggctgaacaaagtctctcctttgagcgtgctcaacaaatttctaaagcaaattatcaacgtccccaaaagcttaaaaaa

SEQ ID NO: 8558 - DNA, 1170 bp, Acinetobacter baumannii
atggctactttaaatccacgtgacgttgtgattgttgatggcgttcgttctgccatgggcaaatctaaaaacggtatgttccgtaatgtacgtgccgacagtttatctgctgaacttgtacgtgcgctcgttgcccgtaaccagtttgatgtaaatgaagttgaagacctgatttggggctgtgtaaaccagaccctagaacaaggtatgaacattggccgtaacatcggtttattggctggcttgcctaaaactgtggctggtcaaacagttaaccgtctttgtggttcttctatgcaggcaatccacactgcggctgcacaaattgcaacaaaccaaggtgatatcttcattattggtggtgtagagcacatgggccacgtaggtatgatgcacggcatcgaccttaaccctgaagcatctaaacactacgctaaagcatctaacatgatgggcttaactgctgaaatgttaggtcgcatgaacggcattacccgtgaagaacaagatgcattcggtgttgaatctcaccgtcgtgcttgggctgcaactcaagaaggccgtttcaaaaatgaaatcattggtgttgaaggccacgatgcaaatggctttaaaatcctttgcgacatcgacgaagtgattcgtccagatgcaaaccttgaagcgttcaaagcattaaaacctgtatttgaccctaaaggtggttcagtaacagcagcaacatcttctgctctttctgatggcgcttctgcaatgttgcttatgtctgctgaacgtgcacaagcattaggtttaaaaccacgtgccgtgatccgctctatggcggttgctggttgtgatgcagcaatcatgggttatggtccagttccagcaactcaaaaagcgcttaaacgtgctggcttatcaattgctgatatccagactgttgagttaaatgaagcatttgctgcacaaggcttgtctgttcttaaaggcttaggtctgtatgacaaacaagacatcgtgaacttaaatggtggtgcaatcgctcttggtcacccactaggttgttcaggtgctcgtatcaccactacgttgttaaacgtaatggaacaacaagatactcaaatcggtcttgcgaccatgtgtatcggccttggtcaaggtatcgcaacagtgatcgaacgtgtt

SEQ ID NO: 8559 - DNA, 531 bp, Acinetobacter baumannii
atgaaacgttggtacattattcatgcctattctggttatgaaaaacaagtgatgcgttcacttaaagaacgaatccagcgtagcgctgttgccgatagctttggtgatgtccttgttcctaccgaagaagtggtagaaatgaaggatggtaagaagcgtaaatctgagcgtaaattctttcctggctatgtgttagttgaaatggaaatgaatgacgatacttggcacattgttaaagagtgtccaaaagtattaggttttattggtggtacacctgaaaaacctgcgccaatcactcaacgtgaagcagatgcgattcttgcgcgtgtacgtaatactggtgaagccccacgtcctaagacgatgtttgagccaggtgaagaattacttgttattgacggtccattcacagactttaaaggtgtggtggaagaggttcaatacgataagtcacgtttaacgttgacgattaacgtgtttaatcgaccaactcaggttgaactcgaatttcgccaagtcgaaaaaacgatt

SEQ ID NO: 8560 - DNA, 1785 bp, Acinetobacter baumannii
atggctggcgcacgtggcttatggcgtgcaacaggaatgaaagatgaagatttcggcaaaccgattattgcagtggtcaattcatttacccaatttgttccaggccacgtccatctgaaagatttaggacagcttgtcgcggcagaaattcaggcagcaggtggtgttgctaaagagttcaatacaatcgcggtggatgacggtatcgcaatggggcatgacggcatgctttattcattaccatcacgtgatttaattgcggactcagttgaatatatggtgaatgcacattgcgccgatgcgatggtgtgtatttcgaactgtgacaaaattactccgggaatgttgatggctgcgatgcgtctaaatattcctgtggtatttgtgtctggcggaccaatggaagcaggtaaggttaaattccgcggtgatgaaaaagcaattgaccttgtagatgctatggttgttgcagctgatgacagctacacagacgaagaagttgcagaatttgaacgttcagcatgtccaacttgtggttcgtgttcaggtatgttcactgcgaactcaatgaactgtttaacagaagcgctaggtttatcgttaccgggcaatggttctatcgttgcaacgcatgcaaaccgtaaaaaattattcttaaaagcaggtcagcttattgttgaattggccaaacgctactatgagcaaaatgatgcaagtattttgcctcgttcaattgccactaaagctgcttttaaaaatgcgatgacacttgatattgcaatgggtggttcaaccaatacagttcttcacttgttagctgcggcaaatgaagctgaagttgattttacgatggacgatattgatgaattgtcacgtcgagtaccagtgctttcaaaagtagcaccagcaaaacaagacgtacatatggaagatgtacatcgtgcaggcggtatcatggccattttaggcgagcttgatcgtgcgaatctacttgatgtatctgtaccgacagtacatgagaaaacattaaaagatgcgttagataagtgggatattatccgtactgaagatccagaggtatatgagttctatcgttcatctccgggtggtgttccaactcaagttgcattctcacaaaaccgctactactcaactttagatggcgaccgtgaaaagggcgtaattcgtaatgcagaacatgcattctctaaagatggtggtttagctgttttatacggcaacatcgcacttgatggttgtatcgtaaaaactgcgggtgtagatgaatctattttaaaattcactggtacagcacgcgtttttgagagccaagatgcagctgtagaagcaattttaggcaatgagattaaagctggcgatgttgttgttattcgctacgaaggtccacgtggtggtccgggcatgcaagaaatgctttacccaaccagctatcttaaatctaaaggtttaggaaaagactgtgcgttggttacagatggtcgtttctctggtggttcatcaggtctttcaattggtcacgtttcgccagaagccgctgaaggtggtgcgattggtttggttgaagatggcgataccatcgaaattgatattccaaatcgtaccattcacttgaatattgatgatgcgactatggcgcaccgtcgtacagttcaagaagcgaaaggctggcatccgaaagaagaacgtaaacgtaaagtatcaaaagcgttaaaagtttatgcaatgcataccacaagtgcggcaaaaggagctgtacgcgttcta

SEQ ID NO: 8561 - DNA, 1776 bp, Acinetobacter baumannii
atgatgcgaactcattactgtggctctttaactgaagcccaaatcgaccagaccgttacattatgcggttgggtacatcgtcgccgtgaccatggcggtgttattttccttgatatgcgtgaccgtgatggtctcgttcaagtggttattgacccagatactccagaagcatttgcaactgcagataaagcacgttctgaatatgtattaaaaattacaggtcgtgttcgtcgccgttatgaaggtactgaaaacccaaatatggtgagtggtcaaatcgaagttttaggcaaagaaatcgaagttcttgctgcatctgaaactccaccattcccattaaatgatgacactattaacgtgtcagaagaacaccgtttaaaatatcgtttcttggacatccgtcgtccagaaatgttagagcgtttacgcttccgttctaaagtaaccaacttgattcgtaactatttagatgatcatggtttcttagacgttgaaactccaattttaactcgtgcaacccctgaaggtgcgcgtgactatttagtaccaagccgtgtacaaaatggtagcttctatgcccttccacaatccccacaattattcaaacaattgttgatggttggtggtattgatcgctactaccaaatcgcgaaatgtttccgtgatgaagacttacgtgctgaccgtcagcctgaatttactcaaatcgacattgaaacatcgttcttaaacgatgatgacattatggatttgatggaaggtatgactgttaaattatttaacgacttgcttggcgtaaaatttgaaaaattccgccgtatgccatacagcgaagcaatgcgtgattatgcatctgacaaaccagacttgcgtattccgttaaaactcgttgatgttgcagacttaatgcaagaagttgagttcaaagtatttgcaggtccagctaaagaccctaaaggccgtattgcagcacttcgtgtaccgggcgcaggttcattaacacgtagtcagattgacgaatacactaaatttgtcggtatctacggtgcaaaaggcttagcatacattaaagtcaatgaaatcgaaaaaggaattgaaggccttcaatctcctatcgttaaattcatcgaaccaatcgtaatgcaattgcttgaacgtgttggcgctgaaaatggcgatatcgtattctttggtgcggacaaagctaaaattgtaaatgatgcaatgggtgcgcttcgtgtcaagatcggtcatgacttgaaccttgcgacttgtgagtgggctccactttgggttgttgacttcccaatgtttgaagaaactgacgatggcaaatggacttctgttcaccatccattcacattacctaaatctagcgtagaagacgtgaagagcaatccaggcgaagcactttctgttgcttacgacatggtattaaacggtactgaagttggtggtggttcacttcgtatttacacattagaaatgcaaaaagcgatttttgaagcgcttggtatttccgatgaagaagcagaagaaaaattcagcttcttactcaatgcgcttcgttacggtgcacctcctcacggtggtttggcatttggtcttgaccgtttagtaatgcttatgactggcgcgacttcaattcgtgatgttattgcgttccctaaaacgaaaactgctgaatgtccacttactcaagcaccggctcctgttgaagcaaaccagcttcgtgacttgggcatccgcttacgtgaacaacaaaagaaagaagct

SEQ ID NO: 8562 - DNA, 1845 bp, Acinetobacter baumannii
atgagcaaaacttttgccgaattttctttgcacgaaaccttacaacaagctcttgaaggtttaggttttactaacccaactcctgtgcaagaacaatctattcctgctgctttagaaggtaaagaccttcttgtttctagccagactggttctggtaaaactgctgcattcttattaccgacattacataatttggcaggtcaagatactttcgttccgttcaaagaacgtatgaaagcagtgactcagcctagcattttagttttatgcccaacacgtgaattggctcaacaagttagccaagacgcaattgcttttgtacgtcacatgaaaggtgttcgtattgctgcaattatgggtggtatgccttttggtaaacaaattcaacagcttaaaggtgctcaagttgtagttgcgactccaggtcgtttattagacttagttaaccgtcgtcaattaaagctagacaaagttgatgctttaatcgtggacgaagctgaccgtatgttagaccttggtttctctgaagacttagaagcgatcagtgacttggctgcgaatcgtggtcaaacgttaatgttctctgcaacttttgctgaccgtattattcgtcttgctgagcgcatgatgaatgaacctgagcgtattgcaattgaaactggtcacagcaccaatactgacatcacccaaactttacactggacagatggtttcgaacacaagaagaaacttctgactcactggttggctgatgaaacgcttgaccaagctgttgtattcgcgagcacacaagaagatacagatatgttggctgaagaacttgcagaagcaggtcactcagttgttgcacttcacggtgcaatgccgcaaacagttcgtaaccgtcgtttacgtagtatccgtgaaggccgtgcgaaaatcttagttgctactgacgttgctgcacgtggtcttgacgttccaacaatttcacacgttattaacttcggcttaccaatgaagcatgaagattatgtacaccgtattggtcgtacaggtcgtgctggtcgtacaggtcaagcgattactttagcgacttatcgtgaacgcggtaaaatccgtgcgcttgaagactacttagaagctcgtttaaatgtttctgaaattgaaggtttagagccatctccacctccagctcgtccacgtcgtgaaggtggtcgtggtggtaacggtggccgtgatggtcgtcgtggtggcggtttcggcggtggtcgtcgtttcgagggtgaaggtaacttcaaacgtcgtgaaggtggtcgtgatgatcgtccacgtcgtagcttcgatgataagcctcgtggtgagcgtcctgctttcggtggcgaagatcgtccacgtcgcgagttcaactcagatcgtccacgtcgtgaaggtggttttgaagaccgtccacgtcgtagcttcggtggtgaagatcgtccacgtcgcgagttcaactcagaccgtccacgtcgtgaaggtggttttgaagaccgtccaaaacgtagcttcggtggtgaagatcgtccgcgtcgcgagttcaactcagatcgtccacgccgtgaaggtggttttaacgataagcctcgttttgattcaaatgatgacaatcgtggtaaccgcgtagactataaaccacgtcgtgaaaacggtttcggtgaccgtccacaacgtagctttggtggtgaagatcgtccacgtcgtgaaggcggttttggtgatcgtccaaaacgtagctttggtggtgaagaacgtccacgtcgcgcagttcgcgaagaacactttaatcaagaatctcgtggtgagcgccgtcgtaaattcgaccgt

SEQ ID NO: 8563 - DNA, 2076 bp, Acinetobacter baumannii
gtgccttattttctaggacatcaattagcaacaattcccctcactttaggtgtggtcgcagctggtttaagtgatattgatgatcgcttttcagtgcgaatcatgaatttgatttacacctatattggtttcttcattaccgcagcttccgtacaattacttttcccttatccaatgctttttgcactagggctgattgcctcttgtattggctggattttactagggtcattaggccgccgttacgcaacaatttcttatggatgtctggttgtttcagtttataccatgctgggagttcatttatttgaccagtggtatattcagccagctcttttggttgcgggagcagcatggtacggacttattgcaaccattagctttttattatttccggttcgccaacttcaagataaacttgcggcctcttatgcttcattaggcgactttctatttgccaaatccaatttgtttgatgtcgatatgactcctgcgagttatcagcaaagcatgattgatctttcattagaaaatggcaaattaataacgatttttaatgatcttaaaaccgcccttttaacccgtttaaaaggtgaccgtggacaaaaaggaactcgccgtagcctacattattattttgtcgcacaagatattcatgaacgtgcagattctgcccatatcgactatcaaaagttagctaaaattttccagcacagtgatattttatttaggtttcagcgcattttggcaattcagggtaaagcttgccaagagctaaatgaatgtattttacagcgtaaaccctatatccataacaaacgctttaagcagagtttcgagaatttacgcttatctttagtaaagttaagaaatgatcagcagtatgacttattgtgggtaaatgctctttttgccttataccgaaacttaaagtctattgactcacaattactcaacttagaaacggaacagcatattcagtctgacaaagtaaagcaggctgaaaaccaacttaaagatgatgatctaaaaggttggaatgatattgttgttcgaataaaacaaaatctaacacctgaatctgtactgttccgtcatgccattcgtgtttcgattgttctttttattggatatgtatttattcaaatgactcatatcgaatatggctactggattatgttgacagctttatttgttagccaacctaactttaacgcaacaaaacgtcgcttacgtttacgtattgtgggtacattagtcggaattattgtcggccttagcatagtatttttagtaccttctgtggaagggcaattagtcatgctaattttgagtggcgtactgtttttcgagttacgtagtaagcaatatgctcaagcaactgcttttattaccattttggcattaattaactttaatctggacggttcggcagtcgctgcggctattcctaggtttgttgataccctaattggttgtgctttagcatggtttggcgtgacctttatttggcctgactggaaattccgtcgcctaccacgcagtattcgacgctccttacaagcacaatgtaattatttagctgaagtggtaaaacaatatcatgaaggacataatcatgccctcaattaccgtattgtccgccgagcagcacataatactgatgcagaagtcgcttcgcttatttctactttagcaacagagccagacttcgaccctactcgtaaatccgatatatttgaatttttatgcctcaatcatacatttttaagttatatcgcagcacttggagcacatcgagaaaagattcaggatcaagcggttcttaacgtattagatcaagctttagatgatatacaaggtgctttgttaagagatgaaatgcctgatcttacggcacaaaatatgctacagacgatacgtcagcgcttaagccaaaatgatgaagatgaccaaaaatcgctcattattttacagcagttatcgttgatgctcagtgtattaaatcgatttagtatgttaaaacaaaggctaagtcatgatctggataatgatgctagcgaacttgcatcatta

SEQ ID NO: 8564 - DNA, 1212 bp, Acinetobacter baumannii
atgtctgaacaaacagcccagcgtcaatattctattggctggattatgttgctcgctttactcacggctttagggccattatccattgatatgtacttacctgcgttgcctcaaatggcccatgattttggggtgagtacgcaaatggtagcaaacacattaccagcttatttttttggtttagccattggacaattggtgtatggacctttaagcgaccgtattggtcgaaaaaagcctctttattttgggcttgcgctttatgcagttgcaagcttgttctgtgtgctcgctacaaatgaatggagtctaattgctgcccgtattttacaagccttaggtggttgtgtgggggtggttatggctcgtgctgctatacgagatagattagatgtccaaggctcggcacaagctttttcaagcatgatgatcgtaatgggcttagcacctattttggccccgatgattggggcctggatattaatctggtttccgtggcaagcgatttttattgcgctttcaattgtaggggcaatctgttggctatgtgtacatttcttttttaaagaaactttggcagttgataagagactcaagttatctctatatcaagtggctaccttatatggtgctattttcaaagatgcaagcttccgtttacctatgtttgcaggatgtttaacaggtgcagcattattctgttatatcagttcagctccagccgtttttatggaccaatatggcttaaatcagcaagagtttgcttatgtattcgggctcaatgcttttggcattatgttaatgtcatctttaaataagcacttaaccacacgtgttgaaatcactaagcgcttaaaagcaggttcaatggtacaagtgacaggtgcaagcattgtgttgattgctggcttaatttctgcagcacctttatggctagtaatgttaggactgttcttagcaatttcaggaattggtttaactggaccaaatgctatggctctagccatgtcaaagcaaggtgctcgtgcaggaacagccagtgcaattatgggcagtatgcaatttgcttgcggtctattgggtggagtactgcttaacttccttatttggtctgcatcactcaatatgggagtgatgatggtgttatttacattaagtggttttattgttgttttaaaagcgattcgtcaagcaaaaagccaatcactctct

SEQ ID NO: 8565 - DNA, 1467 bp, Acinetobacter baumannii
atggctgaagctcaaaagttgaaattgattgacggttgggaagtcgttattggtattgagattcatactcagcttgcaaccaattctaaaattttctcaggttcatcaactgaatttggtcaagacccaaatacacaagcgagccttgtagacttggcgatgccgggtgtattgccggttttaaatgaaaaagtggttgaactcgcaattcgttttggtttagggattgatgcttacatcgaccaagcttcagtatttgcacgtaaaaactacttctatcctgactctccaaaaggctatcaaattagccaaatggacaatccgattgtgggcttgggccatatcgacattcagcttgaagatggtacgactaaacgcattggcgtaactcgtgctcaccttgaagaagatgcgggtaagtctgtgcacgaccaatttgaaggtatgtctggcattgacttaaaccgtgctggtacgcctttgcttgaaatcgtttctgaaccagacatgcgttcggttgaagaagcagttgcctacatcaaagcaattcacacactagtacgttggttaggtatttctgacggcaacatggctgaaggttcattccgtgcggattgtaacgtgtctttacgtcgtccaggacaaccgtttggcacacgctgtgagcttaaaaacctcaactcattccgtttcattgagcaagcgatcaatgttgaaattgaacgccaaatggaaattttggaatggggcggcgaaattgatcaagaaacccgtttgttcgatccaaataaaatggaaacgcgttctatgcgttctaaagaagaagcaaatgactaccgctacttccctgatccagacttgctaccagtaattattccagatgagcaaattgaggccatcaaagcaactatgcctgagttgccagcagcacgccgtgcacgctttattgcagactttggcgtaactgaatacgacgcacacgtacttacgctctcacgcgaaatggcggacttctatgaagctgttgttgctgcggctggcggtgcgaagcaaggtaaaattgctgcaaactgggtaatgggtgaattctctggtgctttaaacaaagcgggcttagagttaacagactcacctgtttctgctgaacagcttggcggcatgattgcgcgtattatcgacaacaccattagcggtaaaattgctaaacaagtctttggctttatgtgggaatctgaaggtaaatctgccgatgacattattgcggaaaaaggcttaaagcaagaaaccgatactggtgcaattgaagcaatcattaaagaagtacttgcagccaatgaaaaaatggttgaagagtacaagtctggtaaagaaaaagcctttaacggtcttgttggtcaagtcatgaaagcatctaagggtaaagctaatcctgcgcaagtcaatgaattaatgaaaaaattgattggt

SEQ ID NO: 8566 - DNA, 1476 bp, Acinetobacter baumannii
atgactgatttacatcgcttatcaattcgcgaacttgctgaaggcttaagccaagcgaagttttcatctcgcgaattgactgaacattatttaaaacgtattgctaaaatcgatccgcaagttaagagctatgtgacggttactccagaacaggcacttcgcgaagccgatgctgccgatgccgcattaaaagctggcaatgcaactgctttaacgggtattcctcttgcccacaaagacatcttttgtaccaaaggtattaaaaccactgctggttcaaaaatgctcgataacttcatttcaccttacgatgcaaccgttgttgaaaaaactaaagcagctggtctggttactttaggtaaagtgaacatggatgagtttgcgatgggctcaacttctgagagttcatatgtaggtgcaacgagtaacccttgggcacttgaccatgttcctggcggttcatctggtggttctgctgcggctgtagcggctgatttagcaccatttgctacaggtaccgatacaggtggctcaattcgccaacctgcttctttctgtggtttaacaggcttaaaaccaacttatggtcgtgtatctcgtttcgggatcattgcttatgcatcatcattagaccaagcaggtccaatggcacgctctgctgaagactgtgcttacctgatgaatgtaattgcaggtcacgatgctaaagactcaacttcggttaaaaaagaagtcgatgattacgttgcaaacctaaataacacatctgtaaaaggcttacgcattggtattcctaaacaatactttaacgttgcaggtttagatgcggacgtaaaagcacgtgttgaagagtctttgaaaaagcttgaagaaatgggcgcagcgcttgttgaaatcgacctcaacatgactgaagcttatgtaccaacgtattacctcatcgcgccagcggaagcatcttctaacttgtcacgttatgacggtgttcgctacggttaccgctgtgaaaacccagctgacttgatggatctttacaaacgttcgcgttcagaaggtttcggtccagaagttcaacgccgtattttaattggtacatacgcgctttctgcgggttattacgatgcttactatgtaaaagcacaaaaagtacgtcgtttaattcaacaagacttcttaaaagcttttgaaaatgtagatgtaattgcagcacctgctgcaccaacaactgcctacaaaattggtgcatctttagaccctgttgaaatgtacttaggcgatatctataccatcgcagtgaacttagcaggcttgccagcgattaatgctcctgttggttttgataaagacaacttaccagtaggtttacagttaatcggtaattactggtcagaatcacaattgttgtcgattgttcaccaataccaacaaaacactgactggcacaccaaacgtgcggcaattgctgaggagaatgca

SEQ ID NO: 8567 - DNA, 312 bp, Acinetobacter baumannii
atgtctacatcggatgcacagcattcagcagatttaaatgcacaaacagtttcagcaatcgccaatcttgctcgattgtcgctcaatgatacgcaatctgctgaatatgctcaaagtctaaataaaattttaggcatgatggaaaccttaaaaggcattgatacggaaggcgtagaacctttaaagagtccttttgacaatcctcaacctttacgtgctgatgtggtaactgaaagcaatcatcgggacgaataccaagcagttgcacctgcaactcaagatggtttgtatcttgttcctcgcgtgattgaa

SEQ ID NO: 8568 - DNA, 1038 bp, Acinetobacter baumannii
gtgattctaaaacgactaattggcttgttttcgccggatctagccattgatttaggtacagcaaatacacttatttatgcaccaggccgcggcattatattaaatgaaccaacagttgtggcaattcgtcacagtggttcacaaaaaattgttgctgctgtagggctagatgctaagcaaatgctaggccgtacacctgcgaatatttctgcaattcgtccaatgaaagacggtgtaattgcagattttgaagtgactgaaaccatgttgaatcagtttattggtaaagttcacgaaaaacgtttgttcccacctgcacctcgtgtagttgtatgtgtaccatgtaaatcaactttggtcgagcgccgtgcaattcgcgaagccgtatttaatgcgggtgctcgtgatgtacgcctaattgaagagccaatggctgctgcaattggtgctggcatgccagttgaacaagcatgtggttctatggttgtggatgttggtggtggtacaactgaaattgcaattatttcattgcaaggttgtgtctatgctgattctttacgtattggtggcgatgtatttgatgagcaaattatcaattatgttcgtaaagctcacggttgcgtaattggtgaaaccacagctgaaattattaaaaaagaagttggtatggctgtttctgatggtacgacattagaaattgaagtacgtggccgtaaccttgcagaaggtgtacctcgtgcaattaccgtaacttctgacgaaattactcaagcaatttctgacccgttacaaagtattgtaagcgcggtgaaatctgcacttgaacaaactcctcctgaactttcttctgatattgctgagcgcggtattgtgttgacaggtggtggagcgttacttcgtaaccttgataaattattagctcaagaaaccggtttaccagttgttgttgctgaagaccctcttacttgtgtaacccgtggtggtggtaaagtattggaattcttcgacaacccgaaccatgacatgcttttcgtcggt

SEQ ID NO: 8569 - DNA, 909 bp, Acinetobacter baumannii
gtgtcatcactctctcaagttaatgcggatgttttaaaacaagctcaacaacgtattcaacaagatttattgacgacactggctgcattctcaattcccgaacctttaaaaagcgctgtacaccatgcagttatgctcggtggaaaacgtgtgcgtccggctttgtgttacgctacagcttctttacaagataatccaaattttgcggctgctcgccgtgctgcggttgctgttgaactcatccattgttattccttagcacatgatgacctgccttgtatggacaatgatttgcttcgccgtggtcagccaacgtgtcatgttgcatttggtgaagataccgcgttacttgcgggtgacattttacaatcaatggcttttgaagttttagggagccgtttgtttgatgagcaagggcagggaacggatgctgcaattgtcttaaagcaaattcaaattttagctacagctagttctaaaatggtttgtggacaggttttagacttacaagcggaagctaaacaaatttctcaagacgaactagagaatattcaccgtaataaaacgggtgcgcttattcaggctgctattatgatgggggcagtgacaattttctcgggtacagatcaggcaattccaaaactacgtcaatatggtcaagcaattggactggcttttcaggtccaagatgatattttggatattacgtcgagcactgaaactttaggcaaaaccgctggtaaagatgaacaagtacaaaaatcgacttatcctgctctaatgggactagagcaagcacagatttatgccaaagaattgcatgatcaagctttcgatgccttagcgcatttcggtgaaaatgcaaaagaattagttgagatttcacaattcctgttagctcgtactaat

SEQ ID NO: 8570 - DNA, 1032 bp, Acinetobacter baumannii
atgactccagaattacccggaacttatattaatttattagttgagatcgttaagcgcagaggtatctcttgtgagcagtttttagagggtagtggagtaacaccggaacaattaaaaaaaccgtattggtatgttgagtttaatatcttaaataacttacttgagcatgcgattcaactcactcatgagccagcattagcgggttatttggcattggaaatgaaagcttcttgttatggttctgtcggtatggcggccatggtgtctgcaaatcttgaggaggctttaaaaatacttgaacaatttattggttcgcgttgtgatgcctttaaacctgagttaaagcaagagcaagacgatgtttactggtctattcatcaacctttaaaaagttttcaattaagttcagatgcgactatttttttgttgttaggttttgtttacatcgcaaaacatctaacaggggtatcttctttaggtacagtgcaattgaatatgcccgaaccactaggtttttcaaaaataaaagataaattaggcgtaagttgtttatttgagcaaaaacataatatttggattattccaaaagaatatttaatgcagcctgtactcacggctgatcctatgctggcacctttactgaaagcacagtgtaaaaaagatattgataaattgaagttacgaagtgggtggaaagcagaaattagccaagtaataaaaaaattattgatcaatagtcagggggaaatattaaaagttaagcaagttgcccaaatgatgaatatgtcagaacgtagcctacagcggtatttggcaatagagaatacaagtttctcagcattagttgatttaactcgaaagcaatatgcacaagatcttttgcaaaatagttcaatgtcaattgaagctgtggcattaagtttaggctatgccgatacaccccatttcactcgtgcatttaagcgctggatgggtgtaacaccgaagtattatcaaactcagttaaaactaaaaaatttagagatacgtgaa

SEQ ID NO: 8571 - DNA, 873 bp, Acinetobacter baumannii
atgaataccccagcatcaaatgataaaaatccaactccagatttagctgaagataatgcgttcttcccatcaccatattcactgagtcaatatacttctcctaaaacagattatgatggcacaacctatccaacgccgtatgcgggcaataaaaaggttttaatgattgcaactgatgaacgttatatccagatgcaaaacggtaagttcttttctaccggaaaccatccagtagaaatgcttttgccaatgttccatttagataatgccggatttgaaattgatgttgcgacactttcagggaaccctgccaagcttgaaatgtgggcaatgccaaagcaagaacaagtagtattagatactttccagaaatatgcagataaattaaaaaatccgttaaaacttgccgatattttagaaaatgtagtcggtgaaaactctccatatgcggctgtatttattccgggtgggcatggggtattagcgaagattccgcatagccttgaagtgaagaaagttcttaaatgggcagttgaacaagacaaatttattattacgttatgtcatggtccagcttcgttactggctgccgcagtagatgaacagcctgagaattatatttttaaagattatcaaatttgtgtattccctgactcgttagataagggagcgaatattgatattggttacatgcctggagcattaccgtggttagtcggtgaaaaccttgaaaaactcggtgtgaagattttgaacactggcattactggtcaatgtcatcgagaccgtaaattgttaacgggcgatagtccgcttgcttctaataatttaggcaaacttgcagctgaaacattgctggctgaagtgaaggat

SEQ ID NO: 8572 - DNA, 1011 bp, Acinetobacter baumannii
atgattccaaaacacaacgatggttcagcttacgaccactgggctcgtggtggtggcagcgttaaggcacgtttctcgaatacaacagtacgttacggtactcaagtactcgacttaccagtccttgcaagtaatacaggacgtatggttcctgaatacttcacaggtactttattaactagccatgaaatcaagaaccttgaggttgttgctggtaaatttactaaagaccaaatgtctgaccaaatcaataccgatgcggatgcttctggcagaggtcttgaccgtgcaattgtttggggtgctaaatataagtttaatgataacttaaatgcatcttattatggcttagacagcaaaaatgctcttgaacgccattatgctaatgttaactttaaacaacctttagcaaatgacagttcattaacttatgattttagtggataccatactaagtttgatgcaaatgcacacacttattcagcaactggaactgtagcaccaaattatgctgcggatggtatagctggcgaagaaaagaccaataatatttgggctatttcaggtacttatgcgactggtccacatagtgtgatgttagcatatcaacaaaacactggtaatgttggttacgactatggccaaaatgctgatggtttccaaagtatttatttgccaaactcttatatgtctgatttcatcggtaaccacgagaaatctgctcaaattcaatacaatgttgattttggcaagttaggtgtattacctggtttaaactggaccactgcatttgtatatggttgggacatcaaggttagaaatgtaactgatgatgctcaagaacgcgaattctttaaccaagtgaaatacacagttcaaagtggttttgctaaagatgcaagccttcgtattcgtaactcttactaccgtgcaagtgatgcttaccaaggcgcttacatcggtgataccaatgaatggcgtattttcttagatattcctgtgaaattattc

SEQ ID NO: 8573 - DNA, 711 bp, Acinetobacter baumannii
atgcgcattattggtcatcgtggtgcacgccgagaagctcctgaaaatacattaggtggttttcagcacattaaaaatttaggtattcgtggtgtcgaatttgatattcgtcagctgcaagatcaagagttggtcgtcattcatgatgataattttttgcgcacggcaggtgtcgaccaaattgtagagcaatcaacattggctcaagcattatcatttgatcatcgtcaaaattggcctaactggccaacctctgaaccaacccctactcttacaggcgttttaaatttacttgataactttgatcatattgaagttgaagttaaagctgtaagagatatggcattagcagaaaagttaattcaaaagcttgagactgagttacaaggtttcgagaaagtcgtgaccatcacaagttttgatcttcaaattctaaccgctttacgtgatatcaactctcaatttaaacgcggattattagttgaacttccggttggagcaacggcgattgaacttgctcatcaatatgggtgctgtcatattggctggcatgatcaacttgcaacagatgaaatgattcaattgtcgcatcaagctggtttgaacattagtgtctggacagtgaacgatgtagaaagagcagaaagactacgggatttagatattcagggcttaattacagatattccaaccacaatgcttgaagctctt

SEQ ID NO: 8574 - DNA, 894 bp, Acinetobacter baumannii
atgaatcaagaagtgaaatcagggaaagttcttagcccttcgacgccatggacacagcgtccagttccaggtattgaagttgcagatgagcaacagactctcaaagcaacatttactgagccaactattgagtgccctgaatgtcatgctttagtgacacgtacagcaatatcttttaatgcgtatgtatgtccacagtgtgacgaacacttacgaatgaaagctcgcgatcgcttaaactggttcttcgacaatgttgtggctgaattaggtcaagagtttagcgcgaaagacccattaaagtttgttgatagcaaaccatatccagaccgtatgcgtgaagcgcaaactaaaactggtgaaacggaagctttaattgccatgcaaggtaacttaaatggcgtagatatgattgcatgtgcttttgagtttgactttatgggcggctcaatgggtactgtagtaggtgaccgttttgttaaggcagctgaacttgcaattgaaaaacgtcagccattaatctgctttgcagcttctggtggtgcacgtatgcaagaaggtatgttgtcacttatgcaaatggcgcgtacttctgctgcaattcaaaaattaaaagatgcaggcttaccttatatcgtggtgttaacacatccggtatatggcggtgtaacagcttctttagcaatgttgggtgatatccatattgcagaacctaaagcaatgattggctttgccggtaaacgtgtgattgaacaaactgtacgtgaaacactagaagagccgttccagcgtgcagaatatctgcttgatcatggtgtggtcgatcagattgttcatcgtcatgctttacgtgatactgtatctcgtcttgtatcaaaattgatgaacttacct

SEQ ID NO: 8575 - DNA, 1227 bp, Acinetobacter baumannii
gtggatcagcaaaataatgtgattgactatacccaattcccagatgcaaatgggcatttcggtatccatggcggacgttttgtgtcagaaactttaatggcggcattagaagatttggaaaatctctattcccgcatgaaaaatgatgaacagtttttggcagaattcgaccgtgatctcgcctactatgtaggtcgtcctagtccactttattatgctgagcgatggtcaaaagagttaggtggtgcgcaaatttaccttaaacgtgaagacttgaaccatacaggctcacacaaggtaaacaacacgattggtcaggcactacttgcaaagctttctggtaaaaaacgtattattgccgaaactggtgcaggccagcatggggtagcaacagcaacaattgcagcacgtttaggtcttgaatgtgttgtttatatgggtgctgaagacgttaagcgtcaagcgatgaacgtttaccgtatgcgtttgttaggtgcaacagttgtgcctgtgcaaagtggctctaaaacattaaaagatgccatgaacgaagcgatgcgtgactgggtaaccaacgttgatacaacatattatgtcattggtacagttgcaggtccgcatccttatcctcaacttgttcgtgacttccaatcaattattggtcgtgaagcgcgtaaacagattttggaacaagcaggtcgcttaccagatgcattagttgcttgtgtaggtggtggttcaaatgcaatgggcttgttttatccgttcttaaacgatgccagtgtaaaaatgtatggggttgaagctgctggttttggtattgaaactggtaaacactctgcgcctttaaatgcgggtcatgtgggtgtattacatggtaaccgtacttatttaatgagtgatgaacagggccagattattgagacacacagtatctcggcgggccttgattatccgggtgttggtcctgaacatagtttcttgaaagatatgaagcgtgtagagtacgtgccgattaatgatacagaggctcttcaaggtttccgtgacttaaccaaaatcgaagggattattcctgcgcttgaaagctcgcacgcgatggcgtatgtctctaagcttgcaccgacgatgtctaaagatcagattattattgcgactgtttcaggccgtggcgataaagacttaatgacagttgcacgcattgatggcgtagaaatggtcgagatg

SEQ ID NO: 8576 - DNA, 1155 bp, Acinetobacter baumannii
atgtcatgttcagccatttaccttgatcatttcggcaatttaacatgtaaaaagtgcttttacactgttgtaaatcgccaatttatttttttagacggtcatttaggtcaatttaaagtgaacatcaaagagactgaaggattcaatatgagtcgcgatacgattagcatccacttcgtgaatgcggctttgacaggcgtaaagcgccttggcatggatgtcgagacgttactttcacatgtgggtatcgaagcggaactattacgtcaacctaaagctcgaatctcaccagaacaatatacccgttttataaaaatgttatggatggtcacacaagacgaacacgttggtttcgatgtacaaccgcgtcgtttgggcacttttgccattatgtgtcagttgattattcatgcaaaaaccttgggccaagcccttgaactttcatctcaattttacaaattatttggtgatgaatggtcagtaacgctggagcgtgacaaacatgaagcacgtttagtacctctcattccaaaaacattagatcccgatcatttcattactgaaagtatgctcatgatctggcatggattggcatcatggctgattgaacgtcgcttaccattagaacgtgttcattttagctatccacgtcctgcacatgcagatgaatatgacgcgttattctttgcgcctgttatgcaattcgacgcaccgcgtaccgaaataacctttgcggctgattatcttgacttaccaattcgccaagatgaaaaaacattagaagaattcttaaaagcagcccctgctcagcttttagtaaaattcaaaaataccaattcgttgacttcacgtattcgtgaagtactcaaaagccaaattggtgaagaaatgccaacgctcaatgacgttgcatcaatgttgtatttatctccacaaactttacgccgccgcctagctgccgaaggtaaaagctatcagggcgtgaaagacgctttacgccgagatgctgcgattcatttattactcaatcctgagttaacacttgaagatgttgctcagcaagttggttttagtgaaaccagtacattccaccgtgcatttaaaaagtggactggtgttactcccggtctatatcgccagctccatggttaccat

SEQ ID NO: 8577 - DNA, 2475 bp, Acinetobacter baumannii
gaactcaaacgcatgcgcaaaattgttgagcaaatcaatgcgctcgagccgacgatatcagctttaagcgatgcagacttatctgcaaaaactccagaattcaaacaacgttataacaatggcgaaagtttagataagttactccctgaggcgtttgcagtttgtcgtgaggcagcaaaacgtgtaatgggcatgcgccactacgatgtccagttaattggtggtattaccttacatgaaggcaaaattgccgaaatgcgtaccggtgaaggtaaaacccttatgggtactttagcgtgttacttaaatgcattaagtggtgaaggcgttcatgtcattactgtaaacgattatttggcacaacgtgatgctgagttaaaccgccctttatttgaatttttaggtctaagcattggtacaatttattcaatgcaagaaccagcagaaaaagcagctgcttatctagctgatattacctatggtaccaataacgaatttggttttgactacttgcgtgacaacatggtgttttctttagcagagaagaaacaacgtggtttgcactatgccattatcgatgaagtcgactcaatcttgattgatgaggcgcgtacgccattaattatttctggtcaaagtgaagattcttcacacctctatactgccatcaatactattccaccaaaattacgcccgcaaaaagaagaaaaagttgccgatggcggacatttctggattgatgaaaagcagcgttcagttgaaatgactgaaattggttatgaaactgtagaacaagaacttattcaaatgggtttgttagcggaaggcgaaagcttatattcagctacaaatctaaacctcgttcaccatgtttctgcggctattcgtgcgcacttcctattccaacgcgacgttcactatattattcatgacggtgaagtcgttattgttgatgagcatactggccgtaccatgccgggccgtcgttggtcagaaggcttacaccaagcagttgaagcgaaagaaggtttggctattcaacctgaaaaccagactttagcaacaactactttccagaactatttccgtctttataaaaagctttcaggtatgacaggtactgccgatactgaagctgcggaaatgaaagaaatttatggtctggacgtcgttattattccgacacaccgacctatgattcgtaatgaccagaacgatttaatctacttaaaccgtaatggtaaatataacgcgattattcaagaaattatgaatattcgtcagcagggtgttgcaccaatccttattggtacggcaacgattgaagccagtgaaattctatcgtctaaattgaagcaagctggtattcatcatgaagttttgaacgcaaaacaacatgagcgtgaagcagacattattgctcaggcaggtagcccgaatgcagtaacaatcgcaacaaacatggccggtcgtggtacagatattatcctagggggtaactggaaagcgaaacttgccaaacttgaaaatcctacccctgaagatgaagcgcgtctaaaagcgcaatgggaacaggaccatgaagatgtattgcaagcaggtggcttacacattattggttctgaacgccatgaatcacgccgtattgacaaccagttacgtggtcgtgcgggccgtcagggtgaccctggtgtttctcgtttctatttatctcttgaagatgacctcatgcgtattttcgcaggcgatcgtgtcgttgccatgatgcgtgcaatggggcttaaagaagatgaagcgattgaacacaaaatggtaagccgttctatcgaaaacgcgcagcgtaaagttgaagcacgtaacttcgatattcgtaaaaacttacttaaatatgatgatgtgaataatgaacaacgtaagatcatttattcacaacgcgacgaaatcttagctgaaaatactttacaagaatacgttgaagaaatgcatcgtgaagtaatgcaggcgatgattgctaactttattccaccagagtcaatccatgaccaatgggatgtggaaggcttagaaaatgctttacgtattgatttgggtattgagctaccagttcaagaatggctagaacaagatcgacgtcttgatgaagaaggcttggttgaacgcatcagtgatgaagtaattgcgcgttatcgtcagcgccgtgcacaaatgggtgatgaatcggcagcaatgcttgagcgtcatttcgttttaaattctcttgatcgccattggaaagatcatttggctgcaatggattatttgcgtcaaggtatccacttacgtggctatgcgcaaaaaaatcctgagcaggaatataagaaagaagcatttaacttattcgtgaacatgctgggtgtaattaaaactgatgttgtaactgatctgtctcgcgtacatatcccaacaccagaagagcttgcagaaatggaagctcaa

SEQ ID NO: 8578 - DNA, 639 bp, Acinetobacter baumannii
atgagtaaatcggtgttagaaacctacgacccaaaagaagaactttttaatgcctacagccatggcgctggtgtggttatggcagtaattgcctctgtctttttaattataaaaggatcttatctttccactgcccagtggataggtttatgggtatatgcttttagcttaattctcgtgtttactagttcgactctctatcattttgcacaaacacaaaatttacgttactggtataaaaaactcgatcacacggctatttattatttaattgctggaacatataccccgttcttaagcattgctatacctacacaaaaagctcatattttacttattgcgctctggagcattgctgcaattggtacacttttcaagttagtttttattcaccgttttcagaaaatttcgctacttgcttatgttcttatgggttggcttgccgtttttgtaatggatgatatgcgaacttatttaagcaaagatactttgatgttattgattactggaggtttagcttacaccgttggagcattgttttacgcgttaaaaaaggtaagatatacccatgcgatatggcatatttttgtgcttttaggtgcaggtgcacactttcttgctatctattggtacgttgtt

SEQ ID NO: 8579 - DNA, 1833 bp, Acinetobacter baumannii
atgtcagatatcaaaaatctccgtaatatcgcaattattgcgcacgtcgaccacgggaaaaccacacttgtcgataaactacttcagcaatcaggtgctctcggtgaccgagcaggcgagattgagcgtgtcatggactcgaatgcgcttgaaagtgaacgtggtattaccatcttagcgaaaaacaccgctattacttggttagacaaacgtaccgatacaacttaccgtatcaacatcgtggataccccgggacacgccgacttcggtggtgaagtagaacgtgtaatgtcgatggttgactgcgtactacttcttgttgactcacaagaaggcccaatgccacaaactcgctttgtgactcaaaaagcctttgctcgtggtttaaaaccaatcgtgattatcaacaaagttgacaagccaagtgctcgtccagactgggtaatcgatcaagtatttgatttgtttgataaccttggcgcaactgatgagcaacttgatttcccaatcgtttatgcatcaggtttacgtggtgtagcgggtcctgctcctgaagagcttgcagaagacatgactccgttgttcgaaacgattgtagacatcgttgagccaccagctgttgatgttgatggtccattccaaatgcagatttcatcacttgactataacagcttcgtaggtgttatcggtgttggtcgtattcaacgtggttctgtaaaactaaatactcctgttactgtaattgacaaagaaggcaatacacgtaacggtcgtatcttaaaaatcatgggttaccatggtttagagcgtattgatgttgattctgcatctgcgggcgatatcgtatgtattactggtattgatgctcttaacatttctgacacgatttgtgatccgaaaaacgttgaagcattaccacctttatctgtagatgaacctacagtgtctatgactttccaagtaaacaactctccgtttgctggtaaagaaggtaaattcgtaacttcacgtaacattcgtgagcgtcttgaccgcgaattaattcacaacgtagctttacgtgttgaagatactgacagtccagaccgtttcaaagtatctggccgtggtgaacttcacctttcagttttaattgaaaacatgcgtcgtgaaggcttcgaattaggtgtatcacgtccgcaagtaatcattaaagaaattgatggtgaaaaacaagaaccttacgaaaacgtaacgtttgacgttgaagagcagcaccaaggcgctgtaatggaacaaatgggtcaccgtaaaggcgaaatgaccaatatggaagttgacggtaagggccgtatccgtattgaagcaactgttccttcacgtggtttaattggtttccgttctgaattcttaaccatgacctctggtactggtattatgacttcaagcttctctcactatggtcctcttaaacaaggtactgttgcgaagcgtcaaaacggtgtgttgatttctatggttcaaggtacatgcttgggctatgcattattcagcttacaagaccgcggtcgtttattcgctaagccacagttagaagtttacgaaggtatgatcgtaggtattaactctcgttcagacgatatggttgtaaacccaactaaagcgaaacagttaactaacgttcgtgcgtctggtactgatgatgctttaactttaacacctgcaattgaattcacgcttgaacaagctcttgaatttattgaagatgacgagttagtagaagttactccaaaatcaattcgtatccgtaagcgttacttgactgaaaatgaacgtaaacgtaaccgtgataaa

SEQ ID NO: 8580 - DNA, 2544 bp, Acinetobacter baumannii
atgaaattggtaatgattggtcatggtatggtgggccacaaattcatcgaagccattttagaaaaagcagatgatgaactggaaatcacgattcttgcagaagaacctcgtatcgcatatgaccgcgtgcatttgactgaatacttctcagggaaatcggcaaaagatttatctttagcacgctttgattttgccgatgcgtatggcattgacctgcgtttaaatactaaagcagaggcgattgatacagctgcacaaaccgtaacaaccaatcatggtgatgtgattagctatgacaagttggtgctggcgactggttcatatgcatttgttccgccaattccgggtaatgaccgcgagaactgttttgtttaccgtaccattgaagatctagatgccattcgtgcagcaagtttaaaggctaaaacaggcgtagtaattggcggtggtttacttggacttgaggcagccaaagcattacgtgatttagatttagaaacacacgttgttgagtttgcaccacgtttaatggcagttcaaattgatgatttagggggcaaggttttacgccgtaaaattgaagatttaggtgtaaaagtccatacacaaaaagcgactcagtctattgagtctggtgtaaataccactcatgtgatgaagtttgccgacggtagtgaactcgaaactgatgtgattttattctctgcggggatccgcccacgggatgaattagcgcgtaatagcggacttgcgattggtgagcgtggcggtattgtaattaatgattattgccaaacatcagatcaaaacatttatgccattggtgaatgtgcgctttggcaaaataaaatttatggcttggttgcaccgggctatgacatggcgcgtattgcagcaaaacacattttagatgaagagtgtcattgcttcgctggcgcagacatgagcaccaagttgaagttgatgggcgttgatgttgcttctgttggtgatgcacatgctatgaccccaggtgcattaagctatttctatgcagatgaacatgcactggtttataaaaagattgttgtaaatgccgacaaaaccaaattgcttggcgcggttttagtgggtgatgccaaagaatacaacgaccttttacaaatgatgttgaatggtctggctttaccggaagtgcctgaaagtttaatcatgccgggttttgagcaatcagcagcaaaatctggtggtagcggagtcgatttactgccagacagcgcaacaatctgctcatgtaataacgtatcaaaagcagacatctgccaagcaattagtgatggttcgacctctttaggtgcattaaagaaatgcaccaaagcagcaacagcatgtggtggttgtgcaccattagtaactcaagtattgaagtcagagttacaacgtcaaggtgtgactgttaacaatcacatttgcgaacatttcccgtactcgcgtcaagagttgtatcacttggttcgtgtcaatgaaatcaagacatttgatgatttaattcatcaacatggtcatggtttaggttgtgatatttgtaaaccggcagcagcaaatattctggcatcttgctggaatgatttcgtacttaagccaagtcatgcaggtctgcaagacagtaacgactactacctaggtaacattcaaaaagatggctcttactccattgtaccgcgtatggcaggcggggaagtcactccggatggcttaattgcgattggccaaattgcgaagaaatataacttgtacaccaaaattactggtggtcaacgtgttgatatgtttggtgcgcaagttcatgagcttccatttatttgggaagagttaaatgctgcgggcttcgagtctggtcatgcctatggtaagtcgttacgtacagtgaaatcttgtgtaggtagcacttggtgccgttacggggtagataactcggttggtttggcgattgaacttgaaaaccgctacaaaggtttgcgttcaccacataaattgaaaatggcagtgtctggctgtacacgtgagtgtgcggaagcgcaaggtaaagatgtaggcgtgattgccactgaaaagggttggaacctttatgtatgtggtaacggtggtatgaaaccgcgtcatgcagaattacttgcatctgacctcgataaagaaacacttattcgttatatcgaccgtttctttatgttctacattcaaacggcagaccgtttacaacgtaccagtgtatggcgtgacaacatggaaggcggtctagactaccttaaatctgtgatcgttgatgactctcttggtttagcggccgagcttgagcgccgtatggaacacattattggtacatatcaagacgagtggcgtacagctgtcgaaaacccagaagttcgtaaacgcttccagacttatatcaatgcaggagcaaatgaacaagctgatccgcacattcaatttacaactgaacgtggtcaaatccgcccattaactgaagctgaacgttcagaagaccgtattccaatggttgaagca

SEQ ID NO: 8581 - DNA, 480 bp, Acinetobacter baumannii
atggttgctcaaattcgtattggacaaggaatggatgtgcatgcctttgaagagggtaacttcgtaaccttagctggcgttcaaattccgcatacgcatggcttgaaagcacattctgatggcgatgtcgtgctacatgcattatgtgatgccttactaggtgctctagcacttggtgatattggtcagcattttccggatacagatccagaatttaaaggagcggatagccgtgttctacttaaacatgtttatcaattaatattagaccgaggttatcatttaaataatgctgatattacggtagcttgtgagcgtcctaaattagccaaatacaatttggaaatgcgtcaaagcattgcagatgttttaaatgtagatttaaatcaaattagtatcaaagcgaccacaaccgaaaaacttggatttactggtcgccaagaaggaattttagcaacagcgacggtgttaatatctcat

SEQ ID NO: 8582 - DNA, 1030 bp, Acinetobacter baumannii
caacaatatcgtttagatgaattagctcaccttgttaaaggtgagctaattggtgaaggtagtcttcaattttcaaacttggcgagtttggaaaatgcagaggttaaccatcttacttttgtgaatggtgagaaacatcttgatcaagctaaagtaagtcgtgcgggcgcttacattgttaccgcagctttaaaagaacatcttcctgaaaaagataattttattattgttgataatccctatcttgcgtttgcaatccttacccatgtatttgataaaaagattagctcaacaggcatagaaagcactgccccaaattcatccatctgctgttatttccaaaactgcttatattggtcactatgtggttattggtgagaattgtgtagttggcgataataccgtcattcagtcacataccaaacttgatgataatgtagaagttggaaaagactgttttattgattctcatgtcactattacaggtggttctaaattacgagatcgcgtccgtattcattcaagtactgtcattggtggagaaggttttggttttgctccatatcaaggaaagtggcatcgtattgctcaattaggttcagttttaattggaaatgatgtccgaattggatcgaattgtagtattgatagaggcgcacttgataatacaattttggaagatggggttattattgataaccttgtgcaaattgcacataacgtccatattggttcaaatactgctattgcagcgaagtgcggtattgccggaagtacaaaaattggcaaaaactgtattctagctggggcgtgtggagtggcaggacacctttcaattgctgataatgtgactttgactggaatgtcaatggtcacaaaaaatatttctgaagctggaacttactcttcgggaaccggattatttgaaaataatcattggaaaaaaacgattgtacgcttgcgacaattagcagatgtgccattgacccaaatcactaaacgacttgatcatatacaagctcaaatagag

SEQ ID NO: 8583 - DNA, 438 bp, Acinetobacter baumannii
atgtcaaaattgcgtgaagacgatgctgtagaaaccatgcgtgtcgacaaatggttgtgggcagcacgtttttttaaaacccgttctattgctaaagctgcaattgaagggggtaaagtacatcacaataatgaacgtgtaaaagtttctaaagaaattcgtgtcggtatggagctcgttgttcaacaaggtttcgataaaaaaacagttgttgttaaagcgctctccaatacccgaggaccggcccctgttgcacaacaactttatgaagaaacagaagtaagtattgcaagacgggagttgattgcttcccaacgaaaattgcataatctagcacgacctgaccatagaccaagcaagaaagatcggcgacaaatcaatcggtttaaacaggataatgatcaacattatgaagatcactggtcttataatgatgaa

SEQ ID NO: 8584 - DNA, 1047 bp, Acinetobacter baumannii
atggatgagaataaaagcaaagcattacaagccgctttgagccaaattgagaagcaatttggtaaaaatacggttatgcgtcttggtgataacactgttcaagcagttgaagccgtatctacaggttctttaactttagacatcgcattggggattggtggtttaccaaaaggccgtattatcgaaatttatggtcctgaatcttctggtaaaactacaatgacattgcaagcaattgctcaatgtcaaaaatctggtggtacatgtgccttcattgatgctgagcacgccctagaccctcaatatgcacgcaaacttggtgtagatattgataacctacttgtttcacaacccgacaacggtgagcaagcacttgaaattgctgacatgcttgtccgttcaggcgcaattgatttaatcgttgtggactcggtagctgcacttacccctaaagcagaaatcgaaggtgagatgggtgactctcatatgggtctacaagcacgtcttatgagccaggcacttcgtaaaattacgggtaatgctaaacgttcaaactgtatggttatcttcattaaccagattcgtatgaaaattggtgttatgtttggtagcccagaaactaccactggtggtaatgctcttaaattctacgcttcagttcgtttagatattcgtcgtatcggtcaagtaaaagaaggcgatgaaattgttggttcagaaactaaagttaaagtcgttaagaacaaaatggctcctccgtttaaagaagctattttccaaattctatacggtaaaggtactaaccaactaggtgaacttgtagatttagctgtacaacaggatatcgtacaaaaagctggtgcatggtattcatatcaaggcaataaaattggccaaggtaaaaacaatgtaattcgctattttgaagaaaatactcaaatagctgaagaaattgaacgtaatatccgtgaacaattgctgactacaggcacaaatggtgcagttcaaattgaagatgaagaagagccagatcttttattagaatcg

SEQ ID NO: 8585 - DNA, 480 bp, Acinetobacter baumannii
atgttcaaaagaaacgatgagcaatctcagcagcgccttcctcttactggccaacgtttacgctcatatgcttttgctttactcactcgccgagattactctaaagcagagcttatcgagaaattagctcgttatgcacaaaatatagaagaagtaaaacaactggttgaggagttatctgaacaaaattaccagagtgatcagcgtgttgctgagcaaatgctagcaagccaaattcgtaaaggtaaggggccgaaacggattcaacaagctttaaaaactaaacaaattgaaaatgatttaattgcagatgaaattcaagaaattgattgggtagaacaagcttatcaacttaaagttaaaaaatttggagaagctgtagagaaagatccaaaacttaaagcaaaacagatcagattcttacaatatagaggatttgatttagatgtaattttaaaagcaatccaaagaaaattggat

SEQ ID NO: 8586 - DNA, 822 bp, Acinetobacter baumannii
atgttagagcggattgttaccgcattggtacttgttgcagttgttttgggctgtatgtttgctacgcaatcacattatccaatgttggtacttatgattgtagcagcaggagttgcggggtatgaatggtataagttaatgcctcgggaagttggtgcagtagtaaaacctaaagcttggggttatggtctacttgttgcctttgtttctggtgttgccttattctttcatgacattgctttactgttatggtctgcttcaattttaacttggctcgttagtgtttattgggttaagtcttttcctgaattcgatgggtggtataacgcgaccctatatgtcattggtttgattcttatctgtgcagcagtgactgcaatctttgtagtatggcaaagctcaccatggtggttgatgtatttgttcttgcttgtgtggggtgcagatagtggagcttactttgtaggccgtaaattcggtaaaagaaaattggcgcctacagtaagtcctaataaatcagtagaaggtttatatggcggtattctcactacaattattgtaatgcttgtggtgcaatatcaatatttaaacctaacttgggttcaacaacttctattcttgattttgtctttaattacagtgttcggttcagtattaggtgatttatttgaatcaatgatcaaacgccgtgctggtattaaagactctggccgtgttttgccaggtcatggtggtgtattggaccgtattgattctttactcgcagcagccccgatttttgcaacgggaatgtatatattaaagcttattggtgtagattta

SEQ ID NO: 8587 - DNA, 750 bp, Acinetobacter baumannii
atgaccgattcagaagagtatcatcttcctcagcatgttgccatcatcatggatggcaacaatcgctttgcaaagaaaaatcaaatgcaaaaaggcgatgggcacagagagggtaaaaatgttcttgaccctattgttgaacattgtgttaaaactggcgttcgtgctttaactgtttttgcattttcgagtgaaaattggaatcgaccacaatatgaagtcgatctgcttatgaaacttcttgaagaaacgattcatgagcaaatacctcgcatgaagaaattcaatattgctttgcgctttataggggatcgttcccgattaccttcacatttagttgccttaatggaagatgcagagcaacaaacagcacatcatgacgccatgacattaactattgcagtaagctatggtggtatgtgggatattgcaaatgcagctaagcaggttgctcaagcagtttcccgtggcgaaattgacgctgatcaaataaatgttgatttgttcgaaaaatatgtcagtctaaacgatctgccagctgtggacttgttgatccgtacaggtggagatttccgtatatctaacttcttgttatggcaagcagcttatgcggagctgtattttacggatactttgtggccggaatttacagtggaagaattcgaccatgcattgaatgtcttttcagggcgtgaacgtcgtttcggtaaaacatctgaacaaattcagcaagagaaaatcgagaaatta

SEQ ID NO: 8588 - DNA, 430 bp, Acinetobacter baumannii
atgcagattcaaacgattcgtcaatatttgccgcatcgttatccattcttattggttgatcgtgtgaactgaagttactgacaatagtattgttggttataaaaatgtttctatcaatgaagagttcctacaagggcatttcccagaatatccaattatgcctggtgttctcattgttgaagcattagctcaagtttcaggcgttcttggttttattatgaacaatgaaacgccaaaaccaggttcattattcctgtttgctggtgcagaaagagttagatttaaaaaacaagtagttgcaggtgatcaacttgtattaaaatctgagttggtaatgcagaagcgcggtatctacaaatacaattgtacagctagcgttgacggcattgtagcagcaaccgctgagattatgatttcacaccaaaaaaca

SEQ ID NO: 8589 - DNA, 552 bp, Acinetobacter baumannii
atgattaacgatctgaaaaaagacagcgaacagcgtatgttaaaaactcttgagtctttggaacaagggtttgctaaagttcgtaccggccgtgcacacccatcaattttaaatggggtaatggttccttactatggttctgatgtgcctttaaaccaagtagcgaacgttggtgttgaagattctcgtacgcttatcgttcaaccatttgaacgtacgatggttgctgcaattgataaagcaattcgtgaaagtgatttaggtttaaatcctattactgctgattcaatccgtgtacctttgccagctttaactgaagaaacacgtcgtgatatgcagaaaatcgctcgtagtgaagctgaaaacgcgaaagttgctatccgtaatattcgtcgtgatgtattaggtgatatcaaggcattgttaaaagagaaagaaatttctgaagatgatgagcgtcgtgcaggcgatgatatccaaaaaatcactgataaatatgttgcagaagtagacaagcgtctagcagcgaaagaagcagaattgatgaaggtc

SEQ ID NO: 8590 - DNA, 722 bp, Acinetobacter baumannii
atggcggaaacaatcagcccccgttattcacgaattttattaaaattatctggtgaagctttatcaggtaataaagatatgggtattgatgctcaagttttagatcagatgtcactttctattgcacatttggttggcttgggtgtgcaagtaggtatcgttgtgggtggcggtaacttatatcgtggtagccagttacaaaaagacggtttggttggccgtgtaacaggtgatcagatggggatgcttgcaactgttatgaatggtttggcaatgcgtgatgcattggtgcgccgtaacatcagaactcgtcttatgtcagcgttaccaatcggtactgttgtagagtcttactcaagtcgtgatgcgattcgtcatttaagccaaggcgaagtgtgcgtttttgtagcaggaacaggaaatccattctttacaactgatacagcagcatgtttacgtggtattgaaattgaagcaaatttaattttgaaagcgaccaaagtagacggtgtttataataaagatccgagtaaatacgaagatgcggtgaaatatgaccatttaacatttgaccaagtgttagatgaaaaactgggtgttatggatttaacggcatttgcttatgccgtgaccataatgttccattacaagtatttgatatgaataaatctggtgcgctattgtcagtggtaatgggtgaaaaagagggtacacgcgttact

SEQ ID NO: 8591 - DNA, 1341 bp, Acinetobacter baumannii
atgaagacccccaaagtcggttttgtttctttaggttgtcctaaggcattggtagattctgaacgaattttaactcagttaaagactgaaggttatcaagttgcatcagattatgatggtgctgatttagttgttgttaatacctgtggttttattgaatctgcagtacaagaatctttagatgcaattggcgaagccatgagtgaaaatggccgagttattgtgacgggctgtttaggtaaagacgaagataaaattcgtcaaatgcaccctaatgttctaaaagttactggtgcagcagcttatcaagacgttatggaagctgtacatgaatatgtcccagcaccgcctaaacataatccgtttattgaccttgttcctgagcaaggtatccgtttaacaccgaaacattatgcttatttaaaaatatctgaaggctgtaaccaccgttgtaccttctgtattatcccgagcatgcgcggtgatttagtatcacgtccggttggaagcgtattagaagaagctgctgcgttaaaacgtgcaggtgtaaaagaaatcttggtcatttcccaagatacctcagcttatggcgtagataccaaatataagctcgatttctggaacggacagcccgtaaaaaccaaattctttgacatgtgtgaagcacttggtcagcttggaatttgggttcgcttacattatgtatatccatatccacatgttgatgcagtaatcgatttgatggctcaaggtaaaatcttgccatacctcgatattccattccagcatgcaagcccacgcgttcttaaattaatgaaacgtccggcgcatagtgaaaatacattagaaaaaattaaattatggcgcgaaaaatgcccggatcttgtgatccgttctactttcgtggttggctttccaggcgaaactgaagaagacttccagattttgctcgattggttggttgaagctcaacttgatcgtgtaggctgctttacctattcaccagtagaaggcgctacggcaaatgatttaccagatcatgtgccagaagaaattaagcaagagcgttacgagcgctttatgcaagtgcagcaacaaatctctgctgccaaattacaaaaacgtattggtcaaacgatgactgtattggtcgatagtttggaagatgaatatcctgttgctgttgcacgttcttatgccgatgctccggaaattgacggtaatgtctttgtagaagatatcgataagagcactattcaaccaggcgatatgttggaagtcgaaattaccgatgcggatgaatacgacttatttgcaaagttaattaaaattaaatcggtc

SEQ ID NO: 8592 - DNA, 1107 bp, Acinetobacter baumannii
atggatcaacacacacctatcgactatcgcctattggtagacaatttaactactgcgattttattaatcgatagtaactttaatattttttatttaaattccgcttgtgaagcactttttgacattagtttgcttcgcgcttctggacaaccggttttaaatttacttcatgcacctgatgatacctttaatacgcatgaagccttattgaacacgttaaaaacgggacaaccttatacacgtcgtgaagccatcattaatgtcaattttaaagatttacatgtggattatacggtctcgcaattaaatgcaggtaaaagctaccacccgctcttacttattgagttaaatcctattgatcgtatgttgaaaatttctaaggaagaaaacctaattcaacaacatcaagtggctagacaactggttcgaggcgttgctcacgaaattaaaaaccctctggctggtattcggggggcaactcagttacttgctcgtagtttaaatgacgagagctatgctgaatttacggatatcattattaacgaggtagatcgtctcaccaatttggccgacaccatgttgggctcaagacaattgccaagttatgaaaatgtaaatgtgcatgaacctctagaacgggtacgctctttaatcgcaaatcagaccaagaaaaaaatcaaaattacgcgtgattatgatttgtctctacccgatgtaaaagccgatcgagatcagctcattcaagtcatgctcaatattagcgttaatgcaattcaagctattacagaaaataaatcattttttacagatcaagagcctgaattaattttacgtacccgtattcaacgtctagtcactattaatggagtacttaaccgctctgctgtacgagtcgatattgaagacaatggaccgggtattcccgaaagcattttagagtctgtgttctatcctttggttacaggacgagcaaaaggcacagggcttggcctgagtattgcacagaacatcatgcatcaacataacggaatgattgaatgccaatcagttcctggaaaaacaatgtttagcttatatttaccttgggagtcagaccgtgtcgcgaaa

SEQ ID NO: 8593 - DNA, 2652 bp, Acinetobacter baumannii
gtgcaaagcaatcgcgaaaatcaggctgaggccttattaaatcatgtcaacagatatcaagccggtcgactaacggtctttcttggtgcggcacctggtgtaggaaaaacttatgccatgctcgcccgcgccaaagaattatttcaacagggcacagatgttgttgttggtattgttgaaacccatggaagaatcgaaactctaaaaattttggaagggttgcctcagattgctagaaaagaaatgcaatatcaggggcatattttagaagaaatggacttggatgctattttacttaggcatccgcaaatcgttttggttgatgaattggctcatcgcaacgtcccaaatagtcgtcatgaacgacggtggcaagatgttaatgagttgctagacgctggtattgatgtatttaccgctataaatattcaacatttagaaagcctaaatgatgtggtctatcaaattacaggcattcgagtaaatgaaacagtaccagatcgggtatttgaccgtattcgagatattcgcttaattgatttacccgtcagtgaactcattgaaaggctccatcaaggaaaagtctatgtaccagagcaagcaaatctggcattacaaggcttttttagcatttcaaatttaacagcattacgtgaactcgcaatgcaatgcgttgctgagcatgtcgattcagacttaaaagagagttatgcctcaaagggattgaaatctatctcgctgcaaaatgaactgatgattgcgatagatggccaaggctcatctgaatatttagtacgggcaggttgtcgtttagctgaacgctatggggcaacatggactgtagtgaatgttgctaaaagtttagactttggacagagttcgggaaattcatataaaaaagaatatattgagattgatcgggcgtttgagctggctcgacaactcggtggtcgaacagaaatcttatatggccatcgagttgcgtcagtattaatggatgccgcggttgaccgaggtatttccaatctggttattggtaaaagtatttcaccgtggtggttaaagttatttaagaaaaatttagctcagcaattattaaatcaagaaaactcgattgctttaaccattttgcacccagaacagggcactaaaaagattaatcagctcgaaaaaccttcatttttatcattaaaagaaagtgtttttgttttagctgttacatgcgcaagtatttttatagctcacttcgcagaagttctatttggtattgaagacttctctgtcatttttattatttctgttttaattgttgcaactaagacccgaatgctcgctgcagtagtggctgctcttatttgtttcttagcctataattttttctttattgccccgcgttatacctttcagatttcagcacaccaaggggtagtcaccgttgttgctttttttgcagcagctttaattgctggccgtttagcttctcagttacgccagcaagttttgtctttaaaagctgcgaatgcctacactacggtaatgcaagacttggcacgtaagctttctagtgcagtaaaccttgaagaagtcatgcaaacaggacgtatgactttagaaacccagcttcagactaaggtgtggatttctattcgagataaaataatttcatctgatattgagctaaatgataaagaaaaagtagctgcagaatggtgtttgaaacatcagcagccatgcgggcgttttaccgatactctgagtcaatcaaactggtggtttttacctcttttagagcagaaaaatagcttaggtattgtgggaatttactttaaggatgaagtggtttccttaaattttgagcaaaagaaattgactgaaagtgtaattgagtacattgcacaggcagcacttcgaacccaattggtcaatgagctagaacaagcaaaagtcaccagtgaaacagagcgcttacgttctgctttattatcttcggtatcgcatgatttacgctcgccactcgcttctattattggggcagcagacacacttgccaattttaaagctgaaatgacagaacaagaccaacaagatctgcttgaaacaattcatttagaaggtgagcgcttagaccgttatattcaaaacttgcttgatatgacgcggttggggcacgaaggtctaactttaaaaagagactggattggggtagatgaattaattggttcggcaacccgccgtttaaagcgttataaaccagatacgcaagtggtcgttcagttacctgagcaatcgattagtttgtatgttcacccagcgctggtagagcaagccatttttaatgttttagaaaatgccgcaaacttttcacctccagatgaatctgtcatgattcgtgctcaactttcgtcagaagatgaggtgaaaatagaaattgaagataaaggtgcaggaatccctgaagacgaaagacaccgcattttcgatatgttttatactatagagcgtggagaccgtggaaaattcggtacaggtttagggctaacaattgtaaaagcgattattggtgctcatatgggtacaatagaagcattttcagggcgccaaaataaaggtactttaattcaaatcaaattacccattcatccagtaaaagaa

SEQ ID NO: 8594 - DNA, 603 bp, Acinetobacter baumannii
atgaaaacttatgcacaaaattcagaagcaaatttgggtcagaccttaagagcatctttcggacttctaatttttacccttgtcggctgtggtgctgtttatagtgcgattgctacaggtgcgggacaggtgttatttaataatcaagcgaatggtagtttgattgaaatagatcataaagttttagggtcaaaattagttgctcagccatttgttggagaggcttattttcatccacgtccttcagcagttgcttatgacccgatggcgatggcaggtacaaacttagcgcgtactaatcctgaactacagcaacaaattgatgctcagattcttgcggtgaaaaaacaagaccacacaggtaataaccctattccaagtgatttagtgactaaatctggtagtggtattgatccgcatattagtcctgaatctgctcagttacaggttgctcgagtggcccaagcgcgtcatttagaccctaagattgtggaagagcttttgcaaaagtatgttgaaccgaagcagtttgatgtattggggcaagcccgtgttaatgtattacagctcaatattgctttagatcaattacaatctacacat

SEQ ID NO: 8595 - DNA, 2031 bp, Acinetobacter baumannii
atgaatacacaaactcatgtaaatagccataaacaaaccatggcagtgccaaattttgaagtttggaaaaatgcatttgtgaaactgctaccacagcatgcaattaaaaaccctgtgatggcaattgtatggcttggaacagtggttacaggcattagtacaatcttaggttacaccacgctgatatttggtttagtggttacagcaattctgtttattaccattttatttgctaactatgccgaagctgttgcagaggccagaggtcgtggacaggcatcttcattacgtgcagcaagagaaaatttaacggctcgaagactcaactctttgacagaccgtcaagcgactcaagttgcagcgactgaacttcatttaaatgattttattgaagtacatgcaggtgagcttgttccagccgacggtgagattgtagaaggctttgcaactattaatgaatcggctgttacaggtgagtcagcacctgtgctacgtgaagctggaacagaccgttcaggtgttattggcggaaccaaagtacttacagatcgtattgttgtgcaagtgactgctgaatctggtcaaagtttcttagaccgtatgattgctttggttgaaggttcaaatcgccaaaaaactccgaatgagattgcgcttggctttttgttaatggtgatgacaatcacgtttttaattgtcgtgattagcttgccatttattgccaagtatttgcatattgaacttgattcagttgtgctcgtggcattattggtctgcctgattcctacaaccattggtggcttgttacctgcgattggtattgcagggatgaaccgtgccctcaaagccaatgttttggcgaaatcaggtaaagcggtagaagtcgcgggtgacattgatgtgcttttactcgataaaacaggaaccattacttatggtgaccgtcaagcgacctctttttatcctttaacttcggtaaccgagtctgagttgagagctgctgcttgggtaagttcacttgctgacccaacaccagaagggaagtcgattgttaagttagcaaaagagcaaggtttaaaacagcaagaacctgagcaagccgaatttatctcttttagtgcttcgactcgaatttctggtgtgaatttaccgaatggtgagcaaattcgtaaaggtgctttagatgcgatcttaaagtttgtagatgaagattattctcaagatttagagttaaaagcacgtgttgaacaagttgctaaaaaaggtgcaacaccattggttgtcgcaaatcaacatcatgtattgggtgtgattgagctttcagatgtaattaaacacggcattaaagaacgttttgcccgtttaagagaaatgggtattaaaactgtcatggttacaggtgataacccattaactgcggccgcgattgctgctgaagcaggggtagatgactatattgccgaagcaaaaccagaagacaaattggcttgtattcgcaccgaacaacaacgaggtcgtttagttgcaatggtcggtgacggaaccaacgatgcgccggcattagcacaagctgatattggtctagccatgaactcgggtacacaagctgcaaaagaagccggcaacatggttgatttagactcagatccaaccaaattacttgctgtggtcgagattgggaaacaacagctgattacccgtggtgctttaacaacattttcgttagcaaacgacgtctctaaatactttgccatcttgcctgcattgttcgctgctgcgattccacaaatgcaagtattgaatgtgatgcacttagcaagtccaaacagcgcgattttatctgcattaatttttaacgcgattattatcccgctattaattccaatcgcactccgaggcgtcaaatttaaaccttcaactgcaactcagttactacgtcgaaatatgttgatttatggagtgggtggtgtggttctaccatttattgccatcaaagcgattgatgtagtgattgttcaattatttggtttg

SEQ ID NO: 8596 - DNA, 606 bp, Acinetobacter baumannii
atgaagcctaatcctattaaaaagtctgaagcgaagcgcttacacattcttaacactagttcagacctgattttgcataaaggttttaccggtgtaggattacaggaaattttacagaactgtgagatccccaaaggctcgttttatcattacttccaatccaaggaagctttcggatgtgaattggtacagcattatgtagacaattaccaagtccgtttaaatgatgtatggcgtagtgataaatccccttatcaaaagctaattgagtattttaatttatggatagaagatcctgtaacacagtgtggttgggcggatagctgtttaattgtgaaacttgccgcagaagttgccgatctatctgaagatatgcgctcgattatgtccgctggcgtcgatgatgtaatcgaacgtattgctggtttaattgatttgggaaaacaggatcagtctatccaggcagatactgaggcctcgacgttggcacaagtactttaccaaatgtggttaggtgcagcattactgagtaaattgcaaaaagataaaacaccattacatcaagctctgagagcaactaaatttctattaaaaagtgaagattca

SEQ ID NO: 8597 - DNA, 417 bp, Acinetobacter baumannii
ttgttaaagaccatttacttgtcactcgatccttatatgtgtggtcgcatgagtgatgctccctcatatgcagcaccggttgaaattggcgaagtgatggtcggtggaagagtcagtcaagtagtggcctctaaaaacccaaaattcaaagaaggcgagtgggttctttcaggaaatggctggcagggctacgcaatttctaatgggactgtatgtcaaagcttaggtatgcaacctgaacatccatcttgggcattggatattttgggaatgccaggatttactgcttatatggggttgttagacattggtcagcctaaagccggtgaaactttagtcgttagcggctttgttgcacaaagatttaaaagacaacactctgctcatttgaacagaattcaagtgacaacttgggta

SEQ ID NO: 8598 - DNA, 927 bp, Acinetobacter baumannii
atggcaattagcccgatgaagcatacatgggcaaaaggcattctcgaccgcatggaaaataatacgtggtttccgcatgtcgtaaatatggcagatgatgttgccagttataaccgcttaaatgccgcagatcgtttcatgtttgataaagcattagctttcttgtcaaacctagacggcattcaattcaacaacatcaaccagaatattgcaaaacacgtaacctctccggaagtttccatgtgtttgtcacgtcaagcatgggaagaagcgctacacgtcaaatcatacgccacgatcattgagacagtcagtcttgatccaatgagcgtttacatgacatttgaacgtgatgggttattggctcaaaaaaaccagttcattctcaaacagtcgcgattactcggtgaaaaattctcggctgaaggttttgccctttcatgtgtatcaaacgtcttgcttgaaggtgtttatttcttctcaggtttcctttcgttctatctgcttgccgataagggtgaaatgttaggttcagccgacatgattcgctatatccaacgtgatgaagaaggaacgcacctagatttgttcgcacatatgctagacacccttcgtcacgaaaataaagacgtctttacccaatccttctggaataaagctcttgaagtgttcctgacttcatcagaaatggaaatcagttgggggaaatacattactaaaggcgtaacgaatcctaaagctattgaggattacatcaagcatcttgcaaacctccgtgctgaacaaattcaagcgccgtttgtgccatatccaggcgtaaaaaatccattcccttgggttgagcagttctctaaacctaatacgtcagaaaagaacttcttcgaaacccgcgtcactgactacaaagttggcggtgctttggtttgg

SEQ ID NO: 8599 - DNA, 1125 bp, Acinetobacter baumannii
atgaaagacagcatactttttcaaaacttaagcttaggcccttatgttttgcgaaaccgtattgtattgccaccattaacgcggtcgcgcagtactcagccagggaatattccaaatgaactgatggcaacctattatcaacagcgtgccggggcaggatttatggtcaccgaaggtacgcaaatcgagccacgtggtcaaggctatgcttggactcccggtatttacagccctgaacagattgctggatggcgtaaagtgactgaagcagtgcatgctaaaggaggcattatttttgcacaactttggcatgttgggcgtgtttcacatacatctttgcaacctaatcatgcatcaccggtcgcaccctcggctattagggctgatagtaatgttaaagtgtttattgagaccgggcctaatgctgggaccttggctgatccttcaatgccacgtgctttaagcaatgcagaagttaaagaattagtgcaactctatgctcaagcagcacgcaatgccttggctgctggttttgatggagttgaaattcattgtgcaaatggttatttggtgaatcaatttatctctgcacatagtaaccaccgtgaagatgaatatggtggatcactaaacaatcgtttgcgttttttacgtgaagtagtagaggcagttgctgaggtggttggtgcagatcgtttaggagtgcgttttgccccgctatttgaaagtacagaggaagatcgtgtttacatagggttggttgaagatgatccacatgtgacttatattgaagccataaaaatacttgaagaagttgggattgcctatttatcgattgcagaagctgattgggataatgcaccagaacttcctcatgattttcgtagagatgtcagagacactttcagtggtcggattatttatgcaggtcgatatacggcagaaagagggactcgaattttagaggcaggactggccgatttaattgcatttggacgcccatttattgcgaatccagatttacccgatcgcatcgccaatggctggccattgaatccagtagatgcaagcactatgtatggtgggacagaaaaaggctatattgattatccagcttacgcagat

SEQ ID NO: 8600 - DNA, 2379 bp, Acinetobacter baumannii
atgaacgtaaccaagcgaaatggcgcgacagaacctttttcaccatcaaaaattgaaaaagcagtcaactgggctgtagatggaacgtcgatcgaatcgcaagaagtgattgataaggcaattttactaatttatgacggtatcaaaaccagtgacattcaacaggcattaattaaaggcgctgctaagttagtgtctgcaaccaaagctgatgcatctttggtgtctgcgcgtttattgctgttagatttatataaaaccgtatgcggtgtaaacggcaaagtcagcggtggtggctttcagtatcctcatatcaaagattatttagaaaaaggcgtttctttaaaactgctggaccctgaacttttaaactatgaccttgagcgcattaatgccgctatcaagcctgagcgggacttatcattccactacttagggcttgatacattagccgaccgttactttattcgtgccaatcgcgatattcgcctagagaaagaaacaggcaatatgtcgggtaatattatcgaattgccacagcatttctggatgcgtgtagcaatgggtgttgccttaaaagaaaaacctgaaatccgtacttctgtagcgctggcttattatgagctttattcgaaattagaatacgtctcctctaccccaaccctatttaatgctggtacgttacatcctcagttatcaagctgttacctgaaccaagtctcagacaccattgctgctgatgaaggtgataaccgctttgcttctatttttggagcaattgaagaaacggcgttactttctaagtttgcgggcggtattggtacagactggacgccagtacgcggtgaaaatgaattaatttttggaaccaatggtatttcaagtggtgtagttccatatatcaaggtccagaacaataccgcagttgccgtaaaccaaggcggtaaacgtaagggatacggttgccccatacttagaagcttggctatccagacgtttatggcgttttgtgagcttaaaagagaatctgatgacggaccgccgccgtgctcatgacgtattccctgccgctgggttcctgatctcttgatcgaacgcaaagaagatccaaatgccatgtggtctttcttctcgcctaaacgcttccctgaattgcatgaactttacggcgaagatttcgttaaacgctatgaagaactagaagccgctggtgaatatgatttccaacttccggctattcaggtatggcgccatttgttgaccaatttatttgaaacaggtcatccttggatcacttacaaagatgaatgtaaccgccgtaatcctcaacaacatgcaggcgttattcatcacagtaacttgtgtactgaaattacgttaaatacatctaaagacgaaacagcggtatgcaatttaggttctattaacctttcacaagtaatgtcagctccaaatcctttagaaagattacgtgaagttatccgcttggctattcgtaatttggattctgtaattgacgtgaattactaccctagcgaccgcgcatccaactctaacttcaaacaccgccctatcggcttgggtgtgatgggttattacgaatggctggtaaaacaaggtgtggatttcgaaagcgaagaacacttaaagcaagctgacgcattgtttgaggcaatttcttactttgctatcgaggcttcagcagacttggctcaagaacgcggttcatatccatcatttgaaggttctaactggtctaaaggtatcttgccaatcgataacgccaaattgatggaagacggcaaaccattctttgatcaacctcgtcgattcgactgggaggctttacgtgaaaaagtcaaaaaagggatgcgtaactcgaacgttatggcgattgcgccgactgcaacgatttcgaatattgcaggaacaactcaatgcacagaaccgccgttcttgcttgaatacttcaagtctaacctaggtggtacttaccaagtcgtcgatcctgcaattgctcatgtcggtgacaaatatcacttgctcaaagaatcgtattatgtcgaccaactctacatcattaaggcagccgcagttcgtcaaaagtggattgaccagtctcaatcaactaacctctttgcaaaacaaggtacaactggtcgtgatttagatttgtggtatacaacagctaaaaaacttggcttgaaaaccacttactacttacgcaatcaatctgatgcagagaagagcgcttcaatgcgaaccaaagttattgcggaattagctaacgcagctttaggcaaactttcagaaccaactgaaagcgcaccaaagatgtgttcaattctcgatccagattgtgaaagctgccagtaaaac

SEQ ID NO: 8601 - DNA, 1224 bp, Acinetobacter baumannii
atgaagcatctaatcaaatttgtcagcactgaaactcaactacttggtaactgtttaatgaactctagcttgtcgttattacacccgtatccatttgaaaagttaaaccaactttttaaggatattaccccagcgaaccttcccttgattcctctatcaattggcgaaccgaagcatccagcaccagagtttgttaaacaggctattattgataactttaaccatctatccacttatccaaacagcaaaggcttacctgagcttcgccaaagcattgcagattggttaactaagcgctttaagctcaacagcattagtgctgaaaaccacattttacctgtgtctggtacacgtgaaggtattttctcttttgtacaggcattaattaatcgtgaagatgcaccttatgtggtaatgccaaacccgttttatcaaatttacgaaggtgctgctttacttgcaggtgcaaagccatacttcattaattgcacagaagaaaatggttatttaggtgactttgacgcggtaccagcagaagtttgggaaaagacagcccttctttttgtatgtacaccgggtaacccaacaggtactgtgctttctaaagaacaatttaaaaagctgattgccttatctgatcaatataattttgttattgcatctgatgaatgctattcagaactttggtttgaccaagctcctacgggtttattagaagtatgtgcggaacttggccgtgatgactacaaaaactgtatcgtttttcattcactttcaaaacgctcaaacttaccgggtatgcgttcaggttttgtagcgggtgatgctgctttattaaagccatatttgcaataccgcacctatcacggcgcagcaatgccagtacaacatcagcttgcctcaattgcagcatggaatgatgaaagccatgttgaagaaaaccgtaagcaatatcgtgcaaaatttgacttatttcaatctgagctaggtcatttgcttccattacaaaaaccagatgctggtttttactattggttaaaagtggataatgatgaaacttttgccaaaatgctgatggaaaaagcacatattaaagtcttaccgggccgttatttatctcgtgataccgaacaaggtaaccctggagctaaccatgtacgtatggcgttagtggcagatttagctcaatgtgaagaagtagttaagcgtttaaaagcgattctg

SEQ ID NO: 8602 - DNA, 3561 bp, Acinetobacter baumannii
atgcagtttgttcatctcggtatttacacagaattttcgattacagagtcgattgttcgcatacccgacttggtcaagactgcggtaaaggatgaaatgcctgcgctggcacttaccgacttatccaaccttcatgctgctgtaaaattttataactcttgccttaagaaaggcattaagcctattttgggtagtacaattcgtcttaatgatgcccaacatcgtgcaactttgcttgcaatgagtgatattggatggaaaggactgaccgaaattgtttcgcgtggatttattgaaggtcaacaactcagtatcccttgtgtacaaaaagaatgggtcctagagcagcatcaagatattattgttttacttggccaacatagtgatgttgggcaaatgctttgctcatctaacccgcaaaaagcagaacctttacttgaagagtggattgaaaagtttggtaatcgtgtttatctagccttaacacgtactgatcgtcctggcgaagaagactttattcaagaagctgccaaacttgcagctaaatataatgttggtgttgttgcacacaacgatgtgcactttattgaaaaagaagatttcgaagcgcacgaagctcgtgtatgtattgcagatggttatgttttagcagatgatcgacgtccgcgcttatatagcccagagcagtatttcaaaacttctgatgaaatgattgagctgttctcagatattcctagtgctattgaaaacacctatcaaatcgctaaacgctgtaatgtcactttaaagctcggtacttactttttacctgagtatccaattcctgatggttttaccatcgatacctattttgagcacttatcaaaagaaggcttagaagagcgcttaaattacctttaccctgtcgaaaagcgtggtgaagactggcccgaaattcgtaaaccatatgatgaacgaatagattatgaagtcggaatcatcctgaaaatgggattccctggttacttcctgattgtcatggacttcattcaatgggcgaaaaacaatggtgtccctgttggaccgggccgtggttcaggtgcaggttcattagtagcttatagcttaaaaattacagatcttgatccacttcgttacgacctactcttcgaacgtttcttaaacccggaacgtgtatcgatgcccgactttgacgtcgatttctgtatcgcaggtcgtgaccgtgtgatcgattatgtatcacgtacttatggccgtgaagcggtgtctcagattgcaacgttcggtacgatggctgcaaaaggtgcgattcgtgacgttgcccgcgttttagggaagtcttatggtctagctgaccgtatttcaaaaatggttccaactaagccacttggtgtggatttggcaactgcaattgaaatggaacctcagcttaaagatattgttaccaacccttccaacccagataatgatgatgccagcgaaatttgggaaatggcattaaagttagaaggtattaccagaaatacaggtaaacatgccggtggtgttgttattgcacccggtaaaattaccgacttctctgctgtgctttgtgacgcagacggtactaaccgcgtagcacagtatgataaagatgatgtagaagctgcaggtctcgtaaaattcgacttcttgggcttacgtaacttaaccgttattgaagatgctattcaaaatattaataaaaaccgcgatagcaatgaccctttaaacatttcacacgtccctcttgacgaccctaaagcttattctgtctttgctgatgcaaatacaaccgcggtattccagtttgaatccgtcggtatgaaacgaatgcttaaagaagcgcgtccaagtaaattcgaagaaattattgcgttcgtatctttatatcgtccgggtccgatggatctgatcccagactttattcaccgtatgcatggtggagaatttgagtatcttcatccattgctagaaggtgtattagaaccaacctacgggattatggtttaccaagaacaggtaatgcaaactgcacagatttgtgcaggttacacactcggtggcgctgacttgctccgccgtgcgatgggtaaaaagaaacctgaagaaatggtgaaacagcgccaaatcttccttgagggtgctggacaaaaaggtattgatgaaagcacagctaaccatatcttcgactatatggaaaagttcgcaggctatggttttaacaaatcgcacgccgcagcctatgcacttgttgcataccatacagcatggttaaaagcccactatcctgccgaatttatggcagcagtaatgtcatcggaaatgcagaacactgacagtgtcgtatttttgattgatgactgccgaaataacggactcgaggtcttaccgccatcagtcaatatgtcgacttatcatttccatgcgagtgatgataaaaccattgtttatggtttaggggcaattaaaggtgttggtgaacaggcaatgcagtctgttattgactcacgtcgccaacaagggccttatactgacctatttgatttctgccatcgtattgatttgaaaaaaatcaataaacgaaccttagaagcacttatccgtgctggtgcgcttgattgtttaggtattgaacgttcaagtctaatggctcaattgccagaagctgtacaagctgccgaacaagcacgtagtaaccgtgaaagcggtattatggacttatttggtgaagttgaagaagttcaacgtaaaccagctaaacctgttaagccatggagtgatgaagttcgtctcaaaggcgaaaaagatacacttggactatatttaacaggtcacccaattgatgtttatcgtcaagaactcaaagcgtttattcctgcaaaacttaatgaaattaccgcaactcgtcgcggtgtaacgactgtttatgcaggacttgtccttgatgtagcgaatttcccaaaccgtgttgttattgtgcttgacgacggaacagcacgtattgaagtcagttgtaaccacgaacgtttccaacgctttaaagatattattcaagttgagcgcgtagtcgtctttgaaggcgagatctatgagcgtgaaggttttgatcgtccaatgggacgcttgaacaaagcgtttagcttaaatgaaatcagacaaaaacgcgccaatagtattcaaatcaaattaacccatgatctattgcaaccaagtttggcaaaagatctacaaaatatattattgccttattgtaatgtcgatatgcatcagcatattgcaatacagttacagattgaccaaccatatgctcaggctgagcttcagcttggcccacaatggaaagtcgctcctttagatgaacttcttgccaaactaagagattactttggtaaggataatattcatattgaatatcaggtaaaatctaaggcagctaaagcagcagaacctgttcgtccacaacctgttgcctcacctcctgtggacatgactattgatgatgcattggattcataccaaagcgaagtttctcaatattcg

SEQ ID NO: 8603 - DNA, 715 bp, Acinetobacter baumannii
atgcttaaacagcttaaagaagatatacaggctgtattcgcgcgagatcctgctgcacgaaatacactcgaagtacttaccacttacccgggtatacacgctttacttttgcatagacttgcacatgaattgtggaaaaaagattgcaaaggtaccgcccgttttgtttcgtcatttagtcgttttgcaacgggtattgaaattcaccctggtgctaaaatcggcaaacgcttctttatcgatcatggcatgggcgttgtaattggtgaaactgctgaaattggtgatgatgtaacgctataccacggtgttaccttaggtggtacgacttggaataaaggtaagcgtcacccaactttagaagatggcgtggttgtcggtgctggtgcgaaaatcttaggtccatttacggtaggtaaaggcgccaaagttggttcaaatgcggtagtcacaaaagcagttcctgctggtgtaacagctgttggtaaccctgcacgttatatctataaagatgccgacaaaactaaagataaagatgaagaacgtcgccgtgattatgcacaaagtattggttttgctccgtatgcgactactgctgatcaatctgacccaattttagaaggaatgcgagttttacttgaccgtattcagcacaatgaaacgcgtcatgaataatttgtgccagcgtttgtccgaacttgacccaactttcaaa

SEQ ID NO: 8604 - DNA, 723 bp, Acinetobacter baumannii
atgtatttaacgattggcattagaccgacttatgcagagcatattacaaagcgtagcaatgaagtagaaaagcaaggcgtacatgtcaaactcgttgaattttctgattggcgagcacccactgttgccgtacaaaacggcgatattgatgcaaactttttccagcaaagcgtatttctacgtaatgctgttaaagaaacgggttatgacttacatgcatttggtgtgggttcaggaagtcatgtgggtttatattcaaaaaaatataaatcatttgaagatttacctttaaatgcacgtgttgccattccaaatgatccggttaatttagcccgtgctttaattttattgcatcgtgctggcttaattcagcttaaagatataaataatgaactttcaactactcaagacattattgctaatccgaaacagctgagcttcgttgaagttgaaggccctcaaaccgcacatgcatataatgatgtcgatttaattttcggcttccctcactacttaaaaatggcaaaggtaaccgacccacatagcgcattatttttagacccaatcgataaaaaatatgcaattttgtttgtgacccgtcgcgattaccaagacaaaaaccaaaaacttgcaacctttgttaaagcattccagaactcaaaacaagcacaagacattctggataaagactttggtaaaggtatgtggtttcaaggctggaaa

SEQ ID NO: 8605 - DNA, 891 bp, Acinetobacter baumannii
atgaaacgttctgcaacctctctcattgtttcaacagttatgctttgtacggttggtgctacttctcaaattcaggcagcagatacattagctaaaattaaaagtactgggaaaatcgttattggccatcgagaatcgtctgacccgatttcatatgttgttgcaggtaaaccagtaggttatgcagtcgacatttgtaaccagtttgcaaatgatattaaaaaagaattgaaaatgcctggtttaaaagttgaatacaaggcagtaacttcatcaacacgtattcctgagcttttagcgggcaatattgatatggaatgtggtaccaccacaaactctaaacagcgtcagcaacaagtgggtttctcaactaactactatgcaacagaagtacgcatggctgttaaagcaaactctggtattaaaagtttggcagacttaaatggtaaagcagttgttactactcaaggtactacatctgacaagtacattaagatgaatgaaaaaggccaagcaattaatgtacaaaatatttatggtaaagaccatgctgactcttttgccatgatggcatctggacgcgctgctgcatttgtaatggatgataatattttagcaggcttaattgctaagtcttctacacctaaagcatttgcaattgttggtccagtactttcatcagaaccttatggcattatgattgcaaaagatgatccaaaatttaaagcaattgctgaccgtactgtaaataacttatggaaaactggtcaaatggatgctttatataaaaaatggttcttatcgccaattccaccgaaaaatactaatttgaacatgcaacaaagttcatcttataaaaaactcaaagctcacccaacagatgcaggaatc

SEQ ID NO: 8606 - DNA, 657 bp, Acinetobacter baumannii
atgcaagaccagctcattgatttattaattactggaactatagataccttgctcatggtaggcgcatctgcattcattgcctttttaattggcttacctatcgctgttattttagtcagcacttctgaacatggcattcatccgtcgcaaaagattaatcaggctttgggttgggtcatcaatatcactcgctcagtaccctttctaattttaatggttgcacttattccgcttactcgctggattgtgggtacaagttatggcgtatgggcagcggttgttcccttaacgattgcggctattccgttttttgcccgtattgcagaagtcagcttacgtgaagtcgatcaaggcttaattgaagcagcacaagccatgggttgtaaccgtaaacaaattatttggcatgtacttttaccagaagctttgccgggtattgtggcaggctttacagtgactattgtgacaatgattaactcatctgcgattgctggtgctattggtgcaggtggcttaggagacattgcttatcgatatggttatcaacgttttgatatgcaaattatgttggctgttattttagtattgattgttttagtcatgttagtacaagcgactggtgatgcattagcccagcaactcgataaacgtaaagtt

SEQ ID NO: 8607 - DNA, 1089 bp, Acinetobacter baumannii
atgggttttaattgcggtattgttggtctgccaaatgtagggaaatctacccttttcaatgcattaactaaagcagcgattgcagcggaaaacttcccgttctgtaccattgagccaaacacaggtattgttcctgttccagatccacgtttagataaacttgctgcaattgttaaccctcagcgtgttttgccgaccactatggaatttgtggacattgcaggtcttgttgctggtgcatcaaaaggtgaaggtttgggtaaccagttccttgctaacattcgtgaaactgatgcaatcgctcatgtggtacgttgtttcgaagacgaaaacgtgattcacgttaatggtaaaattgatccattagacgacatcgcaactatcaatactgaacttgcgcttgcagaccttgagactgttgctaaagcaattttacgtttaactaaagttgctaaaggcggtgacaaagaagctgtagcgactaaagcagttttagaaaaaatccaaccattacttgacgaaggtaaaccagctcgcgcggctgatttgtctgatgacgaacgcaaattaatccgtggttttggtttaatgactttgaaaccaaccatgtacattgcaaacgttgcagaagacggttttgaaaacaacccacatttagaagctgttaaaaaacttgctgccgaagaaaacgcaattgttgtgccgctttgcaaccaaatcgaagctgaaatttcattattagaagatgaagatcgtgctgagttcctagaagcaatgggcatggaagaaccgggcttaaacgtagttattcgtgcaggctataaacttttaggtttacaaacttatttcactgctggtgtacaagaagttcgtgcatggacagtaaaagttggtgcaacggctcctcaagcagctggtgttattcatactgatttcgaaaaaggctttatccgtgctgaagttgttgcatatgatgacttcgtacaatacaacggtgaaaacggcgctaaagaagcaggtaaatggcgtttagaaggtaaaacttacgttgttcaagacggcgatgtaatgcatttccgttttaacgtt

SEQ ID NO: 8608 - DNA, 828 bp, Acinetobacter baumannii
atggctcaaacagcctctaaaaaatggctaggcataggcttagtcgttgtagtcctttttgttgctttgttcttatggaataaacatcgtcaaagtggctcaaatgaacttgtgattggcattagtccaccatttgcaaaacctttacaagctgctgccgatgaagcaaagaaacaaggtttaaatgtaaaactggtcgaattttctgactggaataccccaaatattactttaaatcatggggatattgatgcgaactttttccagcatcaacctttcttagacaacgcaattaaagaaactggctttaagttaaaggcatttgcagtgggtgcagcctcacatgtgggactttattcaaagaaatataaaagtcttgatgaattgccacaaaacgcacgcgtagtcattccaaatgatccggtgaaccaaggtcgtgccctacttcttttacaacaagctaagttaattacgcttaaagattcaaataatcacttatctgcactcaaagatgttgtttcaaaccctaaaaatttgcaatttattgaggttgaaggaccacagactgctcgtgcaattgatgatgttgacttggcttttggttatccacattacttgcgcttagcaaaaacagcagaccctaatagtgcgcttttactggatgacaataccaataaacgttatgccattttgtttgtagtgcgtgatgactatgaggataagggcgacaaattaaagaaatttgttgagatctatcaaaactcgccaaaagttaaagctgtgttagacgctgaaattgggccaaaactttggttccctggctggaag

SEQ ID NO: 8609 - DNA, 327 bp, Acinetobacter baumannii
atgatcaaccaagtcgatttctttaaatgtctatctgaccaaactcggttaaatattcttaaattagttctaaataaacaaaatatttgtgtctgtgagctaaccgaacagcttgagttgagccaacccaaaatttctagacacttagctttgttacgaactcatggcgtattactggatgaaagaaaaggacagtgggtttattacagcttaaatcctgatttacctgtttgggctttagatattttaaaggtgatagaaaatgacgagagtgggacaaaagtaaaacaacaagatcagtctttcatcacgacaacgtgttgtgat

SEQ ID NO: 8610 - DNA, 1872 bp, Acinetobacter baumannii
atgaccgacataaacctcatacttaaaaacggtaaaatcacaacactagatcctcagaaccccgaagtacaagcaatagcgattgcagatggtaaagtcgtccgcacgggtacaactgatgaggttatgaaactcgcaactccaacaagtaaagttgtagacttaaatggtcgacgcgttataccgggtctaaatgacagtcatctgcatattattcgtggtggtctaaattacaatatggaactgcgctgggaaggtgtgccatccgttgccgatgcgttacgcttactcaaagagcaagcagataatacgctagctccacaatgggttcgtgtagtaggcggttggactgaattccagtttgctgaaaagcgtttaccgactttagaagaaattaataaagctgcaccagatactcctgtattcgttttacatttatacgccagtgccatgttgaaccgagctgcccttgatgtattaggttttaataaagacacgccagacccgccaggtggcaagattgtacgaaatgaaaaaggtgagccaacaggactgttgctcgcaacgccatcggctatgattttatattcgactttaggtaaagcgccgaaattgccagttgaagatcaagtcaattcaactcgtcatttcatgcgtgaattgaaccgattaggtattacttcagcaattgatgcaggtggtggcggtcaaaactatcctgaagattatgatgtgattaagcaattgcacgatcaaaatcaaatgacggttcgaattgcttataacctatttgctcagaaggcaggccaagagcttgatgattatcgccgctggaccgaaatgacatttccgggcgatggtgatgagctatttagaatgaatggagcaggcgagaacctgacttggtcagcgggggactttgaagacttctatgagccacgtcccgatttaccagaaaaaatggaaggtgaactcgaagccatcgtagagcacttggctgaaaagaaatggccattccgtattcatgcaacctatgatgaaagtattagtcggttactcaatgtatttgagcgcgtcaattcaaaacagccatttgcgacacgatttattattgaccatgccgaaactgtatctgagcgtaatatcgaacgtattggtgcgttgggtggtggtatcgcgattcagcatcgtatggcatatcaaggtgagattttcgtaaaacgctatggtgccgaagctgctcaagcaacgccaccagtcaagaaaatgttagaactcggtgtacctgtgggtgcgggaacggatgcgactcgtgttgcatcttataacccttgggtgtgtttgtattggctgactacaggtaaaacagttggtggtttaccgctgtatgatgaaaaaaatttattagatcgtcaaacggccctcaaactctggactaaaggttcggcttggttctcaggtgaaaaagatgtcaaaggttcactcacagcaggggaacttgctgatctggtggtattgtctgatgactacttcaaagttgaagcagaagatatccagtggattgagtctgtactcactgttttaggtggaaaagtggtgtacgcaggggcagagtttaagcaagacgatccgccgttaccgccagcatctccaacatggtcgccagtaaaacgcttcggtggtcagtggcgcttatctgaaaaccgtaatgcaccatcgaatcaatcattacagtcacaaagtgcattgtgtgcatgtgctagtagctgtggaatgcatggacacagccacgcttggatgcttgatgttcctgtaaatgataaggacaaaaaatctttctggggcgcacttgggtgctcgtgttttgcattt

SEQ ID NO: 8611 - DNA, 849 bp, Acinetobacter baumannii
atgcctttatggatgcaacttttaatgaatggcggcttacttcgacaagaagccaatggtgaaggttctgatttaggaggcggctcaggcggcgaaggcggggaaggtgacgagaaaaaagagcctaccgaacctactaaaaaagactcagaagccgacgatgaaagtaaaaacaagccgactgacaaagaagctgaattactcaaagaagtaatgaagaaaaaagccgaagctcaaaaagtgaagcaggagcttgaagaactgaaggcgcgatatatcgacatcgaccctgaaatcgctcgcaaggcaattaacgaacagaaggaaaaagaaaccaaagagcttgaagcgaagggtgattttgaacgtctgaaagcgcgtatggccgaagagcatgctaaagaagtaaatgccctaaaagcaaaaatcgcagagcttgaaggtgccaatgcttcgaagtctcaaatgatcaatgacctgacggttggcgctcaattcaaccaatctcaatacatcaaacaagatttaatttacacgccaactaagttacgtgcgttatatggtaatcactttgaaattgaagatggcaaagtggttggttatgacaaacctcgcggcgcggcagagcgaactaagatcgtcgatagtcatggcaaccctgtaaattttgataaagctttagaaaaaattgtatcaatggaccctgatgcaaattacatgatcaaagccaaatcaaaacaaggagctggttcacagccaaatccaaaacaaggcgcgcctaaaccagaagctaaattgtcttcaactgccaaaatttcaaatggcttgagtgagctgtttgctaatcag

SEQ ID NO: 8612 - DNA, 1311 bp, Acinetobacter baumannii
atgtccgaacatcctcaaggacaaaaacattgttcattttgcggtaaaacgcagtctgaagtcgggaaactgattgcgggcgaggacgcatatatttgtaatgagtgtgtagatgtctgcttagaccttgtacaaaccagccaacaggttgaagcaggtgactgggcaagcaaggcattgccaaaaccacatgaaatacgtgctgcgcttgatcaatatgtgattggtcaggatcttgccaaaaagacattatctgttgccgtttataaccattataagcgtttaaaagtcgggcaatctggtcatgtgtctaaagatgtggaaattgctaaaagtaacattctactgattgggcctaccggttcaggtaaaacattacttgctcaaacattggctcgtttattagatgtgccgtttgcaatggcagatgcgactactttgacggaagcgggttatgttggcgaagacgttgaaaatatcgtacaaaaacttttgcaaaaagcagattacgatgtagaaaaagctcaaaagggtattatctacattgatgaaatcgacaaaattacacgtaaatctgaaaatccgtcgattactcgtgacgtgtctggtgaaggtgtacaacaagctttgcttaagatgattgaaggtactgtagcctcaattccaccacaaggtggacgtaagcatccacagcaagagttcattcaaattgatacctcaaatatcctatttatttgtggtggtgcatttgctggactggaaaaaattgtacaacagcgtcaagagaaaggcggaattggctttacggctgatgttaaaaacaaagatgaaaccaaaaaacttgctgaattattccgtcaagttgagccaactgatttagttaaatttggtttaattccagaattcattggccgtttaccagtgattgcaacgcttgaagagcttgatgaagaagcgttaatgcaaattttgactgaaccgaaaaatgcattaactcgtcagtatcaatacctgttcaatatggaaaatgttgacctcgtatttgaagattcagctttacgtgcagtggctaagcgtgcgcttgagcgtaataccggagctcgtggcctacgctcgattttggaaaatgttctacttgaaacgatgtatgacttgccaagccgtacagatgtaggaacagttttcattaatgaagcagttattaatggtgaagctgaacctgtctacaagtcagaacgtcagcctaaagaagcagtaacacatgaaagtgttgctaaggcagatttaaaagtaattgattcgaagtctgct

SEQ ID NO: 8613 - DNA, 1113 bp, Acinetobacter baumannii
atgatagagaacccaattaaacgtcgaccaacacgtaaaatccgtgttggttcggtctatgtcggtggcgatgcacctattagtgtgcaaagtatgacaaataccgaaacttgcgatgttgacgcaactgtggctcagattgagcgttgtgttgatgcaggtgcagatattatgcgtgtttcagtgccctctatggaagctgctgaagcctttggtgcaatccgtaagcgtgtttcagttccattagttgctgatatccattttgaccatagaattgctttggcagttgcggattatggtgcggactgcttgcgtattaacccgggcaatatcggttcagaccagaaagttcgtgaagttgtggctgcggcacgtcatcacggtatttctatgcgtattggcgtcaatgcgggttctctagaaaaagatttacagaaaaaatatggcgagcctacagggcaggcacttcttgagtcagctttacgtcatattgatattttagaccgtcttgacttccatgagtttaaagtcagcgtaaaagcatcgaatgtgtttttaaccatggatgcttatcgtttgctttcacaacaaattgataatccattgcacttgggtgtaaccgaggctggtatttaccgtacaggtactgtgaaatcagcgattgctcttggtgggttattaatggaaggcattggcgatacgatgcgtatttcgcttgctgctgaacctgaagatgaaatcaagatcggttttgatatcttaaaatcgcttggcctacgttctaacggtatcaactttattgcttgtccaagttgttctcgccaagaatttaacgtgattcaggtgatgcaggctttagaagagcgtttagaagatatccgtacaccaatggacgtttcggttattggctgtaaggtaaatggcccaggtgaagcaaaagaagcagatatcggggtcgttggggctgcgcctcgttcattggtttatcgtaatggtgagaaaagccatttaattgataccaatcaattggttgatgaaatcgaaactatggttcgtcaacgtgttcaagagcttgaagaagctaaatctaaagaaattattcgtagttcatca

SEQ ID NO: 8614 - DNA, 1524 bp, Acinetobacter baumannii
atgacaacgattatcaaacaagatgacttgattacatcaatcaaggacgccctacagtttatttcgtactatcacccgcaagactttatccaagcgatgagccgtgcttatgatcgcgaagaaaacaaagctgcaaaggatgcaattgcacagattttaattaactctcgcatgtgtgcggaaggtcatcgtccaatttgccaagatactggtattgttaacgttttccttgaagtgggcttagatgttaaatttgatttaacaatgagcttagacgatgcagtaaatgaaggtgttcgccaaggttaccttgaaaacagcaacgttcttcgtgcatctgttcttgctgaccctgcatttggtcgtaaaaatacaaaagataacacccctgccgttattcactacaaactcgtaccaggtaacaaagtagatattacagttgctgctaaaggtggcggttcagaaaacaaatctaaacttgcgatgcttaacccatctgactcgattgttgactgggttcttaaaaccgttccaactatgggtgcaggctggtgtcctcctggtatgctcggtatcggtattggtggtactgctgaaaaagccatgatgcttgcgaaagaagcactcatggaagaaatcaacatggacgaattacttcgccgtggaccagagaacaaaatcgaagaacttcgtatcgaaatctttaaaaaagtaaacgctcttggtattggtgcacaaggtcttggcggtttaaccactgttcttgacattaaaatcaaagactacccatgtcacgctgctggcaaaccagtaggtatgattcctaactgcgctgcgactcgtcacgctcacttccagcttgatggttcaggtgtagctcatattcaagcaccaaaacttgaagactacccatctgtaacttgggatgcttcacaatctaaacgtgtaaaccttgataccattactcaagaagaaatggattcttggaaaccgggcgacacattacttcttagcggcacaatgtacacaggtcgtgatgctgcgcataaacgtatggttgaaatgatcgacaacggtgaagaattaccggttgatcttaaaggtaaatttatttactacgttggtcctgttgatccggtacgtgatgaagtggttggtcctgccggtcctacaactgcaacacgtatggataaattcacacgtaaagtactcgagcatactggcctattcggtatgatcggtaaagctgatcgtggtcctacagcaattgaagcaatcaaggacaacaaagcaacttaccttatggcggtgggcggtgcagcttacctcgtatctaaagctgttcgcgaagctgaagtggttgcatttgcagacttgggtatggaagcaatctacaaatttgtagtggaagatatgcctgtatctgttgcagttgatgtaaacggtacatcaattcacgcagtagctccaaaaatctggcaagcgaaaattggtaaaattccagtaatcgatgccgcagctggc

SEQ ID NO: 8615 - DNA, 240 bp, Acinetobacter baumannii
atgagttcaattgtcgcaatcaaaggttttaatgacgttttaccaacgcaaacagcagcgtggagacgtctcgagcagcatttagcatctttaatggatgcttatggttaccaacaaattcgtttgccgatcgttgaacaaacgggactgtttaaacgtgctattggtgatgcaactgatatcgtagaaaaagaaatgtacacattggagcttcagctgctcgagttctatagtgtcacc

SEQ ID NO: 8616 - DNA, 624 bp, Acinetobacter baumannii
atgtctaccccacattggtttgatcagggctctttagtccttgcaagtaacaacaaaggtaaagtcgcagagtttgaaaaactttttgaacagctcaagttgcctgtagaaattattcctcagggtcacctaaatattcccgacgccattgaagacggcttaagctttattgaaaatgccattattaaagcgcgtcatgcctctaaaatttcagggaaacctgctatggctgatgactccggtatttgtgttccggttttagggggtgcacctggtatttattcagcacgttatgctggagaacatggtgacgatgcagcgaataatgccaaattattaaatgaccttttgccatttcgtaaaaatggtgaagcgattgaaggtatgtttgtgtgcgtacttgctttagtgacgcatgcggaagatccattgccacaaattttccaaggcatctggcatggtgaaattttagaagcgccacgtggtgaaaatggttttggttatgacccactgttctggttaccagagcttcaagtttctagtgctgagttgtctaaagaagaaaaaaataagattagtcatcgtggacaagcgatgcagttatttagagagagcctgcagaag

SEQ ID NO: 8617 - DNA, 1263 bp, Acinetobacter baumannii
atgcaagattcaattgaacaatatatgcaaaaagttgggcaacaagcacgtgatgcttcacgcgtcttaacaagtgcttccacctcacttaaaaatcatgcactctctgctatttatactgctttggaaaacaaccaagcagctatcttggcggcgaatcaaatcgacatggaaaaaggccgtagcaaccagctcgacagcgccttacttgatcgtcttgagcttacgcccgcacgttttaaagggatgttgcaaggtttaaaagatgtgatcgcgcttgtcgatccaattggggaaatcacggatcttgcatatcgccccacaggcattcaaattgggaaaatgcgtgtacctctaggtgtcgttggtatgatttacgaatcacgtccaaatgtcacacttgaagctgcatctttagcaattaaatcgggcaatgccattattttacgtggtggctcagaagcacttgagtcaaataaagcaatcgcagaagcggtgaagcatggcttaaaagttgctggtttacctgagcactcagtacaagtgattgaaacttctgaccgcgcagcggttggtcacctcattactatggctgaatatgttgatgtcattgttccacgtggtggtaaaagcttaattgagcgtgtaaccaacgaagctcgtattcctgtgattaagcatcttgatggtaactgtcatgtgtttgtagaagctcaagcagacttacaaaaagcgttaccaattaccttgaatgctaaaacacatcgttacggcgtttgtaatgcaatggaaactctgctcgttgatgaaaaaattgcagaagttttcttaccacacattgctgagctttatgctgaaaaacaagttgagctacgtggttgcccagaaacacgtcgtattttgggtactactgtcaaacctgcgacagaagaagattggtataccgaatatctagggccgattcttgcagttaaagtggtgagtggtattgatgaagcaattgaccatatcaacaaatatggttcgcatcataccgatgcaattgtgacagagaactatactttggcacgtcagttcttggctcgcgtagattcaagctccgtcgtagttaatgcatcaactcgttttgccgatggctttgaatatggtttaggtgctgaaattggtatctcaacagataagattcatgcacgcggccctgttggcttagaaggtttaacttctcaaaaatggattgtgttaggtgacggtcaaattcgtcaa

SEQ ID NO: 8618 - DNA, 657 bp, Acinetobacter baumannii
atgtttacaggcattattgaaagtttaggtaaagtagaaagcctgcaaagtgtaggtggcgatgtacgtttacgtattcaaaccgatttggatatgtctgacgtacatttgggtgactcaattgcaactaacgggatctgtctcacagtgattgagtggggtgataactggtatgcggctgatgtgtcccgtgaaagtttaaaccgcacgactttgggtaactggaaagttggtcaacgtgtcaatgtggaaaaagccatgttaccgactacccgctttggtggacacattgtaagtggtcacgttgatggtgtaggtgaaattaccctagtacgtgaagatgctcgctcaatttattttgaagtgactgcgcctgtagaacttgctaaatatttggcagagaaaggttcagtaactgtagatggtattagcttaacgattaatcatttacgcggtaatattttaagtttaaatctaatcccacacacagcagagcgtactaatattggaacgtggcaagtgggtagcaaggtcaaccttgaagttgatgttttagcacgttatatcgaacgcttattactaggtgataaagctgctgaacagaaaaccgaatcaaatattagtatggctttcttagctgaaaatggttttttaaaa

SEQ ID NO: 8619 - DNA, 575 bp, Acinetobacter baumannii
atgcagatcggaatcccaaccgaaactgtcgtcggtgaaaatcgtgtagctgctacgccagagacagtaaagaagttgattagcgctggtcatagcgttgtgattgaacgtggtgctggtgtaaaggctgcgtacattgacagtgcttatgaacaggtcggtgcaaccattacggatgatgcctatatcgggtagtcataacttactatgttgaaatgcttcgatgcgccaccaaggcggggaaattcaaaaacttcgcagcaaatacaacctgttgtagcaactgtcttgatcgcttactcgtaatacgcgagctagacgcaatttgcgaagtcagcaagtgtctgcttcttgctcatggaaattgcttcctcgtacgctttctcgtgcacagaaacagtggatgtcgttgtcttctcagagcaaaacttcagactggcttatgaaatcagttttgcttgcggtctgctgaatatcaacgcatgttcccaatgcttatgactgctgctggtactgtaaagcctgcacgtgttgtgattatgggtgttggggttgcaggccttcaagcgattgct

SEQ ID NO: 8620 - DNA, 1446 bp, Acinetobacter baumannii
atgaaatttacaacttatacaacttttcctgaacaaacatctaatgaatctttgtggattttagttgattcagaacagctacaaagcaatctcaatacatatcaaatcaataatctagaaagtattcttacagcaactcaatttaaagccaacttcaatgaaacgttgccattatttggtcaacttagcactcagccccatagccaattacttggtttaggaaaagcagctgaacttcaagcagctaagttagcaaaattggcgcaaaccattatcaagtcggcacaaaataaatttaagcatatcgcaattgatattgctgcgttacctgtcgaataccattatttatttgcattaagcttaactcaagcagcttatggttatgatgagtttaaatcgaaaaaaaatgaatttgtgttacaacaagttgatttaattagctcacaaaccagccttgatgaaaatcaactcgctttagtacatgccgtacaatctggtcagtcttatgctcgtgacttaggaaaccgaccaggtaatatctgtttccctgaatatctggcagaacaggcattagctttagcggcagaattcccagacttacttaaagtcactgtcttaaatgagcaacaaatggctgatttaggcatgtatgcatttcttgcagtcagcaaagggtccgagcgtccgggccgtattgtgactcttgaataccaagcacaacttgaacaagctcctgtcgtacttgtcggtaaaggcgtaacctttgatacaggcggtatttctttaaaaccagggcttggcatggatgaaatgaagtttgatatgtgtggtgcagcttctgtactcggcacaatccgtgctttatgtgaggcacgtcttccaatccatgttgtgggtgcgattgcagctgcggaaaatatgccttcaggtaaagcaactcgcccaggcgacattgtaacaaccatgagtgggcagaccgttgaaattttaaacactgacgctgaaggccgtttggtcctttgcgacaccttaacgtatatcaaacgtttcaatccggcagttgtgattgatatcgcaacattaactggtgcttgcgtagttgcgttaggtaaagtactgagtggtttattctctccggacgatactttggcagcggaactccaacaagctggtgagcagtcatttgaccgtgtatggcgcatgccagtgattgatgattatcaagaactattggactctccttttgcagacatcgctaacattggtggaccacatggcggcgcaattacagcagcctgcttccttgagcgttttactcgtgactatcgctgggctcacttagatgttgccggaacagcatggttatcaggctcagcaaaaggcgcaactggtcgtccagtaccgctacttatgcaattcttggctaaccgtgtaagtacgaatggc

SEQ ID NO: 8621 - DNA, 1930 bp, Acinetobacter baumannii
tgggactctatcccgacagagccaatcgtacttgtcaccatggtctttatggcacttggtgcaattgctgtgcttggcggtatcacctatttcaaaaaatggggatatttgtggaaagaatggtttacaactgtagaccataaaaagattggtatcatgtatatcatcgtatctgtcgtcatgcttttgcgtggtttcgccgatgcgatcatgatgcgtttacaacttttcctcgctaaaggcggtggtgaaggttatttacatcctgaccattacgaccagatcttcaccgcacacggtgtaatcatgatcttcttcgtagcaatgggtctagttgtaggtatgatgaacatctctgtacctttacagatcggtgctcgtgacgttgctttcccattattaaactctttaagcttctggttattcgctggtgctgctggtttaatgatgctttcacttgtattaggtgaatttgctgcgactggttggatggcttaccctcctctgtctggtattcaatattctcctggtgtaggtgttgactactatatctgggcacttcaggtttctggtctaggtacgcttttatctggtgttaacttcttcgttaccatcatcaaaatgcgtgcgcctggcatgaaattgatggatatgcctattttcacatggacttcactttgtacggctgtattaatcattgcatctttccctgtattaacaggtactcttgcgatgcttacattagaccgttacttcggtttccatttcttcacaaatgagcttggcggtagcccaatgctttatgtgaacttgatctggacatggggtcaccctgaagtatatatcttggtattaccagcatttggtttatactcagaaatcgttgcaaccttctctcgtaaagcgttgttcggttacaagtctatggtatatgcaacaattgcaattactgtattagcatttgttgtatggcttcaccacttcttcaccatgggtgctggtgcgaacgttaacgcgttcttcggtatcatgaccatggttattgcgattcctactggtgtgaaaatcttctcttggttattcaccatgtataaaggtcgcatcacctttactactccaatgttatggacgcttggcttccttgtaacattcggtatcggtggtttaactggtgtacttatggctgttccacctgcggacttccttgtacacaactcattattcttgatcgctcacttccataacgtaattatcggtggtgtggtgtttggtatgtttgccggcatcatttactactggccaaaaatgtttggttggaagctcaatgaagcatgggggtaaagctgcattctggttctggttcttcggtttctattttgcattcatgccactttatatccttggtttcatgggtatgactcgtcgtttgaatacatatgacaaccctgaatgggacccataccttgcgattgcattattcggtgctgttcttgttgcgattggtattgcatgtttcttaatgcaaatcatcgttggtttcttacaacgtcaccaaaacatggactacacaggcgatccatgggatgctcgtacacttgaatgggctacttcttcccctgctccattctataactttgctcatgaaccagatgcaagcggtattgaccgtttctggactgacaaagaaaacggtgtagcatacgcacgtaatactaaatatgaagacatccacatgccgactgaccgtgctgctggttttgtcattgcaatgttcattactcttcttggctttgcactcatctggcatatttggtggctcgttgttgtttcattcgttgcagctgttgttagcttgatcgtaagctcattcactaagaatgttgattactatgttccagctgcagaagttgagcgtattgaaaacgaacgc

SEQ ID NO: 8622 - DNA, 906 bp, Acinetobacter baumannii
atgagtacgccaacagaagcaaaattttccctgacttattatacgggtttcttatctgtactatttgctgcttttctatggggtacggcaggcacagcagcatcttttgcaaagggcatcagtccacttgtaattgctactatttctgtgggcttcggtggtttaattcacacatttttaagtttaaaagccattaaaaaagattaccgaaagctttttgactataagaccaaagttttgattgccgtcattgtttctattctttgtccgtttgctttttattcctcggtttcattagctggtgtttctattggtactgttatttcaattggctgcgcccctttgttctcagttatgcttgagtggctattagataaacgtaagctttctttaaaatggcttatcagttttattcttggttttttaggagtcgttttactctcatatgcaggcgaacacagtcaccaacatcaaggcgtccaatccgaacggctattaggtgtattttttggcttactctcaagtctgagttatgcaacatattcgtggattatgaaaaacttaatccataaaggcatcaactcaagagctgccatgggcgtgatctttgggatttcagcagttctgttattacctactttattaattacagcaactcacctatttaattatccaaataatatttgggtagccctttatatcccaatcgtacctatgttcttaggctatttattttttagctttggtttaaaacgtattccagccagtcaagccatgacgttagctttggtcgaaattcctgttgcagcgttattggcagttgttgtagtaggcgaaagtttaacaatgaatagttatttaggtttagttttaatattcctctgcgttattgtcctcactaaaaaa

SEQ ID NO: 8623 - DNA, 738 bp, Acinetobacter baumannii
atgactaaaattatcatccttttgtttgtgtcatattttgaggttaagagaatattcgtgacgctaccatcttttaatgtatcaaatcttggtgcaatgccttcggtatctgaagttattgtcaaatatattagagaagcaattattgcagggcatattgctgaaggtgagcctatccgtcaggatgaaattgccaagctatttaatgtcagcaaaattccggtacgtgaagccttaaagcaacttgaagccgaaggcttagtagagtttataaaaaatcgcggtgcaattgtgacccgaatctctgaagaagaattagctcagatttttgaagtacgggttatgttagaaacgaagctgattcagctcgccgtgccgaatatgacagaagaaacttataaaaaggcagatgaaatttgtaatgcctttattgataacatggatattggaagttggaccacactaaattggcagttacatgcgtgcctttatgaaccggcacagcgaccttatatgctcggattaattcgttcgatttacgataaaattgagcgctatttaagattgcagatgaatgtttccgaaggcaaatcacgtgcaaatgatgagcacaaagaaattgtgaaagcctgtaaagccaaggatgttgatttggcggttaagttaattgaagagcatattaatggtgtttgccaatcactttatgagcacttacctcaccataaaaatgtgaaaaaa

SEQ ID NO: 8624 - DNA, 930 bp, Acinetobacter baumannii
atgaaaacagtaaaaattttggactctcatactggtggtgaaccaacacgattagtacttgaaggttttcctgatttaggcacaggagatatggaaagccgccgaaaaatattatcagaacaatatgaccatttccgtagagcaaccatgttagagccgcgcggtaatgatgttctggttggagcgttattgtgtaagccagtgaatcccaaagcgagtgcgggcgttattttctttaataacacaggctaccttggcatgtgtggtcatggcacgattggtttagtggcttcgttagcacacttgggaaaaatacaagtaggcacgcatttaattgaaactccagtaggtgatgttgaagcgacactgcatgaagatcattcagtgagtgtgcgaaatgtaccggcatatcgttataaaaaagcagtcgaagttaatgttgaaaaatatggaaaagttactggtgatattgcatggggcggtaactggttcttcttgattaatgatcatggtcaacgtgttgcaagtgataatttggatcaacttactgaatatgcgtggacggttagacaagcgcttacggcacaaggaataaccggtaaagatgggcaagaaattgaccatattgagttatttgcaagtgacaccgaagcagacagtaaaaatttcgtgctttgtccaggcaaggcctatgaccgttcaccgtgtggaactggaaccagtgcgaaaattgcttgcttggccgcagatggcaaacttgagccaggaaagttatggaaacaagccagcattatcggtagccagtttattgcctcgtatgaacaagcaggggaatatgtgattccaaccattcgtggtgaagcttacatgagtgccgaagcaactttatttatggatgaaaatgacccatttgcttggggtattcagcta

SEQ ID NO: 8625 - DNA, 693 bp, Acinetobacter baumannii
atgagagatttaatcgtacagtggttaactgaacttactcaacctttctggcacagttcactttcaattgaccagtttgtaactgcgttacaagaaaccttccatatggtgttctttgcgcttttatttggtggtatttggggctttatccaagggattattctacttgtaacccgcccagaaggcattttgccaaataaattcatttatcatttactcaacccaattgtaaatgctttacgttctctgccatttattattttacttattgcagttattccactgaccaaattattggtaggaacttcaattggtacatgggcagcgatcgttcctttaacaatttacgttgggccatatatgggacgtcttattgagacttccctgcttgaagtaaatgaaggaattatcgaatctgctcaagctatgggtgcaactccttggcagattatttcgcgctttatcttacctgaagctcgtagttcgcttattttgaacttaacgactgctacgattagccttattggtgcaaccgctatggctggtgcagttggtgctggtggtattggtgacttggcaatttcttatggctatcaacgttttgatacaagcgtcgttattttaacggttattgtattattacttttggtacaaatcgttcaaatgctaggaaattggctcgcaaaaatgcgc

SEQ ID NO: 8626 - DNA, 1443 bp, Acinetobacter baumannii
atgtctcaggcgaatgccacttctttaaccctttcatctccaacagaaaataagacgagtgaatcaggccaacttaaagagtttcgcactcccccacacaatttagccattgagcaagctgtacttgctgcgctgatgactgttgctgaatcttttgaacaagtcagtgacttactcaaagaaaatgatttttatgccactcgtcataaatatatttatcgtgcaattgaaaaattagcacaggaaaactcaccgtatgatgcggttttggtcaacgactggcttttaaaacaaaacttactcgatgcgattggcggtgaagaatatttgatgcagcttatggctgactcaccttcgagtttctataatcttgaaacttatgcgactaaaattaaagaattttctacactacgcagtatgattaaggtaagtactgaaattttacaaaatgcttatgacacaaaaggtcgaggtgtaagtgaaattttagatttagccgaaacaagtattttctctttagcagaacaacataacaacaataaaaaagattctggtcctaaagcaattagttctgtaactgccgatgtaattagtaaacttgatgaactttcaaaattagacggaaatattactggtttaacgactggctttttagagctcgataataaaacttctggtatgcaaccgggtgatttgattattgtcgcagcacgtccatctatgggtaaaactacttttgccatgaacttggttgaaagtgttttacaatacaataaactcccagctctcgtcttctctatggagatgccagcagactcaattgcgatgcgtctaatttcagctatgggtaaagtgcatcaagggcatttacgttcaggtaatttggatgctgatgaatggactaaagtaacgggtaccattctgcaacttcaacaaatgcatttgtatattgatgattcctctgccctaccacctactgaagttcgtgcccgagctagacgtatcgcaaaaatgcatgatggtaaaatcggctgtatcatggtcgactatttacagttaatgaaagttccgggcatgggtgacaaccgtgttggtgagatctcggaaatttcacgtagcttaaaagctttagctaaagaaatgaactgtcctgtgattgcactatctcagcttaaccgaagtctggaaaaccgaccgaataaacgtccagtaatgtctgacttacgtgaatctggtgcgattgagcaggatgccgacttaatcatgtttatttaccgtgatgaagtctataacaaagaatcgaaagaagcaggcaccgcagaaattatcatcggtaaacagcgtaatggtccaattggtaccgttcgccttgcctttgaaggccaatatactcgttttagtaatctctctcctgagtattacagccaatatgatgatgaagaa

SEQ ID NO: 8627 - DNA, 1878 bp, Acinetobacter baumannii
atgcactatcctaaagtttatgatgttatcgttatcggtggcggtcacgcaggtacggaagcggcgcttgctgctgcgcgtatgggacgacagactttgcttttgacccataacattgagactttgggtcagatgagctgtaacccagcaattggtggcattggtaagtcgcacttagttcgtgaaattgatgcgcttggcggtgcaatggctttagctgccgataaaggcggtattcaattccgtattttaaactcgcgtaaaggtgcagcagtacgtgcaacgcgtgctcaggctgaccgtgttcgctataaagctgcgattcgtgagaccttagaaaatcaagcaaatcttgatattttccaacaagcggctgatgacctgattgttgaaggcgatacagttaagggtgttgtgacccaaatgggtatccgctttgatgcaaaaactgttgtgttaactactggtacattcttgggcggtgttattcacgttggtttagagaaatcaagcggcggtcgtgctggtgatcctccttctattgctcttgctcagcgtcttcgtgagttgaaattaccggtaggccgtttaaaaacaggtacacctccacgtattgatgcacgttcagttgatttttctgttatgacaccacaaccaggcgacttcccgtctccggtaatgtcgttcatgggtgatgtgtctatgcacccagaacaagtgaactgctatatcacgcatactaacgaaaaaactcatgacattattcgtggtggcttagaccgttcaccaatgtataccggtgttattgaaggggtaggtccacgttactgtccttcaattgaagataagattcatcgtttctctgataaagactcgcatcaggtattcttagagccagaaggccttgatacacatgagctttatccaaatggtatttcgacttcattaccatttgatgttcagtttgaacttgtgcgctcgattcgcggtatggaaaatgcccatatcttacgtccgggttatgcaatcgaatatgactatttcaacccgcaagctttgaaatttaccctagaaactaaagcaattaacggcttgtattttgcagggcaaattaatggtactaccggttatgaagaagctggtgcccaaggtttacttgcaggcttgaatgctgcacgccgtgcatgggaacaagaagaatggacacctaaacgtgaccaagcttatatgggtgtattggttgacgacttgattaccctaggtacgaaagagccataccgtatgttcacttcacgtgcggaatatcgtttgatgttacgtgaagataatgccgatcaacgtttaacaactattggtcgtgagcttggtttggttgatgatgttcgttgggcagcttattgcgaaaaaatggaagctgttgagcgcgaaacatctcgtctacaacatttatgggcggcacctaacaacccaatgggtaaaaagtttgttgaaatgacaggtgctgatttaagtaaagaatgtagtgcgattgacttgcttaaacgtcctaatattaattttggccaaattgcggaacttacaggttctgaagtatcacagcaagtcggtgagcaaattgaaattgctgttaaatatgaaggttatatcaaccgtcagcatgaagatgtggctcaattaaaacgtcttgaagaaactaaaattcctgctgattttgattatgacgtcgtttcaggtttatctcgcgaaattactcagaagttgaaaacagttcgcccggaaacattagctcaagcgagccgtattcctggtgttaccccagctgctgttcagcttgtaatgatcacgattcgtaaaaataatatgacgaaaaaaacggct

SEQ ID NO: 8628 - DNA, 444 bp, Acinetobacter baumannii
gtggacgttatcttattacaacgcattaagaaccttggtaaattaggcgataaagtatcagttaaagctggttacggccgtaacttccttatccctcaaggtaaagcagttgcagctactgaagctaacactgctgctttcgaagctcgtcgtgctgaacttgagaagcaagaagctgaagtattagctgctgctcaagcacgtgctgaacaattgaacgaagttaacatcgttatcactgctaaagctggtgacgaaggtaaactcttcggttctatcggtactcgtgacatcgctgacgcgttaacgaatgctggtcttacagttgaccgtgcagaagttcgtttaccaaacggtgcgcttcgtcacactggtgaattcaacatcgcaattcaattgcaccatgatgttgttgcagaagttctcgttactatcgtatctgag

SEQ ID NO: 8629 - DNA, 381 bp, Acinetobacter baumannii
atgcgtcattacgaaatcgtacttttggtacacccagaccaaagcgatcaagttgtaggtatggttgaacgctatatctctcagatcaaagaagctgatggtcaaattcaccgtttagaagattggggccgtcgtcaattggcttacccaattaacaaaattcacaaagcgcactacattcttatgaatgttgaatgtggtcaatctacgcttgatgagttagaagaattattccgttataacgacgcgatcattcgtaaccttatcatccgtcgtgaacacgcaatcactgaagagtcattgcttgctaagagtgctgaagaaaagcgtgcgcgtaaagctcaacgtgaagaagcacagcaagttgctcaagaagctgaa

SEQ ID NO: 8630 - DNA, 3459 bp, Acinetobacter baumannii
atgtttcaacaagaaatctctcaattgaatttgcaacagctcaaggccggtgaaaagcgttgggtggggtcattattaggttcatcagcagctttattgcttaaagaaattgccactcaacattcttctttattggtattagttgctagaaacaaccaacatgttgctcaattagaaagtgaacttgagttttatggagttaagccgacaatttttccggattgggaaattttgccttatgaccgtttatctccccatcaagatattgtgtcagaacgtcttgctattttatctaatatgcctcagcaaggcgtattactgatttcagcaagtaccttggctcaacgggttgcaccttactcatgggtattgggagaacactttgatataaaagtgggtcaaaaatttgatttagaacaacaaaaattaaggttagttcaggcgggctaccacttagtagatacagtttatgaccatggtgagtttgctgtacgcggcagtattatggatatttttgcatctgggcaagaatctccaatccgcatagatttatttgacgatgaaattgattctttaaaattctttgacccagaaactcaaagaacaacaaccacgctaaaaagttttacggttttacccgcgaaagaattccctttaaaagaaggacgttcagtttttagagaccgttattctgagttttttcctactgccaatcctaagaaaaatccaatttatcaggacgttttagatggtatagcatcgcctggtattgaattttatttaccgctattttttaataaagaacaaatgcagtcacaaagtatgtttacaacatacttaccaaagaattgcattgtaattacaactaatgatattgatactgatttaacgagtttctggaaagaagttatgcgtcgttatgaagaccgacgccataatatggatcaacctattcttgctccagaagagctatttatttctccaaatcatctgctaagtgctctaaaccagtttccacgaatgcttgtgagcgcagaaactattgaagaaaaagctggtgcacttaatcttaaaactgaacaaccacccaagttgccagtcgatccgaaaaaagaaaaaccatttagtgccgtaaaaaaatatattgatgaagcaaatcatcctgttctattggttgcggaaagtgcaggacgtcgtgaaagcttaaaagatgcgttgcgttcaagtttaggtgagattccgaatgtagagaattttgagcaattccaaattagtcagtttgcaattgctattactaatgcgcctctagatcgtggcttacttttaactgatcaattaacggttatttcagaaaatcagctttacgagcaccgagttgtacagcgtcgtcgcaagcgtcaacaggaagtttccgaagagtttctgattcgaagcttaactgagctaagcattggtgctcctgttgtacatatcgatcatggtgtggggcgttatgctggcttaattacactcgcgattgagggacaagactatgagttcttacaactagattatgccgaagatgcaaaagtctatgttccagtaacgaacttgcatctaattagccgttatagtggtggcgacccggatttagcaccgttacataaaatcggaactgatgcttggagtaaagctaagcgtaaagcattagaacaaattcatgacgttgcagctgagcttttacatattcaggcacgtcgtcagtcaaaacctggctttgcttttgaactggatcagtcgctctatatgcaatttgcaagcggttttgcgtatgaagaaacccttgatcaggctaatgcaattgaagccacgctctatgatatgcagcaagcaaaaccaatggataggttggtgtgtggtgatgtgggttttgggaaaaccgaggtggccatgcgtgcagcatttgtcgcagtacaaaatggcaaacaggttgctgttttagttcctacgactttactagctcaacaacattatgagtcttttaaagaccgttttgctgattggccagtacgtattgaagtgctctcacgttttggttcaaacaaaacacatttgaaaaatattgaagacttggcaaatggtaaagtcgacattgtggtaggtacacataagcttctacaagagaatgttcagtttaaagatttaggcttaatggttgtagacgaggagcatcgctttggtgtgcgtgataaggagcgtatcaaagctttacgtgccgatgttgatatgttgacacttacagcaacgccaattcctcgtacgcttaatatggctttttcgggtatgcgtgatttgtcgattattgcgactccgccagcccgtcgattagcagtaaaaacctttgtgcaagagcatacagatgcttcaatcaaggaagcgattttgcgtgagttacttcgtggtggacaagtttatttcttacataatgaagtagagaccattgagcgagctgccgaaaatattcgtgtgcttgtacccgaagcacgtgtagcggtagcacatggacaaatgcgtgaacgcgaacttgagcaagttatgcagcagttctatcacaaagaatataatgtgctggtgtgctcaaccattattgagacaggtatcgatgttccaaatgccaatacaattttgattgaacgtgcggataaacttggtttagcgcaattacaccagttacgtggccgtgtaggtcgttcgcatcaccaagcatacgcgtatttattagtaccttcgattaaacacttaaaaggtgatgccgaaaaacgccttgatgcgattcaacgtgcttcgacattaggtgcaggctttatgctcgctacggaagatttggaaattcgtggagcaggcgaattgttaggcgagcaacaaagtggctcaatgcaggcgataggatatagcttgtatatggaaatgcttgagaaagcgactaaagcaattcaacagggtaaaaccccgaattttgatgctccattgtcgttaactgccgaaattaacttacatattcctgcacttattccagatgattatctgggtgatgttcatcaacgtctattattctataaacgtattagtaataccgatacacaggaaaaactagataacatccgtatggagcttattgaccgtttcggtattccaccgcagtcggttaagcacttatttagcgtgcatcaaatccgtttgaaagcagaacatttaggtattacgaaaattgatattaatactcaaggtggaaatattgagttttcaccagatacgccagttcaggccattagtattattcagttaatgcaaaaaaatccgacttattaccgtatggaaggcggacaacgtttgaaggtgatggtgcagcttgaagagtatgaaaaacgaattcaatttatcaatgatttattgcaaaaattgatgagtgaactacatgcc

SEQ ID NO: 8631 - DNA, 1003 bp, Acinetobacter baumannii
tggaagtcgtatcaagcacccttcagaagttgttgaagttggtcaagaagttactgttaaagtacttaagtttgaccgtgaacgtaaccgcgtatctttaggccttaaacaattaggtgaagatccatggttagcgatcatgagccgttaccctaaaggttctatcgttaaagcacgtgttactaacttaactgactacggttgtttcgctgaaatcgctgaaggcgttgaaggtttagtacacgtttctgaaatggaccatactaacaaaaacatccacccatctaaagttgttcagatcggtgacgaagttgacgttatggttcttgaagttgacgaagaacgtcgtcgtatcagccttggtatcaaacaaactcgtgctaacccatgggaagagtttgctaagtctcatgagaaaggcgaaaaagtttcaggtacaatcaagtctatcactgactttggtatcttcattggtttaaatggcggtattgacggtctagttcacttgtctgatatttcttggaacgaacaaggcgaagaagctatccgtcgttacaagaaaggtgacactgttgaagcagttatcttgtctgtagacgctgaaggtaaccgtatcagccttggtatcaagcaattgaacagcgatccgttcaatgatttcttagctgctaacgaacgtggtgctttagttaaaggtactgtaactgcagttgatgctcgtggcgcaactgttaagttagctgacgaagtagaagctactcttaaagcttctgaaatcaaccgtgaccgcgttgaagacgcaactaaattcttagaagttggtcaagaagttgaagcgaaaatcatcaacgttgaccgtaaatctcgctctatcaacttgtctatcaaagcgaaagatgaagctgaagagaaagaagcagttgctaacttgcgtacagcatcagcttctcaagacaatggtcctaagactattggtgacttgatcaaagcacaaatgaagtaa

SEQ ID NO: 8632 - DNA, 909 bp, Acinetobacter baumannii
atgcagtccattagtctcattattcaaatttttcttgtattagcatttggttattttctaggtcctaaactttcactaaatattcggcattttatttttaaaatcctgccttatttttcttatattttactaaccagtgtagctttagaactaacactcgcccttgaccaaattgataatccctcaactatacttccacctgctctattaattgcattaaccacttctcttggttctttttttacttgcttattcgcttatacaatttttgataaagaaagtgttaaagggaaaatttcgcttcaactttttatgaatgcattaaaaaatattgccaaggcatttttagctttaacaataggcgtgattttaggcattcttcttacccaattacatacccatattccctttaatagttggtatttactattactttttatttttttaatcggaatcgaacttgcttttactcattttaatcgtacatggttaagttggaaaattcttattgtacctttggccgcctttataggctcgtgcttagctgggcttctcaactattccttacttggtcatgagtttacacttaatgaaatattagctttgggccaaggctatggttggtattcaatgtcaggtattttatttacacagctacattcagctgagttaggtgggattgccttgctcacagatctatttagagagatagttgcaattttactcatgtatacaatgggttggcggtttccacgtccagcgatttcaagtgctggcgctacctcaatggatgtaacattagcaatggtaaaacagtcatgtggcacacattatgtaccacatgccatgatgagcggcttactcttaagtctactcgctccacttttaattactgtgtttttaaacttt

SEQ ID NO: 8633 - DNA, 372 bp, Acinetobacter baumannii
atggatagttattctccctataaaggtaaaagtggcctaaagcgcatcttgaacgctaccagttattcaatttcaggatttaaagctgcttatcaaaatgaagctgcatttcggcaaattgttttaattaatcttgtactcatccctgtaagctttttcctggatgtaactcgcggcgaacatgccctgatgatcattgtctgtttatttgccatcattgttgagctcttcaactctgccattgaagcagtggttgaccgagtttcactcgagaaacaccaactttccaaaaatgcaaaagatatgggtagtgccgctcagtttgttgcactttctattattgtcgccacttggcttattattttatttgga

SEQ ID NO: 8634 - DNA, 1632 bp, Acinetobacter baumannii
atgtcagctaaagacgtaaaatttggtgattcagctcgctcaaaaatgattgcaggggtaaacgtacttgcagatgcggttaaagtgactttaggtcctaaaggccgtaatgttgtgatcgaccgctctttcggcgcgccgcacatcactaaagacggtgtaactgttgcaaaagaaatttcattaaaagacaagtttgaaaacatgggtgctcaacttgttcgtgaagtttcaagcaaaactaacgacatcgcaggtgacggtacaacaactgcaactgtacttgctcaagcaattttaaatgaaggtatcaaatcagtaactgctggtatgaacccaatggatttaaaacgcggtatcgacattgcagtaaaaactgtagttgaaaatatccgttctattgctaaaccagctgatgatttcaaagcaattgaacaagtaggttcaatctctgctaactctgatactactgttggtaaacttattgctcaagcaatggaaaaagtaggtaaagaaggcgtaatcactgtagaagaaggctcaggcttcgaagacgcattagacgttgtagaaggtatgcagtttgaccgtggttatatctctccgtactttgcaaacaaacaagatactttaactgctgaacttgaaaatccgttcatccttcttgttgataaaaaaatcagcaacattcgtgaattgatttctgttttagaagcagttgctaaaactggtaaaccacttcttatcatcgctgaagatgttgaaggtgaagcgcttgcaactcttgttgtaaacaacatgcgcggtatcatcaaagtatgtgctgttaaagctcctggtttcggtgaccgtcgtaaagcaatgcttcaagacattgcgattttgactggcgcaacagttatttctgaagaagttggtatgtctttagaacaagcaactcttcaagatttaggtacagcgcacaaaattactgtttctaaagaaaacacagttattgttgacggtgctggtgatgctgctgctatcgctgagcgtgttcaacaaatccgtgctcaaatcgaagagtctacttcagaatatgaccgtgaaaaattacaagaacgtgttgctaagttagcaggcggtgttgctgtaattaaaatcggtgcagcaactgaagttgaaatgaaagagaagaaagaccgcgtagacgacgcacttcacgcaactcgtgcagcagttgaagaaggtgttgttgctggtggtggtgttgctcttgttcgcgctgtaaatgctcttgaaggcttaaaaggcgctaacgaagatcaaacagctggtatcaacattttacgccgtgcgatcgaagctccacttcgtcaaatcgttgcgaatgctggtgatgagccatctgtagttatcaacgctgttaagaatggtgaaggtaacttcggttacaacgctgcaactggcgaatatggtgatatgttagaaatgggtatccttgacccagctaaagtaactcgttctgcacttgagcacgctgcttctgttgctggcttaatgttaactacagaatgtatgattactgacattcctgaagacaaaccagctgctccagatatgggcggtatgggtggtatgggcggaatgatg

SEQ ID NO: 8635 - DNA, 638 bp, Acinetobacter baumannii
agtctctattcccgcatgaaaaatgatgaacagtttttggcagaattcgaccgtgatctcgtcctactatgtaggtcgtcctagtccactttattatgctgagcgatggtcaaaacgagttaggttggtgcgcacaatttaccttaacacgtgatagacttgaaccatactaggctcacgactaaggctaaacaactacgattggctcaggcactacttgcaaagctttctggtatcaaaacgctattattgccgaacactggtgcaggccagcatggggtagcaacagctacaattgcagacacgttttaggtcttgatatgtgttgtctatatgggtgctgatagacgtttaagccgtctaatgcgatgaacgtttaccgtatgcgtctgttacggtgcaacagttgctgcctgtgcaaagtggcgtctaaaactttaaaaagatgccatgaacgaagcgatgcgtgactgggtaaccaacgttgatacaagcatattatgtcattggtacagttgcagcgtccgcgatccttatcctcaagcttgttcgtgacttccaatcaacttattggtcgtgaagcgcgtaaacagattttggaacaagcaggtcgcttaccagatgcattagttgcttgt

SEQ ID NO: 8636 - DNA, 1685 bp, Acinetobacter baumannii
catgtaacggttgatacagtccctgcagacctgatcggtgcgatcacgattcctgaagacctaaatggcgacggtatcttgaatgcagacgagttaggcacagacggcagcttcaatgcacaagtggcgttgggaccggatgcgcttgacggcacagtggtgaatgttaacggtactaactacaccgtgacagcagctgaccttgcaaacggctatatcacagcagcgattcctgtgacaggcgaaggccctgtagcgatccatgcagaagcagtggatgcacgaaggtaactgtagcatgttgcagatgcatgacggtgagcaggtcaacggttgatacagtccctgcagacctgatcggtgcgatcacgattcctgaagacctaaatggcgacggtatcttgaatgcagacgagttaggcacagacggcagcttcaatgcacaagtggcgttgggaccggatgcgcttgacggcacagtggtgaatgtcaatggtgtgaactacaccgtgactgcagctgaccttgcaaacggctatatcacagcagcgattcctgtgacaggcgaaggccctgtagcgatccatgcagaagcagtggatgcacaaggtaacgtagatgttgcagatgcagacgtgacagtaacggttgatacagtccctgcagacctgatcggtgcgatcacgattcctgaagacctaaatggcgacggtatcttgaatgcagacgagttaggtacagatggcagcttcaatgcacaagtggcattaggaccggatgcagttgatggcacagtggtgaatgttaacggtactaactacaccgtgacagcagctgaccttgcaaacggctatatcacagcagcgattcctgtgacaggcgaaggccctgtagcgatccatgcagaagcagtggatgcacaaggtaacgttgatgttgcagatgcagacgtgacagtaacggttgatacagtccctgcagacctgatcggtgcgatcacgattcctgaagacctaaatggcgacggtatcttgaatgcagacgagttaggcacagacggcagcttcaatgcacaagtggcgttgggaccggatgcgcttgacggcacagtggtgaatgtcaatggtgtgaactacaccgtgactgcagctgaccttgcaaacggctatatcacagcagcgattcctgtgacaggcgaaggccctgtagcgatccatgcagaagcagtggatgcacaaggtaacgtagatgttgcagatgcagacgtgacagtaacggttgatacagtccctgcagacctgatcggtgcgatcacgattcctgaagacctaaatggcgacggtatcttgaatgcagacgagttaggtacagatggcagcttcaatgcacaagtggcattaggaccggatgcaatcgatggcacagtggtgaatgttaacggtactaactacaccgtgacagcagctgatattaccaacggctacatcaccgcaattcttgctgcaacagcagccgatcctgtgactggtcagattgtgatccatgctgaggctgtagatgcgcaaggtaacgtagatgttgctgatgcagatgtaacagtaacactcgatgtcactccacctgatatcactacaacagtattagcaattgaccctgttaccgcagacaatattcttgatgcgaca

SEQ ID NO: 8637 - DNA, 714 bp, Acinetobacter baumannii
atgagccaagaagaaaagttaccaaagattctgatcgttgaagacgacgagcgtttagcgcgattaactcaagaatatttaatccgtaatggtttggaagttggtgtagaaaccgatggtaaccgtgcaattcgtcgtattattagtgagcaaccggatcttgtggtcttggatgtcatgttgccgggtgcagatggtttaaccgtttgtcgtgaagttcgcccacactatcatcaaccaatcttaatgttgactgcacgtactgaagatatggatcaggtacttggtctggaaatgggtgcagacgattatgtcgcgaaaccagttcaaccacgtgtattattagcgcgtattcgtgctttgttacgccgtacggataaaactgttgaagatgaagttgctcaacgtattgagtttgacgacctcgtcatcgacaatggtggccgttcggtaacgttgaacggtgagcttgttgactttacaagtgctgaatatgacttgttatggttgcttgcatcaaacgctggccgtattttatcgcgtgaagatatcttcgaacgtttacgtggtatcgaatatgatggtcaagaccgttcaattgacgtacgtatttcacgtattcgtccaaaaattggcgatgatcctgaaaatccaaaacgtattaaaactgtacgtagtaaaggttacttgtttgttaaagaaaccaatggattg

SEQ ID NO: 8638 - DNA, 507 bp, Acinetobacter baumannii
atgatgattctgactgataaaaaaccacgtgtgaatgttgaagggattttgactgctgaagaaatccacgaaattgaacatcacattggtcactatccatacccacgtgcagcttctttagatgcattaaagtgcgtacagcgccgtaatggctgggtagatgatgctcaaatgaacgccatcgcacaattattaacgattagtgttgcagatttggaaggtgtagcaacgttctacaaccgtatctatcgccaacctgtgggtcgccacgtaattttgctttgtgattcaattgcttgcttcttgatgggtgctgaaacacttgctgaagcattccaacgcgaattaggtattcagtttggtcaaacgacacaagatggtcgttttacgctgcttccaatttgctgtctaggcaactgtgacaaaggcccaacgttaatgattgatgaagatactcacggtttagtagaagtgacatcaatcaaacagttattggagaagtatgta

SEQ ID NO: 8639 - DNA, 906 bp, Acinetobacter baumannii
gtgcaaatttcacataagtccttcagaaacgtcgggttaattggtcgaccagataaatcatcagttgtagaaacactatgtttaattcatgaccatttgctaagtttaggcctaaaccccatttttgatcaggaaactgccgaattagtgccctatgatcatgcgcaagtcgttagtcgtcacttattaggtgaagtcgctgatctggtgattgttgtaggcggtgacggttcattgcttcatgcagccagagctttagtgcgctacaatacgcctgtaatcgggattaaccgtggacgtttaggttttttaaccgatattaagccttcggaagctatttttaagcttgatcaggttttacaaggtcatttccagcttgatcgccgtttcttgcttgaaatggaagtacgtaccaatggtgaagtcatttatgacgcaattgctttaaatgatgtcgtactacactctggtaagtcggtacatatgatcgattttgaactcaatatcgatgggcaatatgtttatcgccagcatagtgatggtttaattgtttcgacaccaaccggttcaactgcttatgctttatcaggtggtggtccaattttacatccaagtatggatgctattgcattagttcctatgcatccccatacattatcttcacgtccgatcgtagttggtgggcaaagtgaaattaaaatcgtcattcgcgaaaatcgggtattaccgatggtaagtgcagatggacaacatagtgtctctctcaatgtcggtgatagtttgcacatccgcaaacacccatttaaattaagtttattacacccacctggttatgatttctatatggcttgtcgtaccaaattgggttggaaccaagattttgaatcttttcaaagagatgaatca

SEQ ID NO: 8640 - DNA, 1431 bp, Acinetobacter baumannii
atgtctcaacaatttgatcttgttgtcattggcggtggtcctggtggttatgaagctgcgattcgcgctgctcaactaggcttcaaagtcgcttgtattgaaaaacgtattcacaacggtaagccttctttaggtggtacttgcttaaacgtaggttgtatcccttctaaagctttgcttgattcttctcatcgttatgaagatacagtgcatcatttagctgatcacggtattacaactggtgaagtgaatttcgatcttgcaaaacttcttgctcgtaaagacaaaattgttgaccaattaactggcggtattgatcaattgcttaaaggcaacggtatcgagtggttaaaaggtacaggtaaattacttgctggtaaaaaagttgagtttgttccacatgaaggtgaaactcaaattttagaacctaaatacgtaatccttgcgtctggttctgtgcctgtaaatattcctgtagctcctgtagatcaagatattattgttgattcaactggcgcattaaacttccctgaagtacctaagcgtttaggtgtaattggtgcaggtgtaatcggtttagaacttggttcagtatggcgtcgtcttggtgctgaagttgttgtatttgaagcaatggatgcattcttgccaatggctgataaagcactttctaaggaatatcaaaaaatcttgactaaacaaggtttagatatccgcattggtgcgaaagtatctggtactgaagtaaacggtcgtgaagtgactgttaaatacactcaaggtggcgaagataaagaacaaacgtttgataagttaatcgtttgtgttggccgtaaagcttatgctgaaggtttattagctgaagattcaggtattaaattaactgagcgtggtttagttgaagtaaatgatcactgtgcaacttctgtagaaggtgtatatgcgattggtgacttagtacgcggtccaatgcttgctcataaagcaatggaagagggcgtaatggctgttgaacgtattcatggtcatgcagctcaagtaaactatgacacaatcatttctgttatctatacacaccctgaagcggcgtgggttggtttaactgaagagcaagctaaagaaaaaggtcatgaagtaaaaactggtcaattcggttttgctgtaaatggtcgtgctttagctgctggtgaaggtgcaggttttgttaagtttgttgctgatgcaaaaactgaccgtttattaggtatgcatgtgattgggcctgcggcatctgatatcgttcaccaaggtatgatcgcacttgaatttgtatcttctgttgaagatcttcagttgatgacttttggtcacccaacattctctgaagttgttcatgaagctgcacttgctgtagatggtcgtgcaattcacgcgattcaacgtaagcgtaaa

SEQ ID NO: 8641 - DNA, 888 bp, Acinetobacter baumannii
atgagcgtattaattaataaagacactaaagtattggtacaaggttttactggtaaaaacggtactttccactctgcacaagctttagactacggtacaaaagttgttggtggtgttactccaggtaaaggtggtacaactcaccttgacttaccagtattcaacacaatgaaagaagctgtacgtgaaacaaatgcagatgcatctgtaatctatgtaccagctccattcgttttagactcaatcgttgaagcggttgattcaggtgttggcctaatcgttgtgatcactgaaggtgttccaacaatcgacatgcttaaagcaaaacgttatttagaaactaacggtaacggtactcgtttagttggtcctaactgcccaggcgtgatcactccgggtgaatgtaagatcggtattatgcctggtcacatccaccaaccaggccgtattggtatcatctcacgttcaggtacattgacttatgaagctgttgctcaaacaactaagcttggtttaggtcagtctacttgtatcggtatcggtggtgacccaatcccaggtatgaaccaaatcgaagctcttcaattgttccaagacgatccagatactgatgcaatcatcatgatcggtgagatcggtggtacagcggaagaagaagctgctgaattcatcaaatctaacgtgactaaacctgtagtaggttacatcgctggtgtaactgcacctaaaggtaagcgtatgggtcacgctggtgcgatcatttctggtggtcaaggtactgctgaagagaaattcgctgcatttgaaaaagcaggtatggcttacactcgtagcccagctgagcttggttcaactatgttgcaagtattaaaagagaaaggtttagct

SEQ ID NO: 8642 - DNA, 3174 bp, Acinetobacter baumannii
atggcacaattttttattcatcgccccatatttgcgtgggtgattgcattagtcattatgttggcgggtattcttacgctaacaaaaatgcctattgcacaatatccaacgattgcaccaccaaccgtaacgattgctgcgacttatcctggtgcatcggctgaaacagttgaaaatactgtaacccagatcattgaacaacaaatgaatggtcttgatggcttacgttatatttcatctaacagtgctggtaatggtcaggcatctattcaattaaactttgaacaaggtgttgaccctgatattgcacaggttcaagttcaaaacaaattgcaatctgcaactgcgcttttacctgaagatgtacaacgtcaaggtgtaacagttactaaatctggtgcgagcttcttgcaagttattgcattctattcaccagataacaacctgtcagactctgacattaaagactacgtaaactcgtcaattaaagaaccgcttagccgtgttgccggtgttggtgaggtacaggtcttcggtggctcatacgcaatgcgtatctggcttgatccagctaaattaacaagctatcaacttactcctagtgatattgcaactgccttacaagcgcagaactcgcaagttgccgtaggtcagttaggtggtgctccggctgtacaaggtcaagttcttaacgcaacagtaaatgcacaaagcttattgcagactcctgaacagtttaaaaatatcttcttaaagaacacagcatcaggtgctgaggttcgattaaaagatgttgctcgcgtagaattaggttcggataactatcaattcgactcgaagtttaacggtaaaccggcagctggtcttgcaattaaaattgcaacaggtgctaacgcactcgacacagccgaagcagttgaacaacgtttatctgaactacgtaagaactatccaacaggtcttgcagataaactggcttatgacacgactccatttatccgtctttcaattgaaagtgtagtacacacattaattgaagccgtgattttggtattcattgtcatgttcctattcttacaaaactggcgtgcaacgattattccaacgcttgcagttccagtagttgtattaggtacatttgcggtcattaatatctttggcttctcaattaacaccttaaccatgttcgctatggtattggcaatcggtcttctggtcgacgacgccattgttgtagtcgaaaacgttgaacgtgtgatgagtgaagaccataccgatccggttacggccacttctcgctcaatgcagcagatttctggtgcgttagtaggtattaccagcgtattgacagcggtattcgtaccaatggctttctttggtggtacaacaggtgtaatttaccgccagttctcgattacccttgtaactgcaatggttctgtcgttaattgtagcgttgacgttcacaccggcactttgtgcaactatcttgaaacagcatgatcctaataaagaaccaagcaataatatctttgcgcgtttctttagaagctttaacaatggttttgaccgcatgtcgcatagctaccaaaatggtgttagccgcatgcttaaaggcaaaatcttctctggcgtgctctatgctgttgtagttgcccttttagtcttcttgttccaaaaactcccgtcttcattcttaccagaagaagatcagggtgtggtcatgacacttgtacaattaccaccaaatgcaacgcttgaccgtaccggtaaagtgattgataccatgactaacttctttatgaatgaaaaagataccgtggaatctattttcactgtttctggtttctcattcacaggtgttggtcaaaacgcgggtattggcttcgttaagttgaaagactggagcaaacgtacgacaccagaaactcaaattggttcattgattcagcgtggtatggcattaaatatgatcattaaagatgcatcatacgttatgccgttacagcttccagcaatgcctgaacttggtgtaactgccggatttaacttgcagcttaaagattcaagtggtcaaggccatgagaaactgattgcagctcgtaacacgattttaggtttggcatcacaagataaacgtcttgtaggtgtgcgtccaaatggtcaggaagatactcctcagtatcaaattaatgtagatcaggctcaagctggtgctatgggcgttagtattgccgaaatcaacaatacaatgcgtattgcatggggtggctcatacattaacgatttcgttgaccgtggtcgtgtgaaaaaagtttatgttcaaggtgatgcgggcagccgtatgatgcctgaagacttaaacaaatggtatgtacgtaataacaaaggtgagatggttccattctcggcatttgctacaggcgaatggacgtatggttctccacgtctcgaacgttataacggcgtgtcatcggttaacattcaaggtacacctgcacctggcgtgagctctggtgatgccatgaaagcaatggaagaaattattggtaagttaccatctatgggcttacaaggtttcgactatgagtggacaggcttatcacttgaagaacgtgagtctggtgctcaagcgccgttcttatacgcactttcattgttaatcgtattcctttgcttggctgcactatatgaaagctggtcaattccgttctcggttttacttgtggtaccacttggtgtcattggtgcaatcgtattgacctacttgggcatgattattaaaggagatccaaatctctcaaataacatttacttccaggtagcgattattgcggttatcggtctttctgcaaaaaatgcgatcttgattgttgaattcgcaaaagaattgcaggaaaaaggtgaagatctacttgatgcaaccttacatgctgcaaaaatgcgtttacgtccaattatcatgaccacccttgccttcggtttcggtgtacttccacttgcactttcaacaggtgccggtgcaggaagtcagcactctgtaggctttggtgtacttggtggcgtactcagcgcgacgttcttaggaatcttctttatccctgtattctatgtgtggattcgtagtatctttaagtacaaaccaaaaaccataaacactcaggagcataaatcg

SEQ ID NO: 8643 - DNA, 2877 bp, Acinetobacter baumannii
atgactgacgctcaaaccgctcaaaatattgccaccacctacgatccaaccgagatcgaaaagaagtggtacaaaacgtgggaagaacaaggttacttcaaaccttctggtcacggtgaatcattctgtatcatgattccaccaccaaacgtcactggtagtttgcacatgggccatggctttaacaatgccattatggatgccctcacccgttataaccgtatgatgggtaaaaacactttgtggcaaccgggtaccgaccatgctggtattgcaactcaaatggttgttgagcgtcaacttggcttacaaggtattactcgtcacgacttaggccgtgaaaagttcatcgaaaaagtttgggaatggaaagaacaatctggcggcacaattaccaaacaaattcgtcgcttaggttcgtctgtagactggtcacgtgaacgcttcacgatggatgaaggtttatcaaacgcagtgaaagaagttttcgttcgtttgcacgaagacggtttaatttaccgtggtaagcgtcttgtaaactgggaccctaaacttcaaactgctctttctgaccttgaagtagaaagcaaagaagaaaaaggctcactttggcactttaaatatttctttgaagataaatcagttaaaactcaagatggcaaagactatctcgtagttgcaacgactcgtcctgaaactttacttggtgatactgctgttgctgttcaccctgaagatgagcgttatgcacaccttgttggtaaaaatattgtattgccaattactggtcgtttaattccaatcgttgctgacgattacgttgaaaaagacttcggtactggttgtgtaaaaatcacccctgctcatgactttaacgactatgagttaggtaaacgcaatagcttgccaattatcaatatcttcaacaaaaatgccgaagttttaggtgaatttgaatatattgccaaagctggtgaacaaatttctaaaaccattactgcacctgcagactatgctggtttagagcgcttcgaagcacgtaaaaaattagttgctcaagcggaagctgaaggctggttagaccaaatccaaccgtatgacttaaaagcgccacgcggtgaccgttctggtgtgattattgagccgttactgactgaccaatggtacgtaaaaattgcgcctcttgcagagcctgcaattgaagcggttcaagatggtcgtattaagtttgttccagagcagtacagcaatatgtacatggcatggatgcgtgacattcaagactggtgtatttcacgtcagctttggtggggtcaccgtattccagcttggtacgatgctgatggcaacatctatgttggccgtagcgaagaagaagttcgcgcgaaaaataacatcgcggccgatgttgagcttaaacaagacgaagacgtacttgatacatggttctcatctgcactttggacattctcaactttaggctggccagaacaaacgcctgaactcaaaactttccacccgactgacgtgttggtgactggttttgacattatcttcttctgggttgcccgcatgatcatgatgaccatgcacttcatgaaaaatgaagatggttcatctcaaattccatttaagacggtttacgttcacggcttggtacgtgatggtgaaggtcaaaaaatgtcgaagtctaaaggtaacgttcttgacccattagacttgattgacggtatcgatttagaaagcttagtcgcaaaacgtacgactggcctaatgaacccgaaagatgctgcgaagattgaaaaatcaacgcgtaaagaattcccagaaggcattaatgcttatggtactgacgcagttcgtttcacgttctgtgcccttgcaaacactggtcgtgacatcaagttcgacttaaaacgtgttgaaggttaccgtaacttctgtaacaaaatctggaatgcaacacgtttcgttctgatgaatgttgaaggccaaactgtcggtcaagaagcacgtcctgatctttgggaacttccagaacaatggattatcagccgtctgcaaaaagctgaagctgctgtacaccaagcgtttgcaacttaccgtttagaccttgctgctcaagcgatttatgactttatctggaatgaatactgcgactggtacgttgagttaactaaaccagttctgaacgatgcagaagtttcagaagaacgtaaagctgaagtacgccgtgtattgcttgctgtcatggaagcatcattacgtttggctcatccattaatgccatatttgacagaagaaatctggcaaacacttgcaccaatgcttggtcaaggcggcccaaccattatgactgctcaatatcctattcctgagcaagcaaaaatcaatgaacaagctgaagcagatatgcaatggcttcaaggtttgattggtgcggtacgtaacattcgcggtgaaatgggcttaggtaatgcgcgtttattaccagtattacttcaaaacatttctaatgctgaacgtgagcaaattactcgtattgaagcgttgttcaaagcattggctaaagttgaaagtattgagttcttaggtaaagatcaagaaccaccgctttcttcttcaagtgttgtaggtcatgcatcggtatttgtaccaatgaaaggcttaattgaccctaaagctgagcttggccgtttgcaaaaagacttggataaaatccaaaagcaacacgaccaaattgcaaataaacttgcaaatgaaggctttgtatctaaagcaccagcagcggttgttgaaggtgaaaaagcgaagcttgctgagtttgctgcgcagttagataaagttaaagcgaatatggagcaaattgctgcgctt

SEQ ID NO: 8644 - DNA, 255 bp, Acinetobacter baumannii
atggcaactaaaaaagccggtggatcgacgaagaacggtcgtgattcaaacccaaaaatgttaggtgttaaagtttacggtggtcaaactgtaactgctggtaacatcatcgttcgtcaacgtggtactgaattccacgctggtgcaaatgttggtatgggccgtgaccatactttatttgctactgctgacggcgtagtaaaattcgaagtgaaaggtcaatttggccgtcgctacgtaaaagttgaaactgtt

SEQ ID NO: 8645 - DNA, 1269 bp, Acinetobacter baumannii
atgatcgaccctaagttactcagaaataatattgaagtcgttaatgcagctttggcaaaacgtggtgttcagttagatgttcaagaatgggcatctttagagactcgccgtaaagacttgcaatcaaaaactgaaaagttacaggcagagcgaaatgccggtgctaaacaagtgggtcagattaaaaaatccggtggtgatgcttctgaaatcatggcacgtatgcaagccattggtgatgaaattaaagctgccgaagttgctttatcagagctacaaaacgagattgagcaaaaagcgcttagcattcctaacttgccggacgaatctgtgccagctggtaaagatgaaaatgataacgttgaaatctcaaaatggggtacacctcgtcagttcgattttgaaatcaaagatcatactgatttaggcgagtggatgggcggactagagtttgaaactgccactaaactcacaggctcacgttttagtgtgttgaaggggcctttagcgcgtctacaacgtgctttaactcagtttatgctcgatacccatactttaaagaatggttataccgaagcgtatgtgccttatttggtaaatgctgattcattacgtgggacaggtcagttaccaaaatttgaagaagatttatttaaacttcaaggtgaaaaagaatactacctcatccctacagcagaagttccagtcactaactttgtccgtgatgaaattattgatgcagatcgcttaccattaaaatatgcggctcatactccatgtttccgtagtgaagcaggttcttatggtcgtgatacacgtggtttaattcgtcagcaccaatttgacaaagttgaaatggtgcaaatcgttaagcctgaaacatctatgcaggcacttgaagagcttactgcacatgctgagggcattttacaggcacttggtttgccttaccgcaaaattttgctctgtggtggtgatatggggttcggggcgactaaaacttatgatttagaagtttgggttccaagtcaaaatacttaccgtgaaatttcaagctgctctaatatgggtgatttccaggcacgtcgtatgaaagcacgctaccgtatggatcagaagaagaccgaattggtgcacactctaaatggttcaggccttgctgtagggcgtactttacttgcagtaatggaaaactaccaacgcaaagacggttcaattgagattccagaagtattacgcccatatatgggtggtgcaacgtttattgat

SEQ ID NO: 8646 - DNA, 1600 bp, Acinetobacter baumannii
attggtattgacttaggtactaccaactcatgtgttgctgtacttgaaggcgataaagtaaaagtaatcgaaaacgcagaaggcgcacgtacaactccatcgatcattgcgtataaagatggcgagatcttagtgggccaaagcgctaagcgtcaggcagtaacaaaccctaaaaatacattattcgcgatcaagcgtttaattggtcgtcgttatgaagatcaagcagtacaaaaagacatcggtcttgtaccttataaaatcatcaaagcagacaacggtgatgcttgggttgaagtaaacgataaaaaactagcacctcaacagatctctgctgaaatcttgaaaaagatgaaaaaaactgcagaagattatttaggtgaaacagtaactgaagcggtaattaccgttcctgcttactttaacgatgctcaacgtcaagcaactaaagatgcgggtaaaatcgctggtttagatgttaaacgtatcattaacgaaccaactgctgctgcacttgcgttcggtatggacaaaaaagaaggcgaccgtaaagttgcagtttacgacttaggtggtggtacattcgacgtatctatcattgaaatcgcggatcttgatggcgaccaacaaattgaagtgttatcaactaacggtgatactttccttggtggtgaagacttcgataacgcgttaattgaatacttggttgaagaattcaagaaagaacaaaacgtaaacttgaaaaacgatccacttgcgttacaacgtttgaaagaagctgctgaaaaagcaaaaatcgagctttcttcttcgaatgcaactgaaatcaaccttccatacatcactgctgatgcgactggtcctaaacacttagtgatcaacgtaactcgtgcaaaacttgaaggtttagttgctgatttagttgctcgtactatcgaaccttgtaagattgctcttaaagatgctggtctttcgacttctgacatctctgacgtcatcttagttggtggtcagtctcgtatgccacttgtacaacaaaaagtacaagaattcttcggtagagagccacgtaaagacgtgaaccctgacgaagcagttgcaatcggtgctgcaattcaaggtgctgtattgtctggtgacaagaacgacgtattgcttcttgacgtaacaccattaactttaggtattgaaacaatgggtggtgtattaacaccaatcattgagaaaaacacgacgattcctgcgaagaaatcacaagtgttctctactgctgctgataaccaaccagcggtagatatttcagtttaccaaggtgaacgtaagatggctcaacaaaacaaattgttgggtaacttccagttaggtgacatcccacctgctccacgtggtgtgccacaaattgaagtatctttcgatattaacgctgacggtatcttgaaagtgtctgcaaaagacaagagcactggtaaagagcaatcgatccagattaaggcaaactcaggtttatctgatgctgaaatcgaagcgatgattacagatgcagaagcaatgctgaagaagaccgtaagttgaagaacttgcaaaagctcgtaacgaactg

SEQ ID NO: 8647 - DNA, 366 bp, Acinetobacter baumannii
atgctttcagcggttatcccttccgaacatagctacccggcgatgcgactggcgtcacaaccggtacaccagaggttcgtccactctggtcctctcgtactaggagcagatcctctcaaatttccagcgcccacggtagatagggaccgaactgtctcacgacgttctaaacccagctcgcgtacctctttaaatggcgaacagccatacccttgggacctgcttcagccccaggatgagatgagccgacatcgaggtgccaaacaccgccgtcgatatgaactcttgggcggtatcagcctgttatccccagagtaccttttatccgttgagcgatggcccttccatacagaaccaccggatcac

SEQ ID NO: 8648 - DNA, 999 bp, Acinetobacter baumannii
atgaaactgcttcgtcttaatgcgttatcgcccaatttccagttaccacaaacagcggtaactattggtaattttgatggtgtccatttaggtcaccaagcgatgattgctcaactcaaaaaaattgctgcagcacaaggcttaaaaacattggtcatgatttttgagccccaaccgcttgagttctttaaaggctacgatgccccacctcgtattaattcattacgggaaaaagttgaatatctagctgaacttggggtggattacatcgcggttgccaagtttgaccagcatttccgtagcatgagtgcttctgagtttgcagatttattaaaagacaaattaaatgctcaagctttagttttaggagatgactttcatttcggcaaagaccgtcaaggcaatagcgaatttttaaagaattacggctttcaagtcacaaatttacatacgattgaactcgaaggtgaacgcgtcagttcaacccgtattcgccaagtgcttcaagtgggtaatctcgctttagcagctaaattattaggccgtccgtacagtattaccggtcgtgttcaatatggtgaccaaattggacgaactttagatttcccaacgattaatgttcgtctcaaccgtcataagccttgtttaaatggtatttatggcgttgaagtcatttgcgaaacaacttcgctaactcaaaaagtgcttcaggataatcctgaaaagcccggaattgccggatatcatgaaaacagcctctatggtgcaggtcatgtcggtactcgtccagccattcagcaagaacatccagagtggagattagaagtacatttccctgatgtttctgctaatctgtatggcttatttatgcgggtgacttttcttcactatcttcatggtgaattgaactacccttcgcttgaagcacttaaggcaggaattgataatgacgtgcagcaattacgacaatatcgtaacgacacgacacaatttcctttt

SEQ ID NO: 8649 - DNA, 390 bp, Acinetobacter baumannii
cagcgccgccatcattatgccattcgtgcaggtcggaacttacccgacaaggaatttcgctaccttaggaccgttatagttacggccgccgtttactggggcttcgatcaagagcttcgcttacgctaaccccatcaattaaccttccagcaccgggcaggcatcacaccctatacgtccactttcgtgtttgcagagtgctatgtttttaataaacagttgcagcggcctggtttctgcggctgtcgtcagctcaggaagcgagttccatcaccaacaacagcgtaccttctcccgaagttacggtaccattttgcctagttccttcagcagagttctctcaagcgccttggtctactcgacctgaccacctgtgtcggtttcgggtac

SEQ ID NO: 8650 - DNA, 561 bp, Acinetobacter baumannii
atgagcttgattaatactgaagttaaacctttccaagcaactgcttaccacaacggccaattcatcgaagtgaacgaaactaaccttaaaggtaagtggtctgttgtattcttctatcctgctgacttcactttcgtatgtcctactgagcttgaagacttagctgataactacgctgaattccaaaaattaggcgtggaaatctacggtgtttctactgacactcacttcactcacaaagcttggcacgacacttcagacgcgatcaagaaaatccaatacccattaatcggcgatccaacttggactctttctaaaaactttgacgttttaatcgagtctgaaggtttagctgaccgtggtactttcgttatcgatccagaaggtaaaatccaaatcgttgaaatcaacgctggcggtatcggtcgtgacgcatctgaacttcttcgtaaagtaaaagctgctcaatacgtacactctcacccaggtgaagtttgcccagctaaatggaaagaaggcgaagcaactcttgctccatctatcgacctagttggtaaaatc

SEQ ID NO: 8651 - DNA, 2577 bp, Acinetobacter baumannii
atgcgatttgaaaaatttacgaaccgcttgcagcaagccctctcagatgctcaatccttagcgatgggtaaagaccatacagctatagcaggtattcatattttgagtactttattggaagagccgtccaatattagtttgttgcaacaagcaggtgcacggttacctgaacttaaacaaaagctagagcaggctttaaaagatgctccgactattgctaacccgacgggcgatgtcaatttaaacccagaagcagttaaagcactcaacttggcagatcgatacgcgcaaaaagctggcgatgaatttttgtcaactgactgggttttattgggcttggcagaaactggtgaaacaaaaaatattttaagtgccgtaggtgtaactcccgacagcttacgcaaagtaattgaaaatattcgaggtagtgacaaagtcatgagtaataatcacgaagaccaacgtgactcacttaataaatatacgattgatttaaccgagcgggctttatcggggaaacttgatccggtgattggacgtgatgatgagatccgccgtaccattcaggtcttgtcacgccgtactaaaaataacccagtactcatcggtgaacctggggtaggtaaaaccgctattgttgaaggtttggcacaacgtattgttaatggtgaagtaccagaaggcttaaagaataaacgtgttttatcgttagatttaggttcattgcttgcaggtgctaagtatcgtggtgagtttgaagaacgtttaaaagctgttttaaaagatttggcgaaacacgaaggcgaaatcatcttattcattgacgagctacatacgctcgttggtgctggtaaaggtgacggcgcgatggatgcaggtaatatgttaaaacctgcgttggctcgtggtgagttgcgctgtgtgggtgcaactaccttagatgaatatcgccaatacattgaaaaagacgcagccttggagcgtcgtttccaaaaagtgctggtcgatgaaccaagtgtagaagataccattgcgattttacgtggtctgaaagaaaagtatgcgactcaccatggcgtacagattttagattcagcgattattgctgcggcgaaaatgtctcatcgttatattacagatcgtcaattaccggacaaggcgattgacttgattgatgaggcagcttctcgtattaagatggaaatcgattctaagccagaagcacttgataaacttgaccgccgtttaatccagttgaaaatgcaattggaagcggtgaaaaaagatgaagacgcaggcagtaaggccgaagttactcatcttgaaaaacagattgctgaagtcgagaaagaatacaacgatctggaagaagtgtggaaagctgagaaaacattggtagaaggcactaaacaagctcaggttgaacttgataaagcacgtattgcttttgaaaaagctcagcgcgaaggcgatttggcagaagcagcacgtttgcaatatggtgtaattccagagttgcaaaaacaacttgaacaagatgaagttgctgaagaaaacgaagagccaaaactcattcgtacaaaagtaactgaaaatgaaattgccgaagtcgttagtgctgcaacaggtattccggttgctaaaatgatgcaaggcgagcgtgaaaaacttcttcatatggaagagtttttacatgaccgtgttgttgggcaagatgaagcagttgttgcggtatcgaatgcagttcgtcgttcacgtgccggtttgtctgacccgaatcgtcctagcggatcattcttgttcttaggaccaacaggtgtaggtaaaactgagttaactaaagctttagctaacttcttgtttgacagtgatgatgccatgattcgtatcgatatgagtgaattcatggagaaacattctgtcagccgtttagttggtgcgcctccgggttacgtaggttacgaagagggcggtgttttaaccgaagctgttcgccgtaaaccatatagcgtagtgttgtttgatgaggttgaaaaagcgcatccagatgtcttcaatatcttgctacaagtgttagacgatggacgcttaaccgactcacaaggtcgtgtagtggactttaaaaacacggttattgtgatgacatcgaacttgggttcacaagatgtacgtgaacttggtgaaggtgcaactgatgatgaagtgcgtactattgtaatgaatgcggtaagtcagcatttccgtccggagtttattaaccggattgatgagttggtgattttccattcactcaaaaaagcacagattcgtggcattgccgatattcagttggaccgcttacgctcacgacttgttgatcgtgatatgagtttaactgtagatgacagtgcatttgacttattgattgacgctggttttgatcctgtatacggagcgcgtccattgaaacgtgcaattcaacaacaggttgaaaatacactagctcaaaaaatcttgtcaggtgactttgttgcgggtgataccattttagttaaaggcgaaaatggtcacttagtgtttgataagctgaaactcagc

SEQ ID NO: 8652 - DNA, 1014 bp, Acinetobacter baumannii
atgtcaaaccacaatgttgcacttcaatttgaagatggtgttacacgttttattaacgtagctcaaggcgaaaccctatctgacgcagcctatcgccaaaaaattaatattcctttggattgccgtgatggtgcatgtggaacttgccgtgcattttgcgagtccggtagttatgacatgccagaagaaacctatattgaagatgcattaacccctgaagaagctgcgcaaggctatattcttgcttgccaatgtcggccaacttcagatgccgtatttcagattcaagcgtcttcagatgtttgcaaaacagaaattcatagcttccaaggtacattggcccgcgttgaaaacttatcagactcaaccatcacatttgatattcaacttgatgaaggacaaccggatattcatttccttgcaggtcagtatgtgaatgttgcaattccagaaactggcgaaacacgttcatattcatttagctcaaaaccgggcaaccgcttaacgggctttgtggtacgtaacgtaccgaatggcaaaatgagtgaattcttaagcaagaatgccaaaactggcgacaaaatgacttttaccggtccattcggtagcttctatttacgtaatgtagtgcgtccagtgcttatgctggcaggcggtactggtattgccccatttatgtcgatgttacaagtgcttgaagaaaaaggctccgaacaacctgttcgtttagtctttggtgtaaccaatgactttgatttagttgctctagaaaaactcaatgagttgcaggcgaaattcccatggtttgaataccgcactgtagttgcaagccctgagagtaaccatgaacgcaaaggctatgtaacgggtcatattgaaagtgaatggttaaacggtggcgacgtcgatgtttatctatgtggcccagtaccgatggtagaggctgtacgtagttggttagaaactgaaaatattaaaccagcaaacttcttgtttgaaaaattctctgcaaac

SEQ ID NO: 8653 - DNA, 2469 bp, Acinetobacter baumannii
atggactcaaaaaccacaaaattgccagcatatagtgaaacactctcaattgagggcatgacttgtgcctcctgtgtaggtcgtgtcgaaaaagcacttaaaaaagttgaaaatattgagattgccaacgttaatttggcaacagaaaaagcggttgtttattcaaatcaaccgattcagcgtgaagcactggttaaagcagttgagcgagcaggttatgatgttccaaaagctgcaccagtagaattgtctattgagggtatgacctgtgcatcttgtgttgcacgtgttgaaaaagcccttaaaaaagtagacggcgttcaagaggcaactgtcaacctagcaacagagcaggcttgggtacaaacagattcctcagtcaatgttgaagacttaattcgtgctgttaaaaaagcaggttatgacgcgaaagcatctgaaaaacatcaagatgagcaactcgataaaaaagcttcagagttagatcagcttaaaaaagatttgatcatttcgattgtgttggccttacctgtgtttattttggaaatgggttcacatctcattccagcttttcacatgtgggtcatgcacaccattggtcaatacaatagctggcttttacagtttgttttgaccacattaatactcgtttttcctggtcgccgtttttaccaaaaagggattccagccttatggcgtttggcgccagatatgaactcgctggtcgctgttggaactttagctgcctacagtttctcagtcgtggcaacctttatgccgcaggtattaccacaaggcacggtcaatgtttactttgaagcggctgctgtaattgtcagtttaattttactcggacgttattttgaagcaaaagctaaaggacgtacttcgcaagcgattcaacatttggtgggaatgcagccaaaaacagcccgtattcaacgtgatggtcaagtggttgaagttgctgttgctgaaatggtcagtggaactattgtagaaattcgtccgggtgagcgtgtgccagtcgatggtgaagtggttgaagggcacagctatattgatgaatctatgattacgggtgagcctgttcctgttgaaaagagagtagggcaacaagtagttggaggtacggtcaatcagaacgggactctaaacattcgggcaaccgcagtgggtagctcatctgtactttcacaaattattcgcatggttgaacaagcccaaggttctaaacttccgattcaagggttggtcgataaagtcaccatgtggtttgtaccggctgtcatgctaattgctgcaattactttcttggtttggtttatttttgggccagagcctgcgctgacttttggcttggtgaatgctgttgcggtactgattattgcgtgtccttgtgcgatggggcttgcaacaccaacttctattatggtcggtactggacgtggggctgagttaggtgtcttgttccgtaaaggtgaagctttacagcttttacaagaagcgcaagtggttgcagttgataaaacgggtacgctcaccgaaggcaaaccgacactgacagactttaatgtgcaatcaggttttgaacgtaaccaagtgctgactttagtggcctcagtcgaagccaagtctgaacatccaattgctcttgcgattgttcaagcagcagaaagcgaaggtttaaacttattaccagtaacagcatttaactcgattacaggttcaggtattgaagcggaagtttctggtcaaaaagtacaaattggcgcagaccgttatatgcaccaacttggtttagataccagctcattccaagcgattgctgctcagttaggtgaagaaggcaaaacaccgctttatgttgctattgatcagcaacttgcagcaattattgccgtggcagacccaattaaagaaacaacctatgctgcgattgaggccttacatcaattaggtctcaaagtggccatgattacaggagacaaccgtcatacggcgcaagcaattgccaaaaagctgaacattgatgaagttgtggcagaggttttacccgagggcaaagtggacacagtccgccaactgcaaaaacaatatggtcgcttagcttttgttggtgatggtattaacgacgcaccagccttggcacaagcggacgtgggcttagccattggtacaggaacagatgttgctattgaagctgccgatgtggtgctgatgtcaggtagtttaaaaggcgtaccgaatgcaattgcgctaagtaaagcaactatgcgaaacatacgccaaaacctgttctgggcatttgtatataacgttgcacttattccaattgcagctggtgccttatatccagcatttggtgtattactttcaccgatgtttgcagcaggtgcgatggcactttcttcggtctttgttttaggcaatgcgttacgcttaaaacgttttcatgcgccagtacag

SEQ ID NO: 8654 - DNA, 564 bp, Acinetobacter baumannii
atgtttgttgcaggcgtagatgaggcaggacgaggcccattagtgggttcggttgttgctgcagctgttattttagatccgaataatccaattttaggattaaacgactctaaaaaattaactgaaaagaaacgtgaaaagttgtttattgaaattcaagaaaaagctttagcatggtcaatagcagaagctacacatgcagaaattgatgagctgaatatcttgcaggcaacttttttggctatgcaacgtgcagtggaaggtctgaaaacacaacctcaaaaggtaattgtagacggcaatcaaatccccaaaggaattattattccttgtgaggcgattgtagggggagatgcaagccatgccgaaattagtgcggcgagtatcttggctaaagttacgcgtgatcgtcaaatggcagaattagatcaacaatatccattatttggttttgccaagcataaggggtatccaaccaaagcacactttgaagccattgctgctcatggcgtgattgatcaacaccgtcgtagttatgcacctgtaaaacgggcattaggacta

SEQ ID NO: 8655 - DNA, 252 bp, Acinetobacter baumannii
atgctgattctgacccgccgtgtcggggaaacattaatgattggggatcaagtcagtgttactgtgcttggcgtcaaaggaaaccaagttcgaattggtgtaaatgcaccaaaagaggtttctgttcatcgcgaagaaatttatcaacgtattcaacatgaacgtgcaatgcatgaacaccttcaacatcttgatcaagattatcaagtttcatatgaagatgataattatgcacagaaaaacttcaatcgt

SEQ ID NO: 8656 - DNA, 1278 bp, Acinetobacter baumannii
atggcattaatcgttcaaaaatatggcggtacttctatgggtacccccgagcgcattttaaatgttgctcgtcgtgtgaagcgttggcatgatcacggtcacaaagttgttgtggtcgtatctgcaatgagtggtgaaacaaaccgcttacttgccctcgctaaagccattaccgaaacacctgacccacgtgagttagaccaaatggtttcaaccggtgaacaggtgacgatttccatgttagctatggcacttaattcgattggtgtggaagctaaatcctataccggacgtcaagtcggtattaaaactgacagtgcatttactaaggcgcgtattgagtcgattgacacagatgtcatgaccaatgacctagatgcgggccgtgttattgtagttgcaggcttccaaggcttcgatgccaacggaaatactacaactctaggacgtggtggttcagatacttctggtgttgccattgcagctgccctaaaagcagatgaatgccaaatttatactgacgttgatggggtttatactacagaccctcgtgttgcccctaaagcgaagaaaatcgatcgcatttcttttgaagaaatgctagaaatggcatcattaggttctaaagttttacagattcgctcagtagaatttgccggaaaatatcaagttcctttacgcgtattatcaagttttgataatgatgacgacggcgcatttgacgacgaatttaaagaaaatgtaggtacactcattactactgaggcagaagacactatggaacagccaatcattgcaggtatcgcttttaaccgtgacgaagcaaaattaacaattttaggtgtacctgatgaaccgggtattgcttctaaaattttatcaccagtaagtgatgccaacattgaagtggatatgatagtccaaaatgttgaagaagatggcacaacagatttcacgtttactgtaaaccgtgttgatttagcaaaagctgaaaaaatcttaaatgaaactgccaaaaatattggtgcacgtgaagtttcaacacgcgatgacatcgttaaagtatctatcgtgggtgtaggtatgcgctcgcatgcgggtgtagcaagcaaaatgtttactgcccttgctgacgaaggtattaacatccttatgatttcaacatctgaaattaaggtttctgtcattattgatgaaaaataccttgagcttgcagttcgttgcttacataccgcttttggtttagatcgtgaacatggtgaaagcagcgcacgcgct

SEQ ID NO: 8657 - DNA, 2649 bp, Acinetobacter baumannii
gtgagtactcgtttaatgacatctgctgaaattcgtgaagcatttttgcgctactttgaaacgcaagggcatacacgtgttgcatcgagttctcttgttcctgccaacgacccaactttattatttacaaatgctgggatgaaccagtttaaagactgttttttaggtcttgaaaaacgtgattatgtacgtgcaacaacatcacaaaaatgtgtacgtgcaggcggtaaacataacgatttagataatgttggttatacagctcgtcaccatacattctttgaaatgttgggtaacttctcatttggtgactatttcaaacgtgatgctctcaagttcgcatgggaatttttaactagcgaacaatggcttgctttaccgaaagataaactttatgtcacggtttaccatactgatgacgaagcttatgacatttggaataaagaaatcggcctagcaccagaacgtattatccgtattggtgataacaaaggcgaaaaatacgcatcagataacttctgggcaatgggtgatacaggtccttgcggtccatgttcagaaattttcttcgaccacggtgaacacatttggggtggtttacctggctcacctgaagaagacggtgaccgtttcattgaaatctggaacaacgttttcatgcagtttaaccgtactgctgatggcgtacttcacccactccctgctccatctgtagatacaggtatgggcttagagcgtatttctgccgtattgcaacatgttaattcaaactatgacattgacctgttccaacacttattaaaagctgctgcaaacatcattggtattgaagatgaaggtcagccttctttacgtgtagttgcagaccatgcccgctcttgctgcttcttaattgctgatggtgtaaacccaagtaatgaaggacgtggttatgtattacgtcgtattatccgccgtgctgtccgtcacggtaacaagcttggcgcaacaggtacgttcttctacaaaatgttgcaaccattaattgaagtaatgggacaggcttatcctgagttagaagctcgccgtgaagtcattgaagcaacattaattcgtgaagaagaacagtttgctaaaaccttagagcaaggtttaaaacttcttgaaggtgaacttgctcagttaaaagataaaactattccgggtgcgactgtatttaaactttacgatacttatggtttcccaacagatttaactgctgatattgcacgtgaacgtggctttattattgatgaagcaggttttgaagttgaaatggctgcacagcgtcaacgtgcgcgtgatgctggtaaatttgctgttgactataacaacattgtaaaagttgaaggcgaaactcagttcgacggttataccaacacaaccggtcaaggccagattgtagcgatctataaagatggcgtacaagttgatgaagtttctgaaggcgacgaagcacttatcgttttaaaccaaactcctttctatgctgaaagcggtggtcagattggtgatactggtatcttcaaaaacgaaacaggtatttttgaagttcaggatacgaaaaagtctggtggtgcctttgttcatcaaggtattgtgactgttggtaaccttaaaaccagtcaaaatgtagaagcgattgttaaagccgacattcgtgaagctactgcgcgtaaccactcagcaactcacttgttgcatgctgcccttcgtcaaattttaggttcgcatgtacaacaaaaaggctctttggttgcaagtgatatcttacgttttgactttgcaaatgaccaacctgtgtcatttgaacaactacaacaagttgaacgtctcgtaaatgctgaaatcattgcaaatactgctgtaacaactgaactactcgacattgaaactgcgaaagcaaaaggcgcaatgatgttgttcggtgaaaaatacggtgatgaagttcgtgtgctctctatgggctcagtcattgacgagaaaaacttctcaatcgaactttgtggcggaattcacgtaaaacgtacaggtgatattggtttattcaaaatcacttctgaaggtggtgtggctgccggcgtacgtcgtattgaagcagtgaccggtactaaagcattagaagtagtacaaaaagctgatcatgatatccagcacattaatagcttattaaaagcacagaaagaccaaacggttgagcgtgtacaagctaatgtagaattggtttctgcattacaaaagcagattgaacaactcaaccaaaaattggcaaacttccaagcggctgatttgattgaccaagttcaaactattgctggtcgtcaaacgcttattactactgttcagggtgttgatgctaaagcgcttcgcaacttacatgacagtgtaaaatcaaaattagagaacgcagtgattgtgttagcaggtgtagagggtgacaaagtcagcctgcttgcatcagtcgcgtcgcaatacactgcaaatctaaaagcaggtgacatcatcaaacatctagcgaccgagttaggtggtaaaggtggtggtaaacctgacttagcacaaggtggcgcgccacttaacgagaagtttggacaagttatggcagcattacctgcttggcttgaacaaaaa

SEQ ID NO: 8658 - DNA, 1023 bp, Acinetobacter baumannii
atgcaacgtatcgccattaatgggtttggccggattggacgtaatgttttacgtgcctggtttgagagcccgaaacaatttcattttgaaatcgtggcgattaacgatatagcagatgtacatacactggtacatttattcaaatatgactcaacgcatggtcgttttaatggcaaagttgatatcaccattgaaaatgaaaagatttatttaaatattcaatctaaccagagactcttaaaggttgaagttttgcagcaaaaacagccggaacttttaccgtgggcaagtttaaaaattgatgttgtacttgagtgtacaggtttattccgctcccatgctgatgctacccgccatttagaagcaggggctaaaagggtcattattggcgctgcgccttttgatcatgttgatgctgcaattgtttatggtgttaaccatgctgatgtgaaagcgactgatcagattatatcgagtgtgtcatgtacgacacaggctttagttccactggttaaaatcattgatgatgcatttggcatagaaacagcgcttatgaccgaaattcatgcggtaacagcagatcagtctgtgcttgatcatgcgcatcgtgatttgcgtcgtgctagagcttctggacaaaacattatcccgactacttctagtgcgcttggtgctttaaagcgtgtgatgccaaaaatggaagaccgtattgatggttactcaattcgggtacctaccattaatgtagcggcaattgatttaacgtttatcgcgcaatctccaattacggtccatcatattaatgaattgctgattaaagcatctcaaacagattatgcagaaattatggctgtaacagatgaaccattagtttcaagtgattttaatcattcgccctattcacttattgttgatttaactcaaaccatggttgttggacatcaagccaaagtatttgcttggtatgataatgagtggggctatgcaaatcgtttattggatttgtgtgattctttcaaaagt

SEQ ID NO: 8659 - DNA, 672 bp, Acinetobacter baumannii
atgcttttttctcaagaactctggcaacgtaatttaaatttatatcaaaaaattctcgacctgccttttaatcaggaacttgctaacggtactttagataaagaagctttttgtcattatgttattcaagatgctcaatatttagtggcctatggccgtgtgttggctgttgcagcagctaaagcttttgatgctgacgatattatgcagttttcagatgcagcgaaaatcgcaattgtggtcgagcgcagtttgcatgacgactttatgaaaaactttggtgtcaccaaagaagaatttaaaaataccccattgaccttggcaggccatcattacacttcatttttgacagcgactgcttggtctgaaagctaccctgttgtacttgctgcacttttaccttgcttctggatttatgccgaagtcggtaaagacatcgtgagtaagtctgtcccgaacaatccttatcaggcatggattgatacctacgcaggtgaagaattccataccgctgttcgtaatgtgattgccacagtagacaaggttgccgcacgttgtgatgcagatactttagagaaaatgcatgcagcctataccatgggtgcaaaacttgaatggttattttgggatagtgcctaccatcaaagacaatggttaggtttagatcagatc

SEQ ID NO: 8660 - DNA, 1093 bp, Acinetobacter baumannii
gaaattaatccttatctaaaccaattgaaagacttaactgatcgtagccaaacactacgggggtatctttgactacgatctaaaaaaagaacgtttagaagaagttttacgtgagttagaagaccctgcgatctggaatgatcaaaaccgtgctcaggcaatggcgaaagaaaagggcgaactagaaaacgttattaatgtattagatggcttatctacacagcttgaagatgcaaaagcaatgttggatttggctgtagaagctgatgatgaaagcttgcttgaagatgttcagtctgaactgagtactgctgaagaagaattagcaaaacttgaattccgccgtatgtttagcaatccaatggacccgaatccttgctatgtcgagattcaggcgggttcaggtggtacagaagcacaagattgggcttcaatgctattacgtatgtatatgcgctggattgaacgtcatggttttaaagcagaacttatggaagtctctgacggtgacgtcgcaggtatcaaatctgctacgattcgtgttgaaggtgaatatgcgtatggttggttacgtacagaatctggtgtacaccgtttagtacgtaaatcaccatttgacagtggtaaccgtcgtcatacttctttctctgcggtatttatttctccagaagttgatgacaatatcgaaattgatattaatccttcagatgttcgtactgatacttaccgtgcatctggtgcaggtggtcagcacattaacaaaaccgactcggctgtgcgtttgacgcatattccgactggtattgtagtggcatgtcagaaccaacgttcacagcatgcgaaccgtgatcatgcatggaaacagttacgtgcaaaattgtatgaattagaaatgcaaaaacgtaatgaagccgctcaagcacttgaagactcgaagtctgatattggttggggtagccaaattcgttcttatgtacttgatgactctcgaatcaaggatttgcgtacgggtgttgaaaattcaaatactggtgcggttcttgatggtgaccttgatcgttttattgaagcgagtttgaaacaggggttataa

SEQ ID NO: 8661 - DNA, 999 bp, Acinetobacter baumannii
atgaaatatagaactttaggacaaacaggcgaaaaagtatcagcacttggtttaggttgcatgggaatgagctttgcctatggtgcctcagacgacacacaaagcattgcaactctagaaaaggccttagacctcggcattaacttttgggacactgccgacatgtacggcaacggcgcaaacgaagtcttgctctcaaaagttttagaaaaacaccgcgacaaagtgtttttggcgaccaaatttggcttccgctataaagaagataaccttaacccgaaaaactctttagagtcttatatcgacggctcacctgagtggattaaagtcgcggtcgaaaacagcttaagacgcttaaatacagatgtgattgatttgtattatgcgcaccgcatagacccgaatgttccagttgaagataccattggcgcaatggcggacttggtcaaacaaggtaaagttcgttatttaggactgagtgaagcgtcggctgaaactattcgtaaagcacatgcgattcacccgattgcagcggttcaacatgaatattcgctacttacccgtgagtttgagcaaacccatttgcaaaccattcgtgagttaggtattagccttgtgccatattcaccactttcgcgcggtttaattaccaatacgcttgatgtaaataacctagacgaaaatgatttccgtcgccagttaccacgttatcagggcgataactggaaaaataaccaaagcttggcgcaagcatttagtgaatttgctcaaagcaaaaatgcgacagcagctcaactggctttggcttggattttggcgcaaggtgacgacattattccaattccgggtacgcgtaaaatcgagcgacttgtagaaaatgcgggtgctgtagaccttcatttaacaccagcagatttagcagaaatcgaagcgattattgcaagatatccaaacatgggcgcacgctataacgctcagcaacttgctgcggtgaatcac

SEQ ID NO: 8662 - DNA, 1242 bp, Acinetobacter baumannii
atgaactcttcatctacacccagtactttaaacactgaggcaacgtctgttctttcccgtgagtggattcacaaagggactaaagcttataaacatgcaggatttgctttattcctcgtaggttttgctagcttctctctaatttattgtgtacagccactcttacctgcatttagccaaagcttccagattagtcctgcgagtagctctctagcactgtcattaacgactgcctttttagcaatttcaattgtgctatcgagtgccttttcacaagcgattggccgtcgcggtgtgatttttacatcaatgctgtgtgcagcaattttaaatattgtctcgatgtttacaccgaactggcacagtttactcatggcacgtgcgttagaaggtttattactcggtggtgtacccgcagtgactatggcttggattgccgaagaaattgcacctgaacacctcggtaaaaccatgggtttatatattgcaggtacggcctttggtggcatgatgggccgtgtcggtatgggtattttggttgaatatttttcatggcgcaccgccttaggcctacttggagcaacctgttttatttgttcgattgcttttttaaaactacttcccgcatcgcgtaattttgtgcagaaaaaagggctaaatttaggctttcacatgcaaatgtggcgtgctcatttaagcaatactaaattattacgcctgtttgccattggtttcttgcttaccagtgtttttgtcaccctgtttaactatgcgaccttccgcttaagcggcgcaccttattcactcagccagacacaaattagccttattttcttgtcgtatagctttggtatggtgtcttcatcgttggcaggtagcttagccgatcgcttcggcaagaaaaccatgatgatgagtggctttgccttgatgatcatgggtagtctcatgaccctgctcagctcccttttcggcattattattggcatcgcatttattaccacaggcttctttattacccactcacttacgagtagttctgtgggtaccgaaagtaaacaagcgaaagctcatgctagttcgctgtacttactgttttactatatgggttcaagtattgtcggctcggcgggcggttggttctggttacacggtggctggagtgcgattgtcggtttaaccgtggtcttgtctttaattggaatatttttagcgatttatacttcacatgccaaagcgcat

SEQ ID NO: 8663 - DNA, 600 bp, Acinetobacter baumannii
atgaaacgattaaataaaagcgaaactacacgacaacacattttagataccagttttgaactggtactacataaaggttttgtcggtgttggtttgcaagaaattttaaaggcttgtgacgtacctaaaggttcgttctatcactactttgcttcaaaagaggcgtttggctgtgcgttgctcgagcaatacatggccaattataaagtccgtatggaacagctttggcagcacagtgagcaaagtgcccatgcccgtttaatggctttatggcaggcgtggattgatgatccggtacatggtagctgggctgaaaactgcttgattgtgaaattggcagccgaagtttcggacttgtcagaagatatgcgccaaattctcaatgacggtgtgcacaaactaacccaacgtttggctttactactcaaagaagggcaacaagaaggatcaattccaaaacatattgaacctttgaaaactgcgcaagtcatgtatcagttatggttaggtgctgctttactcacaaaattgtcgcaagacaaagcacatctacatctagccttagaaaccacccaacaactcttaaaaccgatagaggaa

SEQ ID NO: 8664 - DNA, 2835 bp, Acinetobacter baumannii
atgagccaaagtcatatccgtattcgaggcgcacgcacccataacttaaaaaatgtgtcactcgatattccacgcgacaaatttgtggtaattacggggctatcaggttcaggaaaatcttctcttgcctttgataccttgtatgccgaaggacagcgccgttatgtcgaatcactttcggcatatgcccgtcagtttttatcgcaaatggaaaaacctgaagtcgactcgattgaaggtttatcaccagccattgcgattgagcaaaagtctactagccataacccacgttcaacggttggtacgattaccgaaatttacgactatttgcgtctgctttatgcacgtgtcggtacgccttattgccctgaacacgacttacctatggttgcgcaaactgtttctgaaatggtcgatgcggtaaagaaccttgaggaaggcactgcactcatgttgcttgcccctgttgttcgtgagcgtaaaggtgaatacagcaacttgttcgaacaactacaaggtcaaggttttgttcgtgcccgtgttgatggtgaaatcattgatattgatacaccaccggaactcgacaaaaagaaaaaacataccattgaagtcgttgttgaccgctttaaagtacgtgatgacttaggcaaccgtattgctgaatcatttgaaactgcactacgtttaggtggcgatattgcagttttatcgtggatgaatggcgaacacccagatcgcgttttttctgcaaaacactcatgccctgaatgtgatcgcgcagtcgcagagcttgagccacgtttattttcatttaacaacccgtttggtgcgtgccctgtctgtgatggcttaggtacacgtagccattttagccctgaaaaactcattcctaaccctgaacttgcaattagtgaaggtgctattcgtggttgggatcgtcaacgtccttattactattcaatgctgcaaaaagttgccgaccattttggttttcaacttgatacaccttggaatcagttagataaagacacgcaaaagaaattcttacaaggtactggcaaagaaaaaatcgatttaagttatatcgatgaacgtggccgtaaacatacacgcgtgcaaccttttgaaggaattttgccacaccttgagcgtcgctatcgtgaaactgaaagtaactatgtacgtgatgatttagcacaatatttgtctaatgcagcttgtgatgcatgtggtggttcacgtctcaatgaaatttcacgtcatgttcgtgtaaaagataaaaccattgccgacattacccgcatgtcgattggtgatgctgaaagctactatcaaggtataaaccttgaaggtgccaaaggtgaaattgcagataaaatctttaaagagattcgtgagcgtttacatttcttggtgagtgttggcctgaactatttaagtctggctcgttctgccgaaacactatcgggtggtgaagcccagcgtatccgtctagcttcgcaaattggtgcaggtttgatgggtgtcatgtacgtccttgatgaaccatcaattggtctccatcaacgtgataatgaccgtttattacaaacgctaattcgcttacgtgatttgggcaatacggtattagtcgttgaacatgatgaagatgcaatccgtgcagctgaccatattattgatatcggccctggtgctggcgtgcatggtggtgttgttattgctgaaggtacgtatgatgagctggctaaacatgccgactcactcacaggtcaatatctttcaggcaaactcaaaattgaagtgccaaaacaacgaactcaaccacctaaacctgaagaaaaaattaaactttcaggtgcagcgggtcataacttaaaaaatgtcgatttaaccatcccacttggcattatgacttgtgttacgggtgtttcaggttcaggtaaatcaacactgattaaccgtacgttacttccactggctgcaacacagctcaacggtgcaacgactttaacagctgaaaaatttgactcgattgatggtctacaacatctggataaagtcgttgatattgaccaaagcccaattggccgtacaccgcgctctaatccagcgacttatacgggtctatttacgccaattcgtgaattatttgctcaaacaccagaagcgaaagcgcgtggttatagtgcgggtcgtttctcgtttaacgtaaaaggtggacgctgcgaagcgtgtgaaggcgacggtatgattaaagtcgcaatgcacttcttaccagacatgtatgtaccttgcgatgcttgtcatggcaaacgttataaccgtgaaacacttgaagtcggctataaaggcaaaaacatttctgatgttttagaaatgacggttgaagatgctgctgagttttttagtgctattccagttattcaccgtcgtttagaaaccttaactcaggtaggtctaggctatattcgtttaggtcaggcggctactactttatctggtggtgaagcacagcgtgtcaaactggctcgagagttagcgaaacgtgatacgggtaaaacgctttatatcttggatgaaccaacaacaggtctgcatttccatgatattgccaagttactcgatattttgcatgagctacgcaacaagggtaataccattgtggtaattgaacataaccttgatgtcattaaaacagcagactgggttgtcgacttaggtccagagggtggttcgggcggtggtatgatcattgctgaagggacacctgaacaagtagccgaggtcgagatttcccatactggccgcttcttgaaaccgatgttgaaacaataa

SEQ ID NO: 8665 - DNA, 1698 bp, Acinetobacter baumannii
atgacaaaaatacaaattaaacaaagacctttattgacacgccctgaacagtttcagggcgtgcctccgtttattgccgaaattttggcaagacggggcgtacaatccgagcaagaactagagttaaagcttaagaatttactggctcctgaactcaaggggttggatgctgctgtagcattaatggatcaagccatcgatgagcagaaaaaaatagttattgtgggggactatgatgctgatggcgcaaccagcactgctttaatgatgctcgtgcttcgcgatatgggagcacaagtcgactatctggtaccggatcgttttaaatatggctatggacttactcctgccattgctgagcttgctcatcacacctatcaacccgatctattaattacggtagataatggaatttctagccatgctggtgttgatgcagcacatgccctaggcatgcaagtgattattactgatcatcacttaacgactaaagaaacaccacttgcagaagcagttgttaatccaaatcaattaggctgtgagtttccaagtaaggcacttgccggtgttggcgttgctttttatgtacttgccaatttggcgagtctacgcaatagacagggtaaaagcacaagtaaagtgactcaatatttagatttagtcgctttgggaacttatgccgatgttgctgttttggattataacaaccgtattttggttgatgccggtgtaaaacgtattcagcaacatcagtgtcgagtgggaatcttagccttactcgatatcgctggtcgggaagctacttcaatacgtgctcaagatttaggttttgtgctcggaccgcgcattaatgctgctggacgtatggagagtatgcgtattgggatcgagtgtttattagctgacacgatggaaactgcataccccattgctcagcaattaaatcagttaaatatcgatcgccgtcaaattgaaggggagatgaagcaacaagctttatctgctttagacagtttacaactctcacaacaagatattcccgcggcgcttgttctgtttgaagaaaactggcaccaaggtgtcatcgggattgtcgcgggacgtttaaaagaacagtttcatcgcccaacgattgtgtttgctccagatgaagatggtattcatattaaaggctcagcacgttccattgatggggtgcatattcgagataccattgaacaagttgccgaacaacatcctgagctggtgagtcattttggtggacatgcggcagcggcaggcttaacgattcgtaaagaaaactttgaagcttttaaaaccgtatttaatgattgtgtagctgctatggatgaatcaatctttcaagcgacattatggaccgatggtgagctacctgtctctgctttgcaattagataccttaaactggattgagcaattaggtccgtggggacaaaaatttccactgcctcaatttgaaggatattttaaagttatcgattttcgttggctcaaagagacacatttaaagcttagattagcgatagaccaatatagtttcgatgctattgcttttaatgcagcaggtcgcttcgagtttgatccgatgcgagaccatgtgcatttggtttatgaaatagaccgtaatgtctttaatggtaatgtgagcttacagctacgcattgtgcatttaaatcaa

SEQ ID NO: 8666 - DNA, 1530 bp, Acinetobacter baumannii
atggtggattttgcagaacatcgtaaagcgttactctgcaatgatgcacaatccattgctgactatgagtcagcaatgggcgaagcggtaaaagccgtttcagcatggttgcaaaatgaaaaaatgtacacaggcggtagcattaaagagttgcgttcagcaatttctttccaaccttcaaaagaaggtatgggtgtacaacaatctcttcaacgtatgattgagcttttcttgaataaaagcttgaaagtacaccatccacactcattagcacatttacactgcccaaccatggtgatgagccagatcgcggaagtgttaatcaatgcaactaaccagtctatggactcatgggatcaaagcccggcaggttcattaatggaagttcagcttattgattggttgcgtcaaaaagtaggttatggttctggtcaggctggtgttttcacttctggcggtactcaatctaacttgatgggtgtgttacttgctcgtgactggtgcattgcgaaaaactggaaagacgaaaatggtaacccatggtctgtacagcgtgatggtattccagctgaagcaatgaaaaacgtcaaagtcatttgttctgaaaatgcgcatttctctgtgcaaaagaacatggcaatgatgggcatgggcttccagtcagttgtgactgttcctgtgaatgaaaatgcacagatggatgttgatgctcttgaaaaaacaatggcgcatcttcagtctgaaggtaaagttgttgcttgtgtcgttgcgacagcgggtacaactgatgctggtgcaattgatccattgaaaaaaatccgtgaaattactaataagtatggttcatggatgcatatcgatgctgcatggggcggtgcactgatcttgtcaaatgactatcgtgcaatgcttgatggtattgagttgtctgactcgattaccctcgacttccataagcattatttccaaagcattagctgtggcgcgttcttgttgaaagatgaagcgaactatcgtttcatgcactacgaagctgagtacttgaactctgcttatgatgaagagcatggcgtacctaaccttgtgtctaaatcattacaaacgactcgtcgttttgatgctttaaaattgtggatgaccattgaatcactcggcgaagagctatatggttcaatgattgaccatggtgtaaaactgactcgtgaagttgcagattacatcaaggcaactgatggtttagagcttttagttgaaccacaatttgcttcggtattgttccgtgttgttccggaaggttacccagttgagtttatcgatagcttgaaccaaaacgtagcagatgaattgtttgcacgtggtgaagcaaatatcggtgtaacaaaagttggtaatgtacagtcattgaagatgacaacattaagccctgtagtaactgtcgacaacgttaagaaccttttagctcaagtattggctgaagctgaacgcattaaagatgcgattgcttctggtaactacgtaccaccaatcgac

SEQ ID NO: 8667 - DNA, 1218 bp, Acinetobacter baumannii
atgcgctttgttgatgaagcagtcattaccgtagaggctggcgacggtggcaatggcgtagccagttttcgccgtgaaaaatttgtaccatttggtggcccagatggtggtgatggcggacgtggtggaagtatctatattcaagcagatgatgatacaagtaccctagtcgattaccgttacacccgtaaattccgcgctgagcgtggtaaaaacggtgcaggtgctaactgtaccggacgtggtggtgaagatgtggttttaaaagtacccgttggtacaacaattgttgatacagattcaggcgatattattggcgatctggtagaagacggccaaagagtcatggttgcaagcggtggtgaaggtggtttaggaaatactcactttaaatcatcaaccaaccgtgctccacgtaaatgtacgacaggtacaaaaggtgagttccgtgaaattcgccttgagttgaaagtattagcagatgttggcttattaggtatgccaaatgctggtaaatcaacatttattcgtgcagtaagtgccgcgaaaccaaaagtagcagattatccatttaccactatggttcctaacctaggtgtagtagatgctgaccgtcaccgctcgtttgtgatggcagatattccgggacttattgagggtgcagcagaaggtgcaggtttaggtattcgtttccttaagcatttagcacgtacacgtattcttttgcacattattgatgtacaaccaattgatggttcagatccggcccataatgctaaagcaattatgaatgaacttgccaagttttctcctactttggcgaagttaccaattgtattagtacttaataaacttgatcagattgctgaagaaagccgtgaagaatggtgtcagcatattctagatgagttgcaatggacaggtcctgtctttaagacctcgggtttactcgaagaaggaaccaaagaagttgtttattacctcatggatcagattgaacaacaacgtgaacgtgaagttgaagatcctgagtacgcagcagaagtaagagcattccgtgaacagcttgaagctgaaacacgtgaacagaccattgcagcgaaggaagcatatcgtgctatgcgtaaggcacaacgccttgaaagcatgatggacgatgatgatgacttcgatgacgatgaagacgatggtgatgtagaaagcatctacgttcgtgac

SEQ ID NO: 8668 - DNA, 642 bp, Acinetobacter baumannii
atgtcgagtatcaattacgatgaattaatgcagcctgtattagcatttttagggtgccaaaccccaaaagaatggttggatgaggccgttaataatttagacatcttgatgcaagatcatgctaactgtgagaaaaaggcagcgggtacggccatgaacttaatgttccgctatagttttttcacggacttacaagttaagcttgcccagcttgtacgtgaagaaatgcttcactatgaacaagttctagaatttatgacgaaacgtgggcaagagtggaaaggtttaagtgctggacgctatgcaggtggcttacgaaaagaaatccgcacatatgaaccagaagctctaattgatgtactcgtgattggggcttttgtagaagcacgttcatgtgaacgtttttatgcgcttgctccgcgtgttgatgatgagttaggacgttattaccgttacttgcttaagtcagaatctcgtcattttgaagactatttagcactagcgcttgacgtcgcaaaaactgccaaaatgaaagatcctgaagaagatattcaacagcgtattgaacatatccgtgaagttgaaaagaatctgattttgactccagatgatactttccgttttcatagtggtatccctgca

SEQ ID NO: 8669 - DNA, 1374 bp, Acinetobacter baumannii
atgaaatctcgctatttacaacaaggaatgtatgcagcggtatttacagttgctgctgttcaagcaaatgctgctgttgatttttcaaacctcgttgaacaagttagtccggctgtggtgagtgtaaacgttgtaaaaaaaatgactcaggatgaactgttacaacagcaagttcctgaaattttaaaacgtttctttggtaatcaggtcatcattccacagcaacaaggtcctcaagagaaaaccgcatatggtagtgcgttctttattagtaaagatggttatttacttacgaaccaccatgtaattgaaaatgcttcccgcatcagtattactttaaatgaccgtcgtgaaattgatgcaacggtggtcggtagtgatgagcggacagacgttgcattattaaaggtaaacggaactaactatcctgctttacgagtaggaaatgttgaccgtttacgtgtaggagagccggttttagcaattggttcaccatttggttttgattattcagcttcggcaggtattgttagcgctaaatcacgtaacatgagcggtgaaacctctgtaccatttattcaaaccgatgtggcgttgaaccctggtaactcaggcggtccattgtttaaccagaatggtgaagttgtcggggtgaactcacgtatctttagtggtacgggtggctatatgggcttatctttctctattccaattgatgttgcgatggatgtagctgaacagcttaaaacgaaagggaaagtgactcgttcatacttgggtgtcatgatgcaagatattgaccgtaaccttgcagatgcctataaattacctaaaccggaaggtgctctgattactcaggtttctccaaattcacctgctcaaaaagcagggcttagagctggcgatgttattctaaaattaaatggtgcttctgtactgcgtactagtgatttgctttatgcattaaataaagtacaaccaaaccaaactgttcagtttgaagttttacgtgatgataaaacccgaaatatctcggcaacactagcaactgcacctgatgaaacaccagctaccggtaatcaagcctctgcttctaaaggtccagtattgggaatgagtattcgtgatctcgctgtgccagagaaaaatgctttaggtataaaaggtggtatttatgtacaagatgtccgccgtggtggattagcatcattgtcaaatatcattcctggcgatgtgattattcaggttaataatactcagattttgaacagtcaggattttgcaaaagttgtttcgaatttgccgaaaaatacagttgcgcgagttgggattattcgtcaaggacaacgagcaatgcttggtttacgtattcag

SEQ ID NO: 8670 - DNA, 597 bp, Acinetobacter baumannii
atgtttattagctttgaaggcacggaaggggtaggaaaaactacactcattcgaaaaattcatcagcattttgaagaacaaggtaaacaagttgttttaactcgagagccgggtggaacaccactcgcagaacaaatccgttcgatgcttttggcagtgaatcatgatgaaaatatgagtcatgatactgagttgctcttaatttatgcggcacgagctcaacacttacaacaagttattttgccagcattagagtctaataaaattgtattaagtgatcgttttaccgatgcgagttttgcttatcaatgttccggtcgtggtttaagccaagacaaattacagcttttaaaccagaacttcgtttcacgcatgccagaagtgactttctggttagatgcaccaattgaacttggtatgaaccgtgcacgtgaacgcggagctttagaccgttttgaacaggaaaagttaagcttctttactaaggttcgtgaaggatatgaaactttatggaaagctgagcctgagcgtattaaacgtttagatgctacacaaagccctgatcaggtgttcgagcaagctctacaatatttagca

SEQ ID NO: 8671 - DNA, 810 bp, Acinetobacter baumannii
atgtggtgttttaaaaatggacaacctgtagagaccattcctttattggaccgggcatttcattatggggatggctgctttaccacaattcgtgtttttcaaaataagattgagcttaaagcacggcactgggaacgtctaaaacttgcttgccaaaaattatctttggttgcagattttgagttaatcgaacaaagtttgcagcatctacaaaatcagaatctcgtgctcaacgggactttaaaaattgtgattagccgtggtgaaggtgatcgtggctatagtttgccaaagcatgcggcagatatttatatctggttttatccaaaagcattggagcagttccaaccagattttattgagtgtggagttttaaatcaggctttaggtttaaccatgccgagtttagttgggcttaaatccttaaaccgtcttgagcaggtattgctaaaaaaagaagcagatcaacaaggctgggttgaagctttagtaactgatgtacaaggttatattgttgaaggggtaagcagtaattgttttattcgtttaaatgatagatggattactccggaacttcgctataatggcgtccacggtgtgatgcgtgcagaaattttggcgcgtatgcagcactacggaattgcctgtgaagtcagaataattgagctagatgaagtaccacaaatacagagtctattcttttgtaatgctttacatccaatgcgagtagttactcaaatcagtgaacaaattctagagtcacaggcgtgcctaaatttatttcatactcttaacttgaatcagattcat

SEQ ID NO: 8672 - DNA, 1386 bp, Acinetobacter baumannii
atgagcaaagtcaaaaccgtttaccgttgtgagcaatgtggtgccgatcatctaaaatgggcaggtcaatgttcagagtgtggtgaatggaattgtcttaatgaagtcaaactagaacccactactgctcatcgtgcacgtcctaaagttgggggttatgcgggtcaagtcgccaatattacaacgcttaataaagtctctgtttctcatgaaacccgtttaccaacaggtattagcgaatttgaccgcgtgcttggcggtggcttggtgacaggttctgtagtactcattggtggtgacccgggtattggtaaatcgaccattcttttacaaacagcaactcacatggcaagtgcaaaaagttctgcactttatattacgggtgaggaatcgctgtcacaggttgccttacgcgcccaacgccttgacctaccaacagaccagttaaaagtcatggctgaaacttgtgtcgaacgcatttgtgaagttttagaacaagaacgtcctgttgtcgcaattttggactctatccaaacgctttacacagaaacgcttcaatctgcgccgggtggggtttcacaaattcgtgaatctgctgcgttattaacccgttatgcaaaaaatagtggcacagcgctatttattgttggtcacgtgaccaaagaaggtgcattggcaggtcctcgtgttttagaacacatggtggactgcgtactttactttgaaggccaatcagactcacgttatcgaatgattcgtgcagtgaaaaaccgttttggtgcagtcaatgagcttggtgtatttggcatgaccgataaaggcttacgtgaagtggctaacccttctgctattttcttaagtcgttatgacgaagccattccaggttcaattgtcatgattagccgtgaaggcactcgcccacttttagttgaagttcaggctttagtcgatgatgctcaaggacaaccaagacgtgttgcacttggtcttgaacaaaaccgtttaaacatgttgcttgctgttatgcatcgtcatgggggtgtacaaaccaccggacaagatgtgtatgtcaatattgtaggtggtttaaaaattaccgaaacaggttcggacttggctgttttacttgcatgtgcttcgagtttgcgaacaaaagccttacctcagcagcttgcagtttttggtgaagttgggctttcaggtgaaatccgccctgtacctaatggtcaggaacgtttaaaagaagcagcaaaacatggctttaaatacgtcatcttaccaagaggtaatgccccgcaaaaagcaattccgggcgtacaagtgattgctgttgcccgcctgcatgaagccttgactgaggcgatgcaactcagtgatgaattgaca

SEQ ID NO: 8673 - DNA, 345 bp, Acinetobacter baumannii
tctcgacgtacagacaacagtggtgctcgccgcgtacaatgtattaaagtacttggtggttcacatcgtcgttatgcttctgttggcgacattattaaagttactgtaaaagaagctattccacgcgcacgtgttaaaaaaggtgacgtgatgaatgcagttgtagttcgtactaagttcggcattcgtcgtccagatggttctgtgatccgttttgatgataacgctgcagttattttgaacaacaacaaagctccgattgcgactcgtatcttcggaccagtgactcgtgaacttcgtactgaacagttcatgaaaatcatttcattggctcctgaagttcta

SEQ ID NO: 8674 - DNA, 278 bp, Acinetobacter baumannii
atggctaagattaaaaaaggcgatcaggttatcgtgatcgcaggtaaagaacacaaggcaaacagggtactgttttgtctgtttctgaagaccgcgttaaggttgaaggccttaacttagtgaagaagcatcaaaagccgaatcgtgtaactggcgctgaaggcggtatcgttactcaagaagcttcgcttcatatctcaaacgtggcaattttaaatgctacaacccagaaggctgaccgtgttggttaccaagtgattgatggcgtgaaactcgcg

SEQ ID NO: 8675 - DNA, 611 bp, Acinetobacter baumannii
gtcatttcacaaactggacctatggcgcaattatcgcctatattcttgggggtgcaagtgcttacatggtcatgctctgtttaggggagctggctgtacatatgcctgtttcgggttctttcggtgcatacgctcgaaagtacattagtccaagtacaggttacatgatttcatggatgtactggctaacatggacagcaacgctaggaaccgagtttaccgccgctgctctacttatgcaggaatggtttccacaaatttcaatgtggatctggacacttatttttgcagtaactattttcgggttaaatatcagttcaacccgagtatttgccgagtcagagttctggctagcgctagttaaggtcattaccgttattgcttttattgtgcttggattattagcaatttttggcttaattcctttccacggcgctcaaactgctccattgtttagtaatttaactgcccaaggttggttcccacacggttttcttcctattttcaccactatgctcattgttaactttgctttctctggaacagagttaattggcgtagctgctggcgaaactaaagatccggctcagaatgtccctaaagcgatttat

SEQ ID NO: 8676 - DNA, 300 bp, Acinetobacter baumannii
atgaattttaaatttgcaaaaaatggtactgttattattgcgaaaatcatcaaaatgaccgtgctttcgcaaaaagagatattgctctctccaaagaactggtcacgtatcgcaaccttatggcagcgtttacagcaaagcttccgactcatggttggtgtgccggactatcaaacgtatctggagcatatgaaagcccatcatccagatttaacgcctatggatgcacaaactttctatcgacattgtgttgatgcaagatacccatctgcaggtggtaatttgaagaagtgcccttgt

SEQ ID NO: 8677 - DNA, 1716 bp, Acinetobacter baumannii
atgcaaactgctaaacatttattatttgtcactaatggtccgcaacagcaagtcaatgctttaatcttggctcgtaaacttgctttagtcgcaacccaacacggttataaacatagtgtcatttcactcgatgagtttgaatcaagcgatcattttgatcatgtcattattattggacagcaacctaaaaatctaaatatttttggtcaaaacgctttatctttagtttctattgaagatattaaagatgatgcagacaaagcacttttaacggcacttgaacactcaaaaccagcaaatgagtgggaacaaaaacctaagcaagcttcaaataccgcaactcattttgttgccattactgcttgcccaactggagttgcccatacatttatggcagctgaagcgttacaacaaggtgcagaaagacttgggtatcaaatcgatgtagaaactcaaggttctgtaggtgcgaagaatattttatcacctcaagcgattgctgatgccgatattgttattcttgctactgacattgaagtcaacactgaccgctttataggtaagcgtgtctatagatgtagcactggttttgctttaaaacaaaccgacaaggcttttgctgaggcaattgctaatgctcaggttttagaacaaggtaaacagcaagcaacaactgaaaataaggataaaactgaaaaagttggtgtatataaacacttattaactggtgtttcttatatgctgcctatggttgttgcgggtggcttgctaattgcactttctttatgttttggcctaaatgcagcggaacaagctggtagtctgccagccatattaaaacagattggcgcagcagcatttaccctcatggtacccatgctgtcgggttatattgcatattcgattgcagatcgccctggtcttgcaccaggtttaatcgggggattattggcagcacagttacaagcaggttttttaggcggtattgtttctggtttccttgcaggttatatcgcgttatttatagctaaaaaagttaagctcccaactagtttagagtctcttaagcccattttgattattccattattaggaacattatctgttgggctgattatgttctatgtggtaggtcaacctgtagcgcatatttttgagttaatgaaagatttcctcaacaatatgggcacaacaaatgctgtattaatgggaattattctggcaagtatgatgtgtattgatttgggcggaccaatcaataaagctgcttatgcttttacagtcggactacttactaccaatacctatatgccaatggcagccacgatggcaggcggtatggttcctgcaattgggatggcaattgcaactttcctcgctagaaataaatttagtactggtgaaaaagatgcaggtaaagctgcatttgtgcttggtttatgctttatttcagaaggtgcaattccatttgcagcaaaagatccaatgcgcgttattccaacctgtattctaggtggcacagtaactggtgcattagttgctttatttcactgtgagcttgtgactccacacggcggtgtatttgtattactgattccaaatgcaatcaatcatgcgtggttgtatcttgcagcaattgcggctggaagtatcgtaacgggagtaagttatgccatcattaaaaagaatcaagaagaaaaattattaacaaactca

SEQ ID NO: 8678 - DNA, 2856 bp, Acinetobacter baumannii
atgctagcactagagcctcaacatattcatatgaatcaacatgctgttgataaaacacatgcattaaagtgtctagtagatatattagaaaaagatgggttagttacgcctgaatatataacgggactcatcaatcgtgaacaacaaagcgcgacttatttaggccaaggcattgccattcctcacggtactcctcaatcacgtgaatatattttaaaaacaggtatccgcttagcccatttccccgaaggcgtgatctgggatggagaaaataaaatttatttagctgtagtgattgcagcaaaatctgatgaacatttgcaagttttgcaaattcttactcgtgcattaatgcatgacgtcagcgaacaagtaaaaaatgcttctaaacctgagcagattatcgaattactacaagctcagccattatctttagcgcttcatgaaaatcttattcaaaccgaaatcgatgcacaagatatcgaagatttattttgggcagcttctcaaacactcaaaaaacataattttgtaaaatgtggttttctaagttcacttgatccagaacaagccattcaactgcaagatcaaatctggtccatttctagcgatcactttgttcagcaaccagctattagcattactaaaccatcacaggcattagagctaaatggtaaaaagctgaacaccctcgtttgtatagcagccaatgaccaactcgataatgaaagatttaatcgtttaattgatattttatttaaccctgagcaagttgccgagctagataaaactcaaacaccaaacgaaattgcaaaaattattggagctgacgttgttcctgactggcctcaacgttcagtagtactggcaaatgcacacggcttacatgcccgaccagctacacaccttgtcaatcttacaaaaacctttcaaggcgacatccaagttgcagtagacgatggtagctttgtttctgccaaaagtttaactcgtcttttagcgttaggttgtaagcgtggccaaactctacgttttatcgctgagccagaaaccgatgccgtagaggctttagatcaagttattttggcagtgcagcaaggcttaggtgaagaagttgaagcgctacctgtaaccagtgaaacacctgaccagctccctgctcaaacggtaatatcaaatgctacgacattgggtaacaatacgggcattgcagcatcaagtggcttagcttttggacctgtccatgtgattaaaccaaaggtttatcaatatgaacgtatgggttcaggcgtaaaagtcgagaaagaaaatttagatattgccctacatgcagtaaaaaacaatattcaccaagtcatagccaaagctgatgcctctgaaattaaacaaatctttcgagctcacctagaaatgcttgatgatcctgatttaattaatggtgtatatcaaaaaatttatcaaaatttatcagcaccagctgcgtggcatgaacatattgaagctgcagctaaagcacaggaagctctaccagatcgtttactcgctgaacgcgcaacagacctacgtgacattggcgacagagttttaacccaattatgtggtgaagtggttattgaagagcctaaagagccttatattctaatcatgcatgacgttgggccaagtgatgtcgctcgtctcaacaaagaccgtgtcgcaggtattctaactgctataggtggtgcaagtgcgcatagtgcaattgtcgcacgtgctttaggcattcccgctattgttggtgctggtgaacaagtcctagaaattgatccgaaaagcactttacttattaatggtgatacgggaacttttgttttagatccagatgttgcacaaatcgaacaagccaagcaagagcgtgagcaacagcgtcaaattcgtgaagaagctgaacgtcatagccacgagccagcaattaccttagatcaacaccaaatcgaaattgcagccaatttgggtaaagttcaagcgacagcacaagcagtagaatgtggtgctgaagcaattggcctacttagaaccgaacttgtttttatgtctcatagcagtgcacctaatgaggctgttcaagaagctgattaccgagttgtattagatgcacttgcaggtcgcccgcttgtggtacgtacattagacgtaggtggtgataaacctttaccttacttaccaattgctgaagaagaaaacccattcttaggtttaagaggaatccgtttaactttaagacgccctgaacttttaaaacagcaattaaccgctctactaaaagcatctgataatcgtccgttacgaattatgttccctatgattggacgcgttgaagaatggcgtgctgccaaagcaattcttgacgaagtaagagcccaacatccatgtggcaatttacaagttggcattatgattgaggttccgtctgctgctttacttgcaccggttcttgcacaagaagtcgactttttcagtatcggcacaaatgacctgacccaatatacgttagcgattgaccgaggccacccaatactctcagcggaagcagacggattacatccaagtattcttaatttgattgatcaaacagtgaaagctgcccacaaacatggcaaatgggtaggaatctgtggtgagcttgcagcagacccgaaagctgtccctattctcatgggattaggcgtagacgaactgagtatgtccccaaatagcattcctttagtaaaagctcaaatccgcacactaagctatagccatgctcaaaagcttgcgcaacaagctttactatgcgatagcgcccctgctgtgcgccagctatctgaacaagactta

SEQ ID NO: 8679 - DNA, 1104 bp, Acinetobacter baumannii
atgcaacaacaatcgaatatgcaaaataaattcttgatagatgctgagatcggggatgacgatgtcacattgcctaatttacctgctatcgatgttcctatcgttgagtcacctgttaagcaagaagtaaaagctgaagaagttgtcgaggctgcaccttctacagaacctgagcaaccaaaatctggtttctttggacgaatgaaagaaggcttgagcaaaactcgccgtaatttcaccgatgggatggttaatatcttaattggtgggaaagaaattgatgatgagttgcttgaagaagtcgaagagcaattattagttgcagatattggtgttgatgcaacaaaaacgattattaccaacttaactgaacgtactgctcgtggtgatttgatctattcacattcactttataaagccttgcaagaagagttagttgctttgcttgctccacgtgtgaagcctttgcatattgaccctaataaatcaccttatgtgattttaatggttggggtaaatggtgttggaaaaacaacaacaattggtaaattagcgaagcgtttacaaggtgaaggcaaaaaagtgatgttggcggcaggtgatacattccgtgctgctgctactgaacaattgcaaatctggggtgagcgtaacgatattgctgtagttgctcaaggtcatggtgccgatagtgcatcagttatttttgatgcttttgaaagtgcgcgagctaaaggtattgatgtactgattgcagatactgcgggccgtttgcataacaaaagtaatttgatggaagagcttaagaaagttaagcgtgttatgcaaaaaattgatgcaacagcgcctcatgaaattatgttggttgtagatgcgggtactgggcaaaatgcaatcaaccaagtacaagaatttgaccaggctgtcggtttaacaggtattaccattactaagttggatggtacagcaaaaggtggagtattatttaatattgctagtcgtactcatgtgccaattcgtttcattggtgtgggtgaaaaaattgatgatttaagaccattctcggcgaaatcgtttgttgcagcactatttgaaactgaaaaa

SEQ ID NO: 8680 - DNA, 1584 bp, Acinetobacter baumannii
atgatttctgaaagcgtggttgatctttcgcggttccaatttgccatgaccgcaatgtatcactttcttttcgtacctttgaccctaggccttgcatttattctggctattatggaaaccacttacgttatatctggtaaagagatttacaaggatatgactaagttttggggaaaactatttggtattaactttgccttaggcgtaactacaggcttaaccatggagttccagttcggaacaaactgggcatattactctcattatgtaggtgatatattcggtgcaccattagcaattgaaggcttaatggcattcttccttgagtctacatttatcggtctattcttttttggatgggaccgcttaagtaaagttcaacatctaggagtaacttggttagttgccctaggttctaacatgtcagcgctctggattttagttgcgaatggctggatgcaaaaccctgtaggtgcagcatttaacttcgaaactatgcgtatggagcttgttgatttcggcgcacttattttcaacccggttgcacaggttaaatttgtacatactgtttctgccggatatgtaacaggtgcgattttcgtactcgccatttcaagctactatctacttaaaaaacgtgaccttcccttcgcacgtcgttcatttgcaattgctgccatttttgggcttgcttctacactttcagtaattttactcggtgacgagtcgggttatgaactaggtgatgttcaaaaaactaaactcgctgcaattgaagccgaatgggatactcaccctgctcctgctccgtttactttgtttggtgtaccaaaccatgaagaaatgcgaacagattatgcagttaaaattccatacgcattaggcctcatcgccactcgttcaactacgaaagaagtcactggtttgaaagacttaatgcaacagcacgaagttcgtattcgtaacggtatgcttgcttatgctgagcttgaaaaattacgtgctggtgatcgctcaccagagttattagcttcatttgagaaaaatcaaaaagacttaggctatggtctacttcttaagaaatatgctccgaatgtagtcgatgcaagcgagcagcacattcaagcagcggtaaaagatactattccgaatgttacagctctgtttttctctttccgtgcaatggttgcttctggcttcttaatgctgcttcttttcattttagcaacttgggcagtagcgaaaagaaatgctgagaataaaccttggctacttaaatatgcattatttgccctaccacttccgtggattgctgcacaaactggttggtatgtagcagagggcggccgtcagccgtggtctattggtgaaattttacctacgcacttatcagcttcaagtttaagtacgggcgatgtgtggggctcaattctcgctctggcagcgttctataccatacttttgattattgaaatgtacttaatgattaagtttgctcgcttaggtccaagctcacttcacactggtaaataccattttgaaaaacaagagccaaaagcagctgttaatggggaggctttatca

SEQ ID NO: 8681 - DNA, 1635 bp, Acinetobacter baumannii
atgacccattttatttttgtcactggtggtgtggtttcatcgctaggtaaaggtatttctgctgcttctgttgctgcacttttggaagctcgtggcttaaaagtcacaatggttaaaatggatccttatattaatgtcgatccagggacaatgagcccattccagcatggtgaagtttttgttaccgaagatggtgcagaaacagatctggatctgggttattacgaacgtttcttacgtcgcgcgaaaatgaccaaactaaacaacttcactagtggtcgtgtatatcaagacgttttaaataaagagcgtcgtggtgattacttaggtggtacagttcaggttattcctcatattaccgacaatattaaagaacgtgtactccgcgcgggcgaaggctatgatgttgctatcgtagagatcggtggtaccgtaggtgatatcgaatctttaccgtttatggagtcggttcgtcagttaatggttgagctgggccataaacgtaccatgcttatgcatttaactttgttgccatatattaagtcagcagcggagttaaaaacaaaaccaactcagcactctgtaaaagagttactttcaatcggtattcagccagatattcttatctgtcgtactgagtatgatgttgatgctgacactaaacgtaagatcgcgttattcacgaacgtagaagctcgtgcggttgtcgtgtgtaaagatgcgaaaacgatctatcaaattccacgtggcttctatgagcaaaatgtagatgacctgatttgtgaacgttttggttttactgatttaccggaagctgacttaactgattgggataatgttgtagaagcattacttaacccagaatacacagtacgtgtagcaatggtcggtaagtatgttgaattaccggatgcttataaatctgtaaacgaagcattgttacatgctggtattaaaaatcgcgtaaaagtacaaattgattatgtcaatgctgaagagcttgaaagtcaagatgtttctattttgaaaacagctgatgcgattttagttcctggtggttttggtgagcgtggtactgaaggcaaaatgaaagctattcaatacgcacgtgaaaatagtattcctttcttgggaatctgtttgggtatgcagttggctgttattgaatatgctcgccatgttgcaggtatgccagaagcttcttctacagaatttaaccgttctacaaaatatccattgattggtttaattaccgaatggttagatgagcgcggtgaattacaacagcgtagccttgagtctgacttaggcggaacaatgcgtttaggtgcacaaaaatcagaattggttgaaggcacaaaaactcgtgaagtttacggaaaagctgagattaccgaacgtcatcgtcaccgttatgaaatgaataatcgtttcattgaagcgattgaacaagcgggcatgaagatttctggttattcttcagcgcaacatttagttgaaactgtagaaattcctgaacatccttggtttattgctgtacaattccacccggaatttacaagttcaccacgtgatggacatccattatttgctagttttattgacgctgcaaaaacacagcatcaaaaaagtaag

SEQ ID NO: 8682 - DNA, 4097 bp, Acinetobacter baumannii
tttaccagttatggtcttgattcgattgttgctttgtctgtgtctggggatttagaagatctgacgaaattagaacttgagccaacactattatgggattacccaacaatcaatgcgttggctgaatatcttgtttctgagttgcagcagggagttgcttcatgaacaaccttgcacgactagaaccggaagttctgtcgcgtcatgcgatttctgcagagcagcttggcatttggtatatccaacgtcttgagccaacttgcagtgcctacaatatggtggtggcctttgatgtgaaggttaaccaaccattaggtaacaagccaatagaaatactagaagcggtaatgcatgattatccgctactgcgcgtaagcatgccagccaatgatcagggaattgagcaactcatctgggatcgcgtgtacccgaatatcatcttttctgatgctcgtcatattgaaacttctgatttgacgcaattggttgaacaggacaccaagcagccatttgacctgactcagccaccgttatggcgtattcattgttatgaacgcggtcaaaatcattatgtaatcgcatttgtgattcatcatgcgctcatggatttttggtcaattggtctattgctgcgagacgttagcaaacgttttggactcgttgcagagtcggatgcagtgaacggaatcgagtttgcacagtatgccgataagcagcagagcagcgtgattgatgatactgatgagagcttaattttctggaaaaatgcactgaagcatgcaccacatgtgcatagcattccgcttgattacccccgtccagccgtacagcaacataaaggtagttcactggttttccgtgtgcctgagtcagtgtcatctggtcttgtaaacttagcaaaagattatgagatcacattgttcgggcttgtgctatctggcttttatattttgctgcacaaactatctaatgaaaataatctagtgattgctacgcccgtagcaggtcgacttgaacgttctttacgtaatgcattgggtcagtttgtcaacacgattgctattcacatagacatcgatgctgatcagactttacgtcaatttacgcaacaggttcaggaacaattaagacaaagcctcaaacatcaaaaagttgccttttctagagtagttgaagctgtcgcaccaaaacgtgatggaagtattaatccattggctcagataggaatgttctgggaacgtctgggtggtatggatgagtttaaagaactactcctaccaatccagactccggccactttggttggacaagatttgacgttaggaagttttccggttcgccagcaagaaggacagttggatattacgctggaaatgggcggtgaatatcaaggtgaactcgttggtgtattgaaatacaacactgatctattttctgcgcagtctgccgagaatatggtgcaactgctgcaagctgtactatcagagatggtggctcaccctgaacgtaagatcgttgagctagatatcgctcctgattataaagatggcattcagttcgaggctctccgtggaaaggtgactgattatgctcagcatgatctattcgcaatgattctcaagcagattgatgagcgtggtgacaatcatgctttgacctcaaacgatcatacggttagctatcgtgagttaggtcaacatattgcgggtattgctgaatatttgcgtgcacacggtattactcaaggtgatcgtgtaggtctaatgttagaccgcacagcgttattgccagcagcaatccttggaatctgggcggcaggtgcagcttatgtgccactggatcctaatttcccaactgaacgtctacagaacatcattgaggatgccgaacctaaagtcatcttgactcaaaccgagttaatggatgctcttaacgtttctatgccttgcttagatatcaatcaagctggtgttgtggcacttgaacaggtgcgcgagacgcttgcctttggtgacattgcttatgtgatgtatacatcaggctcgacaggtaagcctaaaggtgtccgtattgggcatccttcaattatcaatttcttgctatccatgaatgatagattgcaagtaactgctgaaactcagttgttagcaatcaccacgtatgcatttgatatttcaattcttgaattactcattccgctaatgtacggcggtgtggtccatgtttgcccacgtgaggtatcacaagatggcaatcaattggtggattatctaaatgctaagcctatcaatattctgcaggcaacaccggctacttggaaaatgctcttagacagcgaatggagcggcaatgcggggttaacggcactctgtggaggcgaagcgctagatactattctggcagaaaaactactcggtaaagtcggttgtctatggaatgtctatggtccgaccgaaactacagtgtggtctagtgcggctcgtatcactgatgcaaagtatattgatttaggtgaaccactggcgaacactcagctttatgtccttgatgaacagcagcgtttagtcccaccaggcgttatgggtgagctttggattggcggtgatggtctggcagttgattactggcatcgccctgaactgacagatgcccaatttagaacattgccatctctaccaaatgccggccgtctctaccgaacaggggataaagtctgcctgcgtacagatggtcgcttgactcatcacggacgtctggattttcaggtcaagattcgtgggttccgtattgaactaggtgaaatcgagaatgttctcaaacaaatcgacggtattacagacgcagtagtgctagttaaaactacagctgacaacgaccagaaactggtggcgtatgtaactggacaagagcttgatattgctggtttaaaaaagatcctacaaatccatcttccagtttatatggtgccaagtgcgtttatccgattggatgagtttccaatgacggctaacaataagttggatcgtaaggcatttcctgagccgatctttgagcagagcaatgattatgttgcaccgcgtgatccgattgaaatcgaactgtgtactacctttgagcagatcttgtctgtcaagagagttggtatacatgatgatttctttgaattaggtgggcattcactattagctgtgaagcttgtcaatcatctcaaaaaggctttcggtactgaactgtcagttgctttattagcacagtactccactgtagaacgtctgggtgagatcattcgtgaaaataaagaaatcaagccgtccatcgtaattgaactccgccgtggaacctatgaacaaccgctgtggctgttccatccgattggtggcagtaccttctgttatatggagctttcgcgtcatcttaatccgaaccgtaccctacgtgctattcagtctcccggactgattgaagcagatgctgcggaagtggcgattgaagaaatggcgacgctctatattgctgaaatgcgaaagatgcagcctcaagggccttatttcctcggtggttggtgtttcggtggggcgattgcctacgagattagccgtcagttgcgtcaaatgggacaacaggtcacaggaattgtcatgattgatacgcgtgctccaattccagaaaatgtacctgaagatgccgatgatgccatgcttttgtcttggtttgcccgtgatttggctgcgccttatggcaaaaagttgacgattccagcgcaatatttgcgtgagttgagtccagatcaaatgtttgatcatgtacttaaagaagctaaggccattaatgttctgcctctcgatgcagacccatcagatttccgactttactttgatacctatttggcgaatggcatcgcactccagacctatttcccagacccagaagattttccaatccttttggttaaggccaaagatgagccagaggattttggggaaagcttaggttgggatcaactagtcaaagacacgttgacacaagtcgatttgcctggtgaccactcatcaattatgtacgctgagaatgtcgtagctgtagcccagacaattgat

SEQ ID NO: 8683 - DNA, 1483 bp, Acinetobacter baumannii
cctgaacatgcttatggtcaggacagatcataagcataaaaagacaaaacaagaaaatctaaaaaggacattacgatgcaaacaatacatggaaacggttcacatcctaaaaagtcgtcacatcgattagcaggcatctctagcatggtcggcaccacgattgagtggtatgacttttttgtttatggtgcagcagcagccctcatttttaacaagttatttttcccaaatctggacccacttacaggtgtgcttgcagcatttgcaacctatgctgttgggtttattgggcggcctttaggtggtttagtctttggccatttcggtgacaagattggccgtaagtcaatgttgttgctaacgctgatgctcatgggaattccaaccgtattgattggcctattaccgacttacgaatcaattggatattgggctgcaattggtttggtgatcttgcgatttattcaaggtatggccatgggcggtgagtggggcggtgccgtgcttatggcagtagaacatgcacctgaaggtggtaaagggttctggggaagtttacctcaagccagtaccggtgggggcttaatgctcgcctcaatcgcactaggactggtgtcattattacctgagcaagcattgtttagctggggctggcgattaccatttcttgccagcattattttactggcagtgggttggtatattcgtgtaaaagtgcctgagtcaccagactttgagaaagtaaaacaacagtccgaagaagtcaaagttccggcctttcaggtttttaaaaaccatccaaaacaacttatcactattattttggcgagagctgctgaaaatgcatggttctatattgcttcaacctttacgttagcttacaccaccacacaattaggtattccacgacaagacattttatttgccactatttgcggtgcagccgtgattttatttatgacaccgttatgcggacatttgtccgataaagtcggtcaacgcaatatgtttatgtttggtctatgtgtattggcactttattcttatccattttttagcatgctcaataccaaagatccggtactggtctggacggcaattgttttggcaattggtgtggtgttcccgattatgtatgcgccacaagctcagctttttgctcgtcaatttcctgctgaaattcgttatagcggtatttcgatttcggtacagttggcaggtgttttgggtggtggtttagctcctatgattgccactaaactgctcagtattgggcaaggcaatccatatttaattatgttttatatcggaagtatggctgtagttgcgattatatcgacatcatttatgccgcgtgattggagctataaaaaggatgagacttattataagaaagcaaacctaaatctaaaaaccaagattgattgatatgcactcatcttgctcggtcatatgtatagattgctatgtaaaaattaggact

SEQ ID NO: 8684 - DNA, 918 bp, Acinetobacter baumannii
atgagtcaggtcatgaaatatcacaaatgggcatttatttttcccattctggcagtactgatttggtctttaaatattgtagtcacccgctatgtctcggactatatttctccggtaagtatcagcttttatcggtggttaatcgcttttattattttgactccatttatgtttttgtctgtttggagacaaagacgactagtaataccctatttacctaagcttgctgtgttaagtgcatttgggatggtgctttatcaaggcttggcttatacggctgcccattatactagtgcaaccaatatggggattgtgaatgcatttattcccatctttacgatctttgtttcgcttgccattttaaaagatgtgcctaatcgctttgcagtttttggcagtattttgtcttttgctggtctgctatacgttatgtcccaaggaaatattaataagcttttaagtggtggcgggcaccttggcgatgcattgatgattattgccgtattcttctatgcattttatggagttttcttaaagaaatggcagctcccacttccaattatgacaagcttatacgttcagattgggttttccgtgctgttccatcttcctttaattttctggtttggtctggatgccttaaatgcacaaaatgcgccaagtgcaatttatgccggtgtatttgcttcactcattgcgccgctagtttggatgttagccgtacaacaacttgggccaaatagaaccagtatctttatgaatcttgtgccagtgttcaccgccattattgcaagtatctggttatctgaacaatggacgatatatcacactttcggcggaattatgattctggtgggcattatcatggcacaaaagaaggttaattctaaaaaatcagatcttttgccagagcaaaat

SEQ ID NO: 8685 - DNA, 639 bp, Acinetobacter baumannii
atgacaaataggcatgaaacagatcttgttaatgaggacacgttaaaaaagaagcgtggacgccctaaatgctttgatgagcagcaagtgttagagaaagctatgttacttttttgggaacatggctatgaagccacctctattagtgacttaacacatgctttagaaattacagcgccgagcctatatagtgcttttggcgataaggcaggtttgttttacaaaagtattgactactatctcgctcatgaagcatgtcctattgaaacgatatttttagaagcaaaaactgcaaaaattgcttttgagttatatctttatgacaatgtaaaacgattggttcaacccaataagccagcaggttgtatgttggtagttgctgctatgaactgttctgatgccacacaagaggtacagcaaaatcttttagataagcgaataaagaccaaagaaaaattattaaaacgtctcgaacaaggtgtagagcagggcgatttgcctactaatgcccctctacaagaaatgactgatttttatgcgactgttattcaggggcttaccattcaggccagagatggtgcaagtaccgaacaattacataaagtggtagaacatgccatgaaagcttggacattattt

SEQ ID NO: 8686 - DNA, 1542 bp, Acinetobacter baumannii
atgcaacaactgaatccatccgagatcagtgcgctcattaaacagcgtatcggagatctggacaccagcgcgaccgctaaaaacgaaggtaccattgttatggtatccgacggtatcgtgcgtattcacggtcttgctgatgcaatgtacggtgaaatgatcgaattcgacggcggcttatttggtatggcactgaacctagaacaggattcagtgggtgccgttgttttaggtaactacctaagccttcaagaaggtcaaaaagctcgttgtacaggtcgtgttttagaagttccagttggtcctgaacttcttggccgtgtcgtagatgctttgggtaacccaattgatggtaaaggcccaattgatgcaaaattaactgatgctgttgaaaaagtagcaccaggtgtaatttggcgtcaatctgtagaccaacctgttcaaactggttataaatcagttgataccatgattcctgtgggtcgtggtcagcgtgagttgattattggtgaccgtcaaactggtaaaacagcaatggcgatcgatgcgattatcgctcagaaaaactctggcattaaatgtgtatacgttgcgattggtcaaaaacaatcaacaattgcaaacgttgtacgtaagctagaagaaactggcgctatggcgtatacaactgttgtcgctgctgcggctgctgatcctgctgcaatgcagtatttagctccgtactctggctgtacaatgggtgaatacttccgtgaccgcggtgaagacgctcttatcatttatgatgatttgtctaagcaagctgttgcttaccgtcaaatttcattgcttttacgtcgtccaccaggtcgtgaagcgtatccaggtgacgtattctatcttcactcacgtcttcttgaacgtgcttcacgtgtatctgctgaatacgttgagaaattcactaatggcgcagtaactggtaaaactggttctttaactgcattgccaattattgaaactcaagcaggtgacgtatctgcattcgtaccaacaaacgtaatttcgattactgacggtcagatcttcttagaaacatcattattcaatgcaggtatccgtcctgctgtgaacgcgggtatctctgtatctcgtgttggtggttctgctcaaactaagatcatcaaaaaattgtctggtggtatccgtaccgctttagcgcaataccgtgaattggctgcgtttgctcagtttgcttctgaccttgatgaagcaactcgtaaacaacttgaacatggtcaacgtgtaactgagttaatgaagcaaaaacaatatgctccttactcaattgctgaccaagctgtttctgtttatgcatctaacgaaggctatatggctgacgtagaagttaagaaaatcgtagactttgatgctgcgttaattgcttacttccgttcagaatatgctccgttgatgaaacaaatcgatgaaactggtgactacaacaaagacatcgaagcagcaatcaaagctggtattgaaagctttaaagcgactcaaacttac

SEQ ID NO: 8687 - DNA, 468 bp, Acinetobacter baumannii
atgaatatcaacctcacattgattggtcaagcgattgcgtttgcgttttttgtcgcattctgcatgaagtttgtttggccaccactaatcaatgcgattagtgagcgtcagcgcaaaatcgctgatggcttaaatgcagcagaaaaagcgaaagctgaccttgccgatgcacaagcgcaagtaaagcaagagcttgatgcggctaaagcacaagcggctcaattgatcgaacaagcgaaccgtcgtgcagcgcaattgatcgaagaagctcgtactcaagctgcggctgaaggtgagcgtattcgtcaacaggctaaagaagctgttgatcaagaaatcaattctgctcgcgaagaattacgtcaacaagtagctgccttggcagtaactggtgcagaaaagatcctgaaccaacaagttgatgcagaagctcataacgccatgctgtctcagctggctgctaaactt

SEQ ID NO: 8688 - DNA, 873 bp, Acinetobacter baumannii
atggctgctgaagaacatgccctcacttcgacagagtatatcaagcatcacttgaccaatatgacctatggcaaaatgccagatggtacatggaaattggctgagactgctgaagaagctcattcgatggggttcactgcaattcacttggattcaatgggttggtcaattggccttggtgtgattttctgtttgttattttggatagttgcgagagctgcaaatgctggcgttccaacaaaattccaatctgcaattgaaatgatcattgagtttgttgactcaagtgtccgtgatacttttcatggcaaatcacgtttaatcgctccacttgcactcactattttcgtgtggattttcctcatgaacttaatggacttgatcccagttgactggattcctcaagttgctgcatttgtgggtgctaacgtatttggtatggaccctcaccacgtttacttcaagatcgttccatctacagatccaaacattacccttggtatgtctttatctgtgtttgtacttatcttgttctacagcatccgcgaaaagggtgttggcggtttcgtaggcgagttggcacttaacccatttaacccaagtaatccagttgcaaaagcgttgcttattccagtgaacttgattttggaattggtaacattccttgctcgtcctatttcattggctctccgactattcggtaacatgtatgccggtgagttgatctttatcctgatcgcattattgccgttctggattcaatgggcgttatctgtgccttgggcgatcttccacattcttgtaatcacgttgcaggcattcatctttatgatgcttaccatcgtttacttgagcatggcaagcgaaaaacat

SEQ ID NO: 8689 - DNA, 543 bp, Acinetobacter baumannii
atgtcgagcggcttaaattatggctttagacatggctattggaatgcgatcggtttgcaaatcgccttgttaattcaaatcatgattgtagctgcgggtgtaggtgttctattcgcaacgaccccgttggcttttcaagccgttaagtggttcggggtagcctatttattgtatttagcttatttgcagtggacagcacctgtaaaagacatagaaattcaacacgaaaaaaaggataaatctgtttctgctctgctgttaaatggatttgtggtcaatatcagtaatcctaaagcgattgtatttctattggcagttttgcctcagttcttagatttaagcaaacctcaatggatacaatatctgattatggcagctactatggttacgattgatttgattgtaatggctggttatacagggctagcttcaaaagttttaagattgctacgttctcctaagcaacaaaaatatttgaaccgtggttttgctgtcatgtttagttgtgcagcgttattgctaagtacggtccatcaagcagcc

SEQ ID NO: 8690 - DNA, 918 bp, Acinetobacter baumannii
atgactgctcaatctgtcattttgccattaccatcagatcatgcccgttttattgttcttcgtttaaaagatttaacaattgctgaattaaaagaacaactcgaagctttattcgaaacacgtgaccgtctcattactcaacattcagacgcacaaattaaaacagcagtcgcttttggtccagaactttggaagcagctttacagccaatctcctgctggttttaaacaacttgaaccagaaaatggcgcattcaatatgccagtcgtaccagctgatgtgcttattcacattgccagtatgcgttctgatatctgttttgctttaagccaagcattttttgaagggattaaagataaagttgaagttctggatgagcgtgtatgcttccgttatttcgatggtcgcgatattactggctttatagatggtactgaaaaccctcaatttccagatgaccgcgcagaaactgctctcctcccagaaagtgctggagtatttgcagatggtagtttcatatttgcgcagcgctatgcacatgacttggaaaaatggaaaaaacttaaagtcgatgcacaagaaaatgtcatgggccgtaccaagcttgaatctattgaattagatgatgatgttaaaccggaaaatgcccatgtcgctcgtactgtcgttgaagatgaggaaggcgaagaaatggaaatcctacgtcacagcttaccttatggtgacggtcgaggtgatcaaggtttattcttcattgcttacactaaagacctgagcattattgatgcgatgttaaagcgcatgtttggtacaagtggggatggcatccatgaccgcttattgcacttcgtgacaccacttgacggggcatattactttgcaccaagtgaagaactattagaagaaattttagaagag

SEQ ID NO: 8691 - DNA, 1788 bp, Acinetobacter baumannii
atgaatacggcaatacaagcagctctcgaccatgcagtgcaaacccttcagcaagaaggtgtgcttccttcggattggaataattcaagcaatttaacacgcaccaaagaccgaagccatggcgattttgcttctaatattgccatgatcggctctaaagctgctggtatgaaaccacgcgatttagctgagaaaattctagcagcgctaccagaagttgcagacatcagcaaagctgaaattgcaggccctggttttatcaatttctttttaaatgcagatcaacgttttgcaattcttgaccagattcaagctcaaaaagaaagctttggtcgtagccaatcaaatgcagctaaaaagattcaagttgaatttgtttctgcaaacccgacgtctagcctacacgtaggtcatggccgtggtgctgcttatggtatgactgttgcaaacttgcttgaagcaacaggtgctaaagttgaccgtgagtactacgtgaatgatgctggccgtcaaatggatattttggcgacttctacttatttacgttatttggaattacttggacaaaaccttgtattccctaaaaatgcatatcaaggcgattacgttaaagaaatcgcacaaggcatcattgataaagatggcgatgcttacgttcgtgaagttgcgaatgtttataaagatgtaccagaagacgtgcaatatgctgaagagctagatagcgaaggcaacaaagtcgtattatctggtgataaagaaaaacacattgacggtcttattgccaactcacaacaattattaggtgaaggctaccgcgtattccatcaagcagcacttcatgccattttagatgatattaaagatgatcttgctgacttcggcgtaacctttaaccaatggtttagtgaagcatctcttagcgcaaaaattgacgaagcgttagaaacacttgatcaacgcggcttcttatatgaaaaagatggcaacatctggtttaaatcgactgaatttggtgatgaaaaagaccgtgttgtgaagcgccgtaatggtcaaacgacttactttgcatctgacattgcatatcacttaaataaactacaacgtggttatactgaccttgttgatatttggggttctgaccaccacggttatatctctcgcgtaaaagctgcgattgatgcaatgggttatgactcgaaaaaattaactgttcttttagttcagttcgtaagcttatggcgtggtggtgagatggttcaaatgtcatctcgttcaggtcagttcgtgactttacgtgacttgcgtaaagaagtcggcaatgatgcagctcgtttctactacgtgatgcgtaaaagtgaacaacacattgactttgaccttgaccttgctgtttcacaaagtaaagacaatgcggtgtattatattcaatacgctcatgcacgtatttgccgtatgctagaaaaagcagcaagcactggcttacaatttgaagtaagtgctgctcgttcacatgctgcacgtttatcacttgatgcagaaactgaaattcttgctaaactggctgcatatccagacgttgtgttacgtgctgctaatgcatatgaaccacaccaagtaggtaactacttaaaagaattagctgcgctattccacggttggtacaatgaacacaaagttttaagtgatgatgctgaacttacacaagcacgcttattactttcaatcaatgtacagcaagtattgcgcaatggcttagaattactcggtgtttctgcacctgaagccatg

SEQ ID NO: 8692 - DNA, 1566 bp, Acinetobacter baumannii
atgactaccaatactcaaattactgaagatcgtatcctgatcctggatttcggctctcaatatagtcagctcattgcacgtcgtgtacgtgaagctggtgtttactctgaaatgtatgcctttgatatgtctgaagaagacatccgtgcttttaagccaaacggtatcattttatcaggtggacctgagagtgtgcatgaagagggcagccctcgcgcaccgcaagtggtgtttgaattaggcgttccagtattgggtatttgctatggtttacaaaccatgtctgaacagttaggcggtaaagttgagccgggtactgtacatgagtttggttatgctgaagttgatatcgttaaacgtgaccaacttattggcaacttacaagaccgcgaaaaccaactacacgtttggatgagccacggcgacaaagtgagccagattccagaaggttttacgattactgcaagcacaccaagctgtccagttgctgctgtaagtgatgaaacacgccgtttttacggtgttcagttccacccagaagtaacacacacggcaaaaggtgaagagctactttctaatttcgttcacaaaatttgtggatgtggtggcctttggacacctgaacacatcatcgatttgcgtgtagagcagttacgtgagcaaattggtaacgagaaagtacttttaggcctttctggtggtgttgactcatctgttgttgctgcacttttacacaaagcgattggtgatcaattaacatgtgtatttgttgataatggtttgcttcgtttaaacgaaggtgaccaagtgatgcaaatgtttgctgaaaacatgggtattcgtgttattcgtgcagatgcagaagcacgtttcttaaatgctctagctggcgttaccgatcctgaagcgaagcgtaaaattattggtcgtgagtttattgaagtatttgctgaagaagcacgtaaacttgatggcgtgaaattcttggcgcaaggtacaatttacccagacgtaattgaatctgctgcaagcaaacaaggtaaagcacacgttattaaatctcaccacaatgtgggtggtttaccagacgatttagcatttgaattggttgagcctttacgtgacttgtttaaagatgaagtacgtaaattaggtactacacttggcttgccacatagcatgatctaccgtcatccattcccgggcccaggtttaggcgttcgtattttgggtgaagtgaaaaaagaatatgcagatattcttcgtcttgctgatgatatctttatgcaagagcttcgtgacagcggttggtatgataaaacagctcaagcatttgctgtcttccaacctgttaaatcagtgggtgtagtcggtgatggccgccgttatgcatgggtgattgcgcttcgtgcagttgaaacagttgactttatgacagctcgttttgcacatttaccatacgaattggttgataaaatctcaacacgcattatgaacgaaattaaagatgtatcacgtgtggtatacgacgtgtcatctaaaccaccagcaacgattgagtgggaa

SEQ ID NO: 8693 - DNA, 1116 bp, Acinetobacter baumannii
atgaaagtaggtctggtcggttggcgcgggatggtcggttccgtccttatgcaacgtatggttgaagagaatgattttgctcatattgagccattctacttctctaccagtaatgcaggtggtgaagctccttcatttggtggtaagactgccccagcacttatggaagctacagacattaccagtctgaagcaaatggatgtcattattacctgtcaaggtggtgactacacgtctgaagttttcccaaagttaaaagcaactggttgggatggctactggattgatgcggcatctactttacgtatgactgatgatgcaatcatcgttcttgatccggttaaccttaatgtaattaaagacggcttagcgaaaggtactaaaactttcgttggtggtaactgtacagtatcactcatgttgatgggtgttggcgcacttttccaaaataatttggttgagtggatgactgcgatgacttatcaagcggcatcaggcgctggcgcacaaaacatgcgtgagttgttaacaggtatgggttatttatataacaataccaagactttgttagatgatcctaaatctgcaattcttgatattgaccgtcaagttgccgagttacaacgcggtgagggtttcccttctgcgaactttggtgtgccacttgctggttcattaattccttacattgataaacagcttgaaagcggtcaatcaaaagaagagtggaaaggacaagttgagaccaacaagatcttaggtaactctcaaatcgttcctatcgatggtcactgtgttcgtatcggtgcaatgcgttgccactctcaagcattaaccatcaaattgaaaaaagatgttccgcttgatgagatcgaagatatgattcgtaactcaaaccagtgggctaaagttgtaccaaatacacgtgaagcatcaatgactgatcttacacctgttgctgtaactggtaccctaactgtacctgtaggtcgtttacgtaaactcaatatgggtaaagagtacctcggcgcattcacagtaggcgatcagttactttggggtgctgctgagcctctacgtcgtatgttacgtattttagtagaatacaaaagctca

SEQ ID NO: 8694 - DNA, 219 bp, Acinetobacter baumannii
atggccaataaagaggaactcattgagttcgaaggcgttgtcaccgaaacgcttcctaatacgatgttccgtgtacgtcttgaaaacggtcacgaagttattgcacacatttctggtaaaatgcgtaaacactatattcgtattcttactggcgacagtgtgaaagtcgaaatgactccatatgacttaaccaaaggtcgtattacgtaccgtgctcgc

SEQ ID NO: 8695 - DNA, 954 bp, Acinetobacter baumannii
atggccaaaaattattatgaagaattaggggttaaacgagaagcctcagctgatgaaattaaaaaagcgtatcggaaattagctcgtaaatatcatcccgacatcagcaaagaaaaagatgcagaagaaaagatgcaggcaattaatgttgcctacgacaccctaagtaacccagagaaaaaagctgaatacgaccaaatgttagaccacccacaaggttttaatggttttggtcaaggggcagctcaaagtggtttcgatggtgccaggttttatcgtcaaggttttacgggcggtgagcaagcagactttagtggctttgaagacttatttggacgctttggtgcaggctttggcggtggacaacagcaatatcaaagacaacaacgtagttatcgaggtgaagaccagcatgccagcatagaggtcgatcttgatattgcttaccatggatcaacacaacacattaccctacaaattccaaccattaatgcctatggtgagccagaggtacaacgaaaaaccttacaggtaaaaatacctaaaggcatgaaagaaggtcagcaaattcgcctaagtggacaaggacaaagtggtattaatggtggtgccaatggcgatctttatatcgagattcagtataaagatacagatcgtgtgcatgtcgaaggcagtgatgtatatttgactgtagatgtagcgccatgggaagccgcattagggcaaggcattgaagtaaaaacgcctgcgggacctttacacgtcaatttacctaaaaatgcaaaacaaggacaacagctacgtttaaaagacaaagggataccaaataaaacgccaggccatctttatttaattttaaatattgtattcccaccggcgcattctgaaaaagaaaaagaagcctatcagcaattggcagaagcctttgcttcattcgaacctcgttcatctcat

SEQ ID NO: 8696 - DNA, 945 bp, Acinetobacter baumannii
atgtctaacgaaaaccaaaagccaacatctccaactgagcaggcacaaagttcagacaaagttagcccattcctaagctcaccgttaccgcaaggtacccctcaagggcaacaacaatctttacagcaaaccttaacagatacaccagttagcggttctgtgccgaaatacaatttaccacgtggtgcaggcaacactggcaacgttggtgaaacaacacactttggttattcaacagttcgaactgaagataaagcacaaaaagttgctgaagttttccactcagttgcaagcaaatatgaccttatgaatgacttgatgtcatttggtattcaccgtttatggaaacgctttgcaattaacatgtctggtgttcgccgtggtcaacatgtgttagacattgctggtggtacaggcgacttagcaaaagtatttagccgtgaagttggcccgcagggtcatgtggtactttcagacattaacgaatctatgctcaatgttggccgtgatcgtctaattgatgcaggctgtaccaatgtcgattttgtacttgccaatgcagaaactttagaaccttttgcagacaacagctttgaccttgtaaccattagctttggtttacgcaacgtgacagataaagacgcagcgcttgcttctatgttccgtgtgttaaaaccaggtggccgcttacttgttcttgagttttctaaaccagtatttgagccattctcaaaactttatgacctttactcattcactgctttaccgattatgggtaaattggttgccaatgactcagaaagttataagtacttggctgaatcaattcgtatgcacccagaccaacgtaccttaaaaggtatgatggaaaatgctggcttccagaactgtgattatcacaacctgactggcggtattgttgctgttcatcgcggttttaaactg

SEQ ID NO: 8697 - DNA, 954 bp, Acinetobacter baumannii
atggactggactacaaaggactaccgattctttgcacggttgtttaacccaaacgttgtgctttatacagaaatggtgactacgggcgcgattctatttggcgatgcgaaacgccatttgggctataacgctcaagaacacccaatcgtattgcagcttggcggctcaaacccacaagaacttgccacttgcacaaaaatggctgaagactggggttatgacgaagtcaacttgaatgtaggctgcccaagtgaccgtgtacagaacaataaaatcggtgcatgtttaatggcagagccagacttggtcgctgaatgtattcacagcatgcaaaaagtggtgaatattccggtaacggttaagcaccgtatcggtattgatgacatgcagtcttacgaagaaatgctgcactttgtagatactgtagcagcaacaggttgtactcactttgttgtacatgcccgtattgcgatattgaaaggtttgtctccaaaagaaaaccgagaagtaccaccgctacgctatgaagatgtttaccgtttaaagcaagaacgcccgcatctgactattgaaattaatggtggtattaaaacttttgccgaaactcaagctcatttacagcacgttgacggcgtcatgattggccgtgaagcctatcacaacccttacttacttgctgagctcggccaactttggaacctagaagcaccagatcgtttcgatattatggaacaaatgctaccgtatattgaacaacgtctagctgaaggtgcacccctctctatcattacacgtcatattttaggtctattccaaaatttaccgggcgctcgcaaatggcgacaagctctaagtggtggaaatgcaaaaactttaactgacgtcgagaatgcaattcataatatgcaagctgctattatccgtactgaagagtatttaaaggaacaccaattt

SEQ ID NO: 8698 - DNA, 2150 bp, Acinetobacter baumannii
atgaagattagcgaaaattggttacgcacatgggttaacccagcaattgatagcgatacattatctgatcagttgactatgcttggtcttgaagtagatgagctggcacctgttgctaagccatttactggcgttgtagttggtgaagttctaacagttgaacagcaccctgatgcagaccgtctgcgtgtaacaacagtgaatattggttcaggtgagcctttacaaattgtatgtggtgctcctaacgttcgtgctggaatgaaagcacctgtggcaactattggtgcaatattaccgggtgattttaaaatcaaaaaaggtaagcttcgtggtgttgagtcacaaggcatgctgtgcggtgcctctgaaattgaccttgaagataaaatcgatggtttacttgagttacctgatgatgctccagtaggggtaaacattcgtgaatacttaaaacttgatgataatgtcatcgatattagtattacaccaaaccgtggtgactgctttagtattcgtggtatcgcacgtgaagttgcagtgattaaccaactgcaaatgaatgagcctgaaatcaaatcagttgatgcgacaattactgatgagaaaaaagtagtcatcaacacggatggtgctccacgctacttaggacgtgtcattaaaaatgtaaatgttaaagctgcgacccctgaatggatggaacaggctttagcacgttcaggaattcgtactcatagtattttagttgatgtaacgaattacgtcctcatggaattgggtcagccaatgcatgctttcgatttagctaaaatcgaagggactgtacatgttcgccaagctcagccacaagaaaagttacagcttttaaatgatcaagaagttgaactacaagatgatgtgatggttattgcagatgaccaaaaagcactagcaatcgctgggatcatgggtggtctagcatcaagcgtaactgatgatacgactgatatcttcttggaaagcgcattttttgctccgcttgcgattgctggacgtgctcgtcgctttggtttacatacagattcttcacaacgttatgaacgcggtgtagattttgaattaccattaattgcgatgaaccgtgcttctcagcttattcaagagttggcgggtggtgagttcggtccaattactgtagttgaaaaatctgatttacttccgaaacgtgaagcgattgaacttaagcaagctcaagtagaccagttgttgggttacaaagtagcggcagagttcattacagatgcattaactcgattaggttgtgaagtcactgttcaagcgaatggtgaatggagcgtagttccaccatcacatcgctacgatatggcaatttatcaagatttgattgaagaagttgcacgtattgatggttatgacaatattcagatcagcttaccaagtatggatgttcaacttgctaagtaccaagatcgttttgaaatcgcgcagttacgtcaaacggtagtcactttagggtatcaagaagcgattagctttagctttgctgatgcaaaacttgaaaagcaattgaacccgcaagtaagtccgttaatgttggcaaatccaatctctagtgatttggctgtaatgcgcagcacattgctttcgagtttaatcccttgtgtacaatataatttaaaccgtcagcaaagccgtgtacgtttctttgaactaggtttacgttttgattatcaaaatgctaattctattcaggatctgaagcaaattcctacattggctttagttgccgtaggttctcgtgaacctgaatcatggcatgctaagccacagccaatggatttcttcgattttaaaggtgaagtagaagagattttagctgctggacgtgtcaaagttgagtatgtacgttcagagcgtccatggttgcatccagggcaatctgctgaaatcttagttgatggccaatcaattggttacttgggccgcttgcatccatcttctagaaaacgaactagatttgtagcacaacttgggttgccgagcttgatcaggctgctgttttgcaatcttatgtatctaattttacagaattatcacgttttccttcggttagacgtgatattgcgcttttaatctctgataatataaat

SEQ ID NO: 8699 - DNA, 978 bp, Acinetobacter baumannii
atgtcactggaagccctgaccacagaagcgcttgctgccattgcagcagctcaagaccttgttgcacttgatcaggtgcgtgtgcaatttacagggaaaaaaagccagcttgcagaacaatcgaaagcattagggaaaatggaccctgaagaacgtaaagtacaaggtgctgcgattcatgctgttcgagaaacaattaataacgctttaactgagcgtcaaacagcattacaacaagctgcactggcgcaaaaattagcaagtgaaaccattgatattactttgccaggccgtggacagcgcgttggtacagttcatcctgttactcaagtgcaagaacgtatttgccagttctttactaaagctggctttacggttgctacaggaccagaagttgaagatgactatcataacttcgaagcattaaatattcctgggcaccatcctgcacgtgctatgcatgatactttctatttcgatgcaaaccatttgttgcgtacgcatacttctggtgtgcaaattcgtaccatggaaacaagccagccgccaattcgtattgtctgtccaggccgtgtataccgctgcgactcagaccaaacgcattcgccaatgttccatcaaattgaaggtttgtacgttgctgagaacaccagctttgctgaattaaaaggtttattaattaacctactgaatgaattttttgagaaagatttaaaagtacgtttccgtccatcatatttcccatttacagagcctagtgcggaagtggatatcatggatgagcgtggacgttggttagaagtattaggctgtggcatggtacatccaaatgtattgcgtgctgcggggattgatcctgataaatataaaggctttgcttttggtttaggggtagaacgttttgcaatgttgcgttatggcattaatgacttgcgtatgttctatcaaaatgatgtgcgtttcttacgccaatttgcc

SEQ ID NO: 8700 - DNA, 336 bp, Acinetobacter baumannii
atggattacaacaagcacttgtttgacctgaaacagaagcaaaaagatgccaagaaaaaacagcatcaagtgcaagtgaaggaaatcaaactacgcccagcaactgatgtaggtgattatcaagttaagcttcgtgctattctgaagttccttgaagaaggcaacaaagttaagatcaccttacgtttccgtggtcgtgaaatggctcaccaacaacttggtttagctcaattgcaaaaaattgaagcagacgtagctgagttaggggttgtagagcaagcaccgaaaatggaaggtcgacaaatgggtatgttacttggaccgaaaaagaaaaag

SEQ ID NO: 8701 - DNA, 1920 bp, Acinetobacter baumannii
atgccaattatcacattgccaaatggcgatcaaaagagttttgatcaccctgtatctgttatggaagtcgctcaaagtattgggcctggtttagcaaaaaataccgttgctggacgagtaaatgatcgcttagttgatgcatgtgacttaattaccgaagactcgaccttacaaattatcactccaaaagatgaagaaggtcttgagatcattcgccactcttgtgcacaccttgtagggcacgcagtaaaacagcttttccctgaagcaaaaatggtgattggtccggtcatcgaagaaggtttctattacgatatctggatgccacgtccttttacactagatgatatggcagcgattgaagagcgtatgaaaaagctcatcgatcaagattatgacgttatcaaaaaaatgacaccgcgtgatgaagtcatcaaagtattcactgaccgcggcgaagaatataaattacgtcttgtggaagacatgcctgaagaaaaagcaatgggcttgtactaccaccaagaatatgtagatatgtgtcgtggtccgcacgtaccgaacacaaaattcttaaaatcattcaagcttactaaaatctctggtgcttactggcgtggtgatgcgaagaatgaacagcttcaacgtatctatggtactgcctgggctgataaaaaacagttagcagcttacatcaagcgtattgaagaagctgaaaagcgtgatcaccgtaaaattggtaaagcattagacttattccatatgcaagaagaagcaccgggtatggtgttctggcatgcaaatggctggactatttatcaagtactagaacagtacatgcgtaaagttcagcaagacaatggttaccaagaaatcaaaactccgcaaatcgtagattttacgctttgggagaaatctggtcatgcggcaaactatgcagaaaacatgtttacgactcattctgaaagtcgtaactatgctgtaaaaccaatgaactgtccttgtcacgttcaagtgtttaaccaaggattaaagtcttaccgtgatttaccaattcgtttagctgagtttggttcttgtcaccgtaatgagccatctggttctttacacggtattatgcgtgttcgtggttttactcaagatgatgcgcatatcttctgtactaaagaacagatcggtaaagaagttgcagactttattaaactcactttagatgtttataaagactttggctttgaagaagttcaaatgaaattatctactcgcccagaaaagcgtgtaggggatgatgcactttgggatttagctgaaaaatctttggcagatgctttagatgcagctggtcttgaatgggaattgcagccgggtgaaggcgcattctatggtccaaagattgagttctctttaaaagactgtcttggtcgtgtatggcaatgtggtaccattcagtgtgacttcaacttgccagttcgtttagatgcttcttatgtaactgaagaaaacgagcgtgatcaacctgtcatgttgcaccgtgcaattcttggtagttttgagcgttttattggtatactaattgaacactacgctggttttatgccgccttggctatcacctgtacaagcatgtgtcatgaatattactgattctcaagctgaagcaagtgagcaagttgtggcaaaactcaaggaaaatggtcttcgtgctatttctgacttgagaaatgaaaaaatcggatttaagattcgtgagcgtactctagagcgcattccttacctgttagttcttggtgatcgagaagttgaagaaggtacagtgaatgtacgtactcgctcaggaaaaaatttaggtactatgtcagtggatgctttcattgacttagtgaaatctgccgtcgccgaacgtggccggtatattgtggag

SEQ ID NO: 8702 - DNA, 357 bp, Acinetobacter baumannii
atggctcgtgtaaaacgtggtgtagtggctcatcgccgtcacaaaaaaattcttgctcgcgctaaaggttactacggtgctcgttcacgcgtttaccgcgtagcgttccaagcggtaatcaaagctggtcaatacgcttaccgtgaccgtcgtcagaagaaacgtcaattccgtgctctatggattgcgcgtatcaacgctggtgctcgtcaaaacggtttgtcttacagccgtatgatcgatggcttgaaaaaagctcaagtgatcatcgaccgtcgcgtattagctgacatcgctatgcatgatgcagtagcatttgctgctttagctgaaaaagctaaaggcgcattagctgca

SEQ ID NO: 8703 - DNA, 222 bp, Acinetobacter baumannii
gtgccgaacaggtgcccaaaagaggttactatggctaagttaaaaactcgccgtggtgcagctaaacgcttcaaagcgactgcaaacggttttaagcgcaaacaagcattcaagcgccacattttgaccaaaaaatctgctaagcgtatccgtcaattgcgcggctgtgtaatggttcacgtaagtgacgttgcttcagttcgtcgtatgtgcccatacatc

SEQ ID NO: 8704 - DNA, 414 bp, Acinetobacter baumannii
gtggaacgctggttagagtttatggggaatcaccccattttgtttggtacactcggagtcttgatcgtattgttcttcatttttgaaggtcaacgtaacggtcgtaaaatttctccacagtcgcttggtattttagtgaaagcgaaaaatgcccttttgattgacttacgcgatagcaaagacttccgcgaaggtcacattagtggtagccgcaatattccttatagccaaattgcaagtcatgctgatgaattaaaagcaagtgaccgtccattggtatttatttgcaacctagggcaagttgctggtagcgctttacagaaagtcgctcaccatgacagctatcgccttgatggtggtatcagtaactggaaagctcaaggcttacctctcgttaaaagcaaaccaaaagct

SEQ ID NO: 8705 - DNA, 1302 bp, Acinetobacter baumannii
atgaggagagaggcgatggacagccttacaatggataatgttgagcaattaacacttgcagagcttcgagagctgcaaactaaacggttaaaacaaaccctgacttttgtatatgaaaatagtccggtctataagaaaaagttcgatgaagcgggtgtgcatcctgacgacttcgtaactttagacgatctggcgaagtttccatttaccaccaaacaggatttaagagacaactatccgtttggtatgtttgccgtaccgcaagagcaaattgtgcgtttacatgcatcatctggtacaacgggtaaaccgactgtggtgggttatacccaaaaagatattaatacttggtcggacattgttgcgcgttgcttacgcatggcgggtttaaccgcgaaagatatggttcaggtggcttatggctatggactatttacaggtggtctaggtgcacattatggtgccgagcgcttaggtgcaacggttattccaatgtctggcggacaaactgaaaagcaagttcagcttattcaagactttaaaccgactgcaattatggttacgccatcatattgcgtgagtattattgaaaaactcgaacaacaatttggtactgcacgtaatacgtctttaaaagtcggtatttttggtgccgagccgtggaccaacgaactgcgccgtgaaattgaagaacgtctcaatattaaagcactcgatatttatggtttgtctgaggtgatgggtccgggtgttgcgatgcagtgcttaggtgaaggcgaagggctaaccatttgggaagatcatttctacccagaaattattaaccctgaaacaggtgaagtttgtaaagatggtgaacttggcgagctagtctttaccaccattaccaaagaaggcttgccgattattcgttaccgtactcgtgatttgacccgcttactaccgggtgaaaatctggcaatgcgtaagatggataaaattgtgggccgtagcgacgacatgctgattattcgcggtgtgaacgttttcccgacccaaattgaagagcaaattttgcaagttccacatttagttccaaattatgaaattttggtgactaaaaaaggccatatggatactttgcatattcgtacagagatgtgtcataactgtactatacaggccaatcaacttgctcaggagttgatgaaacgcattaaaaccatgattgggattagcgttactgtagaagttgtgacagaagcgaccttacctcgttcggaaggtaaggcaaagcgggtaatcgatatgcgtcagattgct

SEQ ID NO: 8706 - DNA, 1224 bp, Acinetobacter baumannii
atgaaacgtgtagttgtgacaggaatggcaggaattacctctttaggtgaaactgccgatgacatctttgcgcgatttgaagccggcaaaagcggtatacgttacatgccggagtgggagcaatatgttgaccttcggaccaagcttgctgggcctgttgaaacatttcatattccaaaacattttaaccgtaaggttacccgtggtatggggcgtgtagcactcatgtctgtggtttgtgccgaaactgcgttacaaaatgctggtttgcttggacatgaaattttatctagtggcgaagcgggtgttgcctttgggtcttctgcgggtagcgtagatgccgtgggtgagtttgcaagcatgttgcttcaccagagcatgagtaagattaatgcaaccacttatattcgcatgatggcccacaccagtgcggtgaacatgaccgtatattttggcctaaaaggattaactttacctacctcaagcgcgtgtacctctggttccatggcaattgggcaagcgtatgaagcaatcaaatatggtaagcaacaggtcatgattgcgggtggtgcagaggaactcagtgcggcaggtgcggcagtttttgatgtattgttcgcgaccagtggaatgaatgatcaacctgaaaaaacaccacgaccatttgatgctaaacgagatggattggtgattggtgaaggcgcaggctgtttaattctggaagaatatgaacatgccaaagcacgaggtgcccatatttatgcagaagtgattggctatggtagtaataccgatggtcaacatgtaactcgtcctgaatcagaaatgatggggcgctgtatggagttagcgcttaaagatgcatctgtagaagctaaagacattgcctacgtaaatgcacatggtacttcaacagatcagggggatgtggcggagagccaagccactgcaaaagttttaggctataaaccaattagctctttaaagagttattttggacatacgctgggggcgtgtggggctattgaagcttggttaagcatcgaaatgatgaatcgtggccgttttattccaactttaaatctagatgaaatcgactcactatgtggtgaactagattatatcgttcagcagccgagaaatttggatgctgacattattatgagcaataactttgcttttggcggaattaatacttcgcttatttttaaacgtgttaaacaa

SEQ ID NO: 8707 - DNA, 617 bp, Acinetobacter baumannii
cgttatgctggcttaattacactcgcgattgagggacaagactatgagttcttacaactagattatgccgacagatgcaaaagtctatgttccagtaacgaacttgcatctaattagccgttatagtggtggcgacccggagtttagcaccgttacataaaagtcggaactgactgcttggagtaaagctaagcgtaaagcattataacaaaattcattgactgttgcagctgagcttttacatattcaggcacgtcgtcacgtcaaaatcctggctttgcttgtgaactggatcagtcgcttctatattgcagattttgcacagcgtgttttgcgtattgaagaaatccctctgatcatggcctaattgcaattgtaagccacgctctatgatattgcatgcaagctaataaccaagtggattaggttggtgtgtggtgatgtgggtcttgggaaaaccgaggtggccatgcgtgcagcatttgtcgcagtacaataatggcgaacaggttgctgttttagttcctacgactttactagctcaacaacattatgagtctttcaaagaccgttttgctgattggccagtacgtattgaagtgctctcacgttttggc

SEQ ID NO: 8708 - DNA, 247 bp, Acinetobacter baumannii
gcggcaacagctcaacaaaccgcaagtcacttgttgcatgctgcccttcgtcaaattttaggttcgcatgtacaacaaaaaggctctttggttgcaagtgatatcttacgttttgactttgcaaatgaccaacctgtgtcatttgaacaactaccaacaagttgaacgtctcgtaaatgctgaaatcattgcaaatactgctgtaacaactgaactactcgacattgaaactgcgaaagcaaaaggc

SEQ ID NO: 8709 - DNA, 612 bp, Acinetobacter baumannii
atgacagaacgtagtccattacgagtcggaattggcggaccagtcggttcaggtaaaacagcacttacacttaacttatgccgtgccttgcgtgataaatataatatggcagtggtgacaaatgatatttataccaaagaagactcaaactttttaacccgtaatgaagcgatgtcaccagatcgtattgtaggtgtcgagacaggtggttgcccgcatacagcaattcgtgaagatgcctcaattaatttagctgcgattgatgatctgtgcgaaaaatttgatggcttagaactcattattattgaaagcggtggtgataatttagcagcaacatttagcccagagctttctgatttaactttatatgtcattgatgtagcaggtggcgaaaagatccctcgtaaaggaggaccgggtattaccaagtcagatttactgattattaataaaactgacctcgcaccaatggtgggagcaaacctcgatgtgatggaccaagatgcaaaacgcatgcgtggtgaaaagccatttttattttcaaacatgaaaacacaagatgggcttgaagaaattattcaatttattgagaagcaagggctgtttaaggct

SEQ ID NO: 8710 - DNA, 651 bp, Acinetobacter baumannii
atgcgcattatcttactcggaccacctggggcaggcaaaggtactcaggctcagttgatctgtaagcgctacaatatcccacaaatttcaaccggtgatatgctccgtgctgcaattcgtgaaggtactgaattaggtttaaaagctaaaagtgtgatggaatctggcggtttagtttcagatgaactcattatcggtttagtaaaagaacgtattgctcaacctgactgcgtgaatggttgtattttcgacggcttcccacgcactattcctcaagcagaagctttggaaaaagaagggatcagcattgatcatgtaattgaaattgatgtacctgatgaagaaatcgtaaaacgtctttctggtcgtcgtcagcatcctgcttctggtcgtgtttatcacgttgtatacaatccacctaaagtggaaggtaaagatgatgaaactggtgaagatcttgttcaacgtccagatgaccaagaagaaacaatccgtaagcgtttagcgtcttatcacactgaaacagaacaattggttggtttctaccaaggtcgtgctgcttctggtgaaaatgcgccaacttatgacaagcttgatggcttgcgtacaattgaagatgtacaaaaagatttgttcaacatcttagacaaa

SEQ ID NO: 8711 - DNA, 927 bp, Acinetobacter baumannii
atgattacagggatcgagattttaaagtttggagttgaagatagagccgcttcaaacaagtttttggcagattttggtttaagcaaaagtacttcggatattgaaggtgcagatttataccagactcaaaacggcagcaagatttatctatttaattgtgatgataaccgtttaccgcctgctattgagcaaggttcaactttacgtgaagttacgtggggtgttgaaaatgctcaagaccttgaagacttggcagctcgtttagccgatgtagacggttttaaacgtactgaaaatacagttcagtgtcttgacccaaatggcatgaccattcgttttgaacaaagttttgtaaaagaagtaccagaacttaaaacggaaggtattaaccaatacggcaacattcaacgtgtgaatgcagcaagtcctgtctatgaaaaaggtcaacctgttgcgattggacatgtggtgttcttcacaccggatttagcaactactgaaaacttctatattgaaaaagtaggctttcatttatctgatgcttacaaaaatcgcggtgcattcttacgttgccgcggtgaaggttatcaccacgatttattcttacttagcgttccaaataaatctgcgggcctaaatcacgttgcatttgttgttcgtgatattcatgaggtgattggaggcggtttacatatgaaccgttcagagtggtcaacctttattggaccgggacgtcatccaatttcttctgcttatttctggtacgtcaactcaccattgggtggtgcatttgaatattacaccaacgatgattatttgaccgaagaatggcagccacgtgtagaagaacatcgtctagagcttttcaccgagtgggcgattgaaggtggtcttgatgacaaaacccgccgtcaggtgaagcctgtg

SEQ ID NO: 8712 - DNA, 792 bp, Acinetobacter baumannii
atgagcttccaagttgaaggaaaagttgcagttgttaccggtggctcatctgggattgggctggctgctgttgaaatactggttgcagagggtgcaaaagttgcttggtgtggtcgcgatgaagaacgtttaaatgcttctaagcactatattttagaaaaatttccacatgccaatatttttaccaaagcatgtaatgttttgaaaaaagaagaagttcagcaatttgccaaagaggtcaaactcaatttgggcaatgtggacatgcttattaacaatgctggacaaggccgtgtttcaaattttgaaaatacgcaagatgaagactggatgaaagagattgagctgaaatatttcagtgttttacatccggtacgggcttttcttgacgacttaaaacagtcggcaaatgcctcaattaccaatgtgaactcgttactggcattgcaaccggaaccgcacatgattgcgacttcatctgcacgtgctgcactgttgaatttaacccattcgttggcacatgaatttactcaatatggcgttcgtgtgaattcgattttactcggaatggtcgaatctgcgcagtggaaacgccgttatgaaacccgttcagatttaaatctgtcatgggaagagtggaccggcaatatcgcaaaaaatcgtggcattcctatgcagcgtttaggccgtccagaagagcctgcacgtgctttagttttcttggcatcaccattggcatcttacaccacaggttcggcaatagatgtctcgggtggttttaacaaacattta

SEQ ID NO: 8713 - DNA, 1560 bp, Acinetobacter baumannii
atgccacttcatttttacttaaccgaggcagagatgacgcaacaaaacgctcaatcgacttctgaaccaactatttccgaaaacgatttaattgcacagcgtcatgccaaattaaagcaaatccaagatgttgcaaaggaaactggaaagagtccttggccaaatacattcaaacgtgaacattacgctgctgatttacaagaacaatttaaagatcagtctaaagaacaaatcgaaagcgctgaacatgtttatgtaaaagttgctggccgtgtcatgttaaaccgtggttctttcatggtgattcaagacatgactggtcgtatccaattatatgttgaccgtaaaggtttaccaaaagatacgcttgaaactattaaaggtttagaccttggcgatattattgctgctgaaggttatatcggtcgttctggcaaaggtgacttatatgtacaccttgaaggttttgaacttcttacaaaatcgcttcgtccattgccggataaatttcatggtttgaacgacacagaagttaaatatcgtaagcgttatcttgacttaattgtgaatgaagaaacgcgtaagacttttgaaattcgtgccaaagtcgttgcaggtattcgcgcatttttaaccaatgaacgtttcatggaagttgaaacgccaatgatgcatgtgattccgggaggtgcgtctgcacgtccgtttgagacgcatcataatgctttagatatgccattattcttacgtatcgcaccagagctttatttaaaacgtttagttgttggtggttttgagcgtgtgtttgaaattaaccgtaacttccgtaatgaaggggtatcaacacgtcataaccctgaatttaccatgatcgagttttatcaggcatatgctgattataaagacttgatggctttgactgaaaacatgcttgaaaagctagcaattgatattttaggtacgactgatgtgccttaccaaggcgaagtgtttagctttaaagggccattcaagaaaatctctatgtttgatgcgattttggagaataatccgcagttcacacctgaaaatgtaggcgatcgtgaattccttgcaaaatttgttcgtgaggaattaaaagaagaagttaaacctggttttggtttaggtaagcttcaaacaatcgtatttgaagaaacggttgagactaaacttcgtcagcctacttttattactgagtacccagcagagacttctccacttgctcgccgtaatgatgataatccgcacattactgatcgttttgagttctttattggtggccgtgaattggcaaacggctttagtgagttaaatgatccgattgatcaagctgaacgtttccaagcgcaagttgctgaaaaagatgctggtgatgatgaagcaatgcattacgatgcagagtttgttgaagcacttgaatatggtttacctccaacagcgggtgaaggtattggtattgaccgtttggttatgctttttgcagatgcaccaagtattcgtgatgtgattttgttcccgcatatgcgtcgtaaagaaggt

SEQ ID NO: 8714 - DNA, 1808 bp, Acinetobacter baumannii
atgcctttatacaaagctccattacgtgatatgcaatttgtactgcatgaaatgcttcaaacagaacaaaactatcaaggtttaagaaaatatcaggaaagcgtaaatcgagaattaattgatcaatatttagaagcagcagcagatttttgtgaaaatgagttggcgccgattaaccaaaatggtgatcaggaaggctgtcatttaaatcaaggtgtagtcacaaccccgaaagggtttaaagaagcctaccaaaaatatgccgagctaggttttacctcgctaacggccgatccagaatatggtgggcaaggcttgccgacattgctgcggattgcgatttctgaaatgttatgtggttctaattgggcttgggcaatgtatccgggattgtctcatggcgcaatgagaacaattgagcatcatgggaccgagcaacaaaaacaaaagtttttgactaaactcattagtggggcttggaccggaacgatgtgtttaaccgaatcccatgcaggctcggatcttggattaattagaactaaagccgaaccaaatccggacggtagttactcaattacaggcgaaaagatttttatctcggcgggtgagcatgatctttctgaaaatattattcatattgttttagcccgtttacctcaagcacctgcagggactaaaggtatttctctatttattgtgcctaaatttaatgtgagtgacgacggtcaggtgctggaccgtaataaagtcgtctgtagcgcgattgaacataaaatggggattcatggcaatgccacctgtgtacttaattttgatggcgcaaaaggttacttaattggtccggaaaatcgcgggcttaattgtatgtttacctttatgaataccgcacgtattggaacggcagtacaagggcttgctgcttctgaaatttcatttcaaggcgcattaagttatgccaaagagcgcctcgctatgcgttcgttatctggtcctaaatatcctgacaaaaatgccgatccaattattgtgcatcccgctgtacgttcaatgttaatgacacaaaaagctttttctgaaggtggtcgtgcgctggcttattttctggctcagcatgtcgatattgtcgaaagttcaaacgatcaggaacagcaaaaacactccgatgaattactggcttttttaacacccattgctaaggcctttttaacagagtcgggtaatgagtctgcaaagcatggcgttcaagtatttggcggccacggctttattgttgagcatggtatggagcaaattgtacgtgatgcacgtatctcgacattgtatgagggaacgaccgaaatccagtctctagatctgctggcacgtaaagtcctcaagtcggaaggtaaacttttaaagaacatgactgatttaattgatcagtttattagccagcaccaatccaatgaagtgctgaaaccttatctagaaaaattagctgagcttaagcagcaatggctgtcactgaccaaatcgattgcagagaaagccaagcacaacccctgaagaaataggagccgcttcagtagattatctttatttttcaagttacgttgtgttcgcgtatttgtgggtctcgaatggcacaagttgcccatgaaaaattagaatcgggtacacaagaggaagatttttataaagcaaaattaacgacagctaagtttttctatcaaaagcttttgcatcgtacacagagccatgccgcttctattgagtctggagctgaatctgtgatggagctcgatcaagatgcttttgcattttagtga

SEQ ID NO: 8715 - DNA, 1503 bp, Acinetobacter baumannii
atgtatcgctcgactatcaatgcagaagatcttaataggataatgatcatgcagcttaatgaactcgctttatttcgtcagcaagcttttgttgctggaaagtggtgcgatgcagaccatcaacaaacatccgaaattttaaatccagcgacattagagattattggtactgtcccgaatatgggcaaggctgaagccgagcgtgccattgaagctgccaaagaagcttggccgctatggaaaaataaaacagcaaaagatcgatcaattattttaaaaaaatggttcgatttaatcatttcaaatgcggatgaattggcttttattttaacgagtgagcaaggaaagcccttagctgaagccaagggtgaaattttatatgctgccagttttattgaatggtttgccgaagaagcaaaacgagtgtatggagatattattccaagcccatatccagatgctcgtattgttgtaaataaacagcctattggcgtcgttgcagctattacgccgtggaattttcccgctgccatgattacgcgtaaggttgctccagccttggcggcaggttgtccttgcattgtaaaaccagcaccagaaacgccttttactgctttggctttagtggacttagctgtgcaagcgggcgtgcctgctgaaatttttagtgtgattacaggtgatgcagttcatattggtgatgcgatttttgaaagtgatgtcgtacgcaagtttacttttaccggttcaacaccagttggcaaaatgctgcttgagcgttcagcaaaaaccttaaaaaaagtttccttagagttgggtggcaatgcgccgttcattgtatttgatgatgccgatttagaagcagcaattgagggagcgctcattgctaaatttagaaatgcagggcaaacctgtgtgtgcgtcaatcgattcttagtacaggcaggtatttatgaaaaatttattgctgccttaagccaaaaaattcaaaattttaatattggtaatggattagaagctgggcatgacattgggccattaattaatgccaatgcggtgaaaaaagttgaagctcatattcaagatgcattagataaaaatggtcgtcttgtggttggtggtaaaaagcataaagcgggtgaattgttttttgaaccgacactgattgcagatgttaccgctgatatggatgtggcaacccaagaaacgtttggtccgctagcagccgtatttaaatttgaaaacgagcaacaagcagttgaaatggcaaatgcaactgaatttggtttagccgcatattgttataccaaagatttaggccgtgcttggcgaatgagtgaacagcttgagtatggcatggtcggaattaataaaggccttatttcaaatgaagttgcgccttttggtggcattaaacagtctggtttggggcgtgaaggttctaaatacggtattgaagattatctggaaattaaatacaccttgtttggaggattgaatata

SEQ ID NO: 8716 - DNA, 591 bp, Acinetobacter baumannii
atgaaagctattttaacgaagaaaattattagctgtatcgcaattagtggtgttttaagcttcagtgcatttgagattatggcagcgaatcaacaaactataaatgatgggaagaatcactctaaaatattaaatgaaaaccatgaaaatttgactgatagtcaaattttcaagatattaagtacagctaataatggtgaaattaagcaggcaaaaactgcattgccaaaactaaaaatggatgaagctaagaaatatgctgaaatgatgattaaagaacattcagccaatgaaaaaaatgcacaagcgttggcaagtcggttacagttgatttcacaaaccagtaatcttagtaaatcattgcaaaatgatagtgataaaattgttagtaagcttaatcaaataacatcagatactgataaaaattatatgatgagtcaagttaaagttcaccgtaaagttttaacgataattgataagcagttaataccaaacacgaaaagttctgaattaaaaaatatgcttgtacaaacacgtgatgctgttgcgaaacacctaaaagcagctgaagatatatttaaaaatatgaaa

SEQ ID NO: 8717 - DNA, 3879 bp, Acinetobacter baumannii
aggttatgtattaattgtagccgcgtcttaacggtgacttatcctgatggcaccactgcaacagtggtggcaggcacagatggtagctggtcagtaccaaacccaggtaacctggtggatggcgatacggttactgcaacagcgactgaccctgcaggcaacacttcattgccaggtacaggcacagtttcagcagacatcacagcacctgtggttgcgctagatgatgtgttgacgaatgacagcacaccagcacttactggtacagtgaacgacccgacagccactgtagttgtcaatgtggatggcgttgactatccggcagtgaacaatggtgacggcacctggacgcttgcagacaatacactgcctgcattaacagacggtccacacaccattaccgtgactgcaacagatgcagcaggtaacgtaggtaacgatactgcagtggtgaccattgatacggttgcaccaaatgcaccggtgcttgatccgatcaatgcaacagacccagtgagcggtcaggcagagcctggttcaaccgtgactgtgacttatcctgatggcaccactgcaacagtggtagcaggcacagatggtagctggtcagtaccaaacccaggtaacctggtggatggcgatacagtgactgcaacagcaactgaccctgcaggcaacacttcattgccaggtacaggcacagtttcagcagacatcacagcacctgtggttgcgctggatgacgtgttgacgaatgacagcacaccagcacttactggtacagtgaacgatccgacagccactgtagttgtcaatgtggatggcgttgactatccggcagtgaacaatggtgacggcacctggacgcttgcagacaatacacttccaacactcgcagacggtccacacaccattaccgtgactgcaacagatgcagcaggtaacgtaggtaacgatactgcagtggtgaccattgatacggttgcaccaaatgcaccggtgcttgatccgatcaatgcaacagacccagtgagcggtcaggcagagcctggttcaaccgtgactgtgacttatcctgatggcaccactgcaacagtggtagcaggaccggatggtagctggtcagtaccaaacccaggtaacctggtggatggcgatacagtgactgcaacagcgactgaccctgcaggcaacacttcattgccaggtacaggcacagtttcagcagacatcacagcacctgtggttgcgctggatgatgtgttgacgaatgacagcacaccagcacttactggtacagtgaacgacccgacagcaactgtagttgtcaatgtggatggcgttgactatccggcagtgaacaatggtgacggcacctggacgcttgcagacaatacacttcctgcgttaactgatggtccacacaccattaccgtgactgcaacagatgcagcaggtaacgtaggtaacgatactgcagtggtgaccattgatacggttgcaccaaatgcaccggtgcttgatccgatcaatgcaacagacccagtgagcggtcaggcagagcctggttcaaccgtgactgtgacttatcctgatggcaccactgcaacagtggtagcaggcacagatggtagctggtcagtaccaaacccaggtaacctggtggatggcgatacagtgactgcaacagcaactgaccctgcaggcaacacttcattgccaggtacaggcacagtttcagcagacatcacagcacctgtggttgcgctggatgacgtgttgacgaatgacagcacaccagcacttactggtacagtgaacgatccgacagccactgtagttgtcaatgtggatggcgttgactatccggcagtgaacaatggtgacggcacctggacgcttgcagacaatacactgcctgcattaacagacggtccacacaccattaccgtgactgcaacagatgcagcaggtaacgtaggtaacgatactgcagtggtgaccattgatacggttgcaccaaatgcaccggtgcttgatccgatcaatgcaacagacccagtgagcggtcaggcagagcctggttcaaccgtgactgtgacttatcctgatggcaccactgcaacagtggtggcaggcacagatggtagctggtcagtaccaaacccaggtaacctggtggatggcgatacggtgactgcaacagcgactgaccctgcaggcaacacttcattgccaggtacaggcacatgttctcaggcaagatcggtcacatgcagcctgctgcgtatgctgctagtaatgagtcgtgttagaactaagtgattcatgtatagcctagcatacattagcttgttatcatgatgatacggatccagacatgcatactgtagttgtcaatgtggatggcgttgactatccggcagtgaacaatggccgacggcacctggacgcttgcagacaatacacttccaacattcgcagacggtccacacaccattaccgtgactgcaacagatgcagcaggtaacgtaggtaacgatactgcagtggtgaccattgatacggttgcaccaaatgcaccggtgcttgatccgatcaatgcaacagacccagtgagcggtcaggcagagcctggttcaaccgtgactgtgacttatcctgatggcaccactgcaacagtggtagcaggcacagatggtagctggtcagtaccaaacccaggtaacctggtggactggtcctgatacagttgacctgtcaatgcagtcaatatgacaccactgcagtcagacaatatcaatatgagccaggttacaggacacagtttcaccagacatcacagcacctgtggttgcgctggatgatgtgttgacgaatgacagcacaccagcacttactggtacagtgaacgatccgacagcaacagtagttgtcaatgtggatggcgttgactatccggcagtgaacaatggtgacggcacctggacgcttgcagacaatacacttccaacactcgcagacggtccacacaccattaccgtgactgcaacagatgcagcaggtaacgtaggtaacgatactgcagtggtgaccattgatacggttgcaccaaatgcaccggtgcttgatccgatcaatgcaacagacccagtgagcggtcaggcagagcctggttcaaccgtgactgtgacttatcctgatggcacaactgcaacagtggtagcaggcacagatggcagctgtttccagtaacatagcaaggtaagctggtcgattgctatactgtgactgaaatcgtatgtgtctctgtccggtaaggactatcttttgccctggtacacggcagtgttaacagcagacatcacagcacctgtggttgcgctggatgacgtgttgacgaatgacagcacaccagcacttactggtacagtgaacgacccgacagcaactgtagttgtcaatgtggatggcgttgactatccggcagtgaacaatggtgacggcacctggacgcttgcagacaatacacttccaacactcgcagacggtccacacaccattaccgtgactgcaacagatgcagcaggtaacgtaggtaacgatactgcagtggtgaccattgatacggttgcaccaaatgcaccggtgcttgatccgatcaatgcaacagacccagtgagcggtcaggcagagcctggttcaaccgtgactgtgacttatcctgatggcaccactgcaacagtggtagcaggcacagatggtagctggtcagtaccaaacccaggtaacctggtggatggcgatacagtgactgcaacagcgactgaccctgcaggcaacacttcattgccaggtacaggcacagtttcagcagac

SEQ ID NO: 8718 - DNA, 2424 bp, Acinetobacter baumannii
gcactcaatgatggtttaaaagcagaacttttatgcctatcgacaaatgcaacgattcaacttaaatcttttattggtgttcaggctgctgtagatattgtgacggagcgaggtgaattaactcgcgttacaggcattattactcatgctcaacagggccaatcagatggaagtctaactttatataagctgaccttagaagatccaaccgcattatggaaatatcgccgtaattcacgtgtatttatgaataaaagcgtggttgagatatgggaaatattatttaaagaatggcaaactaaaaatccgctatttgctgcaagtttaagtttagatttaagcggtctaacacaaacttatgatgtgcgtccttttgtgatgcaacataacgaaagtgactggaatttccttacacgcttacttcgtagtgaaaatatcagttggctcattgatgaagctcagcatattgttccaagtacagatacatctattcaagctcagaaactcaggttaattgatgccaatagtcaatatcagcctttagaccgtaaaacgattcgttaccaccgtagtagtgcggtcgaacaatatgacagtatgactcgcttaactgccgagcgttctcttcaacccaatgttatgcatatacaacgttggcaagcagaaatattagatcaagaagaagggattggaagtgttcaaagtaagcatcagcatagtgaacattatgacaatgctacacttggcttggagcaagcttggaactattcgcctgcatggattggtgacttaaagggtgaggatggggttactaaatctggaaatcaacaagttgaacgattaaaccagaacctccacaattactacgaggcacaggcgaaacgctttattgcacaaacaacagtccgcgatgcctatgtgggttactatttcgaattaaatgaacacccagaaatagaccagcatgaaagctcagataaaagctttttgattgtttctaaaaacttctttaatcagaataatttacctaaagatttaaatgatcaaatcaatggtttattggcgcaaagtaactgggcaattcaaaaccccgagaacagtgatgaacgccaagcgaatcaactgattttacaacgtcgtcatattccaacaacaccagcttataacccgcaaattcatagtccagtcactcatccacaacgcgcaaaagtggtgggtcctgaaggtgaagaaatctatgtagatgagtgggggcgtattaaagtccgcttcctatttacgcgtagtgatgaccatagccatgatggtggagcaggaaccaacaacaatgataccgattcagcttggattgacgttctaacgccgtgggctggagaaggttatggtgcgcggtttttaccgcgtatcggtgagatcgtcgttattgacttctttaatggcgatatcgaccgaccgtttgtgatgggtcgaattcatgaggcacagcgccaaccaaccaaatttgataacaaaggaaagcttcctgatactaaaaagctcagtggtatccgttctaaagaagtgtcaggtggtgggtttgggcaactcagatttgatgatacaccgggacaaattagtacccaactccaaagcagtcatggtgcaagccagctaaatctcgggaaattgagccatcctaaagataaagcggaaagtgaagaccgcggagaaggctttgaactgcgtactgaccaatggggagctttacgtgcggggcaaggtttattggtatccactcataaacaggataacgctaaaggagaccacctcgatgccgaagttgcgaaaaagcaacttgagggtagtcaaactaacagtaaagcactgagtgacattgctaaaaaccagaaaaccgatgaaatagaatcgattgaacagttaaaagattttgcctcacaaattcagcagcaaatcgctaaatttgaaaaagctttacttcttttgagttcaccggatggtatagctctaagtagttcagaagatattcacatctcggctgatgcacaaatcaatcagattgctggagacagcattaatataagtactcaaaagaatgtgattgcccatgcccaaaataggctgagcctttttgctgctcagagcgggctaaaagctgttgctgcacaaggtaaggtagaaatacaagcccagtcagatgctttagatgtacttgctaataaaggtatcaccatttcttcgacagaagactgtattgaaattagtagtcctaaagaaattgtaattactggtgcaagttcacaaattaccttaaatggttcgggaatctttccaaaaactggcgggaaatttcaggtcaatgctggacagcatgtgttccaaggcggcgcatcggcaagtgttcaatctagtttgccaccgccacca

SEQ ID NO: 8719 - DNA, 1104 bp, Acinetobacter baumannii
atgaagaaattgcttctcgctgccgcagttgcaactttgagcgtaaacgcggtgcaagcagcgccaactttgtacggcaaactaaacgtttccattaaccaagttgacaacaaaaatttcgatggtaaaagtgacgttaccgaagttaactcaaactcttctcgtattggggtaaaaggtgaagagaagttgactgataagctatctgctgtttatttagctgaatgggcaatttctactgatggttctggttcagatactgaccttagcgcccgtaaccgttttatcggtttaaaaactgaaggcgtcggtacgttaaaagtaggtaaatatgattcttacttcaaaacctctgctggtagtaaccaagacatctttaacgatgacacacgtttagatattacaaatattatgtacggtgaaaaccgcttagataacgtggttggttttgaattagaccctaaattattagctggtttaacattcaatatcatggctcaaactggtgaaagcacttctgatagcaaaaaaggcgaaactggtaaagacagcaaaaatgatagcttcgattcagtttcgacttctctaggttatgaaaataaagacttaggtttagcaatcgctgctgctggtgacttcggtatcaaaggtaaatatgctgcttacggtttgaaagatgtttatacagacgcttaccgtgtaactggttcttatgacattgctaaatctggttttgtagtaggtgctttatggcaacatgctgaacctactgatgacttgactgcatatggtcaaacatataaatcagatggttcaatcgataaagctggtaaagcttaccgtggtttagaagaagaagcatacgcggtaactgctgcttataaaattcctaacactaaacttaaagtaaaagcagaatatgcttctgctgaaacacaagtaagtggtcaggcagatcgtaaaattgacttgtatggtttaggtcttgattatcaaatcaataaacaagctcgcttctacggtatcgttgctcaacaaaaacgtgactggttgaatgacgacgacaaacaaactgttgtaggtactggtattgaatataacttc

SEQ ID NO: 8720 - DNA, 388 bp, Acinetobacter baumannii
aaaacaattacggtcgccgctgcggtgatcttaaatgaacaaaatgaattattgcttgtcagaaagcgtaatacacaagcttttatgcaggtaggcggtaaactggagccgaatgaggctccggaaagtgctatacagcgtgaaatcttggaagaaataggcagcccgtgtgtaatagaacagtttatagggcgttttgagacagcagctgccaatgaaccggatcacaagcttattagccatttatatttggttcgattaaaacatccccacaattgcagctgaaattgctgaaatgaagtgggtgaaatttaatgattccgagacaaaactcgcaccattaaccaaagaaattgtaattccgtggtgtgagcagaacttatctata

SEQ ID NO: 8721 - DNA, 534 bp, Acinetobacter baumannii
atgaaaaacattcagaaatcacttcttgcagcattaatagttgctggttatgcggtaaatactcaagcagctgttactggacaggttgacgttaaattaaatatctcaacaggctgtactgtaggtggtagtcaaactgaaggaaatatgaacaagtttggtactttagattttggtaaaacttccggtacttggaacaacgtattaacagctgaagttgcttcagcagcaacaggtggcaatatttctgtgacttgtgatggaacagatcctgttgattttacagtcgcaattgacggtggtgaacgtacagaccgcactttaaaaaatactgcttctgctgatgtagttgcatataacgtttatcgcgatgctgcacgtacaaacctatatgttgtaaaccaaccacaacagttcactacagtaagtggccaagctactgctgtaccaattttcggtgcaattgctccaaacacaggtacaccaaaagcacaaggcgattataaagatactctattagtcactgtaaatttc

SEQ ID NO: 8722 - DNA, 1026 bp, Acinetobacter baumannii
atgtctgagattccatttctcaatcctgccgtattaaaacaattagatttaccggttccgaaccgtgaactcactccgcaagttttaagcccactcaatttaaataccttagaagaaccttctcgtgagcttttagcataccgtaaattatacggtttacatttactggactgtgagcattggcaaggctatgtccaaatgcctttatttcgtctgcatgtccaagtttttaaacctaaattagacaaaatccaaggaaccgtatgtttattgcatggttatctggagcatagcggaatttatcagcccattattcgcgaaatacttgaacaaggctttagtgttattacctacgacttacctggtcatggtttgagtaatggttcacctgcaagtattcaaaattttgaccattatcaacaagttctgatggcggtttatcaatatgtcaaacatgctgatcaattaccgaaaccatgggtaggtattggtcaaagtacgggtggggcaatctggatgcatcacttgcttgagtatgcagaaaaaagacaagacccaatcgtcgatagggttttattgctttcaccattaattcgacctgctaaaacagcatggtggcataatccggtaggtctaggcattattcgtcgtattaagcgtcaagtgcctcgacactttagacggaataaccataatcctgaatttttaagatttattcgtttaaaagatccattgcagccacgcatgatgggcatggattggattttggcaatgtcaaaatggatgcaggaaatggaagagcgacctgcttgtcgtattcctgtctggcttgcacaaggggcattagatcaaacagtagactggcgttacaacatcgagtttattcgccgtaagtttaggcttcaaacattattgatgctagaagagggttctcatcaattaattaacgaacgtgcagatattcgtgcggctttaacaggtttaattccagcctttttgcatgcaaagccgaaacatttttattat

SEQ ID NO: 8723 - DNA, 3594 bp, Acinetobacter baumannii
atgaaaattttatccattcgaataaaaaatctggcatcgcttgctgatgaacattttattgactttgaaagcgcacctctggcccatgcaggtctcattgcaattgtggggaaaactggcgcaggtaaatcgaccattttagatgccatgtgtctggctttgtttaatcgggttcctcgccttaaagacagtgatggtaagttaaaagatgttgatggttccgagttactgaccaattcgcctttaactgttttacgccgtggtacaggacatggttttgctgagctttgctttattgcgcaagatcaaaagcgctatttggctcgttgggaaattaaacgtgcacgtgaaaacccaaatggtaaattgcaaagtgtgcagcgccacttaaaatgcttgaccgctggtgtcgtgcttgccgacaaagccaaagcagttgatgaaaaagttaaacaaattacccagctttcatttgagcagtttactcgtgctgtattacttgcccagtcagaagtcactgcatttttaaaagctcgagacagtgaacgtggtgaattacttgagtacctgaccaactccagcattttcgccaaaatcggtgaactggcttttcgtaaaacagctgatattgcaaagcagcgtaaacagctggaagagttcttaggccatattgaaattttgtctgatgaagagattgctgcatttaccgagcaataccagcaagccgaacaaaactatcaacagttagaacagcaaaaacatgtcttagacaaacagcaacaatggtttgaacgcaaagcaaaacttgagcaagaagttcaagcgaaacagcaacagtttcaaacccagcaaaatcaccatcaacaactggctagtgaacgtgagcaattaaaacgactcgaaattttctctgaaatacgcccacaagtttttcagcaagctcaaaatttacagaccctacaacaacttgagccgcaaattcagcaagctcaaaccaagtttaatgagttggtgcaaatttttgaaacgggacaaaaacaatatcaacttgcagaacaacagctcaaacaaacactcgattttgagcaacagcatcaacatgctttaaatcaagttcgacagtccattcaagaacgcgcttttattgccgatgaatataaaaagtgcaaagaaaaaagacaggtacttgagcaaaacctaagcccactacaacagcagcgaaacgctgtacaacagcatattgcacagcttgagcagaacaaaattcatctacaacagcagctgatccagactcagcaatatgctgcattagataagggcctttcagcacatctacatcagcttgggcaatttattcaaaactatgaagcgattgaacaacagattggaaaccctacccttgctcgccaaaagctatcggaagctaaaagtgaacttgaacaactcacagtttcactaggcaccgttgaacagattgagttaaagcttgaacaacagcgtaaagataaagatcagaaacttgctcaagtcacgcagttagatctgattcaacagaaaataaaaatttatcatgagctatatgctgagcttcagcaattcaccgaaaaacatactcaagcctccgcgcaagaagagcagcttaaaaccgtttgccagttagctgaacaagactaccaaacagcaaaaactgaacgtgaaaagttacagcacatcctgcaacagcaacgtttactacacaccgaaaatattgaacagttacgtgccaatcttaaagaaggtgaagcgtgtttggtctgtggaagcacccatcacccttatcgtattgatgacagtgcgatatccaaggccttgttcgatttgcagcaacagcaagagcaacaagctattgcactcgagcaaactaagtttaatgcatggcaaacccagcaacatgcacttactcagtgccgggccgagcttgaacaagttcagaaatacctagctcaactgcaagtaaaacagacgcacttacagcaagaacttgagcaaacgtttaacctcaatcaattacacattgagcttaatcaagctcctgaacaaatcttacaaacacttaatgagctgagacaagcgacacaaactgccataagtttatttgactcagaaaatgtgcgtttaacccaagccattaaacaacacaatcagcttattcaaactattcagcgtaatgaaagtttgcttaatacagcacagcaatggcaacaacaagttcaacatattgtcgagtgtttatcggaaaccgaacagcacgcatggcagcaagcaagtagccaaacagctaagcagacttgggctattcttgatgcacgtgctaagcaacttgaacaacaagaacagctttcacagcgttttgaacaacagcagcaagaacttaaaatgctgtctgctagccttgagcaaatgaccaagcaaattgatgagatcgatcaaaatctccaagagattacgcttaaaggccaacaaaataatgaaaaagcggtatcgctcattcagcaaatgacgggccgttcggatattaagccgcatgaatggttaattgagcacgacgctaaacgtcagcaccaacaaacggcgtatcatgaggctaaacaacgtttcgaacaaaccagacaaaactttgagcagcaaaaacaggcgctcgatcaacttaaacatcagtatcaacacacagaacaacatcaacagcagcttgatgggcaaattcaaaactggttaaaagcccatactgattttcaggcatctgatcttacagcactcatacagattaattcagttcaagagcaagatattcgtaaccgtcttaatcatgctgagcgtttattaagtgaagcctcttctgcccttaaaacgatgcaagagcaattaagcgagcacttacaaactcagccaaatattgaatacgaaaagctcgttaccctcattcaagacaatattgcaaagctcaaagcacaacttgaagtgcgtgacgggctaaagctgaagcttgaattacatcagcaaaaccttgcaaaacagcaaaaatacgccgagcaaattcaaaatattcaacaagaagaacatcgctggagcaaaatttcaggcttgattggtgatgccaaaggtaaagagttccgtgactatgctcagcaatatcacctagatattttagttgaacatgccaaccaacaactggcgatgctttctcagcgttatacgctaaaacgtcttgatcagtcattaagtcttgccattattgaccacgacatggatggagaaacccgctcagttgcctctttatctgggggtgagtcattcttaactgcccttgccttgtctttagcgattgccaatatggcatcgggttcaatgaaaattgaatcactgtttattgatgaaggttttggtacattagatgcctcatctttgcatatggtcatgaatgctttggaccaattgcaaaatcagggacgtcaagtcattctcatctcacatattcaagaaatgcatgaacgcattcctgtacaaattcaagtgaaaccacttggcgctggtgcaagtaccattgaaatagtgggt

SEQ ID NO: 8724 - DNA, 903 bp, Acinetobacter baumannii
atgaaaaaacagataccaattaaaataactgcttttattattttaattatatgtagtgtagtgggttatgcggggttgttcaaaaatcatgggcaacctcccattattgagggtatcttctggcaacctgacaatgatactactcctcctaaaggaaactggcattacttaggaataaatacttttgttccccaatggtcagtcgttgaatctaaatcttggtggaaaaactccaatcttcctcaatgggaaaaagccattgatttacaaaaaattaaacagcaaccttgggctaaaaatcttatattggggttagcaggtgaatataatgaacacgaagcgcgtgctaatgtcgttgctttgggagaaaaatctgcacaaattattcaagaacaaaatgatgcatctttaaaaggctattattttccagtagaagccgacccaacatggctaagagtaagtaccttaggacatgttttggaaaaattaccctcacctatttgggttagtgtttatagtggtgaaagtgaacccgaaaactacgatttatgggttaaaagctggcttcctcaacaagcaggcgtttttttccaagatggtgtaggtgtcggagtaagaactcccgaacaagctagacgcattttagatcaacttgagcagacacttggaaaagataaaacggttattgttttagaagcatttcgaaccaagaaaaatggtcaatttcgtgcagcctatccttgggaaattatctctcaaattaaggcgtatgaagggaaaaaaatttatatttttgatggcccccactatatgggccgatggtccgtttatattgtcggtctatggtatcgattcgtttatggcagcacacccgccaccataaacggaccagaaaactcaaaa

SEQ ID NO: 8725 - DNA, 732 bp, Acinetobacter baumannii
gtgaataaacatcaatataatatgttctgtttaccgcctgcggggagtagcgcgagtatttatcatccatggaaaaagcagatttctgacaatattcgtattattcctattgaatattcgggtcatggtataaaaataaatgaaccattgattgatgatcctgatctattggctatgcaaattgccaatgaaatacaagcttactcagacacaccatttattttatttggacatagtgtaggaggtggcttgatttggaaagtactcaattatttgaatgaaaaacccataattgatcagttgagattaattgttataagtagccgacctgagcaccactatattcaacatatgcggtacaagcatgagctaaccgatgaaaaaattattgatgaattaaagcgatacaataattttcctgacgaaattttaaataatcaggaagcactcacattctttctcaaaatcattcgtaacgacttctatcttagtgatcaattacttagcgagaagattcataagaccgaggttccgattgttgcattttatggtaaacaggaccctgatattcctaacaaaagaatgatggatgcatggcaacaacacacagaaaattggttaggaagtattgagtttgaaggggaccatttctactttcttaatcccgagactcgagtgaagatgcttgaaaacattgccgccatcgttgaaacattgaccgtgaatattgaa

SEQ ID NO: 8726 - DNA, 153 bp, Acinetobacter baumannii
atgcgtgataagattcgcctcgtttcttcagctggtacaggttacttctataccacgactaaaaacaaacgtactatgccggaaaaaatggaaatcaaaaaatttgatccaaaaatccgtcaacacgtgattttcaaagaagctaaaatcaaa

SEQ ID NO: 8727 - DNA, 1740 bp, Acinetobacter baumannii
atgaataatgcgctttcggacatttttcacaatcaaaccgcacttactcgtgaacggttaagcttttgtgaagccaacattaaagatcttaatgagtgggtcactaccctttctattatgcaattgggtgatacttcaaaagcgctatttacagcaattttggaactgaatgagttaaattgtagtgaaaccttacgctttgacttaattcagacacttcacccaaccattaataatgtgttggcgagtttagaaaaaaacttctttaaccaaggtgtcattagtaccgaccgtaacgagcacattattgagctggccatgcttctgcgctgttattttgccagtatttatttaaatattgcgcaaacaagccacgaacagctacaaaagcagaagttttctttgttctcttttaaacaaaagaaaaacttacaaaccgcacgaattctggcgacattccacgcattgcagcagttgaccaatcttttatatcaacagcatatgctctatagcgaacctgtcaaaggtcaatggttaattgcccaccagctttatgaaacagcggttcaatacaaatatcatttaaccaatattaatcatattcaaggtgtacagcacccgttagccaatattacgcaggcttatgcacagcttattttattagatatttttaacaccaatcagattcgccagtcagaaattcaagccctgtttcaatgtagttttgattgggcacgcatgattcagatcttgccgaaagacactgcttcaacaaagtatgtggtggacccaactaaagatcatccgcctgtatataacaaaaaacaaagctcgaatttcaacccaagtatttttattagcacgcaagctttgcttgagcatgtcactgccaccatgcataaaaatgctcaatatatgtctaaaaatgaaaagatttatttaagtcccgcattaaagtttcacgttcaaacgattttgggcaccacagcacagcgccgtcatgagcgttatgaatataatgcagctttacaaatttgttttggcttaagtactgcacatttctatttgtctaaagccaaaaactttgaagaaacgctacaactaagtaataactataatttacaaagtgaatcgaaagtcttatccaatttagagaaaaaagaacaacaaacctcgtcttatcaacgcttaagccgtgagagtaaaaccatttatcaaactaccgtacttgatattagtgttaatggctatcgtattaaatggtccggcgaagcacctaaaaacttaagaactggcgaatatattttggtgaaggaaacgctacatggtcagtggcgtggcggtgtaattcgctggattaaacaatctacagaaaaaagtctggaactgggtttagaaattctttcacaagccatgttcccttgcgctgtacatattcaggcagagcgtcatacacgtaattatcaccctgcattattactacaaactcaaaacttagaagaaatacaaaacacgcttattttaccggggtctcaaatttttagagagcaacaaacaattcatttacgattggggacagaagaaatcaaagtgtatctactcaaagcacaactcattactcaaagttttattcaatttcaatttgagcttctgaatgagcagcaacagtacctgcttgatcagttcatgctgaaaaagaataacaccgtgaatagccaagatttatgggaagcattaaag

SEQ ID NO: 8728 - DNA, 936 bp, Acinetobacter baumannii
atgcggcctttgaaacctctttcaatcatctataacgaaaaatcaggatttcatgcttcaaaacatgaagacgtctatgagcagctcatgactgtatttacagaatatggttttgaaatacaagtatttgaattaaatgaaaatacattatttgatgatttgataaataatgttattcatcgacattcacaaaatgaaaatacaggagtggttgttgcggcaggaggagacggtactttaaatgcggttgcaactaaacttaaaaatacttctattcccatgggaattctgcctttagggacttttaattatgttgctaaagttttagagattccgttagaccttttagaggcagcggaggttattgcaacaggtaaacctaggtcagtacatgtagcagttattaatgatcatatttatctaaataatgccagtttaggtttatatcctctttttatcaaaaaacgcgaactctacaataaatatttaggaagactgcctttacatgcctatacctcagctttagatgttttattgagagaaaataaatcaatgaagctttctataactgtagatggcaagaaatacccagttaaagcgccgctcattttctttggaaataaccaattgcaactatgtgatatgaagctcagaattgcagaatgtgcagcacagggaagagtcgctggagttgtaattacaaaaagtgataagctgagtttactaaatatgctttggcaatgggttcaaggtaaagttgaagatgcacaagatgtatatagtttttgtgctgatcatgtcattgttgattgtgcaaagaaaaccaaactcacagtggccttagatggagaaatcatagagatgaaacctcctttaaatttcactgtagaaaaaaatgctttaaatattatggtgccgaatgttactacatctgtc

SEQ ID NO: 8729 - DNA, 624 bp, Acinetobacter baumannii
atgccctatctattgctttgtattggttgcgtttttttaggattaggtgttcttggtctttttgtaccaagtcttcaatctttggacttgctcaccgttcaaacattgagtcaccatcgtttagattatcttaatactataaccacctttcttgcacgcgtaggcggcatgccttttgtatgttttttatcctttctagtatgtatatatttagcatggtataaaaaatatattactgttattttcattagcttgggagttattggcagtatcaccatgggttggctgctcaagtggtgtgttaaccggcctagacctcctgaggcatatcatattgttgaaagttatggtgcatcgttcccaagtgcacatagtgtttatgcatcaacactggcttgtctggcaatgattatgttatgccataagcacaacattaactctccttatattgttttgatctcctgtctttggtttgtgtgtatggggctttcaagaatatatgcaggagttcatttcccaacagacgtactcgctggttggggcattggttttatttggattgcactgctttggctctggttattacaaacacaaagtaggttaagtaaaaaacaaatatatttt

SEQ ID NO: 8730 - DNA, 690 bp, Acinetobacter baumannii
atgccacaacctatcattgctgcccatcaagttacacaaactattcagattaaccaaaatcaatttacgattttaaaaaatattgatttagatatttatgaaggggagcaggtagcaattacaggacgttctggttcaggaaaatcaactttactgggtattttagcgactttagaccaaccctttgaaggtgaggtgtggttatgtggtcaggcggttcataagttaacagaagagcagcgcgctcaaattcgaatgcagcatattggttttgtatttcagtcttttcagcttttgccacagttaagtgcacttgaaaatgtgatgttaccgcttcggttacgtaaagattttgattataaaattgctgagaaaaaagctttagattggttgcatcgggtaggcttaagccgtcaagctgaacaaacgcctaaggtcttatccggtggagagcaacaacgtgtggcaattgctcgggctctcattgccgagccacaaattatttttgccgatgaaccgaccggaaacctcgatggtcaaaccgcccaagaaattgaaacccttctttttgatttaaatcgggagcttggtactacacttattttggtcacacatgatcgtaatttggcagcactttgccaacgacatgtcgagttagatgatggccgactaaagacggtacagggtggt

SEQ ID NO: 8731 - DNA, 1078 bp, Acinetobacter baumannii
gttgagctaacgtttgatacccgccaaaaatcacgttttcgagcggctttagcgagtggcgtagatattggtgcggatttgccacgtaccggcattttgcgtagtggttcatatattgcaacgcaagaaggggatgtattacgtgtcgatgccaaacctgaacggctaatgaaagtcactgctcagactgaatttgatttgcttaaagcggcttatcatttaggtaaccgacatgtgccattaatgctgacaccaacagctttatattttgagcctgatcatgtgcttgcagaaatggtagaaggtttgggacttactgtgacagaaaccgatcatccatttgaacctgaaagcggtgcctatgcacagcatagccatgaccatcgtttaagtccaatcaaagttttacaccatgtccactcataatgctgcgcaattactgcaactgctgacattgtcttctacggcattaccagttggagcatattgctattcgcaaggtgtggaaaccgccattgatattggcttaatacacgatgaatcctcggcaattgcttactttgaagaagtgcttgaaatgctgctagtacgctttgagttgcctgtacttaaacgtcttatgcaacattatgatgacccagatcagtttctaatttgggcacatttgtataaggcaagccgagaaagtaaagagcttttggccgaatctcagcaactcgcattttctttaaatgcatggattaaagatgttttaaagaaaacagttgaggttaaaaagcagtttggttttgtgcctgtctatgcacagctttgcggtcgtttagaacttaaagaggtggatgtacttacggcgtatacctttaccgttttagaaaatcaggttttagccgcagtaaaaactgtcccattgggccaaatggcaggacaaagaattttatggcatttgcatgggcgagtaccacaagcggtagagaaagctttaaaacttaaagatgagcaattgagtagtgctttgccgcgctatgccatgctgagcatgaaacacgaaactcaatattcacggttattcagatcttaa

SEQ ID NO: 8732 - DNA, 612 bp, Acinetobacter baumannii
atgtcttcaccatttattagtacatttattttatttttctcattacttaatccattcctcatgagtatctatatgattgggctaatccgtcatacagaaaccagagtatttaataaggctttgattcaaggaagcctcattgcatatgtggtatttcttttatttgcatggggtggtgaagcaatttttaatcggtacttaaatgtaaggtttgaatcatttctaatttttggtggcctgatttttctggtgattggatatcgctatgtatttcagggtgccgatactattggagaaatgcgaggagcacctgaacatttggctggcacagtagctatgccatttatgattggtcctggaacaattagtgcagctgtagttacaggcatgagtatgtctcttttagaggcggctatagtgatcgccttagtactatttgtgagctgtagtgttttgatagcaatgaaattttctcatgatcacttacgttatagccatgccaaatatattgatcgttattttgatattgtagggaggttagctgctttattaattggaacaatcgcagtcgacatgattgtaaatggtgttacacgtttgattgataaagtt

SEQ ID NO: 8733 - DNA, 558 bp, Acinetobacter baumannii
atgttcgtctcggcaaaaactattttaattttaggagatagtattagtgccggttatggaatagaccctaaacaaggttgggtacaattactacaaaaacgtttagaccaacagtatcccaaacaacataaagtggtcaatgcaagtgtgagtggggaaaccactagtggcgctttggcacgattaccaaaacttttacaaacgtataaacccgaggtagttgttattgaattaggcgggaatgatggcttacgtggtcaaccaccacaaatgattcaaaaaaatctgtctcagctcattcaattaagccagaagcaaaaagccaaggttattctttttggtatgaagattccgcccaattatggcacggcttatagcaaagcattcgaaaatagctacaaaactgtaagtcaaaaatatcaggtgaaattgctaccgttttttcttgatggcgtcgctgggcaaaagcaactaatgcaaaatgacttgattcatccaaatacccaagcacaatcaaaattactgaatttagcttacccatacataaaaggtgcccta

SEQ ID NO: 8734 - DNA, 1808 bp, Acinetobacter baumannii
ttagacccgaaactaaaataagaggaaatccaaatgtcagaacaagaaaaaaagaccccattactccacattgaaaacttacgtgtaagctttaaaggtgaagataaacaatatatcgaaactgtgaaaggaatttcctttgatattccgaccaatacgactgtagctttggttggtgaatcgggtagtggtaagtctgtcacttctttagcaactatgggtttacttcccgtaggtcaaagcaagattgatgagaaaagtaagattatttttgaaggtaaagacttgcttggcttatcgcgtacagagatgcgaaaaatctgtggcaaagatattgccatgatttttcaggaaccgatgtcatcattaaatccggtttttacggttggcaatcaaattgcagaagtgttgtgtttacatatgggtatgagccgaaaacaggcgcggcaacgtgttttagagttgcttaaagaggtcggtataccttcaccagaaacgaaaattgatgcttatcctaaccagctttcgggtggtcagcagcaacgtgtcatgattgcaatggcaattgcttgtgaacctaagctactgattgccgatgaaccgactacagcgcttgatgttaccattcaaaagcaaattattgatttacttgaatcactacgtcagcgccgtcaaatgtcgatgctttttattactcacgatttggctttggttggtgaaattgcagatcaagtgattgtgatgcgacatggtgaaattagagagcaaggtaccgctgaacaagttttggaacagcctaaagatgtatatacccgagccttactttactgtcgtcctcaaatgtcacaaagaccttatcgtttgcctgtaaccagtgattttatgcgacaagaaaacaatatattggttgagcaaagctttgatgtttcagaaattcctgaacgtaaacgtggtttaaatggcgatgagcacattattttagaagtaaaagatctgaaaaaaagtttttatagtcgtaaaggattgtttggcaaagaagaatttcaggcagtaaaaggcgtttcttttaaattggctaaaggaaaaacgcttggtttggtaggagagtcgggctccggtaaaacgactgtcgggttattgctcatgcgcttacatcaagcatcggggggacaggctttaattgaaggtaaagatattctttctttaactgaaaaagagtttgccaaatatcaaaggaagatccaaatcatctttcaaaatccatatgcttcgctaaatccccgctttacgattgggcagatcttattggaacctatgcaaattcatggaattggtaaagatgacgcggaacgtaagcaaattgcgcttggtttacttgagagagtgaatctgcctgaacaagcttattatcgatatccacatgagttctcgggcggtcaacgccaacgtattgcgattgcgcgctgcttaacgctaaagcctgaaattctaatttgtgatgaatctgtttcggcgttagatgtttcagttcaggcacaagtacttaatttattacaagacttacaagatgagtttgggcttagttatatttttatttcacatgacttgtcggttgtgaaatatatctccgatcaggttatggtcatgaatcatggtgaagttgttgaaatcgccaactcggatgagctctatgcacatccgcaacatgactacaccaaacgactattgcaggctattccacaagggattcagcacgtttcgtaagcgtaaagttatgtcgttaaaggcacttttaagtgcctttttat

SEQ ID NO: 8735 - DNA, 744 bp, Acinetobacter baumannii
atgaaatattcagaatatcaacctcgtccggatctactcaaagatcgaattattttaatcactggtgctggtgatggaattgggcgagctgcggccctcagttatgctttacatggtgcaactgtcgtcttgcatggtagaaccttaaataaacttgaagtaatttatgatgaaattgaaggtttaggcgcacctcagcctgctattttacccctccagctttcgagtgcttccgatcgcgattatgatttcttagttagtacgctagaaaaacaatttggtcgtttggatggcattttgcataatgcaggtattttgggtgagcgggtagaacttgcacattatccagcagaagtatgggatgatgtgatggcagtcaatttacgtgcaccttttgctttaacccaagctttattaccgctattacaaaagtcagaaaacgcttctgtcgtatttaccagctcaggtgtaggccgtgaggcacgcgcactctggggtgcgtattctgtctcgaaagtcgcgattgaagcggtgagcaagatttttgcggctgagcatacttatccaaatattcgctttaattgtattaacccaggggctacacgtactgccatgcgtgttaaagcttatcctgaagaagatccgaaaacattaccaacaccggagtccatcatgccggcttatctttatttaatgggtgaagatagcttaacgctcaatggacaaagtattgatgcacaggat

SEQ ID NO: 8736 - DNA, 849 bp, Acinetobacter baumannii
atgcagttaatatctttaccaaagcagattttacagtgtggacagcttcaattagatttatctcagccccatgttatgggtatcttaaatgtcactcctgattctttcagtgatggtggtaaacataaccaattagaccaagcggttgatcatgcacttagtatgattgagcaaggcgcgactattattgatattgggggggaatctacccgacctggtgcttcagaagttgtagtagaagaagaagtgcgtcgtgtggtacctgtggtcgaggctttatctcaccataacgttattttgtcgatcgacacaagtcagccagaagttattcgcgcagcaaaagcagcaggggcacatatctggaatgatgtccgtgccttaacacgtcccaatgctttaaaaactgccgtagaattagatatacctgtagtaattatgcatatgcgcggtgaaccaacgacaatgaatcagttggatcagtacactgatgtaacactcgatgtgatgcaagagttgcaacagcgtattgatgaggctttggctgctggggtaaaaaagcacaatattattgttgatcctggatttggctttgcgaaaaatgcccagcaaaatttaaaactattaaaagaattttggaaacttaatgaacttggttatccaattttatccgggctttctcgtaaacgtttcataggtgaagctttacaaggcgctcctgcagatcaacgtgctgtgggaagtgtaactgggcatttgcttagtattcagcagggagcatccattgtaagagcgcatgatgtaaaggaaatgcatgaagcaattttagtttggaaagcgatgcagcaagtc

SEQ ID NO: 8737 - DNA, 1590 bp, Acinetobacter baumannii
atgagttttaaagatgagttagcggcacaggtcgctcaacgacgcacatttgctattatttcccaccccgatgccggtaaaaccaccatgacagaaaaactgttgttatggggtaaagcgattcaggttgcagggatggtaaaaagccgtaaatctgatcgtgcagctacatctgactggatggaaatggaaaaagaacgtggtatttcgatcaccacgtctgttatgcagttcccatataaaggtcacacgattaacttactcgatacaccggggcacgaagacttctcggaagatacttatcgtacccttactgctgttgactctgcactgatggtgattgacggtgcaaaaggtgtcgaagaacgtaccatcaaattgatggaagtgtgtcgtatgcgtgacacaccaattatttcattcgtcaacaaaatggaccgtgaaattcgtgagccacttgagttgttagatgaaattgaaaacgtcttgaatattcgctgtgtaccaattacatggccacttggtatgggtcgtgactttgctggtgtatacaatattcttgaagataaattgtatgtctacaaagcaggttttggttcaaccattaccgatattgaagtacgtgatggctataatcacgccgatattcgtgaaaaagttggtgagttagcttgggcttcttttgaagagtcacttgagcttgtacaaatggcaaatgagccattagatcgtgaacttttcttacaaggtaaacaaacacctgttttatttggtacagcattaggtaactttggtgttgaccacgttctcgatgcatttatgaactgggcacctgaacctaaagcacatccaacgcaagagcgtatggttgaagcaaaagaagaaggtttctctggctttgtatttaaaattcaagccaacatggaccctaaacaccgtgaccgtattgccttcatgcgtatttgttcaggtaaatacgagaaaggcctgaaaatgaatcacgtacgtattggtaaagaggttcgtattagtgatgcgttgactttccttgcaggcgagcgtgagcacttagaagaagcatggccgggcgatattattggtttacacaaccacggtacaatccagattggtgatactttcactagcggtgaaaacttgcacttcactggtattcctcacttcgcgccggaaatgttccgccgtgtacgtttgaaagacccattaaagtcaaaacagttgcaaaaaggtttgaaagagttgtctgaagaaggtgcaactcaggtatttatgccacaaattagcaatgatttgatcgtgggagctgtgggtgtacttcagtttgacgttgttgcttaccgcttgaaagaagaatataaagttgactgtgtttatgagccagtaagtgtaaatacggtacgctggattcattgtgatgatgaaaagattcttaatgagtttaagaaaaaggcacatgaccaactttctattgatggtggcggacacttaacgtatcttgcgccaagccgagtgaacttgcagattatgcaagagcgttggcctgatattgagttccgtagcacacgtgaacac

SEQ ID NO: 8738 - DNA, 255 bp, Acinetobacter baumannii
atggcagcaaatgtcattgtttactcaacttctgtatgcccgtactgcgttcgcgctaaacaattacttgagcgtaaaggtgttgcttacaaagaagtaaatctttctgttgaagcgccagaagtacgtgctgaattaatgcaacgtacaaatcatcgcactgttccacaaatttttattaatgatcagtttatcggtggttttgaccaactttatgctttagagcgtgaaggtaaactcgacgaattattggct

SEQ ID NO: 8739 - DNA, 1614 bp, Acinetobacter baumannii
atgagtgtatctgaacatccaaatctggacactgtgcaaggtgcagattcacaaaaagcagtgaatgaaaccttagaagattatactttacgttatgctccacacagctttcggcgctggagtcccaaagttgttgctattactgcacttggtggtattgcctatcttgctgacttttctattggtgccagtattggtatgtcttatggaacaaccaatgctgttttctccattttatttgcagcgattattatcttcttaaccggcatccctttagcctactacgcagctcgctataacatcgaccttgacttgattacccgcggtgcaggtttcggttatatcggttcggtcctgaccagtatcattttcgccagtttcacctttattttctttgcccttgaaggttcaatcatggcgcaaggattattgctcggtttaggcattccgctttgggctggctacctcatctcaaccgttatggttattccgctggtgatttacggcatgaaagctttaagtaaattacaagtctggactaccccactttggctcgttctgatgattggtccggtggcttatctgatttaccaagaacctaccttagttagccagtttgcaacgtttacaggtcatgaaggttttgcacctgtagatatggcagcgattatgcttggtgcaggtatatgcttatccctcatcatgcaaatcggtgagcaaattgactacctacgcttcatgcctgcaaaaacaaaagaaaatagcaaagcatggtgggcagcggttatttcagcgggtccgggctgggtaattttaggagcgatcaaacaaattattggggcgtttttaggtttctatttactcactaaaataccgggcgtaaacagcactgaacctgttcaacagtttaatgcggcgtttcatgacatgcttccgggctgggcggctttaacacttgcggttattttggtggttatttctcaaattaaaattaatgtgaccaatgcttactctggttccctcgcatggacaagtgcctacactcgtattagcaaacattatccggggcgtattgtctttgtgatcgtaaacttggcaattgcgcttgctttgatggaaggcaacatgtttgcggtactgggtaaaatcttaggattctattcaaactttgcaattgcatgggttgtggttgtcgcaacagacatttcaatcaacaaatatgttttaaaactttcaccaaaagaaccggaataccgccgtgacatgctctacaacgtaaaccctgtcggtatggttgctttccttgtatcagcaggtttatcgattgcagcattcttcggattattgggtagtttcctagcgccttactctccaattattgcacttgtacttgcctttgtattaacaccaatcatgggcctattaaccaaagggaaatactacatcaagtcacacgatgacggcgttaaagaaccacgttacgatgctgaaggtactcctgtagcaactgtttatcactgccgcgtatgtgagcaaggctatgagcgtccagatattatgttctctcacaaacataacggtacaatttgttctttgtgtaaaacactcgatgct

SEQ ID NO: 8740 - DNA, 1141 bp, Acinetobacter baumannii
tcgtatcaagatcaagaagtaatcattatgtaaacttacagcgtaaagctggtttttacaaagaaagccctttttctgaaattcctttagatatcgaagtttatgtattttgttttagtcctacacgaaagttgaacttgcgttaaaaactgttgaaaaactaagtgaacggccaattattcatcctaaattaatgattaatggctctacttttggtttacatggtacagagaaattaaaacagcacttgccgaaagatgaatgggtgtatttccctgatgtgattcaagaaggtaatgcaattaatagtgtactagatgtaaaacatgtcattgtaggtgtagagtctagagacgcaagtgaaattatgcaggaattgttgcgtccttttttccaatttagttatcaatacttatttatgccgattttagatgctgagtttaccaaacttagtatttcgggcatgttagctactcgtattagctatatgaatgatcttgcgatggtcgctgaaaaactcggtattgatattgcaaatgtaaagcatggtattgctgctgatacacgtattggtgccgcatatttatcaccaggtgtgggatttggcggtgagaatttttcgcatgatattttaacactttcaagcacagtgttagaaacgggaacaaaaagccgacttttggagcaagtctgggctattaatgagcaacagaaagaaattttgttccggaagttatggaattattatcactgtgacttgagtggtaaaactgttgcgatttggggagcctcttttaaagaaaatacttcaaatatacataactcacccattcatattttattggctgcgttatgggcgcaaggggtaaaagtacgtttacatgaccctcaggctctagatgaaattgcctcaatatatggctctcgggaagatcttattttatgtagtgatcaatacgaggctgcacaaaatgctcatgctttatgtttagtaaccgcatggaaacaatattggagtcctgactttaagcgactacaacagttaatgaagcatcctttaattttagatgggcgtaatatttatgacccagcatatgtaaaggctagaggttttgcttacgaaggagttggacgcttatga

SEQ ID NO: 8741 - DNA, 1626 bp, Acinetobacter baumannii
atgcaagtattctttctgttcctcgcagcaattctattgggtttcgcatggctatcaccatttcactataacccttgggtaatgttttctagtgaaatgagtacttttgcggcaggtttaagtgtcttagctgcacttttttatcaaaatattaaaattccgcgtgcacaattattgctgttgccatttattttaattccagtggtgcagtgggcttttggtctagtttttgattttagtacagctttgttaagttcactttacttattaggcttctggtttatggttgtggcgggttataacttgtcactagatcaacaaaagcgagatcaaatttttacaggctttagtttattactgattattgtatcaattgcgaccagttttattgcgatatgccaatggttaaatattgagtctcattttgtgcatatgttgcatttaattggtaaccgtccttacggcaactttggtcaacctaacaatatggcaacctttctgattatggggctattaggttgtctatttttatatgaaaagaataaagcaacagtttggttacttttcccttctgcactcattatcttgtttacaatcgctttaagccaatcaagaacgtcttgggtcgtttttccatttttacttatctattggatagttaaactatttggaaaacaaaaaagatttggttttattcaagggttcttgtggtgcgctggtttttttgtaatagctggcgtgattctgccatttgctactagtttaattgaagcatggtcgagcgctgatgtagcccaagcaagtagtttagttgaaagagcaagctctggatatctacgttttaatatctggacccaaatgctacttgctgtacagcaacatccttggttggggtatggttggaaccaaaccagtgtagcgcaaatgtcagcctatgctctttttccaacaactgagtggacgaccagtgcccataatattttattagatctcatcatctggaacggtatcccaataggtatagccattattgcttactttgcatgttggttcctttggctaaaccagcaggctaaagaaactatctcaattattgcaattatgatggtgtgtaccgtactcattcatgccatgttagagtttcctcaacgctacgcttacttcttacttacttgtggattcttattaggcataattcaggcacagacacctgtactcaaaggtattgtgctcaacaagcaggttcttcgtttaatttggggagtcagtttaatacttctgctagcaatttggcgtgactataatgtctatgtcacaaatagtaatttgttgtttaagaataaacagccaaatgctgaggttttgggaagtaatcagatttttgttttaacgcagtttgagcagcgtctaaaatggattgagatgaagcctgaaactactttatctgatgctgatttagcagtgtggggtaattttgtgaagaataaagcgacgccttataacttgcgtaaatatgcccagctacttgcctataatggaaaagtagaacaggccgagcaacaaatatttattttgcagcatctttatcgacagcaaataactttggcagagttgttaaaagataaa

SEQ ID NO: 8742 - DNA, 462 bp, Acinetobacter baumannii
atgaaaggcaatcgtgatgtcattaatcagctcaaccaagtgctgtatcatcatttaactgcaattaatcaatactttttacactctcgtatgtttaatgattggggaattgaacaactcggttctgccgaatataaagaatcaattcgccaaatgaagcatgctgacaaaattattgagcgtatcttatttttagaaggtctccctaatcttcaacacttaggtaaattgtatatcggtcaacatacagaagaagttctgcaatgcgacatccgtaaagtaaaagaaaatattgaagcaattcaaaaagcggtcgctttagccgaaacagaacaagactatgtaacgcgtgatttggtacaagaaatcttagaaaaagaggaagaatattgggattggttagatactcaaattgatcttattggcagtgttggtatcgaaaattatattcaaagccaaatg

SEQ ID NO: 8743 - DNA, 303 bp, Acinetobacter baumannii
atgagttggatctcagtttgtcagcagggtgacgttagcgaagatgagccgaaagccgtcgaagttgaagggaaaaaaattggtgttttttttgtcgatgaaaattacttcgctatcgaaaatgtttgccctcatgcgtatgccttattaacggaaggatttatcgaagatcaaactgtggaatgtccattgcacgaagcaatttttgacattcagacaggtgagctaaaaagtggacccgggtgtagaaacctatgtacgtacccagttcgtgttgaaggacaggatattcaaattcaactc

SEQ ID NO: 8744 - DNA, 1371 bp, Acinetobacter baumannii
gtggatatttttccaatctctttgaagttgcaacagcaacgttgtctgattgtgggcggagggcatattgctttacgcaaggcaactttattagctaaagcaggagcaataattgatgttgttgctcctgcaattgaagatcagcttctgcaattaattaaaacaacagacggcgagccgtttattgaagcttttgctgaaaaatttttaagtacaccctatcgtttagttattgcagcgaccaatgatgcagaagtaaataaaacagtttttgagcagtgtgaagcgcgcaatttacttgtaaatagcgtcgatgatattccacattgtcgttttatggtgcctgcgattattgatcgatctccattaattgtttctgtggcctcaaatggaacatctcctgttctatctcgtcaaatccgtacgcagttagaaacctctattccacatggcatgggcaagttagctgagttttcaggaaaatggcgcaatcaggttaaagaaaaaatttctaatccagatgagcgccgtatattttgggaaaacttgtatgcaagccccttaaaagaacaagtttttaatgacaatctagatgttgccgatagcatgcttgaacaagcactgcaggagtggaaagcacctaaaggcgaggtttatttggtgggtgcaggtccaggtgatcctgaactcattactttaaaagctttacgtttaatgcagcaagctgatgtggtcatttatgaccgtcttgtttctgcacctattttagaattgtgccgtcgagacgcaacaaaaatatatgttggtaaagcgcgttctaaccatagtgttcctcaagaaggtattaatgcattattggttgactacgcgaaaaaaggtaaacgtgtttgtcgtttaaaagggggagacccttttatttttggccgtggtggcgaagagatccaagagttattccaagctggcgtcccatttcaagttgttcccggtattactgctgcgtcaggttgttcagcttatgcaggtattccgcttacccatcgtgattatgcccagagtgtccgctttcttacaggccatctaaaagaaggttctcctgagttaccgtggaacgaactggtatacgaaaaccagacattagtactgtatatggggttggtgggattagagcgtatttgtgagcagctgattgcgcatggacaacgtccagatatgccagttgcattaatttcaaagggtacgacacctgaacagaaggttgtggtggggtcacttgctgatattgcatctaaagtgacagaacatcaaattcatgcgccgacactcacaattattggtgaggttgtacgtttgcgtgaacagttacagtggaat

SEQ ID NO: 8745 - DNA, 819 bp, Acinetobacter baumannii
atgtctcagctttctacgatcattgagcaagcatttgaagaccgcgcaaatttcactgcagcagattgcccaagcgaaattcgccaagctgttgaagaagcaattgctggtttagataacggtacacttcgagttgcagaaaaaatcaatggtgaatgggttgttcatcaatggttaaaaaaagctgttttattatcatttaaacttaatgacaataaaccaatcgagtcatgtgatcttcgtttctacgacaaagttgaaactaaattctctggttggactgaagagcaatttaaagctgcaggcgttcgtgttgttcctcctgctgttgctcgtcgtggtagtttccaagctaaaaatgtggtgttaatgccatcttatgtcaacattggtgcttacgtagatgaaggcacaatggttgatacatgggcaactgtaggttcatgtgctcaaatcggtaaaaacgttcatttatcaggtggtgttggtatcggtggtgttttagaaccattacaagctaacccaaccattattgaagacaactgttttatcggcgcacgttctgaaatcgttgaaggtgttattgtcgaagaaggctctgttatttctatgggtgtttatatcggtcaatctacacgtatttatgatcgtgagactggtgaaatccattatggccgtgttcctgctggctcagttgttgtaccaggtaacttaccgtcagctgatggtaaatacagcttatacgctgcaattatcgtgaaaaaagttgatgcacaaacacgtgcaaaaacaagtttgaacgatttgttacgcgctgac

SEQ ID NO: 8746 - DNA, 2388 bp, Acinetobacter baumannii
atgaccaaccgtgtaaccaaacgcaacggctctacggagcctttttctcaagaaaaaattgagaaagcggtaatttgggccacaaaaaacacaaacgtgccacctcaattagttattgataatgcaattatgcttatctatgacggtattaaaacaagcgacattcaagaagctttaattagcgcagcatctaaactaacttctgcaaccatgacagatgcttcatttgtagcggctcgcttattgctcttagatttatacaaacttgtatgcggcgagcaaggaaaggtcgatggtggtggttttaaatatcctcacattaaggattacattcaggggggtgtttcttgcaaccttctcgaccctgctttattgcaaagctacgacctagatagaattaatgccgcaatcaagccagagcgtgatttgctgtttggttatttaggactagatactctaaaagaccgttactttattcgcaaaaatcgcgatgttaagtacgaaaaagcgactggtaaaacttcaggtgaaattatcgaattgccgcaacatttctggatgcgtgtagcaatgggtgtcgcaattaaagaaaagcctgaaaaccgcacggcgcgcgctcttgaatactatgaaatgtattcaactttgaactatatctcttcaacaccaacgcttttcaatgccggtacattacgccctcagttgtctagctgttacttaaaccaagtatcagacacgatcacagccgaacttggtgacagtcgttatgcttcaatctttggagccattgaagaaacagctttattgtctaagtttgctggtggtatcggcacagattggacacctgtgcgtggtgaaaatgaaatcatcattggtacaaatggtatctctagcggtgttgtgccttacatcaaagttcaaaacaatacagctgtcgcggtaaatcaaggcggtaaacgtaaaggttctgtggcgccttatcttgaatcttggcatcctgatttcatgtccttctgtgaactcaagaaggaagctggtgatgaccgacttcgtgcgcatgatgtattccctgccgcttgggttcctgatttgttaatgaaacgcaaagaagacccggaagcaatgtggtcgttcttctctccgcataaattccctgagcttcatgagttgtatggcgaagaatttgaagcccgttatgaagagcttgaagcgcttggtgaatttgagttccaattgcctgcaattaaagtgtggcgtcatattctttctaacttgtttgaaacgggccacccgtggattacattcaaagacgagagtaaccgccgtaaccctcagtcgcatgtgggggtaattcaccacagtaacttgtgtaccgaaatcacgctaaatacatctaaagaagaaacagctgtttgtaatcttggctcaatcaacctagccgttgtaatgtcgggcgataatccattagaaaaattgcgtacagcagttcgtttggccatccgaaatctcgactcggtgattgacgtaaactactacccatcagaacgcgccaaactctctaaccttcgtcaccgcccaattggtttaggtgtaatgggttattacgagtggctagtaaaacaaggtgtagattttgaaagtgatcaacatcttgaacaagcagacgcattgtttgaggcaatttcttactttgcaattgaagcctcagcagatctagcgcaagagcttgggtcatatccttcatttgaaggttctaagtggtcacaaggcatcttgccaattgacactgctaagaagatggaagatggcaagcctttctttgatcgcccacgtcgtttcgattgggaagccttgcgcgagaaagtcaagaaaggcatgcgcaactcaaacatcatggcaattgcaccaacggcaacgatctcaaacattgccggtacaacccaatgcacagaagtgccattcctgcttcagttctataaaacgaacttaggtggcgtgtacaaagtgattgacccatcggtgcgtcatgttggaacaaactatcacttacttaaagaggcgttctatgttgatcagctatggattattaaagccgcagctgttcgacaaaaatggatctgtcagtctcaatcaactaacttgttcgctaagcaaggaacaactggtagagacttagacctcatttacaccgaagctcaccgcaagggtttgaagaccacttactacctacgtggccaatcagctaccaaagattcagcatcggcaaaagatgacgtcattgaagcattgaaatcagcagtggctcaaggggcgacattgagtgatgcagaagctcaccaacaagccaaattgtgttcgattttcgagcctgattgcgaaagttgccaa

SEQ ID NO: 8747 - DNA, 2130 bp, Acinetobacter baumannii
atgtatcaagtacttgctagaaaataccgtccacgtaatttcaatgagttagtgggacaaaaccatgtttctcgtgcattaagtagtgcattggaacgcggtcgtcttcaccatgcttatttatttacaggaacgcgtggtgtaggtaaaactacaattgcacgtattttagccaagtgtttgaactgtgaaacaggtgtgacttctacgccatgtgaagtttgtgccacttgtaaggcggtaaatgaaggccgttttattgacctaatcgaaatcgatgctgcttcaagaacaaaagtagaagatacgcgtgaacttttagacaacgttccttatgcaccaacgcaaggtcgttttaaagtttatctgattgatgaagtacatatgctctctacgcattcttttaatgcgttattaaaaacactagaagaaccaccagaacacgttaagtttttgtttgcaacgacagacccacaaaagctaccgattacggttatttcacgttgtttgcaatttactctaagacctttagctgtagatgaaattaccaagcacctcggtgctattcttgaaaaagaacagatcgctgctgaccaagatgcaatctggcaaattgctgaatctgctcaaggttcattacgtgatgcattatctttaactgaccaagcgattgcttatgggcagggtgctgtacatcatcaagatgttaaagaaatgcttggcttgattgaccgtacgatcatatatgatttgattttagcggttcatcaaaaccaacgtgaaaaagtgagccagttattactccaatttagatatcaagccttagatgtctcgttagtactggatcagctcatttcaacattgcatgagttggctttattacaatatttaccagagctcggcttaaagtatagtgaagaaattaatgccaaaattcttcagctttctaaactgatttctgctcaagatttgcagctttactaccaaatcgcatgtaaaggccgttcagacttgcagcttgccgtaacgcaagagcaaggttttgaaatgtgcgttttacgattattggcattccgtcctttagcaccaaatgaaattttagtttcagagcctgttcaacaaaatgggcaagcagaagtaggcctaaattcacaagctcaaacagcccaagtgattgctcctgtaagtgctgttcagcctgttgaagttattagccaacccgctatggttgaacctgaacctgaacctgaacctgaacctgaacctgaacctgaacctgaacctgaacctgaacctgaacctgaacctgaacctgaacctgaacctgaacctgaacctgaacctgaacctgaacctgatcaggacttaatggtatttgacccaaatcatcatgagttgattggacttgagtcagcagttgttcaagagactgttagtgttcttgaggaagatttcattccggtaccagaacaaaagttagtacaagttcaggctgaaacccaagtcaaacaaatcgaacctgaaccagcttctactgctgagcctataggtttatttgaagcatcgagtgctgaattttcacttgctcaagatacgtcagcttatgacttggtttctgaacctgttattgaacaacagtcattggtgcaagttgaaattgttgaaacagttgtggtggtaaaagagcctaacgcaacagataacagccagctgatgccacaagatattttaaagttgccatcacaaactttggaaggtgagtggacacttgaaaagtgggagttttggtttagaaatagccagctttctccagccgttcaagaacttgctcaacatggtgtgatgactggggaaattggtggcaacacggttttccatattcctcaagaatatgaaaatatgttgactcagctacaacaagccttaattgaagctttaaagcagcagtggccaaatacacaatttacggtcgagtatggtgcagtcaatactgctacaccgtatgttatgcaaagcgttcgtaaagaaaaagctttccatcgggctacagaactattacagcaacaacccgttattaaaagcctcatagagacttttgatggtgagctgcaaaatattcaattaaaacct

SEQ ID NO: 8748 - DNA, 336 bp, Acinetobacter baumannii
atgaaagcatccaaattaattagagataaagggctgcaatacgcgaaagaaatcgttgattcagcaccttctaacgcaactgagtggaatgaaggtttcgagttccaatgtggtcaaagtgtagagattagcaaggctgaccgagaaaaatattttgtagacctttctgaacttaagcgtctagtggagtcggttgatttggtcgaatcatggggcggcattgatgatgtaaagctatatgacttgtctcattgcaaaaacaggcctgaatcggctggatacaagttgcttcaagcaattgctgattacgaatcaatatacggaggcggttatgtt

SEQ ID NO: 8749 - DNA, 243 bp, Acinetobacter baumannii
atggaactcactttaggtctagttgcaattgcatctgctatcttgatcgctttcggtgctttgggtactgcgattggttttggtcttttgggtggtcgctttttagaagctgttgctcgtcaaccagaattagctccacaacttcaaactcgtatgttcttaatcgcgggtcttcttgatgctgtgcctatgatcggtgttggtattggcttgttcttcatcttcgctaatccatttgtaggt

SEQ ID NO: 8750 - DNA, 441 bp, Acinetobacter baumannii
atgtataaattcaattgtagaagcgaacttactaagtcatctacacctacacctacacctacacctacacctacacctacacctacacctacacctacacctacacctacactgagtaatgttttaaaggaaataaagcaattagtagatagaaacataccttattcgcaaactggtgcaagaggtgctggaagtaataaaaatgctacctcagtaattactgctaatgatttaaaaggattagactgttcagaaactgttgcaatatatcttttaaagttaggtgttactgataaattctattctatacatactggtgttatgctcactgaaaatgattttagaaaggctatacgttcaaataaaattgagtatgttgttggaagtaaagatcttaattttatccctcaaattggggatatatttgtttggcgtaatggt

SEQ ID NO: 8751 - DNA, 1410 bp, Acinetobacter baumannii
atgccacgtaaaaaagaggtcgttagtgggaatttcgttaagtacgatgcggtagttctcggttctggacctgcaggtgaaggcgcggcaatgaagcttgcaaaagctggtaagcgtgttgcaattgtagatgtacgtgatcaactcggtggtaactgtgcacacgtaggaaccattccaagtaaagcattacgtcaaacagtttctagcattattcgctatcagcgtgatccaatgtttcaaaaagtaggtgaatggaaacagttcactatgaagcaggtcttgcgtaatgcacacaaagtgattcaacaacaggttgatactcatacgcgcttttatgaccgtaacaaaattggtgtcttccacggtcgtgcatatattcaagacaaaaatacagttttagtttttagccacgaaggcattaaagaaacaattatctgtaagcaaatcgtgatcgcgacaggtagtcgtccttatcatccgcaaggtcttgattttgaccacccacgcgtatttgattcggacaaaattcttgatcttgattactcaattcaaaaaatcattatttacggcgcaggtgttattggctgtgaatatgcctcaatctttattggtttagaccataaagttgacttgatcaatactcaacaaaaactcttaagttatctagatgatgaaatcgccgatgctttgtcttatcacttacgtgaacagggcgtgttgattcgtcacaatgaacaaatggatcatcttgaaacatttgatgaccacgttgttctacatttacaaagtggtaaaaagattaaagctgatgcgattctttggtgtaatggtcgttcaggtaacacagaaggtttaggtcttgaaaatgttggtttagtaccaaatagtcgtggtcaactttctgtaaatgatcaatatcaaactgaagttgaaaacatctatgctgctggtgacgtgattggttggccttcacttgcttcggctgcctatgaccaagggcgctgtgctggtgcaaacatgagtggtgaagatgctaagccagtacgtgatatccctacaggtatttataccattccggaaatctcatctattggtaagaatgaacaggaattaacggaagagaaaattccgtatgaagtcggtcaggcttctttccgtcatttagctcgtgcacaaattaccggtgatacagtaggtgagttgaagattcttttccatcgtgacactttggaaattttaggtattcactgttttggtaataatgctgctgaaattatccacattggacaagcagttatgcacagcccaaacaatactttgaaatattttgttgaaacgacatttaactatccaacaatggctgaagcataccgtgtagctgcacttaatggtatgaatcgtttattt

SEQ ID NO: 8752 - DNA, 387 bp, Acinetobacter baumannii
gtggtgcgtgaagatcaagctggaattttaaatcaattactttcttctctcgatgcaattcctgaagagattattgctttaacagcttatggcgttggcgctattattgccttgtggtgctggtggcgtttaatgcgccgcttacctaccactttgggcgcaataagctggttagttgtttttgctattttggtgacaccgactgtttcagaagggcctaatgcatctgtagcgccagctatttttggactactatttggtgttttaactaaagacagtcctttaatctggtcaaatttatccttaattctgtttgtaatcggtctaggtttggttattggctattgttggtcaaaatatataacaaacaaaagcatgcgttccatc

SEQ ID NO: 8753 - DNA, 1629 bp, Acinetobacter baumannii
atgaattctaatctaccccctgtttcggattcaaaacttgcggcaaacctgcaagcaaaatcgacgaatgtacatgtcccgacacctaagttttttatgccggtgtttctgacgattattattgcaacacttatttatattgggtttcaggtcagtgctgatttagcgcatgttccacctttaagcctttattcagttattcttttatctactgcactcttgattgcactaggctttgaatttgtaaacggtttccatgacactgctaatgcagttgcaacggttatttatacaaatgctttgcctgcaccggttgcagtcatgtgggcaggtttttgtaatttccttggggtaatggtcgcaagtggtgctgttgcgtatggcattattgcattgcttccagttgaacttattatgaacatgggcagtggtgctggctttgcaatggtttttgcattgttgatcgctgcaattctttggaatcttggtacttggttcttgggaattcctgcttctagctctcataccttgattggttcaatcttaggtgtgggtattatgaatcatctgttgagtgcatcgactggcgtaacgaccagtggtgttgatatggatcaggtgattaaagtaggtaaggcattattattttctcctttaattggttttgcttttgcggcaattgtattcttgttggttaaaactattttcaaacgccaattagaattattccagccacctgaaggaaataagccaccaccagcaatcattcgcgcaattcttatctttacctgtacaggtgtgagttttgcacatggttctaatgatggccaaaaaggtatgggtcttatcatgctgattttggttggtttggtgccattagcttattcattaaataaaaacctcgatacacagcaggttcaatcattccatcagctttcttctcaaactgcggttttgttaaaccaaaatcaaccagaattgactgacgaaaaagcgcgtgcggttttaactaaatacattcaaaccaagcaacaaacgcctgaagttgtgcctgcattggcaagcatgactgaccatttgggtgagcgtgtttctagctatagcaacttaaaagatattccagaagctgcaattagcgaaatccgtaatgacatgtatttgagcacaacgacgtttaagcgtttggataaggcagatgctttaccaaaaatggatgactcacagaaaaagcttgtgaaagattatcgtagtagcttggattcattcttacaatacattccaaactgggtgaaagtggcggtcgcattagcgcttggacttggtactatggttggctggaaacgtattgtggtaactgtcggtgagcgtattggtaagcatcacatgacttatggtcaagggatgtctgctgagcttgttgcaatgagtacaattgctgcagcagatggtttaggtatgccggtttcaacaacacacgttttaaacagcgctgttgcaggtactatggttgccaataaatcaggcctgaatttcaatactgtaaaaacaattctctctgcatgggtatttacacttcctgcaaccatctgtttgtcgggtggtttgtactggttattcttacagtttgta

SEQ ID NO: 8754 - DNA, 876 bp, Acinetobacter baumannii
atggaaaatacaacgaatcagtatccatcagaagttcctgcacaagttcaacctcatcaaccaggtgatcaggagaaaatgcatcctgaaccagaaattattaaagcatcccataaaggcagtgaaaaactaaaaggcaaagttgccgtcattagcggtggtgatagcggtataggccgttcagttgccgtactatttgcccgtgaaggtgccgatattgctgtactgtaccttaaagaagaccaagatgccgaaattactaaacagcttattgaaaaggaaggacaacaatgtcttttattaaaaggtgatatttccgatccagaccttgcaaaacaaaatattgataaggttttacagcattttggaaaaattaatattttagtgaataatgcgggtgtgcaatatcaacaaaaagaaattgaaagtattagtaatgaacaattagaaaaaacatttaaaacaaatatttttaccatgttttatttaaccaaagaagccattccttatatggaggaaggcgatagcattattaacaccaccagtattaccagttaccaaggtcatgatgagttgattgactatgcaagtactaaaggtgcaattacctcttttactcgtagtctatcgaacaatttaatgaagcagaaaaaaggtattcgtgtaaatggtgttgcaccaggcccaatctggactccccttattccaagtagtttcgatgccgagactgtcgaaaagtttggtaaagataccccaatgggtagaatgggtcagccaagtgaagtcgcccctgcttatcttttccttgcctcagatgatgcaagttatattactggtcaggttattcatgtaaatggtggtcaaattgttaatggc

SEQ ID NO: 8755 - DNA, 1311 bp, Acinetobacter baumannii
atgcctcatgttccttctgaggatatggacatgacaacaaagactgttacagagaatatgagtagcactgaagctattcaaacaccaaaaaagatttggattacagcttttatattcgctttttttacacttttatgtgacggggccgacttaggttttttggcattaagcctcactagtcttaaagcagagtttcatttaactggtgtgcaagccggaacattaggaagcttgacactatttggttcggccgtgggtggccttattggtggttgggcttgcgaccgttttggtcgggtccgcattattgttttctttattgctttttcttcgatattaacctgtgcactcggctttacacattcttatatgcaatttgcagttttaagaacaataggcgccatgggcttaggtgcactttatattgcctgtaatatcttaatgtctgagatggtgccaaccaaacatcgctcgactgttttagctactctcatgacggggtacaccttaggttctttactcgcgaccttattagctggacatattattcctgaacatggctggcgtttcctatactggattgcaattacgcctgtggttttgtcagttttgatgcacttttgtgtacctgaacctgagtcatggaaaaaagcccgtcaactaaaagcgctagaagtcgctcaaagtaaccaacctaaaaaacgtcaaaatccatatcttgagattttaagagataaaaaacacggcaccatgtttattctttggattattagtactggtgcattgcagtttggttattacggggtaagtaactggttacctgcttatttagagtctgaccttggcatcaagtttaaagaaatggcgatgtatatggtcggtacattcctaattatgatgtttgccaaagtgatcgcagggatcgttgccgataaattaggacgccgcgctgtatttgctttcggaaccattggtacagccttatttattccagtcattgtttatttaaatacaccaaccaacattttatggatgatgctgttcttcggtttcctttacggtattccatatgcaattaatgccacctatatgacagaaagcttcccgacttcaattcgaggctcggcagtgggcggtgcttataacattggcaaagtactttcaattttctctccattaacaattggttatctatcgcaaaacggttctattggtttaggactcttggtgatggctgcagcttattttatctgcggggtaattccattgttatttattaaagaccgattatttaacccgcaaaaggcagag

SEQ ID NO: 8756 - DNA, 2067 bp, Acinetobacter baumannii
atgagcaaacatactgttttattcgaacttggctgtgaagagcttccaccaaaaagcttaaaaacgttacgtgatgcactacaagcagaaactgtaaaaggcttaaatgaagcaggtttagacttcgcatctgttgaagcttatgcagctccacgtcgtttagcgcttaaaattgtagatgtagatgctgctcaagcggatacacaaaaacgttttgacggccctgctgttcaagcagcttacgatgcagaaggcaaaccgactaaagcacttgaaggctttatgcgcggtcaaggcattactgttgatcagctttctacattccaagcaggtaaagttgaaaaagtttgctatttaaaagatgtgaaaggtcaaagccttgatgctttacttccacagattttacaaactgcgttagacaatttaccaattgctaagcgcatgcgttctgctgcaagccgtaccgaatttgtacgtccagtgaaatgggttgtcttactcaaagatgaccaagttattgaggcgactattcaagatcacaaagctggtaatgtgacttatggtcaccgtttccatgcacctgaagctgtgaccttagcgcatgcaaatgactatttagctgcgttagaaaaagcatatgttgtagcgaactttgaaaagcgtcaggcaaccattcaagaacaagtgaaaaagttagctgatgaagtgaatgcaactgcgattgttccagctgacttacttgatgaagtaacaagtctggttgaatggcctgtggctttacgtgcaacttttgaagaacgctacttagctgttcctcaagaagcactcatcacgacaatgcaagacaaccagaagtatttctgtttgatcaacgcggaaggtaaattacagccttactttattactgtttcaaatattgagtctaaagatccgactcaaattattgaaggtaacgaaaaagttgttcgccctcgtttgtctgatgctgagttcttcttcttacaagatcaaaagcaaccgcttgcatctcgtaaagaaaaattagcaaacatggtattccaagcacagcttggtacgctttgggacaaatcaacacgtattgcaaaacttgcagttgcattatcttcaatcactggtgcaaacccagctgatgctgaaaaagctgcattacttgctaaatgcgacttaacctctgagcttgttggtgaattcccagaacttcaaggtattgcgggtacttactacgcgcgtattgaaggcgaaaacactgaagtttcagaagctttaggtgagcaatatttaccaaaatttgcgggtgatgttttaccaaaaaccaaaacaggtacaactattgcccttgctgaccgtttagatacgcttgttggtatttttggtattggacaagcgcctacaggttctaaagacccgtttgcacttcgtcgttcagcaattggtatcttacgtttaatcattgaaaatgaattagatgtaacgattgaagagctagttaatcttgcacttcaaggttatggcgatatcgttaaagaccacgacaaaactcgtgctgatgcggttgcattcttagaaggtcgttaccgagctaagtacgaagaccaaggtgttgctgttgacgtacttcaagcagttcaagcacttgcaccaaaatctccacttgattttgacaagcgagtaaatgctgttaaccacttccgcacattacctgaagctgctgcacttgctgctgcaaataaacgtgttgctaatattcttgcaaaagaagcagcaccagaaggctctgtaattgaagcgaacttggttgaagatgccgaaaaggcattatttgctgagcttcaagcagtgactcctgtggttgaaccattacttgcagcaaaagactatactgctgccctttctaagcttgcagcacttcgtgcgccgattgatgcattctttgatggtgtaatggtcatggcagatgacgctgacctgaaagcaaaccgtttacgtttattggctcagttacgtaacttgtttactgctgttgctgatgtgagtgtgttgcagggt

SEQ ID NO: 8757 - DNA, 810 bp, Acinetobacter baumannii
gtgacttttcaagtctcaacactttcacaaaaaaatcatgtcatcatacaaattaccgatacacatttattggagtatccacagctagaatttgtggggatgaatcctgaagaaagtttccacgccattattcaacagatactaaaacaacatcccgaagctgatgcgattattcataccggtgacctcgcacaagccccaacacctattacctacaaacgttatatcaattttatgcaaaccttgggtctgccttttttccagaccctcggtaatcatgacaatgtcgaccactttcctctacataacgaaaaccatcaacaacctgtagttgtcggtttaggaaactggcgtgtgattatgctaaatagcgcggtaaagggaaaagtagatggtcatctgtcttcggaacaattagaaaatttagcgaatttacttgaacaatttgcagatcatcctgttttgctggcttgtcatcaccatccatttgccatgaaatcaaaatggattgaccaccataagcttcaaaactcaaatgcacttttagataccttaagtccatttcaaaatgtgaaggccctagtctgcgggcatgttcatcaagattcccttaatatctggcaaggtatcgagtttttttctacaccttccacaagtgtacaatttaagccgtttagtaatgattttgcactcgaccaaaatgcgccgggttatcgttacattcgtctgaataacgatggtagttttgaaacaaaagtgtttcgccttgaaaatttcaaaacccgtataaatactgatatttcaggttat

SEQ ID NO: 8758 - DNA, 1293 bp, Acinetobacter baumannii
atgtccaactggtttcccaaatggcagccttaccaaggtgatgttgaccatcggccggtctctaccaatgaatatctccctccagttcaaagtgctattttaggtatccaacatgcatttgccatgtttggagcaactgttttagcacctttactcatgggctttaaccctaaccttgctattttaatgtcaggtatctgtaccatcctgttcttcttaattacaggtggtcgtgttcctagttatttaggatcgagttttgcctttattggggttgttgcagcagccacggggcatatcacaggttcaggggccaatccaaatctttctattgcgttgggcgggatcgtagcgtgcggtattttttatgcactcatcggttttattgtcatgctcacgggtacacgctggattgaaaaacttatgccgcctgtggtgactggtgcaattgtgatgattattggtctcaaccttgcccctgttaccattaaaggcgttgcaggacagccatttgaaatgtggatggccttaattactgtactttgtatgggcagtattgcagtttttacacgaggcttattgcagcgtctacttctattggtaggtttgatcttggcttatgtaatctatgcgattgcgacaaacggtctaggtttaggtaaaccgatcgattttagccagatctcacaagcttcgtggttcggtattccaaacttttcacatcctacttttgatactaaggctattttaattattgcaccggttgcactgattttagtagcagaaaacttaggccatatcaaagcagtaggtgcaatgactggagaaaacctaactccacaattaggcaaagcctttgtcgctgatggtttagctacgacactttctggtagtgttggtgcgccagggatgacgacttatggtgaaaacattggtgtgatggcagtcactcgtgtgtactcaaccattgtatttgtgattgcaggcatctttgctattttcttaggtctatcaccaaaatttggcgctgtcattagtaccattccaagtgcagtccttacaggtgcatctattgtggtatttggcttaattaccattgccggtgcaaaaatctggattgaaaacaaagtcgatttttctaacaataaaaatctgattgtggcttcagtaaccattattttgggtgctggaaactttgaattattgttcggtaatttcaatttaggtggtattggtacagcaacgtttgcagccattattttaaactggctgtttagtttaaaagataaaacc

SEQ ID NO: 8759 - DNA, 1836 bp, Acinetobacter baumannii
atgtgtggtatcgtcggaggcgttgcagaacgttgtgtaaccgagattttaattgaaggtttaaaacgtcttgaatatcgtggttatgattcggcaggcgttgctttactcaataaccagcaaattttacgtgagcgccgtgttggtaaagttgccaatcttgcagatgctgtttcagaacaccagcttactggagcaattggtattgcgcatacccgttgggcaacacacggtaaaccgaccgaaaataatgctcacccgcacatgtcaggcaaggtagcagtcgttcacaacggtattatcgagaactatcaagagcttaaagatgaccttcaagctttaggatatgtatttacttctcaaacagatactgaagtggtagcccatttagttgcagaagctctaaaaaatactgatagtttacttgaagcagtagaatctgtagttcctcagcttaaaggtgcctatgcgttaggtattattcacagcgattacccagatgaactcattactgtacgtgaaggttcaccacttgtaattggtgtgggtattggcgagaactttatcagttcagaccaattggcccttttaccagtaacaaaccgttttatttacttagaggaaggcgatattgcccgtcttactcgtacttcaattgaagtatttgtaaaaggtgaacgtgttgaacgtccagttaaagaacttgatgcaactgtaagcagtgcttcaaaaggtgaatataaacactacatgctcaaagaaatttatgagcagcctgaagcaatcaaacaaacaatttctcaagcgcttgatggcaacaatttacgtgatgatttcttgaaagatgctgatgcagatttcagtaaacttcaaagtgttcaaattattgcgtgtggtacaagttatcactcaggaatgatcgctaaatattggtttgaacagttaattggtgtgccatgccaagttgagattgcgagtgagttccgttatcgctcaccagtgattgtggaaaatacactttacatctgtatttcacaatcaggtgaaacagcggataccttagctgcactacgtgaaactcaaaaacgtgctaaagcaaataatatcgacattcagactttaacgatctgtaacgtcgcaacttcttcaatggtgcgtgaaactgatcaccacttattgacacttgcaggcccagagattggtgttgcatcaacaaaagcgttcacgactcagcttgctgcattaatgttgttaatcttgaaaattggtcaagtgaaacaacgtattagcaatgtgatgattgaagagcttgctcgtgaattgtggcacagcccgaaagtcattctagatacgcttaagcaagatgctgaaattttacgtttatcagaattgttcgttgaaaaacaacactgtttattcttaggccgaggcacacactatccaatcgctttggagggtgcattaaagcttaaagaaatttcatatattcacgcagaaggttatgcggctggtgagttaaaacatggcccattggcacttgttgatactgaaatgccaatcgtgattcttgcgccaaatgacgaaatgcttgataagcttaagtcgaatatggaagaagttcaggcgcgtggcggtgagttattcgtttttgctgatgaaaatagcggtgtagtcgaaaaagatcgtcaacacgttgtacaaattccagcagtaaacgaatggcttgcaccaatcatttatagcgtaccagttcagttgttgtcttatcacgttgctgtattacgtggtacagacgttgaccagccacgtaacttggcgaagtcagtaactgtagag

SEQ ID NO: 8760 - DNA, 270 bp, Acinetobacter baumannii
atgaataaatcagaattaatcgatgcaattgctgaaaaagggggagtatctaagactgatgcaggcaaggcactcgatgcgacaattgcgtcaattactgaagcacttaaaaaaggtgacacagtaactttagttggttttggtactttcagtgttaaagaacgtgctgcacgtactggtcgtaaccctaaaactggtgaagagcttcaaattaaagcaacaaaagtacctagctttaaagctggtaaaggtcttaaagattcagttgct

SEQ ID NO: 8761 - DNA, 1026 bp, Acinetobacter baumannii
atgagcaataatacgattcaggcttatgctgcaatgcaggcaggtgaaaaactggtcccatatcaatttgatgcaggtgaattacaaccgcatcaggttgaggtaaaagttgaatactgtggtttgtgtcattctgatatttctgttttaaataatgaatggcgctcaaccgtgtaccctgtagttgcaggccatgaaattattggacgaattgttgctttaggctcagaagccaaaggactacaaattgggcaacgtgtcggtattggctggaccgctgaaagttgccaagcctgtgatgagtgtattggtggtcaacaagtactttgtacgggcgaaaatatcgcaacaatcgtgggacatgcgggtggctttgccgataaagttcgtgcaggctggcaatgggccattccccttcccgaagatttagacccagaaagtgcaggccctttactttgcggcggaattaccgtttttgatccactactcaaacacaaaatacaggcaacacatcacgtgggtgtgattggcattggtggtttgggtcatatagccattaagcttcttaaagcgtggggctgtgaaattacggcgtttagttctaacccagataaaaccgaagaactcaaagcaatgggagccaaccatgtggtgaatagccgcgatacagaagtggtaaaagctcaaaagggtaaatttgatttattgctgagtaccgtgaatgtgactttaaattggcgtgctttcatttctacgctagcaccaaacggttctttgcacttcttagggctcacactagaacctgttcctgtttctgtcggctcacttattgatggtgccaaatcagtaactggttcacctacaggttcacctgctgctctacgccaacttttaaagtttgccgcacgcaaaaaaattgcacctcaaattgagctatttccaatgtcacagctcaatgaagcaattgaacgtctacactcaggtcaagcacgctaccgtattgtgcttaaagcagacttcgcagaa

SEQ ID NO: 8762 - DNA, 468 bp, Acinetobacter baumannii
atggcaattcgccgtattgaaggtttattacatctcgcaagcgaaggtcgttatgcgattttagtgggtcgtttcaacagttttgttgttgaacacttattagaaggcgcgatcgacacgttaaaacgtcatggcgtaaatgaagataacattactgttattcacgctccaggcgcatgggaactaccgatcgttgctaaaaaattagctacatcaaaccagtttgatgccatcattgcactcggtgcagtcattcgtggtagcacacctcactttgactttgttgctggtgaatgtgcgaaaggtttaggtgtagttgcgttagaaagcagcttgcctgttatcaatggtgtattaactactgacagcatcgagcaagcaatcgaacgctcaggtacaaaagcaggaaacaaaggtagcgaagctgctttaactgcaattgaaatggttaatttattaaaggcaatt

SEQ ID NO: 8763 - DNA, 1035 bp, Acinetobacter baumannii
atggaaatcaatacgattattggcatcgttgttgccattattatcatgctaattggcttaagaatgattttaaaaaagccgaaccatgctgaaccctcgctagacagtgatttgcatattaatcctgaaagtaatcaaccggttatccctcgtcatgtacgagatcaacttgaacagccagaagttactgttgcgtcagcagccgttgctgaacgagtggaaccaactttaagcgagccagcacagtcagaagaaaagggaacaaaagaactagaacaggcttcacaagctcaaacagtccagacacaagtacccgttgaaaatacgccagtagaagtagaagaagttaaagctgaagaaaatactgttagcccaactgtaagtgaaaatagttcagttgagttagttgataccgtttctgctgaaccagaagttgttagctcatcagaaccaaaagttgcagaagggcaaccgaaaactgagccggaattaagcttaaatccaaatatcgaaactgctgaaattgctgagtttgaaggtgaaagcaacattcttgatgtacatttacatgagcagcagcgttttgatgacgaaagtgcgttagcaatggctgagcagattatcgcattaaatgtatatccaaatccgcgccgtgcgttatcgggtgataaagcactgaaagtgcttttaaaatatggtctacgttacggtgaaatgtcttgtttccaccgctatgaaaataccgatgagccgagtgcattgatgttctctgtattgcgtatgactgataatggtcctgctggtttcgatttagaaactttatcgactgaacaagttcaaggcttagcatttttccttgcacttccaaacagcaaagctgttaccggttttgacatgatgaccagtattgcaggccttattgctcgtgaaattgatggtaaggtttatgatgaaaataaccttgaatttacgccacagttaaaagaacattggcgccatcatgtgattgattatcgtccagcacaggcaacagcc

SEQ ID NO: 8764 - DNA, 696 bp, Acinetobacter baumannii
  misc_feature (479)..(479): n=g, a, t or c
atggcttatgtaatgatgcttgctcgagttttttcctcagaaaaatatgcaaacgaatttattaataacgggaaatttcgcttaaatactcttaatttctttaagggatataaggaagagctctctaataatataggggatcaatacgaaggcataagctttcgtgctacaggtgagcaagaagtcaaagttactatagaatataataatgaaagccatgagattgaggtaaatgaaatttacactcatgataattatgttctaaataataatattttctgtatgtatgccccagctgtagaacaagaaaaaaaatttactttagaggatatacaagaaattgttgcatttcaaaaagatgctgaaaacctaggaaattatttagttttaattgcaaatcccgaagaattttttgaaagatttgctaaaactgttaaaaagctggggtataaaatgaagagagaccttgtagagtacgntgattttaataacagtgtacatgtacctagggataaaattggctttgtcaaaagtgatcaattttctcatcaaaaagaatatagattgatgatcgatgatggaagaaacgtggatgagcatattgatttggaaataggttcattagctgatattacgtatttaattccaacagaagattttaataaatctttagaaataaaggttaaagaagaaaat

SEQ ID NO: 8765 - DNA, 1050 bp, Acinetobacter baumannii
atgagacaaacgattttagctgtattgtctttatcaacgcttgccgcacttttgactgggtgtggtggtgatatggtacttctaaactctaaaggtccagttggtcaaggtcaaagtgaccttatgatgactgcgatctatttaatgttacttgtggtgattccttcaatcatcatggcattatggtttggttggaaatatcgtgcgtcaaataaagatgcagactataaacctacatgggcacactcaactgcaattgaagttgtagtatggggtattcctgtcattattattggtattttagcttggttaacttggtggggttcccacaagtatgacccataccgtcctttagaatcagataaagcacctttaactattcaggttattgctgaacagttcaagtggatttttatttatcctgaacaaaacattgcgactgttaacgaagtacgtttcccagagaaaactccgttaagtttcaaaatcacttctaacttcacgatgaactcattcttcattccacagttaggcggtcagatttatgcaatggcaggtatgcaaactcaccttcatttgttagcaaatgaaactggtgtatatcgtggtttctcttctaactactcaggctatggtttctctcaaatgcgtttcaaagcgcatagcgttacagagcaacaattcaacgaatgggtagcggctgttaaagcaggtaatggtacaactattaacccagaagcagttcaaaaaactacgcttgaccaagctgaattggcaaccttacgtgatggcgatcgttctaagcaccaaatcgagcatttagtaaatcgtgctaaagctgctggtgatcaagaagcgcttgctaaagcagaagcgatgaaaccgttcccgactaagccacaccctgtgacttattactcttcagttgaaccaaaattgtttgaaacaattatcaaccactatatgagtaactatcatggtgctgaccactctgctgcacatacaacagcagaaactcatgttgcagctgaacacgctgctcaaggggaa

SEQ ID NO: 8766 - DNA, 840 bp, Acinetobacter baumannii
atgcttttggctattttgccgtgggcaattcaatggcgcttagctcatggattggcaaaccttgcttggaaatatttaaaatctcgtcgtaaaaccacaattcgtaatttagaggtttgctttccagaatggacacctgaaaaagtacagcaacaagcaaaacaagtttttgtagatatgatgcttggtatttttgagaccttaaacgcatggtataagccttactggtttaaaaaccgtgtcactattgaaggcttagaacacattaccaatgcacaagctcaaggcaaaggtgttttattgcttggtacacatagtactttactcgatgcaggtggttatgtatgcgcccaatatttcgagccggatgttgtgtatcgccctcaaaacaatcccctcctcgatatgctaatttatcgttgccgcggcacaatttataaagcacaaattgatcatgatgacatgcgtggtttgattcgtcatcttaaagagggtgatgcaatttggtatagtcccgatcaagactttgggcttaaacaaggtattatggcaccattttttggagtgccagctgccactgtaaccgctcaccgtcgtttattaaaaatttccaaggcggttgctgttcctttatatttttatcgtcatggcgatgtgcaagatcctaaatatcatattctaattgaacctgcggttgacaatatgccaagtgaagatgaagtcgatgatgcaacgcgtgtgaataagattattgagaaccagcttcgtatcgcaccaactcaatatatgtggtttcaccgtcgttttaagacacgtcctgagggatatgaagagatttat

SEQ ID NO: 8767 - DNA, 796 bp, Acinetobacter baumannii
attagcgcctttaaggcatgaattattacatccgattgaacgacatgcaggatgaaaatgatcgtcaatttattactgcattagcacgtggtttagagctattacgttgttttacgcctaaacatcagcatttgggcaatcaagagcttgctcagatgacaggtttgccaaaccaaccattactcgcctcacacataccttgtcgcgtttgggttatatcaaacaagtacctaactcaagcaaatttcagctttcagttggagttcttgcgtttggttattcgatgctgtctaacgtatcgattcgctctattgctcatccatatatgaaaaatttggcagactatgctggcgctgctgtagccatggcaacacgtgatcgactgaacatgatttatcttgatgtggtgcaaggcaaaggcaatatgaccatgcgccgtcaagttggaacctatttaccgattcatttaagttcgatgggacgtgcgtgtttagctgcaatgcctgaagatgaaagagagttcttacttaatgccattcgtaacaagcacaaagaagactggatcaaaattaaccgtgatttagacaaagcctttaaagattaccaagattttggatactgtttttctattggcgaatggcataaagatgtcaattcggttgcggttccactcattcatgaacaacatggtttattggtgtttaactgtggtggtccaagctttattatgaaccgtgaaaaactcgaagaagatattgcaccacgtcttttacatatggtgaataatattcgtacc

SEQ ID NO: 8768 - DNA, 1614 bp, Acinetobacter baumannii
ttgattgagtttgttcgctggtctcccgagagagcgcaacactatcgaaataaaggctattggattgaccaacctttgacgcgcattttaacggtaggggttcaatcgcatccgcattcgccggcaattatttgtggtgaacgtcagttgagttatatcgagctggatcggctatcaacaaatttagcttctcgactagctgaaaaaggcttgggcaagggtgatacagctttagtacaacttcccaatgttgcggagttttatattgtcttttttgccttgcttaaagcaggcgtggttgtactcaatgcgctatatagccatcgccaatatgaactaaatgcctttattaaacagattcaacctaagcttttaattggttcgcgtcagcatgaagtatttagcaataatcaatttattgattcacttcatgaagtaaatttaagtcctgaaattattttgatgctcaatcatcaagctaccgatttcggattattagactggattgaaacaccagcagagaccttagtcgatttttcatctacacctgctgatgaagttgctttctttcagctatcaggtggaagtacgggaacaccaaaacttattccacgcacgcataatgactatgactatagcgtgcgagccagtgccgagatttgcgatttaaactcaaatacccggttattgtgcgctctgccagctccgcataactttatgttgagttcacctggtgcattaggtgttttacatgcaggtggatgtgttgttatggcaccaaatcctgaaccgctcaattgcttctctattattcaaagacatcaagtcaatatggcatctttagtgccgagtgctgtcattatgtggctagaaaaagccgcgcaatataaagatcaaattcagtctttaaagttgcttcaagtaggtggagcaagtttccctgaatctttagcccgtcaagttcctgaagtcatcaattgtaaattacaacaagtatttggaatggccgaaggcttggtcaattacaccagactcgatgactccgatgagcaaatatttacgacacaagggcgtcctatcagttctgatgatgaaatcaaaattgtggatgaacagtataaagaggttccagaaggtgaaatagggatgcttgcgactcggggaccttataccttttgcggttattaccaaagccctgaacataattcacaggtctttgatgaggacaactattactattcgggcgatctcgtgcagcgtacccctgatggtaatttacgtgtagtaggaagaattaaagaccagattaaccgtggtggcgaaaagattgcttcggaagaaatagaaaaacttattcttttgcatccagaagttatgcacgcagctttggtcgcaattgttgatgaacaatttggtgaaaagagttgtgcctttattgtttctcgtaatcctgaacttaaagctgttgtgctcagacgccatctcatggagttgggtattgcacaatacaaacttccagatcagatcaaattaatcgaaagtttgccactgaccgcagtcggtaaggtggacaaaaaacaacttcgcagcattttaaatacatctacaacatct

SEQ ID NO: 8769 - DNA, 3983 bp, Acinetobacter baumannii
attaatgcatcagaagcgtcaggcaacgttactgttacaggcgtattgaaaaatgttccggcagatgcagcaaatacagtggtcactgttgtgatcaatggccagacgtatactgcaactgtagatagcacagcgggcacatggacagtaagcgtaccaggtagtgacttgactgcggatgcagataagacaattgatgccaaagtaacgtttacagatgcagcaggtaatagcagcagtgttaacgatacacaaacttatacacttgataccactgcacctgatgcaccagtaattaacccggttaacgggacagatccaattacaggtactgcagagcctggttcaaccgtaacagtaacctatcctaatggtgacacagcaacagttgtagcaggacctgatggcagctggtcagtaccaaacccaggtttaaatgatggtgacgaagttgaggcaattgctacagatccagcaggcaacccatctttaccaggtacagctattgttgatgcagttggtccaaataccgatggcgttaacttcacggttgattcagtaacagctgacaatgtgattaatgcatcagaagcgtcaggcaacgttactgttacaggcgtattgaaaaacgttccggcagatgcagcaaatacagtggtcactgttgtaatcaatggtcagacgtatactgcaactgtagacagtgcagcaggtacatggacagtaagtgtaccaggtagcggtttggttgctgatactgataaaacgattgatgccaaagtaacgtttacagatgcggcaggtaatagcagcagtgttaacgatacacaaacatatacagttgataccactgcacctgatgcaccagtaattaacccggttaacgggacagacccgattacaggtacagcagagcctggttcaaccgtgactgtgacttaccctgatggcaccactgcaacagtggtagcaggcacagatggtagctggtcagtaccaaacccgggtaacctggtggatggcgatacagtgactgcaacagcaactgaccctgcaggcaacacttcattgccaggtacaggcacagtttcagcagacatcacagcacctgtggttgcgctggatgacgtgttgacgaatgacagcacaccagcacttactggtacagtgaacgatccgacagccactgtagttgtcaatgtggatggtgttgactatccggcagtgaacaatggtgacggcacctggacgcttgcagacaatacacttccaacactcgcagacggtccacacaccattaccgtgactgcaacagatgcagcaggtaacgtaggtaacgatactgcagtggtgaccattgatacggttgcaccaaatgcaccggtgcttgatccgatcaatgctacagacccagtgagcggtcaggcagatccctgagttcaatccatgccggtgacctatgcctgatggcaactcagccaccatcagctatcaggcacacatcgatatctgatctacgttccccacccagctgacctggtggatggcgatacagtgactgcaacagcgactgaccctgcaggcaacacttcattgccaggtacaggcacagtttcagcagacatcacagcacctgtggttgcgctggatgacgtgttgacgaatgacagcacaccagcacttactggtacagtgaacgatccgacagccactgtagttgtcaatgtggatggcgttgactatccggcagtgaacaatggtgacggcacctggacgcttgcagacaatacacttcctgcattcgctgatggtccacacaccattaccgtgactgcaacagatgcagcaggtaacgtaggtaacgatactgcagtggtgaccattgatacggttgcaccaaatgcaccggtgcttgatccgatcaatgcaacagacccagtgagcggtcaggcagagcctggttcaaccgtgactgtgacttatcctgatggcacaactgcaacagtggtagcaggcacagatggcagctggtcagtaccaaacccaggtaacctggtggatggcgatacagtgactgcaacagcaactgaccctgcaggcaacacttcattgccaggtacaggcacagtttcagcagacatcacagcacctgtggattgcgcatggatgacgtgttgacagaatgacagcacaccagcaacttacatggtaacagtgaacgatccgacagccactgtagattgtcaatgtaggatggcgttgactataccggcagtgaacaataggtgacggcacctggacgcttgcagacaatacacttcctgcagttaacatgatggtaccacacaccattaaccgtagaactgcaacagatagcagcaggtaatcgtaggtaaacgatactagcagtggtgaccattgatacggttgcaccaaatgcaccggtgcttgatccgatcaatgcaacagacccagtgagcggtcaggcagagcctggttcaaccgtgactgtgacttatcctgatggcaccactgcaacagtggtagcaggaccggatggtagctggtcagtaccaaacccaggtaacctggtggatggcgatacagtgactgcaacagcgactgaccctgcaggcaacacttcattgccaggtacaggcacagtttcagcagacatcacagcacctgtggttgcgctggatgatgtgttgacgaatgacagcacaccagcacttactggtacagtgaacgatccgacagcaactgtagttgtcaatgtggatggcgttgactatccggcagtgaacaatggtgacggcacctggacgcttgcagacaatacacttcctgcgttaactgatggtccacacaccattaccgtgactgcaacagatgcagcaggtaacgtaggtaacgatactgcagtggtgaccattgatacggttgcaccaaatgcaccggtgcttgatccgatcaatgcaacagacccagtgagcggtcaggcagagcctggttcaaccgtgactgtgacttatcctgatggcaccactgcaacagtggtagcaggcacagatggcagctggtcagtaccaaacccaggtaacctggtggatggcgatacagtgactgcaacagcaactgaccctgcaggcaacacttcattgccaggtacaggcacagtttcagcagacatcacagcacctgtggttgcgctggatgacgtgttgacgaatgacagcacaccagcacttactggtacagtgaacgatccgacagccactgtagttgtcaatgtggatggcgttgactatccggcagtgaacaatggtgacggcacctggacgcttgcagacaatacacttccaacactcgcagacggtccacacaccattaccgtgactgcaacagatgcagcaggtaacgtaggtaacgatactgcagtggtgaccattgatacggttgcaccaaatgcaccggtgcttgatccgatcaatgcaacagacccagtgagcggtcaggcagagcctggttcaaccgtgactgtgacttatcctgatggcaccactgcaacagtggtagcaggcacagatggcagctggtcagtaccaaacccaggtaacctggtggatggcgatacagtgactgcaacagcaactgaccctgcaggcaacacttcattgccaggtacaggcacagtttcagcagacatcacagcacctgtggttgcgctggatgacgtgttgacgaatgacagcacaccagcacttactggtacagtgaacgacccgacagcaactgtagttgtcaatgtggatggcgttgactatccggcagtgaacaatggtgacggcacctggacgcttgcagacaatacacttccaacactcgcagacggtccacacaccattaccgtgactgcaacagatgcagcaggtaacgtaggtaacgatactgcagtggtgaccattgatacggttgcacca

SEQ ID NO: 8770 - DNA, 849 bp, Acinetobacter baumannii
atgtttgaccctcgtcttcttcgtgcatttgtgaccatttttgaaagtggtagttttacagccgccgctgataagttgcatctgacacaatcaactattagtcagcagttagcacgcctcgaagaatcggttggtcactcccttattgatcgcacagcaagaccattacaattaacagcttcaggtgaatatttaattggttatgctcaaaggattttgacgcttcaacaagaggccgaggcggtcttaaaagatccagctggcagcatccctattcgaattggattgccagaagatatgatgagtactgctatggcagaagtttttggtctatttgctcaagaacatcgtactattcggttagatgtcacttcaggcttaagccgtaacctgacagagcgctatcgtaatggtgaactggatattgttattgtgaaagaatcagcagccagcgccgattgttatgcctcttttcctgaagaaatggcatggtttgaaagtgaaaatgcgattacgcctttgtctgaaccaattcgtttagtgacctttcctcaaggtggactttaccgagatgaaatgtttgaaacattagaacgtgaacgacgacgttggtatattgcttttacaggaagtagtttagaaagtgttctagtgagcgtcgaaacaggtttgggaatatctttactaccagttagtaccacaaaaggccgtcgtgtacgtagatataaatctttaggtgaagcttcacctatggttgtttcaatttatacatgggaaaaagctgggttgatttcccagcttgtcgatcacatgactaccgttttacatgatcgcttccaatcaggctcc

SEQ ID NO: 8771 - DNA, 918 bp, Acinetobacter baumannii
atgataaataaaaaaccgcgtattccgagccctgttcaaattcctgaacatttaagctttttacaaggttttcgcgactatctggttgcacaaacagtcagtccgcatacgcgcaatgcctatttatccgacctgatccaatgtagtgaacttcataaaaaaaatagattgccagattggacgagcgatgacatttctgacgtcctcattgaacttaccaaagtagggaaaagcccacgctcaattgcccgttgcttatctgctctacgtcagttttataaatttctacgtgaacagaaattacgaagtgataatcctgtagctactcaccattcaccaaaaattggccgagctttacctaaagacttgtgtgaagaagatgtagaagcgctcattcaggcgccagacattacaacggcgttgggcttacgtgaccgagcaatgtttgaagtcctttacgcttgtggtttacgtgtctctgaattactgaatttacgcctcgaacttattaatttaaaacaaggttacctgcgtattacgggtaaaggtaacaaagaacgtttagtgcctttaggccaatatgcctgcgattgggtggaacgctatttaaacgaggcacgtccacaactttataaaagttcaactgactatttatttttaacccagcacggtggaattatgagccgtcagaacttttggtatgccattaagcgttatgcgctacaggccaatattcaagctgaactttcacctcacaccttacgtcatgcttttgccacgcatctacttaatcatggggcggacttacgcgtagtacaaatgttactgggtcatagtgatttatcaaccacgcaaatctatacgcatgtagcacaagtcagaatgcaacaattgcatgaaaaacatcaccctaggggt

SEQ ID NO: 8772 - DNA, 1536 bp, Acinetobacter baumannii
atgacagatttagacttatctcgtgcccgaattgccgtcattggttctggcactatgggcatcggcattgcccagttagccatcgttaatggacacacgaccgttttatatgatctagatgctcaaaaagcgcaacaagccgttcaaggtttagggcagacgtttaaaaagctggttgaaaagagcaagctcacagagcagcaagctgatgaagccttagcgcgtttaacagtggtcaatcaaattgaagcgctgcgtgatgctgacttggtgattgaagcagtcgttgagaaaaaagaagttaaacagtctttatttaagcaacttgctgaaatttgtagtgcgcaaaccatttttgcaagcaatacatcttcaatttcagtgactgcaatttcggcgggcattactcaccctgagcgggtagtgggtttacacttttttaaccctgcaccagtcatgaaactggttgaaattgtacaaggcttaaaaaccccaaacagcttatgtttggctttaaaaaacttgatgctgaattggaagaaaattcctgtactcaccaagtcgactcccggttttattgttaaccgaattgcacggccgttttatgcggaaggctttagagcactgcaagaacaagtcaccagctatgaccagctagattatgccttaaagcaatgtggcggttttgcgatggggccttgtgaacttactgacctgattgggcaagatgttaacttttcggtaacccaaagcgtttaccaagagttcttttacgagccacgctatcgtccaagcctcgttcaaaaagaattggtcgatgcaggtgcttgggggcgtaagtcaaaacaaggcttttatacctataacgaaaaaaatcaataccagacatttcagcctcaagctgtggttgccaaaccagtcgatgcccatattcagctaaaagggacttggtctcagctacctgcttttttaacgcgtttaggtttaaaaagcggatctgcgagtgatgacaatatccttcaaattgatgatatcgacttacgtttaagccaaggtgagtcagccaatattcattacctaagccgtaaagtggttttaatggattggcaccatgattttgagcaggcggaggctttagtactcagtcataacgagctttgtgaaacaaatgatctggctaaagttgaggcttactttgcacagtttggtatgagcgtgatgtggattaaagaccatccggcactgttaaccttacgtaccatcgctttactcattaatgaagcctgcgaagcaagtttacatggagttgcgagtctggaagatattgataatgccatgaaatatggagtgaattatcctaaaggcccttaccagtggttgacacaaatgggtggcgcttatgtgctccaaaccttaaataacttatatgcactgtatggagaggaaaaatatcgcgcgagtatctacctcaagcaatatgtagcgaaaacccaaaacattgctactcaatattcacgtgatatgaccgaatttgca

SEQ ID NO: 8773 - DNA, 1248 bp, Acinetobacter baumannii
atgtcgaaattatggatgtacactacccttatgctctcaggttcagtgtgggctggcagttttattgataacagttcagtagaactcaccacgcgaaatttctattttgaccgcgactaccaagagcaatctgcttaccctgctgccaaggactggacacaaggttttattcttaaagccaattcaggttataccgaagggactgtcggttttgggctagatgtgcttgcaacggcaggctttaaactcgatgctgatgccgagcatggcggtacaggaaacttacctagagacacgcgtaccaatgaacctgccgactcttatggcgaaattggggtcacagcaaaagctaaaatgagccagaccgaactacgcatcggtacattaatgccaatgaaccctgttttagtggcgtcacctgctcgtttgcttcctcaaacctatagaggcatttcactgaccagtaaagatattaaagattttgatttacaggcagcctacctcgataaagtgaatcatcgtgattcgactaactatgaaaaaattaaaatttctggggtgaatggacgatttaaaagtgccgaaactgatggactctattatttaggtggaaactatcagtttaatcctgcactcaaactcaccgctttttacatggatgttgatgatctttataaccaaaccatggtcggtgctttacaccaacacaaaattaatgacaccactaattttagctctcaattacgttactaccgcagccgagatgacggacaagcaaaagcaggcttagtcgataatgatctttatcacgcgcatttcgaactaaaacatcaaaaccataaatttatttttggaaccttccaacatcatggcgacaccgcctttccatatttgactggcggtgaaactggacttcttattgatacatggccgggcgagtttttaaacccaaaagaaaaagcctatagcttccgttatgaatatgactttaaagattatgttccgggtttacgttttatgacccgttacaccacaggtcacaatatttatgcacccaatttaggcggaaccaatctaaaagaacgcgaaacagactttgatttaggctacaccattcaaagtggctggttaaaaaatctagggttacgcgcgcgctacgccatttatgacaacaacatgctctctacagccaatatcaaacctgtaaacgaaacccgtatcaacatcgactacacatggaaatttaaa

SEQ ID NO: 8774 - DNA, 1125 bp, Acinetobacter baumannii
atgcagatcggaatcccaaccgaaactgtcgtcggtgaaaatcgtgtagctgctacgccagagacagtaaagaagttgattagcgctggtcatagcgttgtgattgaacgtggtgctggtgtaaaggctgcgtacattgacagtgcttatgaacaggtcggtgcaaccattacggatgatgcctatacgggtagtcaaattattttgaaagttcgtgcgccacaaggcggggaaattcaaaaacttgcagcaaatacaactgttgtagcaatgtttgatccttatcgtaataccgagctagaccaatttgcgaatcagcaagtgtctgcttttgctctggaattgcttcctcgtacgctttctcgtgcacaaaacatggatgtgttgtcttctcaagcaaacttagctggttataaatcagttttgcttgcggctgctgaatatcaacgcatgttcccaatgcttatgactgctgctggtactgtaaagcctgcacgtgttgtgattatgggtgttggggttgcaggccttcaagcgattgctactgcaaaacgtttgggtgcaattgttgaagcaactgatttgcgtccaacagcaaaagatcaggttgagtctttaggtggtaagtggttagacgtaccaatgtctgaagaagaacagcaacgtgcagcagatgcagcaaaaaatggttatggctggatgccgggtgagcaatacatcaaagaccaagctgcgattgtagataaggctgtgtcgaatgccgatatcgtgattacaacagcattgttgccaggtcgtgatgcaccgcgtctgatcaaagctgaaactgttgccaaaatgaaaccaggctctgtcattttagatatggcagttgaaacaggcggtaacgttgaaggttctaaagttggcgaaactgttgtcactgaaaatggcgtaaaaattttgggtattccaaatattccggccactgttgcgacagaagcttctgcattatatgcacgtaacgtttttaatttcgtagagactttattcgacaaagagaaaaactttgcgattaatcaagaagacgaaatccaaaaagccctattggtcactcatggcggtcaagtgctgcttaagcgtggt

SEQ ID NO: 8775 - DNA, 2274 bp, Acinetobacter baumannii
atggctttattgaatcatcaacgtccactttgggcattacttgcagcagccccattgattgcgacagtaagtagcagtgcctatgcccaaacatggaagatcaatttacgtgatgctgacttaactgcctttattaatgaagttgcagacattacaggaaagaacttcgctgtagatccgagagtacgtggtaatgtcacggttatttctaataagccattaaataaagatgaagtttatgacctatttcttggggtcttaaatgtaaacggggtggttgcaattccttctggtaataccattaagcttgtaccggatagcaatgttaaaaactcgggaattccttatgattctagaaatagggtccgtggtgatcaaatcgttacacgtgtgatttggctggaaaatactaatccaaatgacttaattccagcactccgtcccttaatgccacaatttgcacatatggcggcaattgcaggaaccaatgcacttattgtttctgatagagctgcgaatatttatcaacttgaaaatattattcgtaacttggatggaactgggcaaaatgatattgaagcgatcacgcttcagtcgagccaagcagaagaaattattacccagcttgaagcgatgagcgcaacaggcgcatctaaagattttagtggtgcccgtattcgtattattgctgataatcggacaaaccgtattttaataaaaggtgatccgcaaacacgtaaacgtattcgtcatatgattgagatgctggatgtaccttcggcagatcgtttaggtggcttaaaagttttccgtttgaagtatgccagtgctaaaaacttgtctgaaattttgcaaggcttagtcacaggacaggcagtatcttcatcgaataatagtaataattcatctaactcatcgaatccgattaatagtttaattggtaataaccagaattctggttcaaatacatcgggttcaaatggtgcctcaatttcaactcctgcaattaacctaaacggtaattcgaacagtagtaatcagaataatatcaccagctttaatcaaaacggtgtgagtattattgcagataatgctcagaactcattagtagttaaagctgatccccaattaatgcgtgaaattgaatcagcgattcaacaactagatgttcgtcgtcaacaagtgcttattgaggccgcaattattgaagtctctggagatgatgcagatcaacttggaattcaatgggcactcggtgatttatctagtgggattggtttacttagctttagtaatgtaggggcgagtttatcttctatcgctgctggttatttatcgggtggttcggctggagctgcatctgctatcgctaatggagctaataaaggtaatggtgcaactttaggattgggcaattttgataattctcgtaaggcatatggtgcactaattcaggctctcaaaaccaatactaaatcaaacttactttcgacaccgtccattgtgacgatggataatgaagaagcttatattgttgtaggtcagaacgttccatttgtcacagggtcggttactaccaatagtacaggtatcaatccctatacaactgttgagcgtaaagatgtcggtgtgaccttgaaagttgttccacatatcggtgaagggggtactgttcgtttagaagtagagcaagaagtttctgctgttcaagatagccgtgggcaagcagctgacttggtgacaagtaaacgcgctattaaaacagctgttttagccgagcatgggcagactgtggtgctaggtggtttggtgtcggatgacacttcgctttcaagacaaggtatacctggtttaagtagtattccttatgttgggcgattgttccgatcagataacagaagcaatgtaaaacgtaaccttctcgtttttattcacccaacaattgtgggcgatgcaaatgatgtacgccgtttatctcagcagcgctataatcaactttatagcttgcaattggctatggataaaaatggcaactttgcaaaattacctgagcaagttgatgatatttataaccaaaaaatgaccccgccgagtattgcctccaagccaaaaaattaccaacaggttccatcaggtggtaaaagttcgaccataactacgccggtagctgtagaacctaccgtccaaaagcaaaccctacagttgcctgatcctgaaattaatcgtactaaaaatacagtaacaacaacgacactgcgtccaagcacagcgccg

SEQ ID NO: 8776 - DNA, 825 bp, Acinetobacter baumannii
atgcctaaagcattagcagatgccccaattggtatttttgattcaggtattggaggtatgtcggttgcagcagaaattgccaaatatttgccaaacgaacgtattgtgtattatgcagatacagcctatgttccgtatggtcctcgctctgatgaagaaatcagagagctaacggctcgtgccgtcgactggttatatcgtcagggttgtaaaattgcggtcgtagcttgtaatacggcttccgcatttagccttgatcatttacgagaacattatggcgaacacttcccgattgttggcttggtaccggcactaaaacctgcagtattacaaactcgttctaaagtggttgcagtattggcgacaccagctacttttcgtggacaactcattaaggatgttgtcgaaaagtttgctgttccagcgggtgttaaagtgatgactctaacgagtttagagcttgtcccttgtgtagaagcagggcagcaaatgagccctgcttgtttaaatgcattaagagaagttttacaacctgcagttgagcaaggcgcggactatttggtacttggttgtacgcactatccttttttaaatgaagccattcattatctttttgataaccaattcacactggttgattcgggattggcagttgcccgacaaacagcccgtattttaataaaaaatgagttattatgtgaccaaatgcgtcagaatgttgcacgtattgaatgttatgtaagtggtaataatgcagatgcattacaacctgttttacaaaatatgattccacaagaattgacatggacgctgcacaatctgagt

SEQ ID NO: 8777 - DNA, 1194 bp, Acinetobacter baumannii
atggcaggcttagctcagaccacaatccagaaaatcaatcattggtatgaacggatattgccgaaatggccagcggaagtgacgccacgtaatgtcttgattttctgtgtggttgcattgttatgtatcggttcagtgatggtcgcatctgcttccatgccttatgctgaatatatgcatgaaaacccatttcactatgtgattcgtcatgggatctcaatcgttgctgctggcgtggtggcttatttaacctatcgaatatcactcaatacatggtttaaaaatacctttccactgtggttattaactatggttttgttacttgcggctttggctgtaggttcggaagttaacggttccacacgttggattaaaattggtggttttaccttgcagccaacagaggttgccaaggttatgatggccatctttaccgcagattacgtagtacgccgtgccaaagaagtccgtacccactggaaaggcttacttcgtttaagtggcgttatggcaattacggtaggtttaattattgccgagcctgacttgggtgcgacggtggttattgtcatgatgatggtcggtgtgttctttctagcgggtgcgcctccaacacaattcttaatcatgcttggtgcaattgtcacgggtattgtgtttttgattttatttgaaccttaccgtttccaacgtttgatttcgtttactgacccttgggcagacccattaggtgtgggttatcagttatcaaatgcgttaatggcttttggtcgtggtgagtggtttggtacaggcttggggcatagtgttcaaaagctttcctatttaccagaagcgcatactgactttatgttggctgtgttaggtgaagaatttggtttctttggtatttcgattgtcattggcttatctttcttgatgctggcatgttgtatcaaaatcggccaccgtgccttgaaacatcattatcttcgcgcaggctatttggcttacggtattagtattattttcttactccagattttggtaaatgcgggtatgaacatgggcttaatgccaaccaaaggtttaactctgccatttattagttatggtggtacgtctttaatgatgtgtgcagctatgattagcttgatcttaaagattgatgcttcaactcaagaagtgaaccctgagagggaagaatcaaacttc

SEQ ID NO: 8778 - DNA, 303 bp, Acinetobacter baumannii
atgcactgtgatatttatagatcgagcaaaaaagatgaaatgtacatttatattgctcgtccaaactatcctgatgaaacggagcaagccgatccgtttgaaaaagttccagaagctgttttacaagcctttggccgtgcaacgtttgtcatgcatttagaattggctccaacacgtaaattagcgcgtgtaaatgttttacatgttctagactcattacaaacaaaaggcttctttattcagatgccgccagaagggttaattaacccaaatgcagttgaaccagagggcttacgtggtgcg

SEQ ID NO: 8779 - DNA, 1506 bp, Acinetobacter baumannii
atgtcaaattgcccgaaaaaatatattgtcgcttttgatcagggaacaacaagctcaagagcaattgttttagatcatgatgcgaacgttgtcagtattgctcaaagagaatttacccagatttaccctcagccaggttgggttgagcatgatcctatggaaatttgggcaactcaaagtgctgtatgggtcgaagcattggctcaagctggcatcaagagtgaacaagttgcggcaattggaattacaaaccaacgggaaaccactattgtctgggacaaaaaaacaggaagacctatttacaatgcgattgtttggcaaagccgacaaacaacggaaatatgcaatcaattgtataaagcaggttggcaagaatatatccgtaagaccactggtttagtcattgatccatatttctcggccacaaaaattaaatggattttggatcatgttgaaggcagccgtgagcgtgctgaacgaggagagctattattcggtacggtggacacttggctgatttggaaactaactaatggggccgtccatgtcactgattttaccaatgcatctcgaaccatgctgtttgatatcgaaaagcttgagtgggatgaaaagcttttacaagctttagacattcctagagcaatgttgccggaggttcgtagttcatctgaggtttatggatatacacataccattagtggacaagaagtaggaatcccaattgccggaatcgcgggtgatcagcaggctgcgctttttggtcaaatgtgtgttgagtcgggacaggctaaaaatacctacggtactggctgttttctactcatgaatacgggtaaaaagattgtccgttcagagcatggattactcacaactattgcctgtggtgcgagtggtgaggtgaactatgccttagagggtgccgtatttaacggtggttcttgcgtacagtggttacgtgatgaattaaaggttattaagaatgctaaggattccgagctttatgcaacacgtgtaaaggataataatggtgtatatgtagtacctgcttttaccgggttaggagcaccgtattgggacccgacagctcgcggcgcaatttttggtctgacgcgtggggctagtattgaacatattatccgcgcaactctagagtctatagcctttcaaactcgggatgttttagatgccatgcaacaagatgcagaagaagagcttcgtacactccgtgtcgatggaggagtaacggaaaataatttcttaatgcaatttcaggctgatattttagcgacaccagtagaacgtccaataatgaaagaaactactgctttgggtgcagctttccttgctgggctggcgacgggtttctggcaagatctacatgagttaagaaataaatctgccatagaaaaggtatttgagccaaaaatgtcttctgagcaatctgagatgatttataagggttggctcaaggcagttaaacgtagtcaaagttgggctgaggat

SEQ ID NO: 8780 - DNA, 1698 bp, Acinetobacter baumannii
atgaaaatgtcacgtcgtgcatacgcagaaatgtttggtccaacggttggtgatcgtattcgtttggctgatacagcgctttttattgaagttgagcaagacttaacgacatatggtgaagaagttaaatttggtggcggaaaagttattcgtgacgggatgggacaatctcagcttctagctgatgaagttgccgatacagtcataaccaatgctttaattgtggattggtggggaattgttaaagccgatgtgggcttaaagaatggacgaatctggaaaattgggaaagctggaaaccctgatattcaacccgacattaccattcctttaggtgctgcgacagaagtaattgcaggtgaaggacaaattttaacagctggtggtattgatactcatattcactggatctgtcctcagcaagttgaaaccgcgctgatgtctgggacaacgacaatggtggggggggggacaggacctgcggcaggtacttcggcaacgacagtgactccagggccttggcatattgcgaccatgttgcaggcgattgatgatttgcctatgaatattggtctattgggtaaagggaatttaagtttacctgaccccattagcgagcaaattaaagcaggagtaattgggttaaaactacacgaagattggggttcaacacctgcggctattgataactgtttgagcgttgcagatgagtatgatgtacaggtcgcaattcatacggatacattgaatgaaggtggttttttagaagaaacgctagcggcatttaaagaccgtacgattcatacgtaccataccgaaggtgcgggcggcgggcatgctcccgatattttaaaagcaattgggcaaagtaatgtcttgccatcttcgaccaacccaacacgaccttacacgatcaataccattgatgagcatttagatatgctcatggtatgccaccatttagacccagcaattgctgaagatattgcttttgcagaaagtcgtattcgtcgtgaaaccattgctgctgaagatattttacaagacttaggcgcaattgccatgatgtcatctgactctcaggcaatgggacgtgtgggtgaagtgattttacgaacttggcaaactgcccacaaaatgaaagtacaacgtggcccattagagggtgataatgagtttcatgataacaatcgcgttaaacgctacattgccaaatatacaattaacccggcaattacccatggtttaagccatgaaattggttcggttgaagtcggaaaacttgctgatttagtgttatggaagcctgcgttttttggcgtgaaaccttccatgatcattaaaggtggcatgattgcagcagcgccaatgggtgacattaatgcttcaattcctacacctcaaccagtgcattatcgcccaatgtttggtgcttatccacgtggtgtacataacacctgtattacctttttatctcaagtcgcaattgataaaaaagttgctgagaagctaaaccttaaaaagttaatcagtccctgtaaaaacacgcgttcaattaccaaagccgatatgaaacacaatacatattgtcctgttatgcaggttcatcctgagacttacgaggtgcgggccgatggtgaattactaacgtgtgaacctgctgacgtattaccgatggcacagcgttatttcttgttt

SEQ ID NO: 8781 - DNA, 252 bp, Acinetobacter baumannii
atgcgtaaagatattcatcctgcttaccaacaagtgttatttcatgacaccaatgcagacgtgtacttcttaattggtagtaccattcagactaaacaaaccaaagaatatcaaggacaagtctatccttatgtgactcttgatatttcaagtgcatcacacccgttctacacaggtgaagtacgtcaagcaagtaatgaagggcgtgttgcaagctttaacaaacgcttcgctcgctttaatcgtaagagt

SEQ ID NO: 8782 - DNA, 234 bp, Acinetobacter baumannii
atgtctaaggtttgccaagttaccggcaagcgtccagtcgttggtaacaacgtctcacacgccaacaacaaaaccaagcgccggttcgagccgaacctgcaccaccaccgtttctggttagaaagcgaaaaacgttttgtacgtcttcgtttaaccactaaaggtatgcgtattattgacaaattgggtatcgaaaaggttgttgcagaccttcgtgctcaaggtcaaaagatc

SEQ ID NO: 8783 - DNA, 726 bp, Acinetobacter baumannii
atgaattctgtcaccctcccaatagtcgggcacatgtgctcaccttttcgagaaaaatttggtattccacgtcagcctaatttggtcaatatcgagtcttatatcgaaatggtagaaccttataatgacttattagcttttgagggaatcgaacaatttagtcatctttggctcatctggcagtttcatgacaataaaaatcaggagactgcgactaaattccggcctcaagttcgcccaccacgtctagggggcaatgaaaaaattggtgtgtttgcgacacgtagtatgtatcgtccagcgcctataggcttatctgtagtacgtttaaacaaggttgaaaaagtcggtaaatcattaagagtttatgttactggcagtgatttattaaatggcacgccaattttagatattaagccttatattcactattcagatgcaattgttgatgctcaaagtggttatgcgcaggccgaaccagaacgaaaatcggtcttgtggtctgaaaatgcattgtctacccagcagtctctttttaaaaataaagaaattaatgcacaatatcttgatgaattagaaaaagtattgtcattagatcctagacctgcctatcaagaagaccctgaacgagtctataaaatgaaattttcgaattttgatattcattttaaagttaatggcaatgtcattacagttgttgatatggtgaaagacacatctctcgtg

SEQ ID NO: 8784 - DNA, 1053 bp, Acinetobacter baumannii
atgcagcaagccattgaacttgccaaacgaggactctattcgacaaaaccaaatccaaatgtcggttgtgtcattgtcaaagatgatcagttaattggtgaaggttttcaccctaaagctggtcagccccatgcggaagtttttgcattacgtcaggcaggcgaacaggcacaaggcgcaactgcttatgtgacgcttgagccgtgtgctcattatggacgaacccctccgtgtgctgaggcgctggttaaggcgcaagttaaaaaagtggtagtggcatgtcctgatccaaacccgcttgttgcaggtaaaggtgttcagatattaaaaaatgccggtattgaagtagaaatcggtatttgtgaagatttggcagctcaacttaatcaaggctttttaaaagcgatgtctaccggcatgccatatgtacgattaaaagttgcttctagtcttgatggacgtactgcgatggcatctggtgagtcgaagtggattacaggttctgcggcccgtcaagatgtacaacattggcgtgcgatttcaggcgccgtgattacaggtattgaaactgtaattgccgatgactgccaacttaatgtacgttcacttcataatgttgatatcgaaacggttgctcagccaaaacgtgtaattctagatcggagagggcgtttaccgctcaccgctaaaattttagaaaatcctgaaactgtgatggtcatggggccatatcgtcaggaacttgctgacttaggcgtgatacaattagaaattcagcctttaaaaacactattacagaccttatctaagcaataccaaatttatgatgtgctgatcgaggctggcgcgacattatcaagtgcctttttgcaagaaggcttgattgatgaaatgatcagttatgtggctccaactttattggggcaaagtgcaagagccatgttcaatgcagattttgaatatatggcacagcaacttcgttttaaacttcttgatgtaacacaacttgatcaagatatacgcttaaggttaatccctacgcaagagaaagta

SEQ ID NO: 8785 - DNA, 1185 bp, Acinetobacter baumannii
atgtatattgaaatgaacgcgaaagaaatgagtaacattatgaacatgcaaccccaactcgatatggatttagagaacaagtatttgcttcttactccaggaccattatcaacatcggcaacagtacgccgtgccatgcaaaaagactggtgtacttgggaccaagaatacaactcgctggtacaagatattcgtaatcgactggtaaagttggcaaccagcgaacctgaaaaatatacggctgtgttaatgcaaggcagtggaagttttgctgtggagtctgtgcttgggtcagctattccacgtgatggcaaaatcttgatcattaataatggcgcatatggtgcacgtatggtgcaaatggcgcgttgcctaaatattgaagtgatcgagctgaactatttagaaacccaaacaccagatttacaagaagttgagcgtgttttaaaagataaaaccattagtcatgttgcttgtgtgcactgtgaaaccaccactggtattttaaacccgattcaagagataggccgtttagttaaagcggcaggaaaaatctggattgtggatgccatgagttcatttggtggagtacctatggatatggctgagcttgaaattgattttctaatttcaagtgcaaataaatgtattcaaggtgttccgggctttggctttattttggcaaagcgtgattgtctagaagcatgtaaaggtttggcacgttcggttagcctcgatttgtatgatcagtggaataccatggagcagcataacggcaaatggcgttttacctcgccaacccatgtggtacgtgcattttatcaagcattacttgagcttgagacagaaggcggtgttgctgcacgttatcaacgttatttacaaaaccaacaaaccttatctaaaggtatgcaacaacttggctttgagttggtacttggtgaagagtgcctacaatcacccatcattaccacttttctttacccaacagccgagaaatttagctttcagtcattctatgaaacgctaaaaaaatcaggctatgtaatttatccgggcaaagtcacagatctcaactgcttccgtataggcaatattggcgaagtttatattcaagatattgaagggcttcttgctgcaattgcgagctactgcgaaaaccacctaaaccaagctgtaacagca

SEQ ID NO: 8786 - DNA, 609 bp, Acinetobacter baumannii
atgcgcggtttatacctcattaccaatgatgacccaatccaattattattagaaaaattagacgccgcactcgcaacccgtcaaatcgcaattttacagtaccgccgtaaaaaaatagacaaagccgaacagcctgctgaagttgaacagatcaaacaattatgtgaaaaatatcaggttccttttgtcattaatgatgacctaaaactggctgctcagtttggtttaggtgtgcatttaggccaaagtgacggtgaaattaccgatgcaaaatcgcagttaccagaaggtgtcattattggccgtacttgcttaaactctttagagcttgctcaaaaagcaattgccgatggcgcaacttatgttgcctttggtgcggtttatgcaactgccactaaaccggaagctggcaatgtaggtatagaagtgattaagcaagcagcagctcaatatgatttacctatttgtgcaattggtggtttgactgttgaaaattcaaaacccgtgattgaggctggagctgacctctgtgcagtcattagtgatatattaggtcgatcaactgctgaaattcctgcccgtgtacaagcgtgggcacaattattttct

SEQ ID NO: 8787 - DNA, 1377 bp, Acinetobacter baumannii
atgaatctgctacttatcggtgtgttgttagcccttgtggcaattgcatatcaacttgggctgagaaagagccgccacctagcaggtaagggaagcaactcggcgacattacattctcgtcctggttattatggcgcactggttgggctttggtgcggtatccctgcttttttaattttgatcatttggaacttggttgagccaagtattttaaatcatattatctttaacaacgtacctgcttctgtgacagcttctctagatgaggcagcaagaagtgtacttgttgatcgagttcaagcgatcgcttctggttttggggtaagtgatcatcccgcggcttatgagttggctgctgctcagcaatatgcaaaatttcaaactattggctcttttgccaaatttgctgttgttgtctgtgccgctttgttgggcttagtgtgggcaaagaagaaaatcagccaagaatatcgcgcacgtaaccaagttgagcgtgcaattaatgttggtttgatcttatgttctggcgttgcaattttaaccacgatcggcattgtaatgtcgatgtttggtgaggcaatgcacttcttccattttgtaagtccaatcgactttttctttggtacagaatggaaccccggctttagtacttcaggtaatgcagaaggtagttatggtttattaccattactatggggcacgctcatggtcagtggtattgccttattagttgctgtacctgttggcttaatgattgctatttatttagctgagtatgcttcgccgtggttacgctcatgggcaaaacctaccattgaagttttagcgggtattccaacaatcgtttatggtgtttttgccatgatgattattgggccattctttaaagctgctggtgcgtatgtcggtattgaaattaatgcaaccagcgctttgactgccggttttgtaatgggaattatgattatcccattcgtttcatctttgtctgatgacattattactcaagttcctcgtgcacttcgtgatggttcgttaggacttggcgcaacgaaatcagaaacgattcgccaagtggttttaccggcagctttaccgggtattacaggggcatttttattggctgtttcgcgtgccgtaggggaaaccatgattgtggttttggcagcagggaacagtccacttctacatgcaaatccgtttgaagctgtttcgacagttaccgtaaccattgtaaaacagttaacgggtgatactgattttgcgagcccacaggccttggtggcatttgcactgggattaacactctttgtgatcactttaggattaaacattgttgcactgtacattgtgcgtaaataccgtgagcaatacgaa

SEQ ID NO: 8788 - DNA, 720 bp, Acinetobacter baumannii
atgaatcgtttttttatcgaaactgaacttacagttggctcaacaattcaactaactgaatcagtcttccatcattgggtacgtgttttacgcgcacaattacaagaacaagctacactatttaatgggcaaggtggtgagtatctcgtgacattgaccgaaattaataaaaaaaatgcgtttgtcactattgagaattttaatcctgtaaaccgtaatgctccatttaaagccattcttggtcaggtcatgagtaaaggtgaccgaatggattatgccattcagaaagcaactgaacttggtgtcagtaagattcagctcttgaccagtgaacgttgcgaaatgcgtttgaaatacgaccgcgatcaaaaaaagttagatcattggcaagctgttgcaattgcagcatgtgagcaatgtggactcaatttagttccagaagttttagcacctatttctcttcatgaatggttaaactcatccgaccttcctacatctaaatttgttttggctcctgaaaaagaacaaaaagatgtattggcagggatacaacctgaactagccctcttaattggtcccgagggtggtttaagtgaaaatgaaattacgcaagccaatcaagctggatttatgaactggtgtattggggaccgtgtattacgtactgaaactgcacctgttgtagcattatctattttaaattatcggtttttatccata

SEQ ID NO: 8789 - DNA, 1212 bp, Acinetobacter baumannii
atggaccaatctactacctctaaagcacgacccatgacttccacacaagggagctggtttgctattttggctgttgccatcgcagcctttgccttggtaacgagtgaatttttacctgttggtgtcttaaatagcgttgcagccgatttacacatttctgtaggtacagcaggtcttattattacagtacccggcattatggcagcaattgcggcccctctattacccgtttcagtaaagcaacttgaccgccgttatgtgcttattttactgactgctattatggtgattgccaataccattacggcttttgcagaaaactttcatgttctattgttgagccgtttgattttagggatttcaattggtggcttctgggcaacagcaattgccttaagcggtaagctagcacctgcaaatttacctattgccaaagcaactgctgtagtaatggctggtgtaactttcgccactgtactaggtgtaccgattggaacatggttaagtgagttttatgggtggcgcagtgcctttggaattacagctgctatcggtcttgttgtattagtgcttcagcttattttcttaccaaaacttttaccagagtcagcaatacatattcgtgatttacctgcattattacgcacacctaaagcacgtagcggcatgcttattgttttattaattgggcttgctcacttctgtgcatatagttatttagcccctttctttaaaaatgtagccgggtttaatgggacaactattagctcattattattgctttatggaatagctggtatttttggaaatgcatttgcagggtacagtggtaatttaaatgttcggtataccttagctttcgttggaacatgttttgccattgtattctttggcttcccaatctttgctatccatgagtttggtgccattgtccttactgcattatggggcttcgcatttggcgcattccctacctctgccaatatttggatgtttgtacacgcacctcatgctgtagaaaaaggtatgccgctttttgttggtatgttccaagtcatgattgctacaggatcattattaggtggttatgtagttgatcattttaatgaaaatactttaatttatggggtattaagcttcgttgccttagctttaattagtacatttaccttagccaaaggtttaaacaatcccaaagcaacatgtgaaaat

SEQ ID NO: 8790 - DNA, 1197 bp, Acinetobacter baumannii
atgtctaacagtcatgtcgatgtcattgtcttaggtgcaggtgcttctggactcatgttggctgcacatgctgctaaacggggacgttcggtcttaattttagaaaaagccaataaaattggtaaaaagattttaatgtcaggcggtgggaaatgtaactttaccaacctctatgtagaacctgaaaactatatttctcataatccgcactttgttatttctgccctatcacgctatagcaactgggactttattggtctggtctgtgattatggaattgcctatgaagaacgtaaacacgggcaattatttacgctaaacggcgctaaagaaattttagagatgttggtgagtgagtgtaataaaacaaacaatgtcgaaatccagacccattgtgaggttggacaagtcgatccattagaacaaggtggtttttcagtacacaccaatcagggccgttttagctgtgaatcattagtggttgctacaggtggattatccatcccaactttaggtggctctggttttggctatgaattggcacaaaaatttggacatacagttttcccaacccgtgctggtttagtaccatttactttttcagatcatattaaagaagtcactacacgcctaagtggtaatgctttagatgtgactctaactaactcgaagaatagctttactgaagcattattatttacgcatcgtggtttgagtggtccaagttctttacagctttcaaactattggaatacaggtgaaagttttaaaatcgactttttcccgagccaagatttagcaacttatttaaaagataaaaagaaagcccaacctaaagttttactgcgtactcttctgaacgaatttacggcaaaaagtatcgtacaagagttacaacaacttatatggccagagcagagcgagacagcaattggtaatatcagtgatgcacagctagatcatattgccgagcagctacatggttttattgttaaaccatcaggcacagaaggatatcgtactgctgaagttaccttaggtggaattgatacaactgaagtttcatctaaaacactcgaaagcaaaaagcagaaaggactatactttattggagaagtacttgatgtgactggccacttaggaggctataacttccaatgggcttggtcttcggcttatgcagcagcacaatatgtt

SEQ ID NO: 8791 - DNA, 357 bp, Acinetobacter baumannii
atggaaaaaacactgcaatgtccgaaatgtggttctacagaaattgaaacacgtgatcatgacaaattacttaaaaccactggcggtgttttattaacagctgcaggcactacggcaggtactgtaggcggcgccgcaactggtgctactgtaggggcagcgattggtactgttgccggaccattaggtgtaattgttggtggaactgtaggaacgtttgtcggtgcaatcagtgcaggcattactggtggtgtggtaggtaatatttttggtaaaaaagcaggcgtaatgattgataaaaatatatttcaggactatcgctgcttgaaatgtaaataccgttttaaacagaagaaa

SEQ ID NO: 8792 - DNA, 2842 bp, Acinetobacter baumannii
gactacaaagccacgctaaacctgccggatactcaatttgcaatgaaagcaaatttggcagtacgtgaagtgaaatggttagaagagtggtataccgacaacatttatcagcagattcgtgcatcgcgtattggcaagaaaaaatatattttgcatgatggccctccatatgcgaacggtacaattcacttgggccatgcggttaacaaagtacttaaggacatcatcgtaaaaagccgtactttggcaggtttcgatgcgccatatgtaccaggttgggactgtcacggtttgccaatcgaactaaaagttgaagaaaaagtaggtaaagtgggtgaaaaagttgatgcagtcactttccgtaaacattgccgtgaatatgcgctaaagcaaattgatttgcagcgtacagactttaaacgtcttggtattttaggtgactgggataatccttacctcaccatgaactacaaacaagaagccgatatcgttcgtgctttaggtttaatccaaaaaaatggccatatccagccgggcttaaagccagtgaactggtgtatggactgtggctcagcacttgctgaagctgaagttgaatacgaagataaaaaatcagacgcaattgacgttggttttggcgttgtagatttaaaagatttaagcgctcgtgtaaatgtagacgttcaagatccaactgatatcgtgatctggaccactacaccttggacgttaccagcgaaccaagcagttgcattgcatgccgaaattgaatatcaattggtacaagtgactactgaacgtggtaagcaaaactttattcttgctaaagacttagttgtttctgcaattgagcgttacaagcttgaaaacccagttgttttagctgactttactggttcagctcttgagaaccttaccctacaacatcctttacttaccgatcgccaagttccggtaattttaggtgaacacgttatcgcaacaagcggtacaggtgctgtacacactgctcctggccacggtgcagatgactataaagtaggtcttcaatacaaccttaaagttgaaattactccagtggggtggtaacaggtggtttgacttgaccaaccgcgaccaaatgcttttgctggcgagcaacaatgctatgaaagccaaatgcctaaagatttatgtgaagctgtgttaggtgctgtaggtcagcttgatggggctgcatgcaaaccagattaaacacgagcctgacccgactactggctggcgtcataagactccaattattttccgtgctacaccacaatggtttatcagcatggatcaaaaaggtttacgtgacggtgcacttaatgccattgaaaacgatatcgagtttgtaccgaactggggtaaaaaccgtattgaatcaatgatcgaaggccgtccggactggtgtatctcacgtcaacgtacttggggtgtaccaattcctttcttcgttcataaagatacgaacgaattgcaccctcgtacgcctgagctcatcgaagaagttgccaaacttatcgagaaagaaggtattgatgcatggtttaaccgtgatgcgaaagacttcattggtgaagatgctgaacagtacaatgctgttcgcgatacgcttgatgtatggtttgactctggtacaacgcattacgctgtacttgagcaacgcgacgaattagaaagtcctgctgacttatatttagaaggttcagaccaacaccgtggttggttccaatcttctttattaacgtctatggcaattcacaatcgtgcgccatataaagccttgttaactcatggttttacagttgatgaaaatggccgtaaattgtcgaaatctttaggcaactatattccgcttgaagaaatcatcaaacaacttggtgccgatggtttacgtttatatgtagcatctagcgactatcgctatgaaattgcagcatcgaaagaaatctttagccgtgtaagtgatagctaccgtcgtattcgtaatacgctacgcttcttacttgcaaacttaaatggtttcaaaccaagtacagatgctctggcagtagatgatcttattgctcttgatcaatacatcttgcaacgtgctaatgaagtacaacagaccattatcgcggcctatgaagaaatgaacttccacgtcgtgtgtagtgcgttaacaagcttctgtattaatgacttaggtggtttctatctagacatcatcaaagaccgtcaatacaccactaaggctgactcacaagcacgtcgttccgcacaaacagcgctttaccatatcgtacaagcatttgttcgctggatgagcccgattctaagcttcacagctcaagaagcgtggccacttattcctgaacaaactgacaagtatgtatttacagctgaatggtatgacctacctgtttcatcaaaagcaaacttgctttctgaagcagattggcaaacattgattagcgtaaaatctgcagtaaataaacagattgaagcagctcgtaacgctaaacttgtcggtagtaatctttcagccaaagttgaactttgggcaaatgaatcattacaaacagttttaaaccaactggctgatgaactccgttttgttcttattacttcgcaagtagtagtacatccatttgctgaacaaggtgaagcaactgaaatggaaggcttacgtgtacaagtatctgcagctgaaggtgaaaaatgtgcacgttgctggcatgtccttcctgatgtaaatacacatgccgatcatcctggtttatgtggtcgttgtattgtgaacgtcactggtcgtggcgaagtgagaaaatatgcctaa

SEQ ID NO: 8793 - DNA, 1173 bp, Acinetobacter baumannii
atgactgacatcgtaattgttaatggtgctcgtactgctatgggtggttttcaaggatcactatcaggactaactgctcctgaattaggagcagtaacaattaaagaagcaatcgcacgagcaggtttacagcctacagatgtcgaagaagtcattatgggttgcgtactaccagcgggtttaaagcaaggccctgctcgtcaagccatgcgtaaagcaggtttacctgattcaacaggagctgtgacaattaataagctttgtggttcaggtatgaaggcggtaatgcaagcggctgatatgattaaagcaggaagtgctgaaattgtagttgccggtggtatggagtcgatgaccaatgcgccttatgtcttacccaaagcacgtgcgggataccgtatgggccacggtgaaattaaagaccatatgttctttgatggcttagaagatgctgaaactggacgtttaatgggttcatttgctcaagatatggcaaatacacgtggttatactcgtgagcaaatggatgactttgcaattcgttctttaaaacgtgctcaaactgcgattactgaaggctatttcaaagatgaaattgtacctgttactgtttctacccgtaaaggtgatgtcattgtcgatcaggatgaacaacccttaaatgccaagattgataaaatcccatcccttaaaccagcttttgcaaaagacggtaccattactgctgcaaacgcgagttcaatttctgatggtgcttctgcactagttttaacatcgagtgaagttgcagcacagcgcggcttacaaccacttgcaaaaatcatagccactgcgtcaaattctcaacatccttcagaatttacaattgctcctgttggcgctattgaaaaagtacttaaaaaagcaggttggaatgctcaggacgttgacctttgggaaattaatgaagcttttgctatggtaacgatgtgtccaattgatgatttcaaacttgatccagaaaaagtcaatattcatggtggagcatgtgcacttggtcatcctgtaggatcgacaggctctcgtattattcttacgcttattcatgcgcttaaacgtactggtggtaaaaagggtgtcgctgctctttgcatcggcggtggggaagcaacagctgttgccatcgaaattctt

SEQ ID NO: 8794 - DNA, 819 bp, Acinetobacter baumannii
atgacagtaaaaattttagcggtagatatggatgggacttttcttaattctaagaagcagtacaacaaagcacgttttttaaaacagtatgaacaactaaaacaaaataatatccgttttgtagtcgctagtggtaatcagcttgcaaagcttgttacgtattttccagaaattaatcatgagattgcttttattgccgaaaatggtgctcatgttgtagatgcggggcaagagttagcttttgctcatttaagcaaagagcaattcgttgagattttaaatgcgattgacccagtgtatacctctaaaatggtgatctgcggaaaacagagtgcttatgtgcatagcagtatgaacgcggaagattatgctaaagtcgctcgctattttgaaaagctgacggttatagatgacttttatgcactagatgacttggtgtgtaaaattacttttactgcgcaggaaaatgaaagttttacaatttttgagcattttcagaagcaaagttttgtaaaagataaggttttggtaccagtctcaagtggctttaattttatcgatttgattcttccggaccagcacaaagcacatggtttgaagctattattgcaaaaatggcaggttcaacccgatcaagtcgttgcgattggtgataacaataatgatatccagatgattaaagcagcaggttatgggtttgcagtcgaaaatgcagttgaagccttaaaagccgttgctccttacacaactgcaaataatgagcaagaaggtgcattacaggtgattgacttagttcttcagcatcagcctccatttgct

SEQ ID NO: 8795 - DNA, 612 bp, Acinetobacter baumannii
atggtttcaccatatctgcattcttttgctttatttttctctttgctcaatccttttttaatgagcatttatatgattggcctcatccgccattcagaaaccaaggtatttaacaaagctttaattcaggggagcttgattgcttatatcgtctttatgctgtttgcatggggcggtgaagcaatctttagtaaatacctgaatgtacgctttgaggctttccagatttttggcggtcttatctttttggtgattggttaccgctatgtgtttcagggtgcagataccattggtgaaatgcgcggtgcaccagaacatttggctggcactatcgccatgccttttatgattgggccaggtaccattagtgcagctgtggtgacaggtattgaaatgtcgattggtgctgcggcacttgtgatcgggtttaccatgtttttaacatgcagtattttgattttgatgaaattttcacatgatcatttgcggtacaaacatgcaaaatatatcgatcgctatttcgatattgttgggcgtttatctgctttattaatcggtacgattgctgttgatatgattattaatggcgttaccggactgatccataaagta

SEQ ID NO: 8796 - DNA, 1482 bp, Acinetobacter baumannii
atgggccgcgaaattcttaccgttgttgaaacggttagtaatgaaaaaggtgttagtcgtgaagcgatcttcgaagctttagaacaagctctagttgctgcaacgaagaaaaaattttacgagggtaccaattctgaagaagctcagcttcgtgtagaaattgatcgtagaactggtgattaccgtacattccgtcaatggactgttgtggcagatgaagatcatgaaatgccagcatgccaagacgcaatttctgatgttgatcctgcaaaatggtcaattggcgacgttcgtgagcttgaagtagaatcgattgagttcggtcgtatcgctgcacagattgcgaaacaggttatcgtacaaaaaattcgtgaagcagagcgtgcattagttgctgatgcttatgaatcaaaagttggcgagctaatttacggtgaagtgaaaaagcaaactaaagatggtttcatcattgacttaggtgacaatgctgaagcttatttagctcgtgaagaaatgattcctaaagagattcttcgtccaaaacaacgtgtaaatgctattttatatagtgtaaaccgtgaaggccgtggtgctcagcttctattatcacgcgctaagcctgaaatgcttattgctttgatgaagaaagaaattcctgaaatttctgaagaaattattgaaattaaagctgcggcgcgtcaaccaggtgttcgtgcgaaaatcgcagtaaaaacgaacgaccaccgtattgaccctgttggtgcatgtattggtatgcgtggaacacgtatccaagcggtacagcaagagttaaatggtgagcgtattgatgttgtagtttggtctgatgatccagctcaatacatcgcaagtgcattagaaccagctgatgtatcaggcattgtgcttgatgaagatgcaaaaagtgcagacattatttttgctaccaacgatcaattggcacgtgcgattggttcgcaaggtcaaaatgttcgtttagcttctgatttaactggctacaaactcgacatgatgcttgaagaagagtatcgtgctcgtcagcagaatgaagctcagcaatatctcgacatgttcgtgtcacgtttagatattgaagaagacttggcaatggcgttagtagagatgggcttcacttctttagaagagattgcttatgtgccagctgaaacttttgacgaaattgaacttgacgctgagttagttgagttattgcaaagtcgtgcaaaagaagctgcattaactgatgcattgaaacagcaagaaaatattcaagaaccgagtgcagaccttctcaatatggaaggcatgacctctgagatcgcttactcgctagccgctcgcggtattattactgttgatgatttggcagatcaagcaactgacgatatttctgatattgaaggtcttggtcatgataaagcaggtcaattgatcatgaaagctcgcgaatcatggtttaac

SEQ ID NO: 8797 - DNA, 567 bp, Acinetobacter baumannii
atgaaaagattttttttggctactttgattttagtttgttcaaatgcaatggcagaaggggagggcccgttcgccgagtacaccgtgaaaccgagcgaatcattaaatgatatagccaagcgtaacgggaccacgtgggcaaagctggcagaagacaatgatctccctgatccaccaactgtttatgttgggcaaaagctggcaatcatgaaaaagatgaataaggacgaatatctggctgcgattgcaaagacccgaccaacgtgctcaagcaaagaagaatgtgacaagaaaatggaagctgctcatttgtgggtgagtaaatacgctgattacaagatcagaagttcaaataacgtattaatcgaaacatacgctccgcgcgagttcactggtgagatcatcgtaaaggtttctaaggagccttatgggaagggaacctatgcgatcgtggccaacatgtcatgcaataatccgaatatgactaagccttatgactcgatgaccagttgcaagagaaacgtttataaggaaattattaagttcaacgatttcgttagttcttat

SEQ ID NO: 8798 - DNA, 465 bp, Acinetobacter baumannii
atgacccaacaaacttgtccatgcggaaaaggcagctatgcagaatgttgtgagcctttacatttaggcacagcaaaagcactcacggcagagcagcttatgcgttcacgttatagtgcatttgcattgcaggaaattgattatattgtgcaaacgacggctttaggtcagcaaactgctcttgataaagaggctattgcggaatggagcaaacaaaatcaatggttgggtttagaggtggttaatgccaacgaaaaattagataaaacccatgcacaggtggagttcaaggcccattatcatgatggtaaaagcgctcaaattcatcatgaagtttcacattttgtatttcatcagcaacaatggtttttccttgatccgacggtcgatatgcaggtcaccatgaaacaaccttgtatatgtggttcaggaaaaaaatttaagcaatgctgtgcacaattccta

SEQ ID NO: 8799 - DNA, 1299 bp, Acinetobacter baumannii
atgcaacagcttcgtaccggagatattattgccttaggttttatgacctttgccctctttattggggctggcaatattatctttcctcccattgtcgctcaacaagctggtgatcatgtatggctagctgccataggttttttgattactgccgttggtttacctgtaattaccattatggccctctctcgtatgcagggttccattgaaattattagttcaccgctaggtcgtatcgcaagtctgatcttaactgtagtttgttatctatcagttggccctttatttgctacaccacgcaccgcaactgtttcttatgaaattggtttctcatcttattttggaacgtctagcagtagccttttaatttatagtgcaatttacttcgcatttgtaactgtcgtttctttatatccgaacaagcttttagacacagttggacatgttctagctcctctgaaaattatcgctttagcaattttaggtattgcagcggttatgattcctgcgggttatgttcctgctccaattaatcattacgttaactctcctgtttcagaaggtttcgtaaatggttatctcaccatggatactttaggtgccttagtatttggtatcgtcattattcaagcgatctattcgcgtggtgttactgacaacaagctagtaaccaagtatgcaattattgccagccttatttctggtgtaggacttactttagtttacttaagcttatttaaattaggtttgggtagtcatgaagtcgctcctaatgcagcaaatggtgctgtaatcctacatgcatatgttcaacatgcttttgggaatatgggttcactcttcttaacaggtctcattttcttagcatgtatggttactgcaattggtttaacttgtgcatgtgctgaatatttcgctcaacttactaagttgccatataagcttttagttttcatcttggttggtttctctttcattatttccaaccttggattgactaagctaattgccgtatcagtaccagttttaagtgcaatttatccacctgcaattgtagttattatgctcagtttcttctggaaattttggcacaaaccatcttttattgtcggttcagtaacaagcattgctttaattttcggaattattgacgggcttaaagttgcaggctttggtgactacctccctaattttcttcaacacttaccgttaaatgaacaaaacttggcatggttgatcccatctttagttgttcttgtagtgactactcttatcgacaaagttaaacataaaagcatt

SEQ ID NO: 8800 - DNA, 624 bp, Acinetobacter baumannii
atgaataacgagtattttaagctgtatacagattcacaatttctaagtccctatgcatttacagtttttgtaggactacatgaaaaacaaattccatttgaaatagcagccatcgacttaggtcagcaaggccagtttgaaacatctttcgtagaaaagtcattaacagctaaagtgcctgtacttgagcataacgattttgccttatcagaatcttctgccattttggaatatttagaagaactttatccagacacagctatttatccaaaagatattcaagctcgcgcaagagcaagacaaattcaagcatggctcagatcggacttagtggcactaagaactgagcgtccaaccgatgttatttttattcagcccaagtccactccactttcagaagaaggcaaaaaagcagccgagaaacttttctttgttgcagaaaaacttcttgcgtctgatgccgaatttctttttggttcatggagcattgtagatgctgaacttgccctgatgttgcaacgccttattcaaaatggtgatgctgtatcagagcgcctaaaaaattatgcattacagcaatggcaacgtccgtctgtacaaaaatggcttgccttgcgacataaa

SEQ ID NO: 8801 - DNA, 2105 bp, Acinetobacter baumannii
aaatcaaccaataaaacaagtgaaatggctggtgccgatgcagcaaataaagccaatactacccagaaaactgaacagttagacacagttagagatgatgcaactaatgaagctttaaccacaaatcagggggttaaaatagcggataaccaaaatagcttaagagcgggtattcgtggctcgactttattggaagatttcattttaagagaaaaaatcacccactttgaccatgagcgtatacctgagcgtattgtgcatgcgcgtggtgtaggggcacatggttattttcaggcatatgaaggaaacgaacgtttaaccaaagctggattcttgacagacccaactattcagacgcctatttttgtacgtttttcaacagtccaagggcctcgtggttcagccgatactgtccgtgatattcgcggttttgccattaagttttatacccaagaaggtaacttcgacttggtaggaaataacgcacctgtcttttttgtgcaagacgggattaaatttccagactttgtacatgcggtaaaacctgaaccggacacagaaattccaacgggtgcaactgcgcatgatactttctgggattttgtgtctttagtgcccgagtcagcacatgctgtaatttgggcaatgtcagaccgtgcgattcctcgtaacttacgttcgatccaagggtttggtgttcatacgttccgtttaattaatgctgaaggtaaatcacattttgtgaaatttcactggacaccaaaacaaggtttaagtgcgctggtatgggatgaagctcaaaaacttgcaggtaaagacccggatttccaccgtcgtgatctttatgaagcaattgagcacggtttttatccagaatgggaactcggcgtgcagattgtcgaagaagaagatgaaatgaactttgacttcgatttgctggacccaacaaaaattattcctgaagaattagttcctgttacgccaattggccgatttgttttaaatagaaatgtagataacttctttgctgaaacagagcaggtagctttctgtccgggtcatgtagtacctggtattgattttactgatgacccacttttacaagcccgtctattttcatacacagatacccagttaagccgtttaggtggaccaaactttcaccaaattccgattaacaaacctgtgtgtccattccataacaatcaacgtgatggtattcatcagcataccattcataaaggacaggctgcatatcaaccaaactcaattgatggaaattggccagtagagacaccgccagcggcatcaaatggtggttttgaaagttatcctgaaaaaattagtgggcataaacttcgtcaaagaagtgagaacgttctctgattatttctctcaaccacgactttattacaaaaggccttgcaccgcatgaacaaaaacatgtggtcgatgcctatacttttgaattaagtaaagttcaaagaaagcatattcgtgagcgtcaagttcaacaaattttggctaatatcgacttagatttggcacgccaagtaggggcaaatttaggtattgaagtgcctgacttaaccctaagttataagaaaacagcagttgaaaaatctgccaagttatcttttttagctttcccacctgaagatattcaaggtagaaaagttgccgtacttatccataacatggtgaagtctgacgcattagaagctattaaaaactgggcaattaaagaaggcgtaatccttcacttactagcgccgagcttggctccagtcaaagatcataaagataacgttattgtggctgatggcatgcaaatgtctgagccttcaattgcctatgatgcggtaattattccggatggcgataacctaaatacggttatgcaagacggggtagctcgccattacttactcgaagcttataagcacttaaagccaatcgtatttttgggtaataaatctgatttgcttgaaccattaggtttagtggcagatgaaggaactttaattgaagatgagttccagcatgttgcggaaaaatttaagaacctgattaaagcacaccgtgtttggtcacgagaacaaata

SEQ ID NO: 8802 - DNA, 1332 bp, Acinetobacter baumannii
atgtctgctgccaaaatcggattattgtctcttacagcgctggtatttagttctatggtggggtcaggcgtatttagcctcccccaaaatatggctcaagttgccaacggctctgcccttcttgttgcatggctcattaccggagtcggcattattttcttggccctgtcattgttgcatttaactcgtcaacgaccagatctagatggcggtatttataactatgcacgcgaaggctttggagacctcatcgggttttgctcggcgtggggttactggttgtgtactaccattggtattgtcggttatgtagtgattgccttttcaggtgtcggcatgtttaccgacagcaaagaccacgttatttttggtgaaggcaatacgctctactctctgattggatcaagcatttttgtatggctggtgcactggttagtaagccgaggtattaaagaagctgcgattgtgaatttactggcaaccattgccaaaattattccaatggtggtctttatcttctttacttttattgcctttaagtttgatttgttcaaactcaacttaaatgacttctctttaaaagttcccctttggcagcaagtaaaagacctaatgctcattaccctttgggtatttaccggtattgaaggtgcggtggttttatcatcacgtgccaaaaaccgtcatgacattggcaaagcgactattttaggtgttttactggcattaagtttttacgtgatggtgacagtgttggcttatggtgtggtgagccgtgaagcgcttgcgggcatgcataacccatccatggcgaccattttgcagcaactcatcggtctacccggtaccatcattattaccattgggcttattatttcagtttcatcgtcttatttaagctggacgttatttgcgactgaaattccatatctagctgcaaaaaatggtgctttcccgaaactatttttaaagaataaccaaaataatgtgccgatttcatcactatggctgaccactattgtggtgcaaggttctctgattgccgtgtattttttcaataaaaactatacccagcttttattgatttcatcggtgatgattttgctgccttattttctggtatcggcgttttatcttaaagaatcgattcgccacaaacgcacgccgcatattgccattgcaagtgtcgcttcaatctatgcactttggttgctctatgcagcgggtttagacttactgctgttgtctggtgtattgtatttggttggcttggttattttttcaatcagctactttgagcataaaaaatcgctcaaacaaaatcagcttaat

SEQ ID NO: 8803 - DNA, 2154 bp, Acinetobacter baumannii
atgactcaacgctttgctttttcaacttcaaaaactttgttagcagttgctatttttacttcaatgacaacaagtcatgctgaagaaccggcagaacagcaaaattcaaccaatgtgttacccactatttctattcaagcacaaaaagaaaaccccacttcttatgtcgcaacaaaagcaaattcagctttaaaatcagatgcacctctatttaaaactgctcaatcagtttctgtcgtcacccgcgaacaacttgaccaaaaacaagcaagaactttagcagatgcacttgaaggtgttgcaggcgtagaagctgggaaacttggtcgccgcggttgggatgatttcattatccgtgggcaaacttcttctgattcggtgtatgtcgatggtttaagggtaggccaaaatacttatgttgccaccgaactatctggtatggatcaggtacaaattttaaaaggtcctgcttctattaatttcggtttagttgctccgggtggtatggtcaatttagtgactaaaagaccggaagcagaaagctttgcacgtgctagcatgacttatggtagttacagccttaaagaaggaacattcgatttaaactacagcccaaacaatagcgaaaaaggtgctttccgtttaaatggacgtatctctgatcaagatgatccaaccgattatgtttattttaaaaatttttatatctcgccttcttataattttgacctcggtgataacactgacctctctgtaatcgcaagctatcaacaccgcgaatatattcgtcagcaaggtttacctgtaattggtacattaaaagacaaccctaatggatctatagatcgtagtttatatattggcgatcctaatttcggtaaatatgaggcagatgtttatcgcactggttatacgtttaaacatacttttgataatggctggaactttaaccagaattttgccgtacaaaaaaccgaaatggatggcaaagcagtctttgctcgtacaggtagtaacttttgggcaaaagataaacaaggtgaaattgattacacgactatcagccgtagaaataacagccgacaccaagttattgataacttaagcttcgccatcgataaccgtttaaataaacagtttgatctatatggcatgcagcacgacattaatattggagtcgatgcttttcaggaaaaaagtgattacaccaatgataaatatgatattggtgatttaaatatctataaccctgtctatggtcagaacgtgacattgaagcaaaatgtacgtgatatcaaccgtctcaaatatctggggctttatttacgcgaccgtattcagcttaatgatcaattacttttaagcttatcaggacgtcaagattgggcacaaacccaaactacaagtttagtaactggcaatgcgagtaaacaatcagataatgcatttacgggcagtgcttctgtcatgtataccctcaatgacattgtggcaccttatgtgagctacgctacttcatttaccccaaatagtggtactgatgtaaatagcaacccatttaagccagaaaaaggaaaacaggttgaggtcgggatgaaattacaaagtcccgatcaacgaattcaaggtgctatcgcttggtatgatctaaaacgtcagaatgttttggttactgatactgcgaatagtggctataaagtacaacgtggtgaacagttaactcgcggtattgaaactgaacttagtgcagaaattttagaaggattaaaattaacggctgcatatacctacacaattgatgcagaaattagtaaagatgcaaatgcaagcaatgtagggaaagcgctcgacaatattcctgaacacgcttatagcttgtcagctcgttacaaatttgatccatcatcaaaacttggttggtatgtaggtggtggtttccgaggtgaaacttataaaaccgttgatggtttagatgtgcatgttccgggctatacagtatttgataccgaagcgggttatgatgctgagcgttggggtgcccaacttgcgattcgtaatttatttgataaagattactatacaggtgctctcaacgaaaatttggtaactctaggcaatccacgccaaattaactttactgtgaaatttaactat

SEQ ID NO: 8804 - DNA, 681 bp, Acinetobacter baumannii
atgagctgcttactagccagtttctttctcactggttgtgtgagtaatcgaattattggtgaaaacacgcgagagctatttacaaaatacgactcaggctatgaatggatcactttaacagaagatgatgtaattgcattcggtaaaccatcagtatctctcccaaatgaaccagaggacagtattgttatcgcagggaaaaaatatagttatgtcattagtaaaggcggtaacgatttcattcaattaattagtcaattaaatccacaatatattcaaataagtaatgagctagattttaatgctccagcttcgaatagtaaccatttttacggacatattagattttcttacaccccacctaatgggaaattgaacgagaaagaatcagctttattcaaacaatatggtgtaattccatgtgactatgaaaagacattagaactacataaatttgagttaaatcttagaggaactgtttatcctcctgtaaacaatcttaaaaaaataacccctttatccaagccatatcacgttagaatccaatatcttcatgataaaagcggaaaagtacccttatcaactaaggagaagctagcaagtttaccactgcttccgtttaccttaactttcgatattattgctttacctgcgaaagtcatgggtatcatttaccagcct

SEQ ID NO: 8805 - DNA, 1044 bp, Acinetobacter baumannii
atgagcctattacaacaacttgcaatcaaacatccaatttttctggctcctatggcgggcgtctctactcctgaattagcagccgaggtttcaaatcaaggaggccttggatcattaggcttaggagcaaacacaccgcaaagtgcacgtgaacaaattttaaaaactcaagcgctcacggaaaacccatttcaagttaattttttctgtcatcaatcgactgagcttaatgtagaaaaagcaaaacaatggcttgattacctacgtcctcattttgaaaaattcggtgctcaaccgccccaagaattacactgtatctatccaagttttttagacaatgatgattttttaaatgttgttttagaaactaagccaaaagcagtaagttttcactttggtattccgcatccgcatcaaattaaagctttaaaagaggctggtattttgactatggtttcggcaactaatttgatcgaagctcaagctattgaggcagcgggcatcgatattattattgcccaagggattgaggcaggcggacatagagggattttcaaccagacttttgatggggcaattaaaactagtgacttggttcaactgattgtgcagcactgtacacttccagttgtagccgcaggtggcataatgactggcttacaagccaaacatatgttgggcttaggcgcagccgcagtccaattagggacagcatttgttcaatgccaaacttcaaatgcttctgccgaataccgcaaagccctatttagtaaacctgtaacacagattagtgctagtctttctgggcgccctgctcgggggatactcaaccattggcatacaaaaattgattcacctactcgccctgtacaacctgaatatccttatacctatgatttagcaaagcaactaaatgctattgcaagcaaacaccaagattacggttttggtgctttttgggcaggaagtaacgttgcacaaatacgtgaacttgaagcacccgatctggttaatcaactggtcgttgaaatgctagacagtgaa

SEQ ID NO: 8806 - DNA, 870 bp, Acinetobacter baumannii
atggctcggattggttttgttggaacgggcattatgggaatgccaatggccatgaacttattaaaagctggtcatcaagttaaggtctggaatagaacttcatctaaagcagtaagtttaaaagaagctggtgcatatgtttgtagtgaacttgaacaagtcggaaaagatgtagagtttctgatttgtatgctcagtgatggaaaaacctgtgatgaaattctatttcaagaacgtggtgcaatttcacagctaaaacctgaaagcacggtcatagtgatgagttcgatacctgttgaagttgcaaaaaaacaaagtgaaaaatgtaaagaaaacggacttagatatttagatgcacctgtttcgggcggtgaaaaaggtgctcaaaatgcaagtctggcgattatggtaggtggcgatgctcaaacattttcacatgctgaacatgttctatctgccatggggcggccaattttagttggagaggctggctgtggaatgctggcaaaactcgtcaatcaaatgatagtcgcatctactattgcaaccgtgagtgaaggtttattgcttgccagtaaagcaggagcagacccgataaaactcaaacaagcattaacaggcggttttgcagattctccgattttgcaacagcatggcgaacgcatgttaaatcgagattttaaaccgggaggtacagctcgaaaccagcataaagacattcatacagccgttagctatgctaaatcgcttgagttgaatttacctatagcccaaaaagtcagtcaattgttcgaaaatatgcttgctgccggagacggtgagcttgatcattctggtttaattcgtgagcttgaacgaatgaatcatgtg

SEQ ID NO: 8807 - DNA, 990 bp, Acinetobacter baumannii
atgacatacgcaaaccgaattaatgatcgacgcttaattttagggccaaaggatgaccttatggcgatcagcccgatgaaacacacatgggccagagacattcatcaacgcatgaaggataacaattggttccccgaagtggtcgacttgagtaatgaaggcatttgctatcgagacaagcttaccgaagcggaacgtcgattgtatgacaagagccttgcgtttttatcgaaccttgacggcattcaatttcacaatatcaaccaaaatattgcaaaacatgtgacctcaccggaagttgccatatgtttgtcccgtcaagcttgggaggaagccaaccatgtagagtcttatgccaaactcatcgaaacggtctcagcggacccaatgagtgtctatatgacatttgaacgcgatggtattttggcgaagaaaaacgagtttattttgcgtcaatcacgcatcttgggagatcagttctcagcgcgtggttttgcccttgcttgcatttctaacgtcatgcttgagggcgagtatttcttctcaggattcttaggattttatctacttgctttcaaaggtaagatgttgggttctgcggatatgattcgctatattcaacgtgatgaagaaggaacgcatcttgatctgttcttgaacatgattgaaacattgcgtattgaaaatcctgaagtgtttacttcttcattttgggaagatgcggctaaaatcattgatgaatctaccaaaatggaaattagttggggtcaatatattcatcaaggcgttaccaatccagaagcgattgaactgtatattaaatatttagctaataaacgcgccgctcaaattcgagcgccatttgtgccttatcctggtgtggtaaatccgtttccgtgggtagaagagttctctaagcctaatacagccgaaaagaatttctttgaaacacgcgtaacagactacaaaactggcggtgcgttagcatgg

SEQ ID NO: 8808 - DNA, 750 bp, Acinetobacter baumannii
atggcagattacaacgtaagcatgcgcgaccttcttcaagcaggtgcgcactttggtcaccaaactcgtttctggaacccaaaaatgcgtcaatacatttttggcgcgcgtaacaaaattcacatcatcaaccttgagcacactgttcctgcgttaaatgatgctttgaacttcgctaaccaattagcaagcaaaaagaacaaagttttgttcgttggtacaaaacgtgctgcttctaacatcatccgtgaacaagctcaacgcgctggtcaaccatacgtagatcaccgttggttaggtggtatgttgacgaactggaaaacacttcgccaatctatcaaccgtttaaaagatcttcaaactcaatctcaagacggtacttttgctaagcttactaaacgtgaagctttagaacgtactcgtgagatggaaaaacttgagcgctctttaggcggcgttaaaaacatgggtggtttacctgacgcattatttgtaatcgacgttgatcacgaagcgattgcaatcaaagaagcgaaaaacttaggtattcctgttatcggtatcgttgatacaaactctaacccagacaacgtagattacgttattcctggtaacgacgatgcgatccgtgcagtaactttatatgcttcagctatggctgatgcaattcttgctggtaaagaatacgctcaatctcaagcgaacgctcaagcaaaaggcgatgacgctgcgaaagacgcttctgaggct

SEQ ID NO: 8809 - DNA, 4086 bp, Acinetobacter baumannii
atggcatactcatataccgaaaagaaacggatccgtaagaattttggtaaattgccccaagtaatggatgcaccgtacttattatcgattcaggtcgattcgtacagaacattcttgcaagatggcaaatcaccaaaaaaccgcgaagatatcggtctccaagccgcatttcgttcagtttttcctatcgaaagttattctggcaatgctgctttagaatttgttgagtatagccttggtaaacctgagttcgatgtacgcgaatgtattcttcgtggctcgacttatgcggcaccaatgcgcgttaaaattcgtttgattattaaagatcgcgaaactaaatcaattaaagacgtacgcgaacaagaagtctatatgggtgaaattccactcatgactgaaaatggtacctttgttatcaacggtactgagcgtgtaatcgtatctcaattacaccgttcgccaggcgtattctttgaccatgataaaggtaagacccactcaagtggtaaagtgttgtattcagcacgtatcattccttaccgtggttcatggttagacttcgaatttgatgcaaaagacttagtttacgtacgtatcgaccgtcgtcgtaaattacttgctacagttgtgttacgtgcactaggttataacaatgaacagatcttgaatttgttctatgaaaaagtacctgtgtatcttgacatgggtagctatcaaattgacctcgtacctgagcgtttacgtggtgaaatggctcaatttgatattactgacaatgaaggtaaagtcattgttgagcaaggtaaacgtattaatgctcgtcatgtacgtcaaatggaagctgcaggtttaactaagctttcagttcctgatgaatacttatatgagcgtatcactgctgaagatattactctacgtgatggtgaagtaattgctgcaaatactctgttaagccatgaagtaatggtgaagttggcagaaggtggtgttaagcaatttaatatcttgttcactaacgatattgaccgtggttcattcgtagctgatacattacgtgctgacttgacgcgtgatcgtgaagaagcattagtagaaatctacaaagtaatgcgtccaggcgagccaccaacaaaagaagctgctgaaaacttattcaataacttgttcttctcttctgaacgctatgacttatctccagtaggtcgtatgaagttcaaccgtcgtttaggtcgtccttacgaagttggtactgatcagaagtcacgcgaagttgaaggtattttatcgcacgaagatattatcgatgtattacgtacattggttgaaatccgtaacggtaaaggtgaagtcgacgatatcgaccacttaggtaaccgtcgtgtacgttctgttggtgaaatgacagagaaccaattccgtgtaggtttagttcgtgttgagcgtgctgttaaagagcgtttaagccaagcagaaacagataacttgtctccacaagatttgattaatgcaaaaccagttgctgctgcaatcaaagaattctttggttcaagccagttatctcagtttatggaccaaaacaacccattatctgagattacacataaacgtcgtgtatctgcgcttggtcctggtggtttaacacgtgaacgtgcaggcttcgaagtacgtgacgtacaccaaactcactatggtcgtgtttgtccaattgaaactcctgaaggtccaaacattggtttgatcaactcgctttctgtatacgcaaaagcgaatgacttcggtttcttggaaacaccataccgcaaagttgtagatggtcgtgtaactgatgatgttgaatatttatctgcaattgaagaagtaggtactgttattgcacaggccgactctgctgtagataaagatggcaacttaacagaagaattcgtttctgttcgtcatcaaggtgaattcgtacgtatgccgcctgaaaaagtaacgcatatggacgtttctgcacagcaggtagtatctgttgctgcatcacttattccattccttgaacacgatgacgcaaaccgtgcgctcatgggttcaaacatgcaacgtcaggcagttcctactttacgtgcggataaaccgcttgtaggtacaggtatggaagcgaacgttgcacgtgactctggtgtgtgtgtaatcgcaaaccgtggcggtgtaattgaatatgtagatgcttctcgtatcgttattcgtgtaaacgaagatgaaatggttgcaggtgaggcaggtgtagatatctataacctcatcaaatatacgcgttcaaaccaaaatacttgtattaaccaaaatgttatcgtgaacttgggcgacaaagttgctcgtggtgacatcttggcagacggtccgtcaacagacatgggtgaacttgcgcttggtcaaaacatgcgtgtagcgttcatgacatggaatggttacaactacgaagactcgatcttgttatctgagcgtgtacttcaagaagaccgtttaacctctattcacattcaagaattgtcatgtgtagcacgtgatactaagttaggtgcagaagaaattactgccgatattcctaacgtaggtgaagctgcgctttctaaacttgatgaatcaggtatcgtttatatcggtgctgaagttactgctggtgacatcttagttggtaaagtaacgcctaaaggtgaaactcagttaactcctgaagaaaaactgcttcgtgcaatttttggtgagaaagcagctgacgttaaagactcatctttacgtgttccatctggtactaaaggtacagttattgacgttcaagtcttcactcgtgatggcttagagaaagatgaccgtgctttagcaattgaaaaagcacagcttgattcttatcgtaaagacttgaaagaagaatacaagatcttcgaagaagcggctcgtgagcgtgtaattcgtttgcttaaaggccaagagtctaatggcggtggttcaactaaacgtggtgataaactttctgaagatttattatctggtttagagcttgttgacttacttgaaattcaaccagcagatgaagcaatcgctgagcgtttaactcaaattcaagtgttcttgaaagagaagagcgcagaaatcgatgagaaattcgctgagaagaaacgtaagcttgcaacaggtgatgaattaacaactggtgtattgaaagttgttaaagtttacttagctgttaaacgtcgtattcagcctggtgataagatggctggtcgtcacggtaacaaaggtgttgtatctaacatcttacctgttgaagacatgccacatgatgctaacggtgtgccggtagatatcgtattgaacccgctgggtgtaccatctcgtatgaacgtgggtcagattctagagactcacttgggtatggcggctaaagggcttggtgacaaaatcgaaaaaatgttgaaagaacaacgtacagttttagaactgcgcgaattcttagacaagatttataacaaagtcggcggtgagcaagaagatcttgatagcttgactgatgaagaaattctagcgcttgcaggtaacttgcgtgcgggtgtgcctttagctactcctgtatttgatggtgctgaagaaagtcaaattaaagacttacttgaattggctgacatttcacgtactggtcaaacagtattgtttgacggacgtacaggtgaacagtttgaccgtccagtaactgttggttacatgtacatgcttaaattgaaccacttggttgatgacaagatgcatgcgcgttcaactggttcttactcacttgttacacaacaaccgcttggtggtaaagcacaattcggtggtcagcgtttcggtgagatggaagtatgggcacttgaagcatacggtgcagcatatacactccaagaaatgcttacagtgaagtcggatgacgttgaaggccgtactcgcatctataagaatattgtagatggtaaccattatatggatccgggtatgcctgaatcgttcaacgtattgaccaaagagatccgttctttaggtatcaacattgaactaaaaaatggtgac

SEQ ID NO: 8810 - DNA, 1755 bp, Acinetobacter baumannii
atgaatatacatgtagaaatagacacacattggtgtctagaacaactattacaagaaggccgtatcactgaacgagataagttacttgtacaaaccacaaataggcaaaaagatcagttgaaatggcatccattacagtggattgcgcattttaatttaaaagaccaacatcatgtgcaagcacatttaagtttaaaccgtctgtgccaatggtttgcagatcgggcgcaattacctttatttgtgattgatcctttaaaggcggatgtgagtgctttaactcaagtcatgtcgcaagagtttgcgatccgtaatcatattttagctgtagaagtccacacggaccgaattgtgataggaacagaccagccttttcaaacagactggctaaataatttagagaagagtttagcacccaaaaaaattgaacgtgtatttctcaaccccgagcaattacaacgttatttacgagaatattatcaagtcagccgagcagtaaactcagctcaaaaagatgcggctcatgaccgtgataacaacggtgtagaggcacttttacaacttggtgatagccaaaaccctgatgccaatgatcagcatattgtgaaattggtagactggattttgcaatttgcatttgaacagagcgccagtgacattcacatggaaccgcgtaaagacaatggcaaagttcggttccgtatcgatggtgttttacataccatttataacatgccttcaaataccctgaccgccgtgatttctcggattaaaattttagggcggctaaatgtagcagaaaagcgtaaaccgcaagatggtcgattaaaaacacgtacgccgaaaggacaagaaaccgaactacgtctatctaccttaccaacagcgtttggtgaaaaactggttatgcgtatttttgatccagatgtgttagtacgttcctttcagcaattgggttttgaccagtctttattacaacaatggcagcgtattacgcaaaatagtcacggcattattttagttacggggccaacaggttctggtaaaaccacaacgctatattcttctttaaagcagcttgcaaccgagcaggttaatgtctgtaccattgaagacccgattgaaatgctagagcctagttttaaccaaatgcaggtcaatcatgcaattgaactgggctttgcagatggtgtgcgtgcgcttatgcgacaagacccagacattattatgattggggaaattcgtgaccaagatactgcgaatatggccattcaggctgcactcacaggccacttggtattatcaactttacataccaatgatgcgccgtctagtttgacccgtttacatgatttaggtgtacaaccatttttgactgctgcaacaattttgggtgttctcgcgcagcgcttagtgcgtaagctttgcccaaactgcaaacaacaaactcatattaatgaagatgaatggcagcacctaacatttgactacattatggaaatgccagaaaaagtttatcgggcagtaggttgtgaagagtgccggcatacgggttataaaggtcgaatcggcatttatgagtttatgccagttagtcttgagcttaagcatcttattagcagtcatgcgacattaaatgaattaagaagccaaactaaaaaagaaagtgtagagcctttaagaattgcaggagctcgcaaagttcttgaaggtttgaccaccttggaagaggtattgcgggttgttccattaaat

SEQ ID NO: 8811 - DNA, 2661 bp, Acinetobacter baumannii
atgatcaatacatcgccattgctgaactatgtctcaagtcatcatgatattaaagccattaatcagtggcgaacggatgtagaaaagcaattgcaagattcatacgaaaatgggcaatctattcgagaaatcattaaagctcgttcagacttagtagatgaagcgctcgtctttttatggaaacatgcagaacttgaccagtcaaaactaggtctttttgcagtaggtggttacgggcgccgtgaaatgctgccctattctgatgtagatatcatgattttgtctgaagatgaaatcagtgaagaaaatgaaaaacgtatctctacatttatttcctctttatgggatgtaggaaatttcaaaccaggtattagtgttcgtaccattcaaagctgtgttgaacaagccgctaccgatttaactgttgccactacattaattgaggcgcgtttaatcacgggtaatacgcaacttgcgaaatggcctcgccgtattgtttcacagacctggacagacaaaacattttatgacgcaaaaatggccgaacaagccaagcgttaccaccaacacaacaatactgaaagtaatttagaacctgacattaaaaatgcaccgggcggtattcgtgacattaatcaaattggttggattgccaaacgccacttccgagtgaaccgtatctatgacttagtgcatttaggtttcatttcagagttcgaattggctgttttagaagaagctgaaagctttctttgggaaattcgacatcatttacaccgtttagccaaacgtgatgaaaaccgtttactctttgaccatcaaagagaaattgctgctaaatttggttacgttcgtcaagaaggccaacctgtaaattacggcgttgagcaattcatgaaacgctactaccgtacggcgcagcaggtttcaacactcaatgaaatgttgctggcgtattttagtgagtcagtcattactcctcgactccccaactatgaacgcaaaattgaagttgttaacgatcactttaaaattgtcgataataaacttgccgtacagcatcacaaaatattcgcagagcatccaagcgcgattttagagttgttctatattttagccaatcgaccagatattgaaggtattcgcgctcggactttacgcttacttattcttgctgcgaaacgaattaaccaaagttatcgtgataatccagagcatcaagcactatttatgtcgattattcgctcaccatatcgactatacgacaccttggtcgcgatgaaacgttatggtgtgttaggaaactatattcctgcttttggccaaattatgggtcttatgcaatatgacctattccatatctatacggttgatgctcatacattattattgctgcgtaatttaaatcgttttagagaacctgaatttgccaaagaattccctgtggtaagttcggttttccaacgtcttgctcgtcaagatattgtctttattgctgctttattccacgacattgcaaaaggccgtggtggtgaccatagtgaacttggcgcagaagacgcgattgagtttggacgtgcacatggctttactgagcgtgaatgcaaattaattgcatggcttattcaaaaccatttgctcatgtcacttacagctcagaaaaaagatatttctgatccagatgtcgtgaaagattttgcagaaaaacttggcgacatggagcatcttgattatctctatactttaacagttgcagatattaacgccacaaatccaaaactttggaacacatggcgcgcttctctcatgcgtcagctttatacgcatgctcgtgatgtaatccgtaccggtttaggtcgtcctgttgattatcaaatgctaattgaagacaccaaatttgcagcaagtgaattactggtaaataactttgcattggctgatgtcgaaaaagtatggcaagaacttggtgatgaatacttcattaaagagtcggcagatgaaattgcatggcatacacaagcaattttaaaacatggtgataatccagagccattagtcctcttgcgtgctcaccgtaaagcagctcaagatgcggtgcaaatctttatttatacacgtgaccaacctaacctgtttgctactactgttgctgttttagaccgcatgaacctagacgttcaggacgcaaaaattatcacagcaagtaccgcatttagcttagacacttatgttgtactcgatcgtttcggtacattgcttaccgacccagagcgtgaagaaaccgttaaaaatgcattagtgaaggcgcttagccaaccagaccaatacccgggactcatgcaacgccgtattccgcgtcaattacgtcacttcgatatcgaaaatacagtcgatgtaacattgaatgaagccttacagcaaaatatggtcgaaatttcaacactcgatcatcctggcctacttgcacgcgtgggtggtttatttatgatgcaaggtttagacatccattcagcccgaattgcaactttaggtgaacgtgccgaagatattttctttgtcaccaaaaaagatgggaaaccgctgaataacgaagaggtcaaactcttctcggaaaaactgaaagcagcattagatgaagcatctaatcaaatttgtcagcac

SEQ ID NO: 8812 - DNA, 1470 bp, Acinetobacter baumannii
atgagtgatgtacaagttcatcaattgtatatccatggacgctacgttgaagcaaccagtggtaaaacatttaatagtattaaccctgccaacggcgaaattatcgcgactcttcaacaggcatctgaacaagatattgaagctgctgtaaaaagtgcccaacaaggacaaaaaatctgggcagccatgaccgctatggagcgttcacgtattttacgccgtgctgtcgatattctccgtgaacgtaatgatgagcttgcccgtcttgaaacactcgacaccggtaaagcctacagcgaaacatctaccgtcgatattgtgactggtgccgatgtactcgaatactacgcaggacttgcaacagctattcagggcgaacaagttccacttcgcgaatcaagtttcttttatacacgccgcgaacctttaggcgtggttgcaggtattggtgcctggaactatccaatccaaatcgctttatggaaatctgcccctgcccttgctgccggcaatgccatgattttcaagccaagcgaaacaaccccacttactgcattaaaacttgcagaaatctatacagaagctggtttaccagacggcgtatttaacgtggtacaaggtgctggtcgtgaaatcggtcaatggctaacagaacatcctgtgattgaaaaaatctcattcacgggtggcgtagaaactggcaaaaaagtgatggcaagcgctgctggctctacactaaaagaagtgactatggagcttggtgggaagtcaccactcattatttgtgaagatgctgaccttaaccgtgccgcagacattgcggttatggcgaacttctttagctcaggtcaagtatgtaccaacggtacgcgcgtatttgttccaaaatcacgtttagctgactttgaaaaagcggttgtagagcgtgtacaacgtattcgcattggtgacccaatggctgaagacacaaacttcggcccgctcactagcttccctcatatggagaaagtgttgtctttcattgagtcaggcaaacaacaaggcgctaaagtattaatcggtggtggtcgtgcgacagaaggcgaacttgccaaaggcgcttatgtactaccgactgtatttagcgactgtactgaccagatggcgattgttcaagaagaaatttttggacctgtcatgagcatcttaagctatgaaaccgaagaagaagtgattcaacgtgccaacgacacgacctttggtttagctgccggtgtggtcactcaagatattagccgcgctcatcgcattattcaccaaattgaagctggtatttgctggattaacacttggggtgaatcacctgccgaaatgccagttggtggctacaagcaatctggtgtgggccgcgaaaatggcttaaccacgcttgggcactatacccgtatcaaatctattcaagttgaacttggcgattatcaaagcattttt

SEQ ID NO: 8813 - DNA, 843 bp, Acinetobacter baumannii
atggctgaacctataaattttgcaactaattttgctataaaaatcattctttctatctttggcccgattttaaaaaaaccaatagaatggattactaaatttttgtttttagatgcctataaagtatcaactgcatataggacctctagagacctacaactattgtggcgtaaggatttggggggatttgtaaattatagtataaattggaatcaaatttttctaggaaagcagcagactaattgcacactatgggtgaaagcaaataatgaccaacattacagtaaagttattttttgcgttactgcttctttaagtaatctaaaatatcaatctgtgatagagattcatgacttaacgagtaagccttgcgttttagctttaccaagtattcctattagaaatttggagtggagaaatggccagctgtatgaaccttataatgaatttaagattgagttaaaagaagtttttgataaagataatacttatataaatctaaaaaataatacgaaatctatatttaatcctgtagataatttaggttttcttcaaggaaagaaaagttatgtttatagatggggacaatggtggaatttagattttttagaatctgagaaagatgaatttctgctaacttataaggcatatgcttttagggctaaatttgataaatctaataatgccagtttattttcagcaagagcgtggcttttaagtaatagattacttttaaatgttttcttttggagtaagaatatatttaaggctaaacatttgagagtggcttttgataagtatttgaaagatatagaggaagcggctggttttaaattggtagat

SEQ ID NO: 8814 - DNA, 1212 bp, Acinetobacter baumannii
atgtctccaattatccattctttacttgatacagacttgtacaaatttacgatgctacaagtggttctgcataaattcccacaaacacatagcgtctatcattttcgttgcagaaatttagaagatacggtctatccattagtggatattttggacgacttaaacgagcaactcgaccatttatgtaatctcaaatataaagaagacgaactacaatatttaagaaaattacgatttattaaaagcgactttgtcgattatttagaattatttcaactcaaacgccgttttattcatgcgagtatagatgaagaaggtcgattagacatccgtattgaagggccaatggttcaggccatgatgtttgagatttttgttttagccattgtaaatgaattatattttagccggattaaaacagatgaagtctgggctgaaggcgagcgtcgtttacaagcaaaacttgaattaattcagcaatacgaaaaatctcaacaaccgaatgatccaccatttttagtttctgattttggtacccgccgccgttatagttttgaatggcaaaaacatgtagttgctgcatttcataacactgtgccaaatgtgttccgtggtacaagtaacgtcttgcttgccaaagagttaaatattacgccaattggaaccatggcccacgaattcttacaagcttttcaggcacttgatgttcgcttacgtgactttcaaaaagctgctttagaaacgtgggttcaagaatatcgcggagacttaggaattgctttaactgacgttgttggtatggacgctttcctcagagattttgacttgtattttgccaaactatttgatggcttacgtcatgacagtggtgatccgtacgagtggggtgataaagcgtatgcacactatcgtaaattaaaaattgataccaaaaccaaaatgttgacctttagtgatggccttaatttgccaaaggcttgggaactacatcaatatttcaaagaccgttttcaggtgagtttcggtattggtactaatttgaccaatgacatgggccaaacaccgctcaatattgtattgaaactggttgagtgtaatggccagtctgttgctaaaatttcggacagccctggcaaaaccatgactgataacgatacattcttggcctatttgcgtcaggttttccaaatcgaagagctggatgaagcaatt

SEQ ID NO: 8815 - DNA, 2922 bp, Acinetobacter baumannii
atgtttattaaaagtattttatcttcgattactagtattatcccacttcctgaaaatagtaacacaagcagtaatttaggtaacggctctggtgacggcctacttaatggaatatcttccggaaatggtgaacacaactatggtattggcaatggtattgcggatgacgcaagtattaccgccccaattaccattcccctcaacctatctggtaactcaattactctcataggcaattcatcttcaagttcggtgaatagctctccaaccaccacttcaaataacgttaatgacaacgacgtaacgaataatggtaacggctccaccattggtagtggtacaggcaatggctctggtgacgggcttttaaatggcgccgcttctggtaatggtgaacacaactatggaatcggtaatggtattgccgatgacgcaagcattactgccccactttcaattccaattaaccttgcgggtaactctattaccctaattggtgactcatcttctagttcggtcaacaactctgcaaccaatacatcaaataccgtgaatgataacgacaccacctataacggcaatggctcaggtgctggtaatggttcgggcgatggcttgttaaatggaattggctctggcaatggcgagcaaaactacggtatcggaaatgggattgcggatgacgcaagtattacagccccaattacgcttcctattaacttgtctggtaactcaattactctaattggcaattcatctgcaagttctgttaattcctcgccaactacaacgtcaaatactgtgaatgacaacgacaccacctataacggcaatggtactggtgatagcggcgtgaacgctctgggcggttccggcaatggttcaggtgatggcgcaggtaatggtatcgcttctggcaatggtgaacataactatggtattggcaatggtaacggcgacgatgttgatattactgctccgatcactggtgttctaaacatttcaggaaactcatttactctcattggtaattcttcatcaagttcagtcaatactgcgccaaccaccacatcaaatacggtgaacgacaatgacaccattgataatggtaatagcggcggcacaggtagtggttcaggcaatggctctggtgatggtttacttaatggcgctgcttctggcaatggcgagcataactacggcattggcaacggaaatggtgatgatgtagatattaccgcaccaattacaggtgtttttaatttctctggtaactctttctcactcattggcaattcatcttctagttcaattaatactgccccaactacaacgaccaatacagttaatgacaatgacgtgactgataatggaaataatggaggcgggcttcttggtggaagttctggaaatggctctggtgatggcctgttaaacggcgctgcttctggcaatggcgaacacaactacggtattggtaacggaaacggtgatgatgcagatttcaccttccctcttactggcgtacttaacttttccggcaactcgctttcaggctttggcagttcatctagtgaatcggtaaatgttgcaccaaccacagcaactaataccgtcaatgataatgacaccattgataatgccaatacaggtggccttggtggcggttcgggcaatggctctggcgatggccttttaaatggtgcagcgtctggtaatggcgaacataattatggcattggtaacggaaacggtgacgatgcagactttacgcttccatttactggcggtttaaatattctgggcaatgctttatcaggtatcggcggttcttccaccgactctattaatatttcaccgacaactacttcaaacacagtcaatgacaatgacactaccaacaatggcaacacttcaggtggtgtgattggttctggcgactcaggcaacggctctggtgatggcctattaaatggtatttcatcaggtaacggtgaacataattatggcattggcaacggtaatggcgatgatgttgacgttgttgcccctatcactacaccacttaatgtattaggcaactctttctcatttattggtggtgaaggtacaggcgatatcttaggtccgattactggcattattggtggtattggcggtgatggagatatcctaagtccaattactggcattatcggtggtattgatggtgatggagatattttaagcccgattactggcattatcggtggcataggcggcatcggtggtgatctaggcgataacccacttacaggtattattcaaagcggtattgacgttctacaaaatttagaaagtttaaaaacaggtttgattaatacaggtattgatacgattgccggaacaattattggtgtgttccctgatgcagagcatcctgtcggcgattttgcagaccttggaaaactacttttcgagacttcacgtgatagtgttaacggtacgcttgaggctatttctgaccttgcaggcgctgaccttgagggtgcaagtggctcgattactggtgtaattgatactcttattaccaatggttcaacggcatctaccattattcagcatattgtaggtgatgacctagtcactgaaaacggtggcctcttgggttcaatcaccacgattattggtggtgttgacagcggcgacggtggtttactgggtggcctagatggcttaattagcattaactatggtgactcagacaatagtaattctgtagatgtagaagatattttaggaaatatcctcggctcggtaggttcaaatcaaggtattgctgttggtgaacctgatccaacgggcggtagtttgattcatacgatttcacttaacacagtaaatcagttaactgaccaacttttacatgctttaccaactgtc

SEQ ID NO: 8816 - DNA, 363 bp, Acinetobacter baumannii
atgcgttatattctaattgcattactcattattgtatttggctattctttagcacttgttttgcagaacccaacagaacttcctgttgatttattatttactcaagttcctgcaatgcgtttaggtttattattgttgcttaccttagcgcttggaattgtagttgggcttttattaggtgtacaagttttccgagttttccaaaaaagctgggaaatcaaacgtcttcgcaaagatattgatcatttgagaaaagaacaaattcaaagtgctcaattggctgcagcagaagcagctgcaaatgtaagacacgaaaaaactgttgtagatatttatccgcaagataaaaattctactccttta

SEQ ID NO: 8817 - DNA, 543 bp, Acinetobacter baumannii
atgactcaatctgtatatcatattccagtaaaagctatttcaggcgaaacggttgaccttgaccaatataaagggaaagttttattaatcgtaaacacagcgtctaaatgtggtttaactccacaatacgaaggcttagaaaagctgtatcaagcaaagaaagatcaaggtcttgaaatcttaggcttccctgcaaacaactttaaagaacaagaacctggttcggatgaagaaattcaacagttctgctcattaaactacgatgttcatttcccacttttctctaaaatctctgtagctggcgaagataaacatccactttatcaagcgctaacaacagctcaaccagaacgtattggagaaggccctttccgtgagcgcttagaaggtttaggtattcctactaaccctgcccctgaagtgttatggaatttcgagaaattcctagtaaataaaaacggtgaagttgttgcgcgttttgcacctaacttaacagcagacgatgaacaaattgtaaaagcagttgaagcagaattagctaaa

SEQ ID NO: 8818 - DNA, 1284 bp, Acinetobacter baumannii
atgacccaaaacttacatcatattgttattgtcggtggtggtgctggtggtttagaactcgccacacaacttggtgaaacttttgggaaaaatggtaaagccaaaattacattggttgaccaaaatttaactcatatctggaaaccattacttcatgaaattgcggcgggttctttaaatcctcacgaagagcaaaccaattattttgcccatgcaaagaaacaccactatgaatttgtgttgggaacattaacagcagtaaataaagataagaaaataattgatttaattccccctcaagtctctaaagaacaaaatacccatattcaacaactcagttacgatacactggttttagcgcttggttcagtatcaaatgatttcaatacacccggtgttcgtgaaaactgccatttcctcgatagccgtaaacaggcggatattttccagcaagatcttttacatttatatatcgaagcgcaaaatcaacccgatcaacgtacattaaatattggaattattggtgcgggggcaacaggtgtcgaacttgcggctgaactgattgaaacgaccaaaaacttttatcgctatggtttaaaaaagatccatccgaatcaagtcaaaattacactcattgaggcctcagaacgcatcctccctgccctaagtgaaaaaacagctgaacatagcgcaaaacagcttcaaaaaatgggtgttgaaattttaactaagcaccgggttgaaaaaattgatgaacactgtatctattttagtaatggtaaccagctcaacagtgatattacggtatgggcagctggggtaaaagcaccaaaagtacttgaaagtcttagcgatttcgaacgtgacaatattaaccgcttaatggtctatgcaacgctgcagacctattccgatcctaatgtatttgcatttggtgattgtgcgcattgccaacttgatgcaagacacccgcctctcggaccacgcgctcaagttgctagtcaacaagcaagctttttagtcgatgctatggctgctagactaaatggtcgatcacaaccgatgtttacttttaatgacaaaggttcacttgtgtctttaagtcgtaataaagcggttggagaattactgggggatgtcagtgtccaaggatatattgccaaaacgatgtatgtatctttataccgtttacatcaagcaacaattcacggatacactcaagctggactactcacaatgaaagatttacttacaagacgagtacgaccaaaaattaagctgtat

SEQ ID NO: 8819 - DNA, 1233 bp, Acinetobacter baumannii
atgagtattgtaaaaattgaaaatgtacgtgtgttagacccaatccaaaaaacagacagcgtacaaactgtatatcttcaagatggtaagctcattgccccagtcgatcaggttgaacaaactattgatggtcagggtaaatggttaatgccaactatggttgatttgtgtgcacgtttgcgtgaaccaggtcagcagcagcatggaacgttgaaatcagaaggtaaagctgcacgtgctaatggtattttgcacgtcattacgccgccagactcaaagccgattgtacaagacaacggtgcgctcattcacggcttaattgaaaaagcttggcatgatggtggtattcacatgcatatcatcggtgcccagactcaaggtctaaatggtaagcaaccagcaaatatggcaggccttaaaaagggtggctgtactgctgtttcaaatgcgaatgctgcttttgaaaatgacgatgttgttgttcgtacattagagtacgccgcgggtcttggtttaaccgtcgttttctatgctgaagagccacaacttgctaaagatggttgtgctcatgaaggctttattgcatcacgtcaaggtttaccaatgattcctgcaattgcagaaaccgtagcgattgcaaaatatctgcttatgattgaagcgacaggtgtcaaagctcactttggtttgttgtcttgtggcgcttcggtcgaattaattcgtgctgcaaaagcaaaaggtttaccggttactgccgatgtagcaatgcatcagttacatttaactgagcaactaattgatggcttcaattcacttgcacatgttcgtccaccattacgttctgagcaagataaagagcttttacgccaaggtttaaaacaaggtgtaattgatgcaatctgtacccaccatgagcctttaagcagttcagctaaaatggctccatttgcagagacccaaccgggtattactgcatttgatacttatgtggctttgggtattcagctcattaatgaaggtttatttgaacctttagaatgggtaactaaagtgacaagtgctcctgcacaggtagcaaatatgacagcacgttggcaagctgaagcagggtgggtgttggtagatcctgagttaagctggactgtaagtaaagacactattttatctcaagggaaaaacacccctttactgggtcaaaagcttacaggtaaagtcttacagacttttgctgtt

SEQ ID NO: 8820 - DNA, 996 bp, Acinetobacter baumannii
atgtctactgatccacaattcccaacacccaataatttaggtatcgcagtttattcaaataatgccgaagctattggtaatactcctttagtacgtattaatcgtttgattaaaacgggcgcaaccgtattagccaaagtagaaagtcgtaatcctgccttttctgtgaaatgccgtattggagctgcgctgattgcagatgcagaaaaaagaggcgcgttgaaagaaggcatgcatattgttgaaccaaccagtggtaatactggtattgcattggcgttcgtagcggcggcaaaaggttattccattactttaactatgcctgcaagcatgagccttgagcgtagaaaagtgttaaaagcactcggtgctaatttagtcctaaccgaaccagcgaagggaatgaaaggtgcagttgatgaagctgtgcgattagcaactgaacagccagaagtttatttcttgccacaacagtttgaaaacccagctaatccacaaattcatgttgatacgacgggaccagaaatctggcaagcaacaggtgggcaagttgatatcttggtagctggtgtaggtacaggaggtacgattacgggtatttctcgttattttgaacaagttcagaataagccattgtactcagtagcagttgaacctgctgagtctccaattattactcaaacaaaaaaaggtgagaacattacacccgcaccgcataaaattcagggaattggagcaaactttattccaaagaatcttgatttagatttggttgatgaagtcataccagtgagtagtgaagaagcaattcaatgggcaagaaactgtgccacccaagaaggtattttagtgggtatttcgagcggtgctgcattggcagcagcggctaaaattgcagaacgtcctgaaaatgcaggtaaaacaattgttgttattcttccagatagtggggaacgctatttatcttctgttttatttgaaggtttatttgacgaa

SEQ ID NO: 8821 - DNA, 1710 bp, Acinetobacter baumannii
atggaacacatcgaacgtgaatcgatggagtttgacgttgtcatcgtaggtgcaggacctgcaggtctatctgctgcgattaagatccgtcaattagcgattgaaaataacttacccgatctttcagtttgtgtagttgaaaaaggctctgaagtaggtgcgcatatcttatctggtgctgtacttgaaccgcgtgctattaatgaacttttcccgaactggaaagaagaaggcgcgcctcttaacgtacctgtaactgaagacaaaacattcttcttgctttcagaaactacctctaaagaagcacctcactggatggttcctaaaaccatgcacaatgacgggaactatgttatctcgctaggtaacgttgttcgctggttaggtcaaaaagctgaagaattagaagtttctatcttccctggctttgctgcatctgaagtgctttaccatgaagacggtactgtaaaaggtattcaaactggtgacatgggtattggtaaagatggcgagcctacacataactttactccgggttatgaacttcacgctaaatacactctctttgctgaaggctgccgtggccacttaggtaaacgcctaattgcaaaatataatcttgataaagatgcagatcctcaacattacgggatcgggattaaagaactttgggaaatcgacccagcaaaacataaaccgggtctagtgatgcacggtgctggttggccattgtctgaaactggttcttctggtggttggtggttataccacgctgaaaacaaccaagtgactttgggtatgattgtggacttgtcttatgaaaatccacacatgtatccattcatggaaatgcagcgctggaaaactcacccactcatcaaacagtatttagaaggtggtaaacgtatttcttacggcgcacgtgctgtagtgaaaggcggtttcaactctttacctaaattgactttcccgggtggttgcttaattggtgatgatgcaggcttcttaaactttgcgaaaatcaaaggctcacacactgccatgaaatcaggcatgttatgtggtgaagctgtatttgaagcaattgctgccggagttgaaaaaggtggtgatcttgcggttgctcgtgtaaccgaaggcgaagatttattcgttaaagaattaacttcttacacagacaaatttaacaacagctggttaaaagaagagctttataacgctcgtaactttggccctgcaatgcataaatttggtcaatggattggtggtgcatttaactttattgaccaaaacgtctttaaagtgccattcactttacatgacttgaaacaagacttcgctgtattgaaaactgttgatgcaacgagcttcaagccaacttatccaaaaccagatggcaaactgacatttgaccgtttatcttctgtgtttatctcaaacactgtacacgaagaaaaccagccagctcacttgaagcttactgatccttcaattccagtgaacgtaaacttaccaaaatgggatgagcctgcgcagcgctattgccctgctggtgtttacgaaatcatggaaaatgatgacggctctaaacgcttccagattaacgcagcgaactgtgttcactgtaagacctgtgatattaaagacccatctcaaaatattacttgggtaacacctgagggtggtggtggtccgaattaccctaacatg

SEQ ID NO: 8822 - DNA, 1116 bp, Acinetobacter baumannii
gtgcatccatacgctcctactttacagcgcgttttattgtttgggctgttttttatcctgatctttttaggatttaacatcctgaagtactttattgtacctgtactttgggctgccattattgcctacatgacttggccgatttatttaagaattcagcatttttttggtgaaaaccgaaataatttaaacgctacagttatgattagcttagtcattttaattgttggcgtgccatttacatgtgctatttttattctacaacatgaaggtcgcaacctttattttgatttacagcgtcaagtcttttcaggtcatttaagcgttcccgattttattcgtaatcttccgtttattggtaaagaaatatctcgtacactcaacgaaattaacacagaccctaatagtactattcagaatattgcagcttgggtacaaagccatttaagttatgggcgtgtgttattaaatgaaattagtaaaaatatcgtcaaactttgttttgcgattttaagtcttttcttcttttatcgtgatggccacacgatcttaacccaagtgagtaaagccttggaaatggtgattgggccacgtattcatcattatctcgacacaatttcagaaacaacacgtgccgttgtgtatggcgtgggtttaactgcaattgctcaagcagtactggctggattaagttatttcgtcgctggtgtacctaacccaatggttctcaccattgcaacgttcttattagccctaattccgtttggtactcctgtttcctacttaggtgttggtctatggttgttttctcaaggtcaaaccatggaagctattggcgtcatcttatggggtgtgctgattgtaagtagttcagacaacgtgatccgtccacttgtaatctctggtgcgactcaaattccgtttttattgattatgttcggtgtattgggtggtattgcaagttttggtttagttggtctatttattggccctgttattttagctgttttattagcgatttggcgtgaatggcttcatgagacgattgaccctgaacccatgccaaaaacaaccatgatttatgattcagatgatgatttaccaccatctaaaaac

SEQ ID NO: 8823 - DNA, 2634 bp, Acinetobacter baumannii
atggcgaatacctcgcgctctgcatctcaaagcacagcatcttctgcctctgctgcacataaacgtgccttagtgattgtggagtcgcctgccaaagcgaaaaccatcaacaaatatttaggttcgcagtacattgttaagtcttctgtaggtcacgtacgtgacttgccaacaggcggcagtaaagcaacagagaaaaagccggctgcccggaccaaactcactgaggctgaaaaagaacaaaaagcgaatcaggctttaatcaatcgtatgggcgtcgatccggaacatggatggcaagcgcattacgaagttctgcctggcaaagaaaatgttgttgctgaactaaagaaacttgctaaagatgcagatgcaatctatctcgcaacggacttggatagagaaggggaagcaatcgcttggcacttacgcgaagtgattggtggtgacgatagccgttatcatcgtgtggtatttaacgaaattaccaaaaatgccattcaagaagcatttaaacagccaacacgtctcgacttaaaccgtgttaatgcacaacaagcacgtcgtttcttggaccgtgtagtaggcttcatggtttcgccattattatgggaaaagattgcccgtggtttatcggcaggtcgtgtacagtctgtagcggtaaagcttgttgttgaacgtgaacgtgaaattcgtgcttttattccagaagaatattggcaagtctttgcagacactaaagctaaaaaagatgacattcgtcttgaggctgttaaacaggcgggtaaaacacttaaattaaaaaataaagctgaaacagatgccctgttagatgtattaaaaggtgctgaatataaagttgcccagcgtgaagataaaccaactaaggtgaatccaagcgccccatacatcacgtcgactttgcaacaagctgcaagtacacgtttaggtttctctgtaaagaaaaccatgatgttggcgcagcgcttgtatgaagctggtttcattacttatatgcgtactgactcaacgtttttgagtgatgatgctgtaagtatggtacgtgcgcatattgaaagccaatatggcgaaaaatatttaccagctaagccaaatcgctatggtaataaagcaggtgctcaagaagcccacgaagctattcgtccatcaaatgttgcgctgactggtgatcaacttgctggtgtagagcgtgatgctcagcgtttgtatgatttaatttggcgtcagttcgtagcttgccaaatgactccggcagaatatttatcttcaactttaacagttgaagctggcaatgttgagttaaaggcaaaaggccgtacgcttgtatttgatggctttactaaagttcgtggtgccaacaaatctgatgacgatatcattttacctgcaattaaagtgggtgaaattttaaagctagaaaagctagatccaagtcagcattttaccaaaccaccagctcgttttactgaagcatctttagtaaaagaacttgaaaaacgtggtattggtcgtccgtcgacttatgctgccattatttctactattcaagaacgtggttacgttaagttagaaaatcgccgtctctttgccgagaaaatgggtgagatcgtaacggatcgtcttgatgaaagttttaataacctgatgaactatgcatttacagcagaccttgaaggtcagttggaccgtgtagcaacgggtgagcgtaactggaaggaattgctagacacattctatggtgattttaaaaagcgtttgaccaatgctcaaggtgagcagggaatgcgtcgtaaccagccagttgaagtaccagcagtacattgccctgaatgttcacgtccaatgcagattcgtacgggcactacaggcgtattcttagggtgttctggctataacttgccgcctaaggaacgctgtaaagggaccttgaacttaacgccagttgagtctctagcagcgttatctgatgacgatagtgctgaaacagcagacttgatgtcaaaacatcgttgtccgaaatgtggcacggcaatggacagctacgtcattgatggtggccgtaagttacatgtttgtggtaacaacccggattgcgatggctatgagcttgaagaaggcgagttcaagatcaaaggttatgatggcccaaccattccttgtgataaatgtgatggtgaaatgcagcttaagactggtcgcttcggcccatatttcgcttgtacaagctgtgacaatactcgtaaagtcttgaaaaatggtcaacctgcaccaccacgtgtagaaccaatcaagatggaacacttgcgttcaaccaagcatgatgattattttgtgttacgtgatggcgcggctggtctgttcttggctgcaagtaagttcccgaaaattcgtgaaacacgtgcaccaaaagttgctgagcttcgtagcgtagctgatcaacttgatccaaaataccagtttattttacaagctccagatgtagaccctgaaggtaacccaaccattgtgaagtttagtcgtaagaaccaatcacaatatgtgggttctgaaacaccagaaggtaaacaaaccaaatggagcctaatttatcaagacggtaaatggattgaaggc

SEQ ID NO: 8824 - DNA, 4479 bp, Acinetobacter baumannii
atgcacatgccatcgcctaatactgtagctcccgctcaaggtttatatcagcctgatgagtttaaggataactgtggttttggactgattgcccatatgaagggtgaatcaagtcatcatctagtagaaaccgcgattcacagtttaagttgcatgacgcaccgtggtggtattgccgcagatggcaagacgggagatggttgcggcttattattggcgatgccaaagcaatttttccgtgatgaagcaaaaaaactgagtgatattacactgagtgaaatttttgctgtaggtacggtatttttaaatattgatccagcattagcacagcactctaaaaatattttaacgaaagaaattgagtcagaaggtttacgtgtacttgcttggcgtatcgttccaacaaacaacgatgcattgggtgaaatcgcgcttcaatctttacctgtttttgagcaagtcatcgtgaactgtccaatgggcgtaactgaggttgaatttaaccgtaagttattcttggcgcgtcgccgtgcggaacaacaactccaaaatgatccgttattttacgtgactacgctttgctcgacagttattagctataaaggcctaatgatgcctgcggcgattgccgagttttatacagacttggcagatgagcgtttaaaatcacatatcgtggtattccaccaacgtttctctacaaatacattaccgcgttggccattagctcaaccattccgttatcttgcgcataatggtgaaatcaacacaattacagcaaaccgtaactgggcattagcgcgtactcctaaatttgaaaacccattattgccaggtttgaccgagcttaacccgattgtaaaccgtacaggttcggactcttcaagtttagataatatgcttgagattctggtgggcggcggtatggatttattccgtgctttacgtatgctcgtgccaccagcttggcagaacgttgaaactttagatgcagacttgcgtgcattctatgagttcaactctaaacatatggaagcttgggatggtccggcaggcctcgttattcaagatggtcgtcatgcgatttgtatgcttgaccgtaatggtttacgtcctgcgcgttgggttattaccaaaaatgattacattaccttggcatctgaaattggtgtttggggctatgagccagaagatgtagtatcaaaaggtcgtgtaggtcctggtcaaatcttggttgtagacacccttacaggtaaagtgcttgatactaaagatgttagcaatcatttgaaaaacatgcgtccgtaccgtgagtggttacgtgaccatgcaattcgcttaaatgcaaacccggaacttgaagaacaacttgttgataaaggtttaactggcgatgcattaaaagcggctcaaaaaatgtttatggtgacatttgaagagcgcgatcagttgttacgtccaatcgctgagagcggccaggaagctgttggttctatgggtgacgatacaccaatggctgtattgtctcgtcaagtacgtcatgtgaccgattacttccgtcaacagtttgcacaggtgacaaacccgccaatcgacccattacgtgagtcaattgttatgtcacttgaaacctgtttgggccgtgagcagaacgtattcgaacaaggtcctgagcatgctgatcgtatcatcatctctagcccggttttatcaaattcaaaaatgcagcaaattcgtagcattgaacgtgcaggttatgaggcggttgatattgatctgaactatgctgaaaccgaaggtttacaagctgcgattactcgtatttgtgaagaatctgcacaagctgttcgtgatggtaagaccttaattgttttaactgataaaaacattcgtcaaggttatttacctgcaaatgctgcgcttgcaacaggtgcggtacaccatcacctcataaaaactggtttgcgtactgatgcaaacattatggttgaaaccggttttgcacgtgatccacatcaatttgcggtgttactcggttttggtgctactgccatttacccataccttgcatatgatgtaatcaatgatttgattgctaaaggtgagcttttaggtgatccaatccatgcacaggcaaacttccgtaaaggtatcgagaaaggcttattaaaagttctttcaaagatgggtatctcgacagtagcttcttaccgtggtggtcagttatttgaagcagttggtttatcttctgaagttgtagatcaatgtttcttaggtgttcctagtcgtatccaaggtgcaacatttgttgatcttgaaaatgaccagaaaaagttagcggctacagcttggtctaaccgtaaaccaattgatcaaggtggtttgctgaaattcgtatttggtaaagaataccacgcgtttaacccagacgtgattaactcgctacataaggcagttcgttctggcaaatacgaagactttaaagaatatgccgagttagtgaataaccgtccgatcgcgactattcgtgacctgtttaagttaaaaacaaccaatccaattccggttgagcaagttgaatcggttgaagctatcttgcctcgtttcgactcggcagggatgtctttaggtgcactttctccagaagcccatgaagcaattgcaattgccatgaataccattggtggtcgttcaaactctggtgagggtggtgaagatcctgcgcgttacggcacaattcgtaactcgaaaatcaagcaaattgcatctggacgttttggtgtaacacctgcatatttaacttctgctgaagtcttgcaaattaaagttgctcaaggtgcaaaaccgggtgaaggtggtcagttgccaggtggtaaagtgaatggcttgattgcacgtttacgttactctgttccgggtgtgacacttatttcacctccgccgcatcatgacatttactcaattgaagatttgtcgcaactgatttttgacttgaaacaagttaacccgaaagcaatggtatctgtgaagttagtatctgagccgggtgtaggtacgattgctgcaggtgttgctaaagcatatgcagactttattaccatttcaggttatgacggtggtactgctgcgtctccgctttcatcaattcaccatgcaggttcgccatgggagcttggcttgagtgaagcgcatcaggcacttcgtgtaaatgacttgcgtggcaaagtacgtgtacaaactgacggtggtttaaagactggtcttgatgttattaaggcggctattttaggtgctgaaagtttcggttttggttctacaccaatgatcgcattaggttgtaaatacctacgtatttgccacttaaacaactgtgcgaccggtgttgcgactcaacaagatcatttacgtcaagagcactatattggcgaaccacaaatgctcattaatttcttccactttattgcagaagaaacgcgtgaatggttggcagctcttggtgtagcttcacttaaagacttgattggccgtgtagatttacttgaagtcttaccgggtgaaacagagaaacatgctcatcttgatttaagtgcattattaacttctcatcctgctgctgaaggtaaagcacagtattgtgaagtagaaggtaatgcaccgtttgacaagggcgtattggctgaaagaatggtcgaagaaatgcttcctgcaatcgagtcaagcgctggtggtcaattcaattttaatgtcgtgaactgtgaccgttcaattggtgcacgtgtatcgggtgagattgctcgtcgctatggcaacttgggtatggaagcacatccggttgtaatgaacctaacaggtactgctggtcagtcacttggtgtttggaatgctggtggtttgcacatccgtcttgaaggtgatgcaaatgactatgtaggtaaaggtatggctggtggtcgtatttcgatcttcccaccaaaaggttcacctttccaaacacaaaatacagcaattattggtaatacttgtttgtatggcgcaactggcggtaagttatttgctgcaggtacagcaggtgagcgtttcgcggttcgtaactctggtgcgtttgctgttattgaaggtgcaggtgaccactgctgtgaatatatgactggtggtgttgtgactgtgcttggaaaagtgggtcataactttggtgcaggtatgacaggcggttttgcttacgtgcttgacctcgataatgactttgtagattactacaaccacgagttaattgacttaacccgtatttcaacagaatctatggaagatcataaagaattcttattgcgtattattgacgagcacatcaaggaaacaggtagtgcttgggcttataaaatccgcaatgagttcgatttctacagccgtaaattctggcttgtgaaacctaaagctgctaacttgcaaacgcttttgaaaacaacacaagctgacccacaa

SEQ ID NO: 8825 - DNA, 618 bp, Acinetobacter baumannii
atgtttattataaatataaataaggttggagatattaaagtgttcaagaaagtattagttgttgcattaatgggggtgtcttcatttacttttgctggtaattggcaagtaaaatttgggggtagcgttattgctccatcggaagacacaacaactgctttaggtgtggtaaaggcagaccatgaatatgcatttactccatcagtagaatacttttttggtcaaactccattttcggcagaattattattagcaacgccggttaatcatgatgttttattagatggtcagaaagtagcgcgtattaaacaattgccaccaacaattaccgcgaaatatcattttaaaaactcgactcgttttacaccgtatattggtatcggggcaacagcatttattccttgggatgaacaaggcgtagctgacaaagtaaaagaagattttggtgtagctggccaagttggttttaatttccaacctgctgatgctaaaaattggggagtatttgtagatgttcgttatgcagatattagtccagaagttactttaacaaatggtgctaaatttgacttagatattaacccgtttgtttacactttaggttatagctataaattc

SEQ ID NO: 8826 - DNA, 1386 bp, Acinetobacter baumannii
atgccacctcttccaaactctcacatgtttaaaatgtctcatttaaagaaaaaaatctctttagaaagctattactccgctgctgatattttaaaaaaattagaagagttaactggacttgtatatcttcaagatgataacaatcctgttattggttttttgccaaaaaattatttaatcactcaaaataaccaaaactttttattcactaaaactgatttaaataaatataagttttcatcttatatagaaaatcttttagattttacacaattccaatctcaagaactaaaaaatagcaatagagaaaaaataagttttaagggcggatatattggttttattagttatgacttttctgcacatcaatttataaataatcaatcacataaacaaccgtctttatttataggttcctattattcttttattaaaaaaataaataatgaatggtatttttttagcgatgaaaataatgcttttgaaatttttaactatctttcagatctcctcaataaacctgctaataaactacaaaaaaataattttaaactagaacaaaatattcatcctcgctggtctaaaaatacatacttaactgcttttcataaaatacaagaatatattaaggcaggagattgttatcaaattaaccttactcaagaattcaaagcgaattttactggttcattattaaataaagcagatgagctatggaatttaaccaatgcaccatattctggttatttaaaattaacagaatttgagttgttaagttgctctcctgaattatttattgaatttaatgtaaataagcaaattaaaaccagacccattaaaggtacaatgcctcgttatgagaataaagagcaggatttactttcaaaacaaactttaaaaaattctaaaaaagatcaagcagaaaatgtgatgatcgttgatctattacgtaatgatttgagcatttatgccaatacaggttcggtaaaaacaacaaaactattcgaaattgagagcttcaatcaagttcatcatatggtgagtgagattacggctacacttaaaaatgatattaatcctatgcagatgttgctcactgctttaccaggaggctcaattacaggagctcctaaaattcgggcaatgcaaattattgaagagctagaaggcgcacctcggggagcatattgcggcactttaggatattttaatttcgatggtactggacgctggaatattttaattcgtagttttcaacaatatcaaaaccagctctctatttgggcaggcggcggtattactattgcttcagaggctgaggctgaatatcaggaaagtcttgataaaatctctgctatgctgaacttgatgaacagcacagcagaa

SEQ ID NO: 8827 - DNA, 912 bp, Acinetobacter baumannii
atgaaccaatatgtaagtgatgcattactcacatggacgcaccatattaaaaatgtgtgcggcaattttgaaaccgattttgatggaacccgtaatttattcattggtgaggttcagtgctttttattgggcgataccgaaattgcttttattaaaaataatgccaataaaattgtccgaaaagccgatgaaattgatcgagtaaataatcgtttttgttttttgattttgcagtattcgggaaaaatgctgctcgagtataagaatgagactctaagtctgaatgaaggcgatattgtgttggtagacccggtcgaaactatttcgatgtatccgcaaggtttggtgagtcagatttcagtgcacctgtcgcgtgaaaaattacttaaagaaaatattagtaccgaatattttggaaaactgattacgcaaaatatgagtggttttttactcaagaatattttgaaaaatatgtctgctgaaaacatcaaactttggtatgcaacggaagatggtaatgcttttgaagatgcgctgattgctttaatcaaacccacaatcaattataaaaatattaatagcccaaataatctaatggaaaaagccgagcgctatatcatagaaaacttagcaaaaccagatttaacacctaaattaattgcagagcatattggggtatctctacgtcatctctaccgtttgttccttcaagaaaatttatctattaacaaatatatacagctcaaacgcctagaaaaagtcaaggcagatttactcgataaaagaaacaaacaaagctcgattacccaaattgccttgaagtggggtttttgggacggtgctcatttttcaaagatctttaaaaagacctatggtatctctcctaaagaatttagagagggtatgtcagtt

SEQ ID NO: 8828 - DNA, 267 bp, Acinetobacter baumannii
atggctttaactaatgcagaccgcgcagagatcattgctaaatttgctcgcgctgaaaacgacactggttcaccagaagtacaagtagctttattgactgctcaaatcaatgatttacaaggtcacttcaaagctcacaaacacgaccaccacagccgtcgcggtttgatccgtatggttaaccaacgtcgtaaattgcttgactacttaaatggtaaagaccacgagcgttacactgctttgatcggtgctttaggtctacgtcgt

SEQ ID NO: 8829 - DNA, 477 bp, Acinetobacter baumannii
atgaaaattcgtattctgaccattggtcaaaaaatgcctgcttgggtacttactggttttgaagattatttcaaacgcatccagccttttgttcaaactcaggttattgaactcccaatggcaaaacgcggtaaaaatgattcagaagcagatattttaaaatactgtcaaatcgagggtgaaagtattttaaatgctttaaaacctaatgagaccctcattgctttagaagttggcggacgcgagctcagcacagaaaaactagcagacaccatgaaacaatggatgcttgaaggtaatgatgtggcactcgctattggtggcccagatggcttgtcagatcaagtacgcaaagccgctgcttggcactggtcactttcaaaacttaccatgccgcaccctttagtacgtattttattaatcgagcaactttaccgagcaatgagcattaatcataatcatccttaccaccgtgca

SEQ ID NO: 8830 - DNA, 1272 bp, Acinetobacter baumannii
atgtctgaagcaactggcaaaaaagccgtattacatcttgatggcaaagaaattgaattaccaatttacagtggcacattaggtcccgatgtaatcgacgttaaagatgtattggcctcaggtcactttacttttgatcctggttttatggcgacagcttcatgcgagtctaaaatcacatttatcgatggtgacaaaggtattttattacaccgcggttacccgattgaccagttagcgactcaagcagactaccttgaaacttgttatttattattaaatggcgagttaccaactgctgaacaaaaagttgagttcgatgcgaaagttcgtgctcatactatggttcatgatcaagttagccgtttcttcaatggtttccgtcgtgatgctcaccctatggcaatcatggttggtgtagtaggcgcattatctgctttctatcacaacaaccttgacattgaagacatcaaccaccgcgaaattactgcgattcgtttgattgctaaaattccaacgcttgctgcttggagctacaaatatactgtaggtcagccattcatctatccacgtaatgacttaaattacgcggaaaacttcttacacatgatgtttgcaactcctgcagaccgtgactacaaagtaaaccctgttcttgctcgtgcaatggatcgtatctttacgcttcatgctgaccacgaacaaaacgcgtctacttctacagttcgacttgctggttctactggtgcgaacccatatgcgtgtatctctgctggtatctctgctctttggggtcctgcacacggtggcgcgaacgaagcagttcttaaaatgcttgatgaaatcggtagcgttgaaaatgttgctgagttcatggaaaaagttaaacgcaaagaagttaaacttatgggcttcggtcaccgcgtttacaaaaacttcgatccacgtgctaaagtgatgaagcaaacttgtgacgaagttcttgaagcattaggtatcaatgatcctcaattagcgcttgctatggaacttgaacgtattgcattgaacgacccgtactttgttgaacgtaaactttaccctaacgtagacttctactctggtatcatccttaaagcgattggtatcccaacagaaatgtttactgttatcttcgctcttgcacgtacagttggctggatcagtcactggttagaaatgcacagcggtccttacaaaattggtcgtcctcgtcagctttacactggtgaagtgcaacgtgacatcaagcgt

SEQ ID NO: 8831 - DNA, 774 bp, Acinetobacter baumannii
atggcggttatttttttagaatcaaaagacaatgcaaaaattaaacatttgcgtggtttaattgaactcaatagcgcccgaaaaaagcatcaacaaacagttcttgaaggtacccacctttgtctagcttggttacaacaacagaaaaaactcttttcattgtttacgactgaacaagccttagaacatcccgatttaaagaaaatcattgaacttcaccaaggtcatgtctttattattagcgaagttttatataaagacttaagtactttaggtaatactcttccttgcttggctattatcgatttaccgaaaactgcatcaaccattgactatagcgtagatacgttaattctagaaaatgtacaagatccgggtaacgtaggtacattgttacgttcagcggcagcagcaaatataaaacagattatttgcacacaaggctctgcctcactttggtctccacgagttttaagagcaggtatgggggcacattttagcctgtcttgttttgaaaactttcaattaaccgatattcttcctaaattcgatattcctgttttcgttacaagctctcatcgctcgactagtctttattcaaaagacctttcaaaaccatgtgtttggattttaggcaatgaaggacaaggtgcaagtgattatgctttagaacatgcacaatcagtgactataccgcagccaggtggtcaagagtcattaaatgtagccattgcaggatcaatttgtttttttgaaatggttcgccaacgccaa

SEQ ID NO: 8832 - DNA, 1254 bp, Acinetobacter baumannii
atggataaatttttaatcacgggcggtgttaagctcgaaggggaagtacgcatttctggtgctaaaaatgcggctttaccgttacttgcggcaatgattcttgctgactctccaattacattaaccaatgttccaaatcttaaagatgtaaatactttggtaaaattaatcggtggactgggtgttacaattagttatgaaaatgacacggttaaggcggatacttctactttagataaccagtttgctccttatgagcttgtcaaaacaatgcgtgcatctattttggtattagggccattattagcgcgttacggaaatgccaaggtttcattacctggtggatgtgctattggctctcgtccagtagatcaacacttaaaagccctagaagcattgggtgcacatatcgaagttgaaaatggttatgtacatgccactgttgatggtcgtctgaaaggcggcgaagtggtttttgatatggttactgttggtggtaccgaaaatattttaatggcagctgctttggcagacggtgtaaccacaattcgtaatgctgcacgtgaacctgaaattactgatcttgcgcaaatgcttattaaaatgggcgcaaaaattgaaggtttagatacggatacattggttgttactggtgtagaaagtctacatggctgtgaatatgcagttgttgcagaccgcatcgaaacaggttcttacttagctgctgctgcgattactggtggacgtgtaaaaaccacccatacagatccttcattgcttgaggctgttttagataagtttgaagaaatgggtgctgaagttacccgtggcgatgactggattgaattggatatgttgggtaagcgtcctaaagcagtaagttttagaacactacctcacccagaatttccgactgacatgcaagcacaaattatggctgtaaatgcaattggccgtgggtttgcaacgatttccgagaccatttttgaaaatcgtttcatgcatgttcctgaattgtcacgtatgggtgctaatattcaggtcgaaggccatgatgctgttgtgacgggtgttgaaaaattacaagcagcacctgtaatggcaacagatttacgtgcctcattctctttggttttagcggctttggttgctgaaggtgatacattaattgaccgtatctaccatattgaccgtggttatgagcatgtcgaagaaaaacttcaaggtttaggtgccaaaattaagcgagtaagt

SEQ ID NO: 8833 - DNA, 1782 bp, Acinetobacter baumannii
atgcaagaacttgccaaccgattggcgatacaaaatttcgtcaacgcttatatgcaagagactggcaaaggatatttactttcttttgaccaacaaagttcaactcaacaagcgtttagctctggtttgacgctgttaactcttcctcttccttctatacaagcagaatgctctgtacctttatcttatgtaagtcgtgtaggacgccatcgtctcgctgctttaccgaaaatgtgtattgatggtcaatggcaaaaattcagtgcaggaaccattgttagtcttttacttgaagagttggttattgaatctcaattcaaattagatgctgcttcattgttagagaaatggatacaaagccgggacgcgctactacaattcttaaaacaacgccataatgatttcgatgatttagtaaaggctggacagaattttattgaaagcgaacaggcattaattttgggtcatagtatgcacccagcgcctaaaagccggaatggttttgttcatgaagattggttgaagttttcacctgaacatgctggaaaaactcagttatattattggcttgttcatcagaattatattgctgaaggttgtgcaactgagcagccaatttcagatcaagttaaagacgcaatccgttggtatttgtccgaaagcgatttaaacctgttaaagactcatgttgaatttaaattattgccactacatccttggcaagctcgttatttacaaggtaaaccttggtttgagcaattaaaacaaacaggacagttaattgatatcggtttacgtggatggcaattttcaccgactacatcaattcggaccttggcaagttttaacgccccttggatggttaaaacttcactatcagtcatgatcactaattcaattcgagtgaatttggcaaaagagtgtcatcgtggcgaaatttcttatcgtttatggcacagtgatttaggtaaaaaaatattaaaacaatgcccaacattgaaagcagttaatgatccagcctggatagctctgcaaatagacggcgagattattaacgagacaatttgtattttccgtgatcaaccatttgcagtacagcaacaagtcacttgtattgcatctttatgtcaagaccatccaaataaagagttaaatcgttttaatgctttatttgaccaaattgctcagaaaaatcaacaaacgaattttaaagaaattgctttggattggtttgatcatttcttgaagattggcttggctccgttaatgtatgtttatcataaatacggtatggcttttgaatcgcatcaacaaaatgtattgcttgagctagaagatggtttaccgaaaaatctctggttacgtgacaaccaaggcttttattatattgaagagtttgcaactgaaattgtagaagcattaccagatttactagaaaaagctcatgcggttggtcctaaagattttgtggatgaacgctttagttattatttctttggcaacactttatttggtttgattaatgcaattggagcaactggctatatttctgaagatgaactgttaatccatttgcaacaaaatttacttcaattattagagcaatatccagatagcacattattacagggtttattgtttaacgattctttaccgtataaaggcaatttacttacacgtttacatgaattagatgagcttattgcaccattagaacatcagtctgtgtatgtgcagctaccaaatccactgtacgttgaacagaaggatgtgagctatgct

SEQ ID NO: 8834 - DNA, 963 bp, Acinetobacter baumannii
atgagtatgagtgcaaaaatacagcaaataattgattctgttgtaaagaatgaaaccttaagtggaacttcgcttatttcgacaatttttggagattcagtacttcatcggggtggaaatatcagtcttgcaagcctgattcagttattagagctgtttggttttaatgaccgtgctgtaagaacctctgtttttcgtttagttaaaaatgattggttatgttcagataaaatcggcagaaccagtttttatcgaattaccgattcgagccgttcgacttatttgcaggccgagcaacgcatttataacgaccagatgaaagagtgggaccattattgggatcttattctgatgtctagcctcgatactgaaaataaagcgttgttaaagaaagaactcgaatggttaggatttgccaatatttctacaaacctaatggcgtatccgggttgtaaccgtattgagctgcaacgcttgttggttgacttaaatatgagtgagcaagtggtggtgtttaaagccgaaacgttgcagctctttaataactcggtcgataccattggacgtatgctcagaaccaactggcccatcgatgaattacgccaaagatatctacagtttctcgatatttttagagaaattggcgtgttgctgatgcaggaaaacgaacaactcgaacctgttcaggcctttcaaattcgaactttgctgattcattattatcgacggattttattgaaagaccctgcattaccgcttgagttgttgccaactgactggcctgcgattagtgcgcgaacgttatcaatgaatatttataaaaaagtatttgaacctgcggatgaatacttcttgtctgttgccgcaacagcagaaggaccaatgccaaatgccacagcacattattggcgccgtttcggaggtttggtggcgacaaatgagaggttaaatcatgccttgtta

SEQ ID NO: 8835 - DNA, 924 bp, Acinetobacter baumannii
atggagagcaatttggattttgcattacaactgctctcaatgtggttaaaagaaagaaaaattcaaaaccagtctgagcatacaattactgcttatgagcgagatgttaaaagcttccttgagttttgtgagcttaaaaaagttgatttaagaaatgttgaagcttcagatttacgtgaatatttggctcaacgtgtcgaacaggaccagttaagttcaagtagcatgcaacgtcatcttacttctattcgtcagtttatgaagtgggctgaacagggcaaatacctagaaattaatcctactgacgattttaaattgaaacgtcagcctagacctttaccgggcatgattgacatagaaacggttaatcaaattttagatcaacccatgcctgaaaaaccagttgatcagcagctttggttaagagataaagccatgttggaactactgtactcaagtggtttacggctcgctgaactgcaaggcttaacgattaaagatattgattttaatcgtcaactcgttcgtattacaggtaaaggaaataaaacccgtattgtaccgtttgggaaaaaggcaaaagaaagcttattgaattggctaaaaatttataatatctggaaaggccattttgaccaaaatgcttccgttttcatttcacagcgaggcggtgcattaacccctaggcaaattgaaaagcgtgtaaaacttcaggcacaaagagcgggtgtaaatgtcgacttacacccacatttacttcgacattgttttgctagtcatatgttatcaagtagtggtgatttacgctcagttcaagaaatgttaggtcatagcaatttatcgactactcaaatttatacacatattgattttgatcatttggcccaagtgtacgatcaggcccatccacgagccactaagcat

SEQ ID NO: 8836 - DNA, 1023 bp, Acinetobacter baumannii
atgaaaattacctcagctcgtcaagatcaaggtattccaggagtctatggcttattgctattagatgtagtttcacgttggggatacaacgatgaaacattatttgctccttttcatcttactagtgagcaattggccgatcctgaatatcgtatttcaacacccgtagcaaatgagctagtcaaacatgccttaaatcttaccggtgaaagtacactgggttatcatattggcactcaaatgcgtatttccattcacggatttattggctacgcgataatgacagcaaaagatattacagaagcgattgctctcgctgcccgttttatccaattacgcttaccttttttacaattatatttttctactttcgggccaaaagccacattacaattgcaatgtgatattgagttagaacctcttcgtactgaaatcgttttaggtttaactattggtattatgaccatggctaaagcgattacgggtattgaagatttagcgggtgatgttgatttagactttccagaaccggaaggttttgataaatataagagcaaactaagcagtactattcggtttaaccagcctcatctaatctctagctttgacaaaaaatatttaggttttaagttagttaatgccgatccaatcgcaagtcaaatcgctattaaccaatgtgaagcggaactatctgctttaggcgaacgccgccgtctagccatgcgtgtacgtgatattttaagtaattctgaacaacattacttaagcatagaaaatgtagcagaatatttacatatgtcagatcgtaccttaaagcgacaattggcagccgaaggtacttcattttctactttagtagatgaagttcgatatcgtcatgcgacctctctgctttcgcgtacagattatagtcttgaacaaattgcagatgaacttggttactcggatgtcgcaaatttcagtcgcgcttttaaacgctggagcggtcgcagtccgagcaactggcgcaaagacccctattta

SEQ ID NO: 8837 - DNA, 1080 bp, Acinetobacter baumannii
atgagaaatactatattgcttcagcctaagcaaattagggtattcgttattaccttaattgttctctgctgtggtgttctgtttcagaatgcggcttggagtgagaataatattgccactgctaccgatgaaacggatacggtagtggcaggcaaaattattcaacagcagcaagctcaagcatctaagcctcaaataaattctcaggcagcttcgagtgtcacacctcaaacgcaagttgcaaatgatatggctgatggtgaatcaattcgtggtttaccaacattaaatcaacctgtcattgatcaagctaacgttttgagtgaaactgaaaaacaacagcttagccagaaaatcttaaatctgtaccagcaaggtaaagcacaaataggtattgtgattgtaccaactacaggtcaagaagatatttttgattatgctttgcgagtaggtgaaaaatggcaactcggttcgagtaaacgagataatggcttacttatcgcagttgcaattaatgaccatagaatacagattctaactggatacggtttagaaggggtattacctgatattgttgcaagtcgaattattcgaaatcaaattaccccttattttaaacaagcccaatatgctcaaggactaaatgcaggacttgatgaaattggaagaattttaaatttagatccggaagttgctcagcaagctgctcaagatttaaaagaacgccaacatcaagctgccgaagaacaacaagccaaacaaacaacgcttacaatggctttatttattcttgttgctggggttgtgggatcatttattgttggtcgaccacttagcgcgtcaacagcaggagttgcggcagcggtagctggttttgtaaatggtgctggcgtagtaatgagtttactactgggttttggtattttctttttactcataacttcaattgcccaactgattttacaggctattctgagcggagctggtggcggtggacgcggaggaggctttggcggtggtggcggaggctacggcggcggcggtggacgttttggcggtggaggtgcttcaggctcatgg

SEQ ID NO: 8838 - DNA, 297 bp, Acinetobacter baumannii
atgtctgaagaaatgaccttggaagaacgtaaagtaatctatcgcgcacgtcgtggtttaaaggaaattgatgtctattttgacccttatgtgaaaaattattatttaaaggcagacccggcagaaaaagcgttgtttgctgagttggtagaacaggaagaccctgatttactagattggtttatggtaatgtatcagaatcgcactcacgtaccgaattacgtgactttagtctataagattaaaacagctatgttcatggttgaatgttattttgagtcaacctatttgaacttt

SEQ ID NO: 8839 - DNA, 1800 bp, Acinetobacter baumannii
atgccacaatacaaagcgcccttacgtgatatgcaattcgttttgcatgaattattaaatgctgaagaacactatgcaaaattacctgactttcaaggtaacgtaagccgtgaattggttgatcaatatttagaagctgcggcagacttctgtgaaaatgaactttctcctttaaaccaagttggcgaccgtgaaggttgtacttggaatgatggtgttgtaactacaccaacaggctttaaagaagcttatcaaaaatacatcgaacttggcttcccgtctttatcagcagaagaacaatacggtggtcaaggtttacctaactctttaggtatcgcaatttcagaaatggtaggtagctctaactgggcatggggtatgtaccctggtttgtctcacggtgcagtacgtacattagaacatcacggttctgaagagcaaaaaaatacttacttaccaaaccttgtttcaggtgtttggacaggtacgatgtgtttaactgaatctcatgcaggttcagacttaggtattatccgtactaaagcagaaccaaatgcagatggtagctatgcaatctctggcgagaaaatctttatctctgctggtgaacacgacatggctgaaaacattatccatatcgttcttgctcgtctaccaggcgcaccaaaagggactaaagggatttcgttatttatcgttcctaagttcaacgtcaatgcagacggaactctaggcgaacgtaatgccgtacgttgtggttcaattgaacacaaaatgggtattcacggtaacgcgacttgtgtcattaactttgaccaagcaaaaggttatttaattggccctgaaaaccgtggtttgaactgtatgttcacctttatgaacacagcacgtattggtactgcggttcaaggtttatctgcatcagagtcttctttccaaggtgctttaacttacgcgaaagaacgtttagctatgcgttcactttctggtcctaaagctccagaaaaagaagcagatccaattatcgttcaccctgccgttcgtaacatgcttttaactcaaaaagcatttgctgaaggtggtcgtgcacttgtttacttacttgctcaatatgcagatatcgttgaaaaaggcgaaactgaagaagagcgtaagtttgctgacaacatcttgtctttattgactccaattgcaaaagcattcttaactgaaacaggttctgaatctgctaagcacggtgttcaagtgttcggtggtcatggcttcatttctgagcatggcatggagcaaatcgtacgtgatacacgtattgcttgtttgtatgaaggtacaactgaaattcaggcacttgatttgttaggccgtaaagttttacaaactcaaggtgcaatgcttcgtgatttcactaagattgttcacaagtttgtagaagcaaataaagacaatgctgccatgaaagaatttgttgagccacttgctgcgctgaacaaagaatggggcgacctcactatgcaaatcggtatgcgtgcaatgcaaaatccggatgaagtgggtgcagcggctgtagattacctctacttctctggttacgttactttagcttatctatgggctcgtatggcgcttgtagcacaagagaaattagctgcgggtacaaccgatgttgatttctacaatgcgaaagtaactactgctcgcttctacttcaagaaaattttaccgcgtgtacgctctcatgtagacgttatcgcaggtggtttagacccattgatggcattagatgctgaacatttcgctttc

SEQ ID NO: 8840 - DNA, 1599 bp, Acinetobacter baumannii
atgaaccaattacaaagcaagattaatgttcgaagcgaagacttcaaaacaaaccagcaagctatgcaaacattggtcacagatctcaaacaagttgcccagcgtattgctttaggcggtggtgaaaatgcccgtcaaaaacatttggctcgaggtaagcttttaccccgtgaacgtattgatcaactgattgatgtcggcacggcatttttagaaattggtcagttggcagcgtacaacgtttatgaagatgatgttcctgccgcgggtgtgattgctggtattggtcaggtcaacggcatcacttgcatgattgttgccaacgatgcaacggttaaaggtggaacgtattatcccctaacggttaaaaagcatttacgcgcacaagaaattgccgaacaaaatcatttgccttgtatttatttagtggattcaggcggtgcctatttaccaatgcaagatgaggttttcccagaccgcgatcacttcgggcgtattttctataatcaggcacgcatgtcgagcctaggtattgctcaaattgccgtggtaatgggtagctgtaccgcaggtggtgcttatgtaccagcgatgtctgatgaaaccattattgtacgtaatcaaggtacgattttcttaggtggacctcctttggtaaaagctgcaactggcgaagtggtgagcagtgaagatttaggtggtggtgatgttcacacacgtctttcaggtgtggctgaccatttagctgaaaatgatgaacatgcaattgcgattgcgcgaaacattgttgccaacttaaataaaaagccaaatgagttaaataagcaaattgatgaaccattatttgatgcatcggaactctatggcgtggtgccaagtgatgcgcgtaaacctttcgatgtgcgtgaagtcattgcacgtattgtagacggctctcgttttgacgagtttaaagcccgctttggctcaacacttgtaacgggtttcgcttctctctacggcatgccagtcggcattattgccaataacggaattttattttccgagtctgctcaaaaaggcgcgcactttattgagctatgcacacagcgcaatattccattgttatttatacaaaacatcaccggctttatggttggtcgccagtatgaaaatgaagggattgccaaacacggcgctaaactggtgatggcagttgccactgcaaatgtacctaaactcaccctgattattggtggttcatttggtgcaggtaactacggtatgtgtggccgtgcttattcaccacgctttttatggacatggccgaactctcgtatttcagtgatgggcggcgaacaagcagcgagcgtactttcgactttaaaacgagatcaaattgagcaaaaaggtgcccagtggtcagcgcaagaagaagacgaatttaaacaaccaattcgtgaacaatacgagcgtcaaggccatccatactatgcttctgcccgcctttgggacgacggtgtaattgatccagctcaaactcgtcaggtacttggtttaagccttgctgcggccatgaacgccccaatccagccaaccaaatttggcgtgttccgcatg

SEQ ID NO: 8841 - DNA, 690 bp, Acinetobacter baumannii
atgcacacgcgtcgtattttattagcgttttcacttgccgcttcggcagcatcggttgcttttgcagattatcaaaatattaaccaatctactgattcagatcgattggaacagttatcaaaaacactatctcaaggctcatatactcatcctgatgatttagatcttccggcgagtgcaaaagtttcagtgactttacgtgagaaaacagttgaactcaacaatgattcactggcaaagaaatacggcactacgacagctaaaaactcatttaaaacctcttcttcaaatccttattcttggttagtttctcatcctcttcctgatacagtacgtgtttcttctaactttggtggtcgtaccatgggtggtcgtgcagagcatcacggtggtttagatatggctgcaccaagtggtacaccaatctatgcgactggcccgggtattgtgactaaatcaggctggggcacaggttatggccaatatgttgaaattaaccatggtaatggttatttaacgcgttacgcacatgcttcacgcttaatggttcgagtaggtgatcaggtttctgctggtgatcatattgctaatgttggttgtacaggtcggtgtactggtccacatttacattacgaagtagttaaagatggtcaacgtaagaatccatcaacttacttggcaatgttgcct

SEQ ID NO: 8842 - DNA, 3684 bp, Acinetobacter baumannii
atgtctacgcttgccaccctaaaagcgcttcttgctaaacgcattctgattattgatggtgcaatgggaaccatgatccagcgccataaattggaagaagctgactatcgtggtgagcgttttgctgattgggcacatgacttaaaaggtaacaatgaccttttggttctaacacagcctcaaatcattcaaggtattcatgaagcctacctcgatgctggtgcagacattattgaaaccaacagctttaacggtacacgtgtttcaatgtctgactatcacatggaagatcttgttccagagattaaccgtgaagcagcacgtttagctaaagcagcttgcgaaaagtattcaacgccagacaagcctcgttttgtggcaggtgtacttgggccaacatctcgtacatgttcaatctctccagatgtgaacaaccctgcttttcgtaacattagctttgatgaactaaaagaaaattatattgaagcgactcatgcactaattgaaggtggtgcagacattatcctgatcgaaactgtatttgatactttaaactgtaaagcagcgatttttgcagtcaaagaagtctttaaacaaattggtcgcgaattaccaattatgatttcagggaccattaccgatgcatcaggccgtactttaacaggtcagacagcggaagctttctggaactcggttcgtcatggcgatttgctttcaatcggttttaactgtgcccttggtgcagatgccatgcgccctcacgtaaaaactatttccgatgtcgcagatacctttgtttcagcgcacccaaatgcaggcttaccaaacgcatttggtgaatatgacgaaactccagagcaaactgcagctttcttaaaagagtttgctgaaagcggtttgattaacattactggtggttgctgtggtacgacaccagaccatattcgagctattgccaatgcggtaaaagacattgcgcctcgccaagtgcctgaaaccgtacctgcttgccgcttaagtggtttagaaccatttaatatttatgatgattcattgttcgtaaacgttggggagcgtactaacgttaccggttctaaaaaattcttacgtctcattcgtgaagaaaactttgcagaagctttagaagttgcacagcagcaggttgaagctggcgcacagattatcgacattaacatggatgaagggatgctcgattcgcaaaatgcgatggtgcatttcttaaaccttgtagcatccgaaccggacatttcacgtgtaccgatcatgattgactcatcgaaatgggaaatcattgaagccggcttaaaatgcgtacaaggtaaaccggttgttaactcaatttccttaaaagaaggttatgacgagtttgttgaaaaggcccgcctctgccgtcaatatggtgctgcaattattgtgatggcctttgacgaagtaggtcaggccgacactgctgaacgtaaacgtgaaatctgtaagcgctcttatgacattttggttaacgaagtaggcttccctgctgaagatattatttttgacccgaacgtgtttgcagttgcgactggtattgaagaacataacaactacgcagtcgattttattgaagcaacgggctggattaaacagaacttaccgcacgccatgatttctggtggtgtgtctaacgtttcgttctcattccgtggcaatgaaccagttcgtgaggccattcactctgtattcttgtaccatgccatcaagcaaggcatgaccatgggtattgtgaacgcaggtcaaatggctatttatgatgatattcctaccgagctaaaagaagcggttgaagatgtcattttaaaccaaaatcaaggtgagtctggtcaagtcgcgactgagaaactacttgaagttgcagaaaaataccgtggacaaggtggtgcaacaaaagaagccgagaaccttgaatggcgtaatgagtcagttgaaaaacgtcttgaatatgccttggttaaaggtattacgacttatattgaccaagacaccgaagaagcccgcttaaaatcaaaacgtcctttagatgtaattgaagggccactgatggacggcatgaacgtcgtcggtgacttgttcggttcaggcaaaatgttcttgccacaagttgtaaaatctgcccgagtcatgaaacaagcagtagcatggctcaacccgtacatcgaagctgaaaagaccgaaggacagtctaaaggtaaagtcctaatggcaacggttaaaggtgacgtacacgatattggtaaaaatattgtaggcgtagtacttggctgtaatggctatgacattgttgaccttggcgtaatggtcccttgcgagaaaatcttacaaactgcaattgatgaaaaatgtgacatcattggactgtctggtctgatcaccccatctttagatgaaatggtatttgttgctaaagaaatgcagcgtaaaggctttaacattcctttattaattggtggcgcgactacttctaaagcacatacagcagtaaaaattgaccctcagtatcaaaacgatgcggtaatttatgttgccgatgcttcacgtgctgttggtgtagcgacaaccttgctttcgaaagaaatgcgtggagcatttattgaagagcatcgtgctgaatatgccaaaattcgtgagcgtttagccaacaaacaaccaaaagcagccaaactgacttataaagagtcggttgaaaatggttttaaaattgatgaaagctacgtgccaccaaaaccaaatcttttgggaacacaagttttaaagaattatccgcttgctacactcgtggattattttgactggacgccattctttatttcttggagtttaactggcaaattcccgaaaattttagaagatgaagtggtcggcgaagcagcaactgacctttacaaccaggcacaagcgatgttgaaagatattatcgacaacaatcgttttgatgctcgtgctgtatttggtatgttccctgctcagcgtacagatgcagataccgtcagcgtatttgatgaagctggtcaaaatgttacgcatacttttgagcacttacgccagcaatctgacaaggtgacaggcaaaccaaatttatccttggcagattacattcgagctgatcgcgagcagcaagactacttgggcggattcactgtatcgatttttggtgcagaagaactggcaaatgaatacaaagccaaaggtgatgactactctgcaattttagtgcagtcattagctgaccgttttgccgaagcttttgccgaacacttacatgaacgtattcgtaaagagttctggggctataaagctgatgagcagctcagcaatgaagaactgattaaagagaaatatgtcggtattcgccctgcaccaggctaccctgcttgcccagagcactctgaaaaagcagtgttgttcgactggttaggttctaccgacaaaatcggcaccaaactgactgagcactttgcaatgatgccgccatcttcagtaagtggtttctattattctcatcctcagagtgaatactttaacgtgggtaaaatctctcaagaccaacttgaagattatgcaaaacgtaaaggttggacactggatgaagcgaagcgttggttagctccgaatttagatgactcgattgtt

SEQ ID NO: 8843 - DNA, 4365 bp, Acinetobacter baumannii
tccgttacagctcttaaatcagaattaagcagcggaaaaggcattaataacattgttgcgcccttctcggacccacaagaacttccagctctaggtggagcaggtcgtaccgtagctttagtggactctgcgttacgtcgaaacggtaaggcttacaaagtgtcattcacggcggcggctcattatgtgtatttcggcaccgctcaggccgctctagcgccatcacaaatggcgatgcaagttgaggcggggcgcgcttatacatttagcgcttggttgaaggctttatcaacggccgttccatcattccgtttcaacatcatgtggtttattcgtgaccctagcactggaaacatcacaacaaatgccggaatcatttttccacaaggtcaaacagattcttacgttgctccaaacgctaacggtcaacgttattcctttaaaccagtcaactcacctgcaaacacaatcggcgcaaccgtctatgttgtaggcaacccttcggggccttctgccggcgaatacctcatcgatatgttgatgctagaagagtctgtcggttccgaaaagcctgcttctacgtggacggcgggtcctgctgatctaaatgcgattaagaatgccttagatacaaacgctgtagcaatcaacaacctaactacacgcgtttcgaacgacgaggggaaaattacatctcagggcaattcgatcacgcaactaaacaacagcattaatacgattaatggaaccctttcaaacaaagcggatgctacggctttaaatgcattaacaactcgcgtttctaatgctgaggggcaaatttcatcacaagggtcgtcaattgtctctcttcaaaacgatctagcatctaccaacaaagccgtttcaaccaaagctgactcaagcgctctcaattctttggattcaaaagtatcagaaattgatggtcgagtaacaagtactgccaatgccgttacctcgcttcagggcagtgtttccagcattgagaaggggctttcaactaaagctgacgcgtctgcattaaacaactactacacaaaaactgaggctgattctgccgcctctggcgcaatcgacaagttcaacagtcaattgacgattggtggtgtaaacgttgttgcgaactccgaagctcctcgcacttcaactgccgcaacgaatcgcgaatatttactgtatgaacgtagcgccgaattaaaagcgttctatgacgaaaaccttgagaagccaatcacgatttcgtttgaaatgagcgttcctgtggctggaccggttcaagtttattcgtcaaatggttctgctcaccaattcgttacttccgttaatgcaattatcgtaaatcaatttgccaaatattcagtaacagttagtccaaaagcgcatacggcaagtacaactgtttcgacaattgagttctatggaacgtatggaactggccgtatcccgacgattcgtaaattacaaattgaagcgggcacaaaggctaccgcttggagtccaagccctcgtgatacaaaggctgcaattgacgccaatgcttctgcaattcaaacgacccaaacaaaagttgacaatatcgatggtcggctaaccactgctacagattcgattacgtcactaaattcgcgcatgtctacagccgaaggaaatatcaacagcacaaatactgcggttggtggactttcgacacgcatggcaaccgctgagggcaagatcaccaatcaaagtgattcaattgcatcgctacaaaatagcgtcacctcaatcaatggaacactggcaaacaaagccgattcaagcgcggtcaataacttaactagccgagtggaaacagccgagggcaagatttcaagtcaaagcgggcagattacttcgcttagcaatagccttgatctaacaaacagcaacttgaacgacgtaaatgttctggcgcgactgttatcgcttggtaagcctctacgcgaggatccaacttttaaaactacctcttcgggcggtttgtctgcatacaatttccctgcgggaacctcatggattaagcaagccaagtcaacagacaacccaactggctcaacccatgaaatgcttattaaggcaactcaagcgttgggtggtggttggtatccaactgctccaacgctcgtgcttactgctaataagacattcttaattaaacaaattattaagatgccagtaggcacaaaattacaagccatcggtaatgctacgggtacgggtggatacatccgaatcttgggtaatgatctaggaactggcaaatttgaaacgtactactctgtcgtacaaggtggggctgatttaagtggctctactattcaaggtcatttccgcgtaattgccggtactaacccgccagtaccaacggttgataatccagtctttgtgattcttgcttcatacgaagtatttgatgtaacggctgtaaacgacaccattccaaaagcttatagcgatgctattgcagccaatgcgaatgcgattaacaccctgtcaaacactgtcagccagcagggtaataccattacttcccatagtaattctattactcaactaaataacagcatttcaagcatcaacggcgcactttcgagtaaagcggatgcgagcgcattacagtcgcttgattcaaaagtaacactaatcgacggcaaagttacatctaactcttctgcattaacagcgttgcaaagcagctttgagggaattccaaatcaaggcgtgaacttgctcggccctgaaatttccaacccaatcgaaaagccaaattggatttcaggtcttccatttgaagttattcaatcaccagatacggtgaatgtgcgtgcgttccaattcacgatgcctgccaacaccactagcggcacttacttcaacattggtggcggccaagttccgcgacagtggctaacagaaggtacatacatttttagttttgttgccaaaactgttggcgggacaccaccgcatgctattgagtggcaactctacaatgtagatagtacacgcctgcgctttaatattaccgcaacattaacccgctatagcggggtgttcacggtgcccgctggtggtgccgctgcatgtatgctgttaatcggaaaccctacaggcaaacctgcgggacaagttatcaatatcgaaagaatgatgcttgaacggcaagttggcaacaacacaaccccttcggcttggattgcaggtagcgacccaaccggaatgattctttcaacgcaagccaaggcgactgatttattcaacacagccactagccaaaacgccgcgactgcgggacgcgtcactagcctcgaaagtcgcatgacgaccacagaaggcaatttaaacaaaaaggctgatgcttctgcgcttcaaaacctcgacacgaaagttacgaatgtcgatggcaaagtaacgtcaaataccaatgccattacagctttaagttcaactttaagcaacgctacttcaagcatttcaatgaatgcgggtaatgcacagggcgattggacattctttaatacgtcaggcgaatactcaattgttgcacaagcggatggccaagcgggtcgtgttattcaacttggaaataatgctggcaatgatattgtttggatgcatccgaataacttcattccttttgatgcaactaagacatatcgacttcgtgcgcggtatcgccgtcgtgccggaacaggcacaatttacctcggtgtctctcagaaaaccccagacaaggcactatacgtaacaacagccaacgcattatcgggcgatatggggtcttctaactatgttgttaatgcgcacgcacctgcgatcgatgaatggcaagaaatcgttgcgtatatcaaaggtcgatcagcaggagcagcatcgggttcaggctcaaaaacaagcccacgtactgtttcacaacaagcaggcttcatcacgccgatgtttattgcaaactattcggcgcaaacgggcattgttgagcttgattacctaattctggaagatgcagaggcaattgttggcaatgatgcaaatgcatcagcgattagcgctcttgataccaaagtatcagaagttgatggacgcttaacgacagcaacaaattcaatcacttcgcttaactctcgtatgagtgcagcagaagggaatatctcagcggcaaactcggctctaagcggtctttcaacgagaatgacggctgctgaaaatggtttaaccaatcaaagtaatgcgattactaatttaagtaacagcttaacggttacaaccaatacagcgaacgctgcattgcctaagattcagggcggtactggcgcagctaagttattt

SEQ ID NO: 8844 - DNA, 1131 bp, Acinetobacter baumannii
atgaaaagacccttttaccaattaaatcaaagtaaagatgttatacggcattttaccccaaattggtttacagcaactatgggtactggcgtggtcagtatgattttaattcagcttccatttgccaaatcatttttatttatgctggctacgctgttatggcaatttaatattgttctatttagtgttttttcagttctctatttattgcggtggttactcttcccgcatgaagcgaagcaaatatttaatcatccaaatatgagcttgtttttaggtgctataccgatggggcttgcaaccatactaaatggctttttaagcttcggaatcggactttacggcgaagtggcagttcatatcgcccaagctttgtggtacatcgacgtttttttagcactagcaattgcatggatcgtaccattttgtatgtttagccgtcagaatcatcagctacataccatgactgcaatttggttgttacctgtagttgcttgtgaagtcgcagcaagttctgcgggcatgttggttgcacatttaccaacagatgtgcatagctttcatttattgttagcgggttacgtactttggggaatctctgttttacctgcatttgccattttaacgattttaatgttgcgtatggctttgcatcagttaccagaaaaagaagtcgcgatttctagctggctttctttaggcccgattgggacaggtgctttaggcctattgttgctaggtgagcaggcacaaagagtatttgtaaatgttggctttcctgagttggcccatgtatttcaagccttgggcgttgtgggtagtctggtacttttaggctttgggttatggtggcttggccttgcgattttaacaacacttcgtcatgcaaagacaggtattccatttaacttgggttggtggggcttaaccttcccatttggtgtgtttattttggctttatttaatttaggtcatcagattgaagttgtatttttacaatacgtcgctgtggcattcagtattttattattagtgatgtggagcggggtaatgaagaaaaccttagccggagcatacagtggcaagctattcttctctccatgtttggtggctttacaacaaagaatgcag

SEQ ID NO: 8845 - DNA, 534 bp, Acinetobacter baumannii
atggcgaatgacaaccacaaccaagttttggatgaacatacagaagttgtagtagaaggtgataaagcttctgcaaaacgtgcacgtaaagtgaaacctaaaacttctgacgtaggctcaactgcaagtttatttggtattgcaccttatcaacctaagaaaaatgaagagtacatgtctgaaggacagctcgagcatttccgacaaattctgcaagcatggaaagctgaattaatgtctgaagttgatcgtactttaaatacgatgcaagatgaatcaactgcattgccagacgtaaatgaccgtgctacccaagaagaagaatttgcaattgaattacgtacacgtgaccgtgaacgtaaattaattcgtaaaatcgaacaatctcttgaagcgattaaaaacgaagactacggtttctgtgaaacttgtggtatcgaaatcggcttacgtcgtttagaagcacgtccaactgcaacgttatgtattgactgcaaaactttggcagaaattaaagagaagcaaaataacggt

SEQ ID NO: 8846 - DNA, 834 bp, Acinetobacter baumannii
atgtcagaaagtaaacaatttaagcggagtgttttttttatttctgatggaactgcgattactgccgagacccttggacattcgttattagctcaatttcctaacgtagattttgatattcacatcatgccttatatcaccactgaagaggccgcaatggcagtggtggtcgagattaacaagtgtcagaccagagatggttgcctgccattagtatttgatactttggtcgatccgcatgtgcgagaaattattaatacggctaaagcggttaatctggatgtgtttgaagggttaattagtaagctggaacaggagcttggaaccccgcctacaactttagtcggacagactcatgccgtgaccgattcggagtattacaaagcccggattgatgctgttcattttgcgcttgataatgatgatggagcacgtacccgccattatgacaaagctgatttaattttaattggcgtgtctcgttccggtaaaacaccgacttctatttatctatctttgcaatttggtatccgtgttgctaactatcctttaaccgaagaagatttagacgataatcgtttaccggcagtcttaagagagcaccgcagtaaattatttggtttgatgattgatgcagagcgcttggttgccattcgaagtgaacgtaaagcgaatagccgatatgcaagttttagccagtgtcagatggagttgcgagctattgaaggtatttatatttctgagggaattaaatacttaaatgttaccgaaatgtcgattgaagaaatttctactcgtattttacaaatgacaggtttaaaacgtcgtattggt

SEQ ID NO: 8847 - DNA, 1110 bp, Acinetobacter baumannii
atgcgtaattataaaatagatattcttcgaggaatttctatccttttggttcttttacatcattttaatattccctataaactcaaagatacatggttaggttttgattttttaggtgaagcatttagcacagtcatcgcaagaaacggaaattatggcgtcaccatgttttttgtgatttcgggttttttaattacccatcacactttaaaacgagacaaacaattttctgcaattaacctcaagcatttttatatccgacgggcagcacgtattttaccgtgtctggtattactcattttaggtgtaagcatacttggttcatttgacttaaaaccctttatgaaccaagcaccgaatggcattgaggtctcttatcctttaaccatatttgcagccttaaccttctggatgaatatcctgattattaaatttggttgggtaaactacgctttgggcgtgttgtggtcgctctctgtagaagaagttttttactttgtttttccattattgtgtctacttacgcgtagtaataaggtctttattactgtacttgttggagtgattttatatggaccttattttaggtctctccattttggagaagaaagcggtgcctatttatatcattatttttcgagttttgatggtatagcaattggttgtttaacggcgatattttctcatacctatcgaccagattggacctataaaaaacctctttcatggttgattattttgagtatgaccgctctatatttatatgcgcccattaaagaagtcagtacatggggtattagcttatttgcttttgccacaagcttactgattttgtgttttcaacatccttccgaaacacaagcgcataacctatttaccaaagtgatggtctggttggggcaaagaagttacgaaacttatttgtttcatctggttgtgctgggccttatgaaggttgcttttattccagcccaaaccgactctagcattaaaattatgcttttaattggctatttggttctgacttttatcattagcgcagcaattgaaaaatactattccaccccgcttaacagctacattcgaaaggtttttattaaagataaatca

SEQ ID NO: 8848 - DNA, 1002 bp, Acinetobacter baumannii
atggcaactgtagatctttttgcaattggtaatgcattaatcgaccaagaatttaaagtttctgatgattttcttagtcagcaaggcttacaaaaaggcaccatgcagttgtctgatggtgaaacacaatctgccctttatgaaaaattaaaacaaactcaagattacaaaggtcaagcaagtggcggctctgctgcaaatacaactgtagcatttagtgcattaggtggtagcgcattttatggttgccgcgttggtcatgatgaattaggtggaatttacctgcaagggttaaatgatgcaggcatccagactacaccaaagtccatcagtgaaggggtgaccggtacctgtatggtcctgattagcccagattctgagcgtactatgcatacctatttaggtattaccgctgagctctctcaagaccaaatcgattttgaaccattaaaaacagcaaaatggctttatattgaaggctatctttctacaagtgaaacagcacgtaaagcggtaaaacaagctagagaaattgcaaaagctcacggcgttaaaattgccctatctttatcagatcctgcaatggttcaatatgcccgtgaaggcctagaagagcttatggatgatggtgtggatttattgttctgtaatgaacaagaagccttaatgtataccaataccactactgttgaagatgcacttactcaattacgttttaaaaaccataccgttgtgattacacaaagtgcaaaaggtgctttagttgcaaatccaactcaccattttcacgtcgcaggccgtcatgttgaagctgtagatacaaatggtgcgggtgatgcttttgcaggtgccttcctctacgcattaaaccatcatgaagatttaactgctgctgcacagttagccatcttaatttcaagtgaagtcgtgtctcaatttggtcctcgtttagccattaatgactatgctaaacttctcgaaaattttcagaaggaatgtgct

SEQ ID NO: 8849 - DNA, 1008 bp, Acinetobacter baumannii
atgaaagctgtggcatatcaaaaagcggggcctattacatccccagaggcactcgtagatattgaaatcgacactccagtagctaaaggacatgatttacttgttcgtgttcaagctgtatcagtaaatccagtcgataccaaaatacgtaaaaatgtaagtgctgaacaatctggttggaaagtacttggatgggatgctgtaggcacggtagaagcgattggcgataaagttactcaatttaaaattggtgatgtggtttggtatgcaggtgctttaaatcgccaaggcagtaatagtgaattgcaattagttgatgaacgtattgtcgggcataaaccaaagactttagaagtgactgaggctgcggccctccctttaacggcaatcacagcttgggaaatgttatttgatcgtctacaagttccaaagactgcgcctactaatacgactattttagtgattggtggagctggtggggtaggttcaattaccattcagcttcttaagcaattaactaacctcacgattattgctacagcttcacgccccgaaacaaaagaatgggtagaacaactaggtgctgactatgtattagaccaccgtcagcctttagctgcacaaattaaacaattaggtttaagtgcacctttatatgtattctcaaccactgaaacagatcaacatttatcagatattgtagagttaattgctccacaaggtcattttggacttattgatgaccctgatcagttagatattaaaccgtttaaatctaagtctgtctcagtacactgggaatttatgtttacgcgctccatgttccagactgaagatatggaaaaacaaagtgagctactaaatgaagtcagtaaactggtggatgaaggtaaaatcaaaacaactgtgactcaggttttaagcccaattaatgctgaaaacttaacacgggttcatgagcaaattgaaagtggttcaaccaaagggaaaatcgttttacacggattt

SEQ ID NO: 8850 - DNA, 381 bp, Acinetobacter baumannii
atgaaaaagcctattgttctcgtactttcaacattaatgttgggtatgtcggcaactgcgatggccgattcaaatcatcgttgggataactatcacggtaaagaccataatcgctatgaacagcgtcatgattatcgttatgaccaccgcaatgatcatagagctcctgtttggtcacactctgagcgtggcaaccattatggccgatatgtagcctttaagcgcggtgatcgtattcctgtggaataccgtaatagccgttattatgtctcagactggcgtgcacatcgcttatatgcaccaccacgtggataccactgggtgaagactcctaaccaatacttattggttgactcgaaacatcacatttatcgagttcgt

SEQ ID NO: 8851 - DNA, 711 bp, Acinetobacter baumannii
atgattgaaatccttcgacaatattggcagtcatacctttggaccgatggcctacaaatgaccggtgtggcgatgactgcttggttattggtgctttctattgggattggatttgtgcttgctgtgcctttgtcacttgcgcgagtatcagaaaatatctggttgcgtggtccagtttggttgtttacttatgtttttcgtggcacaccactgtacatccaactactgattatttactcgggtatttatagctttgattatatccacgagcatcagacactcgatgcattctttcgagagggcataaattgcaccattttggcattcgcgctcaatactggtgcatataccactgaaatcttcactggagcaattcgttctattccacatggtgagattgaagctgcccaagcttttggtatgtcaaaatggaaactctacacacgtattatcattccgtcgatgttacgccgtgctttaccgttttacggaaatgaagtcattttaatgttgcatgccacaaccattgcatttacagcaacagttcccgacattttaaaaattgcgcgtgatgtgaatgcggcaacctatgacactttcagtgcttttggaattgctgcggtgttgtatgcggtgttggcttttattttgatttggatatttcgtaagttggaaaaacgttggttggcatttttaaagccatcgaatcat

SEQ ID NO: 8852 - DNA, 789 bp, Acinetobacter baumannii
atggactatcaaaatattattgctgaagaaaaaaatggtgttggctacctgacatttaaccgcccaaaagcactgaatagctttaacgttgatatgcaccgtgaagtggccgaggttttaagccagtggactaaaaatccagatgttcgatgtgttgtgattagtggcgaaggccgcggcttctgtgcagggcaagacttaggcgaccgtgtagtagacccaaatgctgaagctccagatttaggatattccattgaaacttactataatccgctcattaaaacgattgtaaatatgccaaagcctgtcatttgcgcggtaaatggcgtggcagcaggtgcaggggcaaatattgcattggcatgtgatttggtgatagcagctaaatcggcaaacttcgtacaagcattttgccgcttaggtttggttccagactcggcgggtacatggtttttaccacgtgctgtaggccatgcgcgtgcgatgggtttgacgttgttaggtgacaagctccccgcagaaactgcaaaagaatggggcatgatttgggatgtggttgaagacgccgagcttaaaacaaaagtgactgaactcgctgaacgtttagcgaaacagcctacatttggtctatctctcattaaaaaagccattcatcaatcaagcaataacacttttgatgagcaaatgctgttagaacgagatttacaacgcattgcaggccgttccgaagattatcgtgaaggtgtacaagcctttatgaataaacgtgaaccaaattttaaagggcgc

SEQ ID NO: 8853 - DNA, 1323 bp, Acinetobacter baumannii
gtgagtctctttcaaaatatcattatcatcgtactgctcatcatcgcagcaggctttttatctttaactgaaattgctctagctggtgccagaaaagtaaagttaaagattttagccgaagctggcgaagaacgtgctcaaaaagtacttgatttacaagaacaatctgcagacttttttgcagcgtcccaaatcggcttaaatgctgttgcaatcttaggtggtatattgggtgaagctgcgtttcgtcctttttttgtgaacttagttgaccgtttctatgaaggaccttggacgcaaaccattggatttgccctatctttcacattggtaacttctttgtttattttattcgccgatttaatgccaaaacgcttggcaatgatcgcacctgaaaaaattgcaattagtgtaattaaccctattcagatttttatcaaaatctgtaagcctttagcatggggaattaatgcaattgccaatttgctattccgcttgtttaaagtaaataccacacgcgaagacaatattacttttgatgatatttcagcagtgatggatgcaggtgctcaagcaggtgtactacaaaaacaagaacatcactttattgaaaacgtatttgagcttgaagaacgtacagtcccatcaagtatgacaacacgtgaaaatgttgtttattttacgcttaacgagcatgaagatagcattcgccaaaaactggcagaatatccttattccaaatttctggtttgtaacgaaaatattgatcaagtgattggctatgtagatgctaaggatattcttgtacgtattttaaacaaccaatctttaacccagctcaatgaatcgactattcgtacggttctaatgatacctgatactttaacactatcagaattactcgatcgcttccgctcaacaaaagaaaagtttgctgttgtaattaatgagtatgcgcttgtcgttggggtaattacgctaagcgatatcatgattactgttatgggggattgggttacccctatggaagaagaacagcaaattattaaacgtgataataattcttggctgattgatggtagtacacctattgaagatcttaagcacgcgcttgaaatggatgaactacctgatgaagagaattatgaaacattagctggtttcatgatgtaccgtttacgcaaaatcccacgtccagccgactttgttgaatttggtggttataaatttgaagttgttgatgtagaccattttaaaattgatcagctattagtaacacgtgtattagaaaaaaatgatttaccttctccacctgatgaaaat

SEQ ID NO: 8854 - DNA, 623 bp, Acinetobacter baumannii
atggaactcaatccaacagaaaaagataagttactcatttttactgcaggcttagtggctgagcgtcgtaaagcacgcggcttaaagttgaactatccggaagctgttgcatttatttctgcagccttacttgaaggtgcacgggatggtatgacggtgagtgaacttatgcactttggaacgactttattaaagcgtgaagatgtcatggatggcgtaccggaaatgattgctgaggtgcaggttgaagcaacttttcctgatggttcgaaattagtcactgttcatcagcccattgtataaaaggaatacttatgattcccggtgaagttattactccagaaactgatattgaactaaatgttggacgagaaactttaaaggttgtggtggctaatcttggcgacaggcctattcaagtcggttcgcattttcatttctatgaagcaaacgatgccttacagtttgatcgtgaggcagtcaaaggttttcggttaaatattgcagcaggcacagcaatacgttttgaaccgggacaaagtcgagaagtagagcttgttgctttagctggtaagcgagaagtatatggttttgctggtcgggtaatgggcaagctggattaa

SEQ ID NO: 8855 - DNA, 327 bp, Acinetobacter baumannii
atgaatatcaatatgctcatgcagcaagcgcagcgcatgcaaaaagatatggaatcaaatataaaaaaggctaaagaagagcttgctcaaactgaagtacacgctgaagcgggtggtggtttagttaaagtaacaatgactggccgttatatcgtaaaacgtatcgaaattaatccagaattacttcaagacgaaccagacatgattgaagacttaatcgcagctgcggtgaatgatgctgtgcgtcaagctgaagtagtttctgaagaaaaaatgcaaaaagctaactctggtatgggtttacctcctggtttagcaggcatgttc

SEQ ID NO: 8856 - DNA, 1248 bp, Acinetobacter baumannii
atggctacaaattacaaagacggtttttctcgtatacaacctcatacgtggaaaatagcatttatttttgcatttctagcactattggtagatggagcagatttgatgctgctgtcttatagcttaaatagtattaaggcagattttggattaagttcagtacaagcaggtatgcttggcagttttacattagcaggtatggctgttggtggaatttttgggggatgggcgtgcgataaatttggtcgcgtgcgcattgtggttatttctattttaactttctcgctcctcacctgtggcttaggtttcacccaaagctttcttcaatttggtattttaagattttttgcatcactgggtttgggttcactttatatcgcctgtaataccctcatggccgaatatgttccaacccgttatcgcactacagtactgggcactttacaagctggctggaccgtcggctatattgttgcgaccttgcttgcaggttggattattcctgatcatggctggcgcatgctgttttatgttgcgattattcctgttgttattgctgtcctcatgcatgtgcttgtaccagaaccagaagcatggcaaaagtctcgactacaacaaccagtcatggctcaaaacgcatcgaaaacctcggcatttaagcttattttccaagataaacgaaaccgtaatatgtttatcttatgggcgttaacggcaggctttttacagtttggctactatggtgtaaataactggatgccttcatatctagaaagcgaactgggtatgaaatttaaggaaatgaccgcctatatggtaggtacatataccgccatgattttaggtaaagtccttgcgggcatgatggcagataaattagggcgccgttttacttatgcttttggtgcaatcggcactgctattttcttacctctgattgtcttttataactcgccaagcaacattctatatttactggtgacctttggtttcctctacggcatcccgtatggcgtaaatgcaacctacatgaccgaaagctttgggacagcaattcgcggtacagctattggtggtgcttataacgtcggacgtttaggcgctgcattagcccctgcaacgattggtttcttagcctctggcggctcaattggtttaggttttgtcgtcatgggcgctgcctacctcatttgtggtgtgataccagccctattcattaaagaaaaaatatacgacccacaaaagtcg

SEQ ID NO: 8857 - DNA, 813 bp, Acinetobacter baumannii
atgtcctttacccgatctcaaatttttcttgcctgtgctttggcttctagcctgttgttcagtgcttgttctaaagaaaacaaaccacaaaaagaagatgcgctcacagcgaccgcacctgctacaggggaagcttcaaccattattgaacgcaatgctaaacagcgtttaattgaaactttgcaaaaacaatttaagaatgcaaacatcaacgtcaaaattttagatattaagcctaccgaagtgcctaatttatattgggttaaccttgaaggaatgacgtcggtttatacaacaagtgatggtaaatacctgattcaaggtgatgtcatccgtttaggtgataaagaacttcataatatcggcgatagccttcaagcctcagaaaacaaaaagcatcttgctgctttaaaaaatgaagacttaattgtttatccagctaaaggcggtaaagctaaacatgtgatttatgtgtttaccgatgcaagctgtccttactgccataaattacatgagcatttagctgagattaatgagaaaggcattgaggttcgttacattgcatggccacgcggcgaacagtttatgccaactatggaagcggtttggtgtagtgcagaccgtaaagctgcatttgaccaagctgtacagggcattagtattccacctgctcaatgtaaaaaccctgttcgcgaacaataccaacttggtctaaacatgggcgtaaatggtacaccagctatttataatgttgatggtgagtacttgggtggctacttaacaccggatgaattgattaaacgattggataaa

SEQ ID NO: 8858 - DNA, 1017 bp, Acinetobacter baumannii
atgattggcgcgttgatgctggacatagccggcacagaacttactcaagaagatattgaactattacaagctccgcaagtcggtggcatgattttatttgcacgaaatattgaatcaccacaacaagtccgtgctttaaccgaccatatgcgccaagttcgcccagatattttgattgctgtcgaccaagaaggtggtcgcgttcaacgtctaaaatctggctttacattattgccagccatgggccgttttggcgagctctatatcactcaacctcaaaaagcacttgaattagctgaacagtgcggctggttaatggcaactgaagttttggctgtggggatcgattttagttttgcgccagttttagatctgaatgcaattagcgatgtaattggtgaccgtggcttctctaaaaatatcgaagatatcgctccacttgctggtgcatttatgcgcggtatgaaaaaagccggcatggcaaataccggtaagcacttccctggtcacggttcggtaaaagccgattcacatgtcgcagccgcaatcgatagccgtagctatgacgaaatttataaccatgacatgcaaagctttatcaagcttatgcctgagctagatgcgctcatgcctgcacatgtaatttacgatcaggttgacccaaatccggcaggtttctcacctttctggattcaagaagtccttcgtaatcgcttgaagtttaatggcgtacttttctccgatgacttaagcatgcaagctgcttgtgtcgctgggggtgcagatgcgcgtattcaagcggctctggcagcaggctgtgatatggggttagtgtgtaatgatcgtagtgcagcatgtacagcactcgatggtattacaaacttagagctaccaaatcaagagcgtttagaacgtatgcgtggtcgaattccacaaatccaagttggtgaaactttatcgcttggaaatgactggcaagctgtcaaaacagccattgaagagtttaagaattcactc

SEQ ID NO: 8859 - DNA, 267 bp, Acinetobacter baumannii
atgatagacacaactgttgatgtaattaataaactcggtttacatgcacgtgcatcaggaaaactgatagaggtcactacaaagtttcgttcgtcaattcaaattggtaagggcgatcatttagtagatgcaaagaatattatgtcgttactgatgttaggtgcaggtaaagggactactttacgtttagtcattgatggcactgacgaagaacaggcattaaatgaagtacaggcgttattcgccgcaaaattttatgaggcagat

SEQ ID NO: 8860 - DNA, 1485 bp, Acinetobacter baumannii
atgttatccactattcgagaacaatggttctccaatattcgcggggatgttcttgcgggtattgttgttgctttggctctaattcctgaagcaattgctttctccattattgcaggcgttgatcctaaagtggggctatatgcttcattctgtattgctgttgtgattgcttttgtgggcggtcgtcctggtatgatttctgctgcaactggtgctatggctttattaatggtcacactggttaaagagcatggtctgcaatatttattagcagccacaattttgacaggatttattcaaatcctagcaggctatctaaaattaggagccttgatgcgttttgtatcaaagtcagtcgttattggctttgtaaatgccttggctattctaatttttatggctcaattgcctgaacttaccaacgtcacttggcatgtttatgcgatgacaatcggtggtttagcggttatttatctatttccctatatcccagtgatagggaaacttttaccctctcccctcatctgtattgtcctacttacgctctttgccttattcatttgtttagatgtaagaactgtcggtgatatggggcaattgccggatacgcttccaattttcttgcttcctgatattcctttaaatcttgaaactttagctattattttaccctattcactaggtttggcagccgtgggtttacttgagtccatgatgaccgcaacaattgtcgacgatttaacagataccaccagtgataaaaaccgagaatgtaaagggcaaggtgttgccaatgtcgcttcaggcttcttaggcggaatggcaggctgtgccatgattggtcaatccattattaatgtgaaatctggtggacgtacccgtttatcatcatttagtgcaggggtctttctgttaattatggtggtgtttatcagtgactggcttaaagccattccaatggctgcactggttgctgtcatgattatggtatcaattggaacatttaactgggattctctacgcaatatccgccaatatcctctctctagcaatatcgtgatgatcgttacagtcgtcgtagttgttgccacacataacctggcttatggtgtattagtcggtgttcttctttctgcattattttttgccaataaaattgaacgctatatggcgattcaatctgtatttgatgaatcagaaagcacacgtacttatacggtaacaggtcaagtgttcttcagttcagcagataaatttacttctgcatttgatttcaaagaggcactttcaaaagtggtgattgatgtcagtcaggcacacttctgggatgtttctgcggttgctgccgtagataaagtggtcattaagtttagacgtgaaggaacagaagtcgaacttattggaatgaatgaagctagtaaaacattagtcgataagtttggtatccatgataagccagatgctttagatcgcttaaatagccac

SEQ ID NO: 8861 - DNA, 930 bp, Acinetobacter baumannii
atgaacgctactgtagaacagcttgcacctgtagaacagcaagcgaccgcgggttgggttgttgcagcactatatcaatttaaagaagttcaagatccagctgatcttcaacaacgtcttttagacttagtgaaaacaattaacctttgcggaactctgattgtagcaggtgaaggaattaatggtaccgttgctggggaccgtgaggcaattgatacgattcatcaatttttgttaaacgaaggctttaacgctatggaatataaagaatcccatagttctgacaaacctttccgtaaaatgaaaattaagcttaaaaaagaaatcgtgactttaggcgttgaagtaaaacctcgtgatttagtgggtcactatcttgatcctaaagaatggaatgagcttattgcacgtgatgatgtgattctaatcgacacacgtaatgactatgaatataaagccggaactttcaagggggcgattgacccaaaaacagaaactttccgcgaatttcctgaatatgtaaaaaaagagttagaacaacataaagataagaaaatcgcgatgttctgtacgggtggtattcgctgtgaaaaatcaacttctttgcttcttcaagaaggctttaaagaggtttaccaccttaaaggcggtattcttaaatatttagaagaaactcctcctgatgaaagcctttgggaaggtgaatgtttcgtatttgatggacgtactgctgtaactcatggtgttgaagaaggtgcaaacattaaatgtcatgcttgtggctggcctttaactcctgaagagtctgcgctaccaagctatgaacatggtgtttcttgcttgtattgtattgataaaactactgaaaaacaaaaagctggtttccgtatgcgccaatcacaaattgctgccgctaaacgtaaacgttta

SEQ ID NO: 8862 - DNA, 1212 bp, Acinetobacter baumannii
atggaacagccaatttctgtaactcgaagcaactttaatgactggatggttccagtatttgcaccggcaaatttcattccggtacgtggtgaaggttcacgtatctgggatcaagaaaataaagaatatatcgattttgcaggcgggattgcagtaaatgcattaggtcatgcgcatccagtggcagtcaatgcgttaacagaacaagcaaaaaaactttggcatgtcggtaacggttatacaaatgaacccgttctacgccttgcaaaacaactcactgaaaatacatttgcagacaaggttttcttctgtaactcaggtgcagaagcgaatgaagcagctttaaaacttgcgcgtaaagttggactcgacagcggtgttgcaggtaaaagtggcattgtggcatttaacaatgctttccacggccgtactttatttaccgtttcggcaggtggccaaccaaaatattcacaagactttgcaccacttccaaacggtattagccatgttgcttataatgatttagaagcggctaaagcagtcataaatgaacaaacttgtgcagtaattgtagagcctgtgcaaggtgagggtggggttattcctgctgatatcgaatttttaaaaggtttacgtgaactgtgtgatcagttcggtgccttacttatttttgatgaagtacaaactggtgtgggccgtacaggtgcactttatgcctacatgaactacggtgtgattccggatgtacttacgactgcaaaagcattgggcggtggtttcccggtcggtgcaatgttaacaactgataagtttgctccgcatttttctgtcggtacacatggtacaacttacggtggtaacccgttagcaagtgcagttgcaggtgcagtttttgagtttattaatacaccagaagtacttgaaggcgtgaaacaccgtcatcaatatttccttgatgcattaaatactttaaatgctgaatatcaagtatttgatgaaattcgtggtcaaggtttattgattggctgtgtactaaaagctgaatatgcaggtaaagcgaaagatattaccacatgggcaggcgaagaaggattactcgctttaatcgcaggacctaacgtggttcgtttcactccttctctaattattcctgaacaagatattgatgaagggattgctcgtttaaaaagagctttggcaaagttggctaaa

SEQ ID NO: 8863 - DNA, 804 bp, Acinetobacter baumannii
atggataaattgcttaaaattatgcaagagctacgtgaaaaatgtccgtgggaccaagagcaaactccaatgtcactgactaaatatgcgattgaagaggcatatgaagtcgaggctgccattcgtcaaggtgacattaatgaaattcggaatgaattgggtgatctgttattacaagtggtatttcaatcgcaaatgtttagcgagcagggggcgttcaattttcaagatgtggttgaggcaattagcgaaaaattagtacgacgccatccgcacgtttttcaagcagaccaatttaacaacttaacaccagaacaagtaagtgagttatgggaacaaattaaacaacaagaaaagcaaggaaaaccacaatcaagattagatgaaattaaacatggaccagcactatctcaggcgcaggaaattcaaaaaaatgttgcaaaagttgggtttgattttgaaacggtagaagatgcttatacaaaattagaagaagaattagatgagtttaaacaggcacttaaaaatcaaaatagtaatgaaattcaagatgaatttggagactgcctgttttcattagtcaatgtaggacgtaaacttggcatttcaagtgaaagttcacttttatcaaccatacataaatttagaagtcgttttgcttttattgaagagcaagccataaaacagcaaagaacattggaagacatgaccttgtccgaaatggatgaattgtggaatcaggcaaaacgacaattaaaatcaggggaaaaaccacatgcaatacagcatgagattttggaaaaa

SEQ ID NO: 8864 - DNA, 1569 bp, Acinetobacter baumannii
atgacaagtcagtttaaaaaacagttatctctaatggatcttacattcattggcttaggcgccattttcggttcaggatggttattttcagcaagtcatgtggcctctcaagccggccctgcgggtatattgtcatggattattgggggctttgccgttttaattctgggaattatttattgtgagttaggcgcagccttaccccgagcaggcggtattatccgttatcccgtattttcacatggcccattacaaggatatttattgggttctgtgaccgtcattgccttttcaagtttaattgcaattgaagtcgtcgctgcccgcgaatatgcagcagcatggttcccttctcttaccgccgtacatgatggtgttcgaactccaactaccattggatggttgtttcagtttgcacttttatgcgtattttttgcattgaactattacagcgtaaaaacctttgcaattgccaacaacctgattagtgcattgaaatttgctgttccggttttagtgatggttgctcttctataccattttaaacctgcaaacttttcaatgaccgagtttgctccaatgggcgctcacggcgtacaaggtgccgtatctgctggcggtattatttttgcgtatttgggtttaacgccgattatttcggtagccagtgaagtaaaacgtcctcaatttacgattccttttgcactcatcttatctgtcgttttggcaacgattatttatgtagtgcttcaagttgctttcttaggtgcagtacctaccgatatgttagcaaatggttggtcaggacttagtgacaagttcccattaccttaccgcgacattgccatgttattaggtttgggatggttagcacttttagttgtttcagatgccattatttctccgtctggttgcggcaacatctatatggctgcaactccacgtgtcatttatgcatggtcaaacagtaatacattcttccgtatttttacgcgtgtagatccaaaatctggcattccacgttatgcgttatggttaacgtttgcactttctgtattttggaccatgccgtttccatcttgggataaattaatttccgtagtttcagcagcattagttttaagttatgccctagctcctgtcacagtgggtgctttacgccgtaatgctcctgagcttgaacgtccattctatgtaaaaggatttactgttctcgggcctctcgcttttgtgattgcatcttttattgtgtattggtctggctggaatgtcatttcatggttattaggcgcacaaatcgtcttgtttgcactctacgtcatttttaagcgctacgtgccaacccaagaagtcagccttgcccaacagttaaagtcatcaacatggctccttgtttactacattttaatgattcttgcctcttaccttggcagcttcggtgatggcgcatcacacctattggcagcgcctttcgacaccttattcgtcatggtgatttctcttggttgctactactggggtatacgctcaggtttaccaaaagcactgattaaaaatgacgatgaagct

SEQ ID NO: 8865 - DNA, 813 bp, Acinetobacter baumannii
atgaatattgctcaagcgcttgcaattcgtggtgagcctgacagttatgaacgacaggaaaatgcttggttacttgagcattttctaaaaatcaattcactcgaattaaagttcagacttgagcaagagttaacagtccaacaagagcaagactacttggctggtcttgaacgtatccaaaatggtgaacctttagcctatgtgacaggttcgcagccattttggacgctcgatttaaaagtaacgtcagatactttagtgccacgaccagatacggaagttttggtcgaaactgttttaaatctaaatttgccaaagaatgcaaatatcgtggatttgggaacgggaacaggtgcaattgcgcttgcattagcgagtgaacgtccagactggttcgtcacagcaactgatatttacgcacctactttagacgttgcaaaagaaaatgcacaaacacatggcttgcatcatgtgaaatttgcttgtggcgcttggtttgaagcactagaaccccaacaatttgatttaattgtttctaatccgccttacattgaccctgaagatgaacacatgcaagctttggcaacagagccgcgtcgtgcgttggttgcagaccatcatgggttagccgatattgaaattattattgctcaaggcaagaactggttaaaaccgcaaggctggattgcactagagcatggttacgatcagggacaagctgtgcgaaatgtatttgctgagcatggttttagtgagataaaaactattcaagactatggccaaaatgatcgagtcactttggcatgttggatt

SEQ ID NO: 8866 - DNA, 3318 bp, Acinetobacter baumannii
aaggcccctaaagtcatcgcaggcgcaggcggtggcggtggtggcaaagggggcagtgaatcagacgacgatcttgaatcgaaatcgttcctgtctttgattgatttgctcggtgaggggcaaattggtggcttggtagatgacagccctaagtcaatcttccttaacgatacgcctttggtgaacgcggcaggggagtacaacttccaaaacgtaacttgggccatgcttaaaggaacccaagaccagccatctttaggtgaaggtttcgacactgttgagtcttctacttcggttgggcagcttattacccgcgattctcctgcaactttctcaattacagacccaaatgcagatagagcgcgtgtaattatctctacaccatctttgatcagtacaaccagtcgtggcgacattgttggctcatcagtcgagtacaaattctctatctcgctgaataacagtcattttgttgagatcggcaaaggcaaaatcacaggtaagacacgctcgcgttatcagcgtcaatacgagtatgcgcttccaaaacaaacggaagacggcacacgcgtaacaatgtggacgatcaagattgagcgcgtaagtcctgagagtaatgaatcatcaacttcaaacgatatttaccttgatagttattcggtaattatcggttcgcgtttgtcttatccaaactcagccgtttttggattgagtatttcgtcagaacaatttcaaagcattccaacccgttcttacttagttgacggtttactcattcgcgttccgtctaactatgactacaaaacgcgtaaatacgaaggtacttggaacggcactttcaaactcgctccaagcgataaccctgcatggattctttacgacgttattaccaacgagcgttatggcttaggtcaatttgttgaccctgcatatgcaaaccctgctcgcttatatgtgattggtcaatattgtgacgaaatggtcgatgatggttttggcggaaaggaaccacgtttcacattaaataccgtaatcaatagcatttcagatgcttatcaattaattagcgacatcacttccgtattcaacggcatggcctactggtctggctctcaatttggctacatgtgcgacatgccaactcagccgaccatgctttacaacgcctcaaacgttgttaatggtgagtttgtttattcgggcgcgtctcgaaaagacatgcattcagttgctttgattacttggaacgaccctgaacgcaactatcaacgcgccgttgaatatgttgaagaccctgaactcattcaacgttacggcgtgcgtaaagctgaaattacatcattcggctgtacatcacgcggtcaggcgcatcgtatcggtaaatggttgctttatacagagcgtaaccagtcacgcaccatttccttcaaagttggtgttgattcttcctttgtgcttccgggtgacgttgtacagattgcagaccctaatcgctcaggcaaacgaatgggcggtcgtttaattggcgcaactgcaacttcagcaactctcgattctgaaattattctcaacgaaaactcatcaatcatgttgcgcttggcgagtggtgattttgtcgaacgtaacatcaagaccattggcactgacttagcaacaggcaactcggttatcaactgggatactgcgctttctacattgccaacggataacgccgtttggattgttaagtctccagagttagagcctcaacttgcgcgtgtagttgccattggtgacagcgaggatgctccgggaacttacacgatcactacaatcgctcacaacccaagcaaattcgacttcatcgaaagcaacattcagcttgatagtccgaatgtgacaatcatttcgccgtcactcattgaggcgacaaagaatgttgaaatcattgaagaagcacgtatcgaacagggtattacggttcgaaacatgtcgatcaattgggagcaagtgccgaacgctgtttcttacgaagttaagtataagaaaaccgaaggtaactggttcacacttccaattacaaaaggattaagcgtagagattgagaatgtctacgagggtgaatatgtggctcaagtagtagctatttcgtccactggcagccgttcaccagcaacctactctattcctacaaaagttaatggccaagcttcggtattgccaaaactaggcttatttaaagctacgcctgcaatgtttgccattgaccttgcatgggaatacgcgccgggcaccaaaggcgttgatcacgtagagattcaaatgagcctagacaactcattagaagctaactttgctctactaggcacatatccagacccaatgaaagcccaccaagtgacaggtttaaacctgagtgatacgcgttggttccgcgctcgcttagtggacaaattcggaatctctggcgaatggtctgatgttgtatcggctgcaccagatattgacccggataaagtacttgaagttatttctgggcatattgacgaaagcgttttagatactgccttacaggaaaaaattgatacctctgagcaaactgccaatgccgcaaaagatgcagcgtcagcagctcaaggcgcagcgtcggcagcgcaaaacgtagccaatgccgcaaaagatgcagcggctaccgctaagaacacggcaaatttagcgcaaaacgtagccaaagaggctcaaagcactgccgcgaccgctcaaaaccaagcaaatgccgctaagaccgccgcagatcaagccgttgccgcatcaaaccaagccaaagacacagcagataaggccacttcagctgcaactactgcgcaaacgatggcgaacagcgcttctacagcggcagcgaaagccaatacagccgcaacgaacgcacaaacaaccgcgaataatgcagcgtccgcagcgtcaaaagttgccagcgatttaacaacctcaacaaatcagttgaaccaaaaaatcgccgatgaagcagatgcacgcacagtggcaatttctaatctgaaagacggtctcacgacagaaacaactcaacgcaagtcagaagacgctgcgttgttaagcaacattgagacgttcaaatcaagcactaaaggctcgttatctagcttgcaagagcagatcacaacgaacgccacgaatacagatgccaatgctcagaaaatcacgtcgcttgattcccgtttgaccacaaacgagggcaaaaccgccgaagcgattaattctgctgctacagctcaacaaaccgcaagtacagcggtagacaaggctaacgctgccgcaaac

SEQ ID NO: 8867 - DNA, 927 bp, Acinetobacter baumannii
atgcttgaatttatgaaaaccttgaaaattgctacacgacaaagcccacttgctctttggcaggcagaacatattcgtgcccgtttacaggagcttcacccagatttaacggtggagttggttaagtttgtcacgcagggcgataaaattttagatacacctttagcaaaaattggtggcaaagggttgttcgttaaagaattggaagcagcacttttagatggtcgtgcggaccttgctgtacattcaatgaaagatgttccaatggcattaccagaaggtttaactttggccgtaatttgcgaacgtgaagatccgttagatgcttttgtttcgaatcaatttgaaaaatttgctgatttgccgcaaggagcaaaagttggcacctcaagtttacgtcgtaaatcacaaattttaaaacaacgtccagatctacaaattattgatttacgtggtaatgtcggtacccgcttagcgaagctagacgatggtcaatatgatgctattatcttggcgagtgctggtttaaaacgtttaggattggcagaacgcattcgccactgtatcgagccaagtgtaagtttgcctgcggttggtcagggcgctcttggtttggaatgccgcgcagatgaccaagaagtgttgactttaattcagccacttctacacccagagacagatgtatgtgtacgtgctgagcgagcattcaatgcgtatcttgaaggtggttgtcaggtgccgattgcaggttatgcaacactccaagatggaaaaattcatattgaaggccgtgtagggagtgttgatgggcaaacattattacgggctgagcttacagatgaagcgaataatgctcagcaattaggtgaaaaccttgctcggaacttacttgatcaaggcgctggtgatttattaaaggccctctac

SEQ ID NO: 8868 - DNA, 837 bp, Acinetobacter baumannii
atggaccatgaactagaagaagagaaagtcgatcaaaccctaagctggcgtgaaaaaatggcagttgaagaacacgagaaactgtcgccccgtttagtatatgaaattattcgccgtgatggtgccgaagagttagatcgcccaacagccgcactcatcttttcaggcattgcagcaggtctagtcatcagtttttcatttgtatttaaagcgattattgcttcttatatcccaactgatgccatctggaccgatttaattaccaatttcggttataccattggattcctgatcgctattttaggacacatgcagctctttaccgaaaatactattactacagttgtgcccctatttaagccctttaccttagacaaattacgagctgtaggccgtctatggggaatcgtgattctatgcaatatcattggaacaggtttggcgagtttattcttcctgaccaccgacttgtttactccaaacattgacaaagccctagatgagctcgcacatcatgttgcgtctttttccgccatccaaaacttgcttaaaggggttatgtctggacttttaattgctgcattggtctggatgctaccttccgtcagcaataaattcctagtcatctttttcatgacttatctaataggactaggcgactttacccatgtggtcgttggctctaccgaaatgtcctatctggtctggcaaggagaagcttctcttggtgaatatatgtttaatttcctgattccaaccaccattggcaatattattggtggtacaggcgtgtttaccctgctgatttatggtcaagtgactgaagaattggaacaa

SEQ ID NO: 8869 - DNA, 2304 bp, Acinetobacter baumannii
atggtcacagtacgtgaacagttacctgaacaactaactgagttgtcagaggaaacgactgtagagcatgccgccgaaacacaagtcggtttagcctcatggttggatcgggttcgtgaaatattagatggggcagagcttaaacaactcgaagaggttgcgcatttaaccctacaaaaagagttagattcaacggttaatcatcgttccaatacatttgctactggtgttggaatggctgatattctggcgcatttacatgtagatgaagatactttatctgctgcaatgctttatcgtagtgttcgtgaggacattactgatatagaagaagtaaagcgaaagtttggtgagcaagtttataaccttgtcaaaggtactttggcaatgggtaagctttcagagcttattgaaaaaaataaacgactagaagaccattttaataacaaccaacgggaacatttaagcggcatttataaaatgctgatttcagtgaccgaagatgttcgtgtcgttttaattaagttagctgaacgtacttactctttacgtgagttggcaaactcatctcgtgaacgtcaagagcgtgtggcacgtgaaattttaactatttattcgccattagcgcatcgccttggtattgcacagctgaagtgggaacttgaagacttagcgtttcgttatttggcgccagaccgttataaagagattgcttcattactcaatgaaaaacgtcttgagcgtgaacattatatccagttcgtgatagaccgtttaaaaagtgaattggcggcgcatggtattgaagctgaaattacaggtcgagcaaaacacatttattcgatttatcgaaagatgaaaagcaaaaacctaagtttcgatcagctttatgatattcgtgctttacgtgtattggtgaatagcgtacctgagtgttatcactcattaggtattgttcatcagatttggcgtcatatcccacatcagttcgatgactatattactaacccgaaagccaatggttatcgctcattacatactgctgttattgctgagaataaatccttagaggtacaaatccgtactcatgagatgcatgacgaagcagagttaggggtatgttcgcactttaactataaagaaggttcaaagaataccgaccactcttttaaccatcgtttgcattcgcttcgtgctgttttggaacattaccaagaacgtaatgaaacaacagtacatcaaaatgaagatgagacggaaggttttgatcagcttcaagactttgaaggttttgaaaagatttatgtctttagtcgtgatggtgatattaaagaactaccacgtggctcaacagttttagactttgcttatcatgtgcatacagaggtaggaaacaagtgttatgcagcacgtgttaaccagcgctatgtaccattaacctatacgttaaaaacaggtgagcaggttgagattttaaccaagaaggatcgtgagcctaaccgtgactggttggtgaactctttaggttatatcaagacagctcgtgcccgtgacaaattacgtcattggttcagacagcaagaccgtagtaagaaccttgaagttggccgtgagttactaaacaaagaattgtctcgattggcgattcaccctaagagtatcgatctcaacgattactcgtcacattttaatgtgaaaacaggggatgatattttggttagtctggtcagcggcgatattagtttgcatgctctgattaatcagattaatcgtcaaatgcatctggatcaggatgaacctgaactggtacttaaaccaacattaaacccacgtgctagtcatactctgtctgcgcatggcatcttaattgatggtttagacaatgttgagctacatattgcgcagtgttgccaaccagttcatggtgaatcaattgccggttatatcacgttgaaccgtggggtaagtattcataaagtcttatgttctgattatcaacgtatgatcaagcaagagccagaacgtgctgttgaagccgattgggaaatgcagccaactcgtggtcaaagtgttcaaattgtagttgaggcttatgatcgtcgtggcttactcaaagacttaactcaagtgattttttctgaccagattaatatccgtcaggtgaacacaatttctgaggcagatggtattgctaatatgaagttgctcattgaggtgaaaggcttggctcagctttcacgtttgttagctcgtttagagcaacaaccggggattattagcgcacgacgcatgattcaaggtgtt

SEQ ID NO: 8870 - DNA, 1329 bp, Acinetobacter baumannii
atgaatactgaaccaaaaccaatttatggcgacggtaatccggaaactcatccactgacttggcgtttaagcaaacaagaatcagtacgtagtgctgacgattacgaagcacttgaaggttatgccggctttaaaaaagcattaggtatgaaacctgctgaagttcttgaagtcattaaagctgcaactgtaaaaggtcgtggtggtgcaggcttccctgcagggatcaaatggtctcttatggcgccaaatgatggcggtccacgttacttgatctgtaacgccgatgagatggaaccaggtacctttaaagaccgtttgttgatggaaaaacttcctcaccaattgatcgaaggtatgttgattgcaggttataccctagaagcaactcagggttatatctttattcgtggtgaatatattgaggctgcacaatacctaaatgaagcgcttgagcaaatccgcgctaaaggttacttaggtgacaatattttaggttctggctggaacttcgagttacacgtgcacactggtgcaggtcgttatatttgtggtgaagaaactgcattgattaactcacttgaaggtcgccgtgctaacccacgtactaaaccaccattcccgcaagttgctggtgcatgggggcgtccaacgattgtgaacaacgttgagacttataacaacttgccagcaatcatgcttcgtggtccagaatggtatatcggtttatcagcaggtaaatcaaaagatccgggcacaaagatttatggtgcttcaggtaaagtaaaattccctggtctttgggaactaccatttggtacgactgcacgtgaagtaatcgaagaacatgctggtggtatgcgtgatggcttgaagcttaaagcatggttaccaggcggtgcgtctactgactttttaccggcggataccattgatttaccaatggatgctgaaaccattatgaaagcaggttctcgtttaggaacatgtttattaatggtggtagacgagacccaatgtatggtgtcgttgacccgtaatctggaagaattctttgcgcgtgaatcatgtggctggtgtacaccttgccgtgatggtttgccatgggctgttaaagcgcttaaagcacttgagacaggtgaaggtaagaaagaagatatcgaccacttacaagaacttactcgtaaattgtggattggtaaaactttctgtgctcacgcaccaggtgcgatggagccgcttatgggcgcactcaaacatttccgtagcgagtttgaagcgaaagtgactgatcgtcctgtcgtgcaaactagcaacgtagaacaagct

SEQ ID NO: 8871 - DNA, 1875 bp, Acinetobacter baumannii
atgcaaaatacggccaaaaaagcgaccttgcctgccacggctttggcagctcttggagtggtctttggagacatcggaacaagtccgctctatgccttgaaagagtccttccatgcagcgcatgggttgggaattcagcctgaaaacgtattaggaattttatccattattttttggtgcttaatgctgattattagcatcaagtatgtcgcaatcgtgatgcgtgcagacaacaatggcgaaggcggtatcatggccttactcgcgttgaatttgcgtaaagcgaaaattgccgacaacaaaaaaatctacatgattgcgataggctttataggggcatcactgttctttggtgacggcattattaccccagccatttcggtattgtctgcggtcgaggggttgtctattgcaaccgatgtgtttgacccgttcattatgcctattgcaattgccattatcgtcacgctgtttttggtgcaaaagcacggtacggcgtttgtaggtaagttttttggtccaattacgcttgtgtggttcttatctttaggaatcttgggtattcacagtgtcatccaaacccctgtggtactaggcatgtttagtccgcattgggcgatccagtttatctatcaccatccgatcatgacattttttgtgatgggtgctgtggtgttaacagtgactggtggtgaagcgctatatgccgatatgggacatttcggaccagttccgattcgtctggcatggttctttgtggtattgccatgcttggttttaaactacgcaggacagggcgcattattactcagagacccagcggcaattgaaaacccgttctatttactggtgccgcagtgggccttgtacccaatgattattatggcaaccatggcaactgtcattgcctctcaagctgtaatttctggggtgttttctcttgcgcgccaagcgattcaattgggttatttaccacgtttaagtattaaacatacgtctgagtccgaagaaggtcagatttatgtacctttcttaaactggttacttttaatcgcaattattatcttaattttaatcttcaaaaccagctcgaatttggcaagtgcatacggtttggccgtaactttgaccatgctctgtgacacgattttggttgccgtgtttatctactcggcgtggaagtggagtttgccaaaagtgcttctcctgattattccgttctttattttagagtcggtattggtcggtgcaacttcacttaaaatcttgtcgggcggttgggtgccattattgattggtgcgattgcggtgactattttaatgacatggaaacgtggccgtgagcttacttttgctaagcttgaacacgatactttgtcactcgatttgtttgtaaaaagtattggtaatagtgtgcactgggtgccgggcgatgctgtatttatgacgggtacgccaaatgttgtgccacatgccatgctgcataatattaagcacaataaggtactgcatcagcgtaatatcttggtcactgtagtgattgaagatgtaccgtttgttgcacctgaagagcgtattacgacagaaaccttagccgaacatttcttccgtattaaaattttctacggctttaaagatgaaatgaatgtgccgaaagcattaatgcaagcctatgaacaattaggccttgaatatgacttgatgcatatcagcttctttatttcgcgtgatcgtattgttcattctgtgggagacggcatgtcgccatggagagaaaagctgtttatttcaatgcagcgtaataccagtccggtcagtgatttctatcaaattccaactaaccgtgtggttgagttaggtagccaaatcgaaata

SEQ ID NO: 8872 - DNA, 2394 bp, Acinetobacter baumannii
atgaagtttgaacgtggtatcggtttcttcgcgctaattttttccattttggtgattggtgcttttattgctcttagtatctatctgattcgtttagataatattatacgtgaaaaatttgaaggacaacgctgggacattccggccaaggtgtttgctcgacctttggaaatttataataatgcgccaattactcaagcaaatttcacccaagaattaaaattactaggttacaaaacttcaagtaattatgacaagtctggaacctatgttgctcaaggcagcaacatgtatgtccatacacgtggtttcgactatggcgacagcgtagagtctgaacaggttttagaactgagttttgcaaacgaccaagttgtagaagttcgcagtacaaaaccttcctcaactggagttgcccgtttagaacctttattaattgggggcatttatcctcaacataatgaagaccgcgttttgattaagcttaatagtgttcctaaaccacttattgaagctttaatttctacagaagaccgtaacttttatcatcaccacggtatttcgattcgtggtacagcacgtgctttggtaagtaatgtaactggaggacgtcgccaaggtggttcgaccctcacccaacagttagtcaaaaacttctatctaacccctgaacgcacacttaaacgtaaagttaatgaagcattaatggctttacttattgagttgcattacagcaaagatgaaattttagaagcatatttaaatgaagtgaatttaggtcaaaacggtaactattcaatcaatggttatggattggcctctcagttttatttcggtttaccactacgtgagcttaatgttgcacaacaagcttatttagtcggtttggttcaaggtccatctttatataatccttggaaaaaccccgaaggggcaaaaaatcgtcgcgatacagtattaaataacatgcgtgtcatggggtatttaactcaagcagagtatgaaactgaaattgcgcgtcctttaaatgttctaagcaaaccaagcctaggtccagcaaaattccctgactttttagatattgtgcgtcgtcaattacgtaccgaatatcaggaaagtgatttaaccaatcaaggattacgtatttttacgaccttggacccaattgctcaaacacaagttcaaaatgcctttaaagcttctgtagagcgcttagctaatagcaaccctgctcgcttgaaaaacctgcaaggggctgtactgattgcccatcctgaaaatggcgaattaattgcagctgtcgggtcaacgcaagactttaccggctttaaccgtgccttagatgcaaaacgccaagtcggttctttattgaaacctgtcatttatttgagcgcaattgaatctggacgttataactgggcaagccagattgaagacgctccaattagtgttccagtagacggcggtaaaagttggacaccgaagaactatagcggcggtggtcatggaattgtgagtttaagtgaagccttagcaaattcttataacctttctgctgtgcgcttaggtcaagagttcgggttatctacatttaccaacaatttaagaaaatttggtgttgaatcgacaatcccggcctacccttctattttccttggtgcagtcaatatgtcaccaatggaagtactgggtatttatgaaaactttgctacaggcggtttcaaatatccgactcgtgcgattcgttctgttgtagatgcaaatggacgtttacttgatcgttatggtctaaacgtacaacaaaccattgatccatctgtcggttatatcatgaactatggtttacaacaggtcatgtcatcaggtacaggacgtgcagcctataacagcttatctccagctttaaaattagcgggtaaatcaggtacgactaacgatacacgtgactcatggtttgccggctattcaggtaatcatgttgcagtagtatggttaggtttagatgacaataaagtaactggtttaacaggttcatctggtgcattaccagtatggattaatgtgatgaaacaattacgccagacaccagtaaacttacgtcaaccagactctgtacagtggcaatggattgaccgtgcatcgggtgacttatcagcacaagcttgtgatggtgccatgtatattccaatgctagcgcatacagtcccacatcgtgctacgccatgtggagcaccgtattatcaagttgatccaacatatacgccacaaagtgataacacaattcctgagcctcaggatgataataccgacagttatattcgtgaaagtgaaaaccagatggaacaagatctgtcgaataacacacgaatcatttcaagtggtagttataacaac

SEQ ID NO: 8873 - DNA, 1407 bp, Acinetobacter baumannii
atggaaaaacagcaaggaatttttgaaagatttgctcttcggattagtgactggtctgaaaaatggtttcctgattcatatatttttgctctgcttggcgtcattattgtctctgttgccgccttgggtattggtgctccaatccatgatgtagcgacctcatttggtaatggcttctggagtcttattccctttaccctgcaaatgactatgctcattattgtaggttatgtcgtttctgtatctaagcccgtaaaattcctgatccaaaaaatggcgcgtattccaagttctggacgtggtgctattgttttggtggcaaccgttagtttattaatttcactagtcaattgggcaataagtacgattcttactgcacttttagtgattgcattagcaaaacgtaaagagctgaatatggattatcgtgctgctgcggcagctgcaatcattggtatgggagcaacttgggctcttggaattagttcatcagcagcacagcttcaggcaaataaaaccagtttacctgagtcaatttataacctaactggtgttattccatttaccgaaacgattttcctttggcaatcaattgcaatgaccattattttagtgattgtttcaatcgctattgcatattggtctgccccaaaaggcaatagcgttaaaaccattgatagttttgatgtgcaatttgaagaagaaaaaacaaatgaagcaaaatctactcgtccaggtgactggttagaaaattcgcctatcttaacgattattgtggtgattttaggcttaatctggatgttttttgaattttcaaaaagcaatcccatcattgccatttcaagtctcaacacctacaacttcgtgtttttaatgcttgggttagctttacatggcacaccacggaactttttaaatgctgttgcaaaagcagttccggcagtatcgggcatcttaattcaatttccactgtacggaagtatcgcctttattatgacccaagctttaaatagccaagacttatcgctgtcacattatattgccgaatttttcgtttcaatcgcttcaaaagaaacctttgcaattgtgatgggaatttactctgctgtacttggattttttgtaccttcaggtggtggaaaatggattattgaagccccatatgttatgcaagcagcaaatgatttaaaggttcatttaggctggtctgtacaaatttataatgcagccgaagctttaccaaacttaatcaatccattctttatgcttccaatgttaggcattttaaaactaaaagcaaaagatgtgattggttttacagtgacacagctcgttgtgcattttcctttagttttattcttgctgtggttctttggtagaacgctcagctatacccctccaactttt

SEQ ID NO: 8874 - DNA, 1500 bp, Acinetobacter baumannii
atgggtaattttttcttattacaagcatttacggttgtatttgccttatcaattgcgaccaccatatttaataagcgtattttgggctttcctcaggctatcggcgtacctcttgtttctgcgatttttgtcttcattttgcaatggggagccagtcttttaaatggtaatcaattcattactatcaatattcataatattgaggaagcagtacggcacatcgatttctatgattttttaattaatggtgttatttgctttattctgacgtcttcagcacttaaatttaaaatttcagatctaagaagctattggaaacagattagtatcttagccactattgccttggtaatctgcgctgtattgtttggtagcttactttacggtttccaattgttagttggacatcatgtaccaattttggttcttctattattaggtgcagcattgggtgcaacagacccgatcggtattaaaggtgttttaagttcaattcgtgctcctcatcatctcattgttaaattagaaggagaatctttatttaacgatgcgatgtgtattgccttatttatgacattactgaatgttttacagggtgaacatttttcattggttgcgacattagaagctttgctttatgaaattgtggtagctgttggtattgggtgggcatttgggataggtaccttacgcttattgcgtggtaaacacgaaatggaatccctgattttaacaactgcattacttgcaagtggagcatatttggtggctctatttgcccatgcatctgcaccgattgcctgcgtcattggtggtttaatcgtcggtaataaatggaaagaaattcgtgaagagcgtgagatcagagaggttaaccatttttggcatacggtagaaggaattatcaattcattcttatttactttaattggccttgagttatttattcttgacttaaactttagcctgattttaggtggaatagttgctttctttattctgcatatttctcgttttgcagcaaactttatgtcttttgctttcttcccaacaatgcgtaagaccaaaagttacaatggtagtttaactattttatcttgggggggtgttcgaggagggatttcactcgctttaattttggcggtcgcgaatattccggcgctgagtccttatagtagtattctgattggatatacctttattagtgtattgttatctggtgtagtatgtggacttggccttcctgcggtaatgaatgcgttttattacaatcctaatgaagaaacggaagggcttaaaggcttttatcaaaagctatgccataaaatgaatcgccgtggctttcaatatatagttggagaagatgcattaggaagagaaacaattactatctttaacccagatgttattgttgatcaaaaaacagaagacgggattgcaaccatgcatgatccaaataagttacaagaagtaaaacgtttcgaaagtccagataatttc

SEQ ID NO: 8875 - DNA, 534 bp, Acinetobacter baumannii
gtgcgacgtttagtttcccatctctcacttggttttctcattattctattggcagcctgtgccagtgcgcctaaaaaacctgccccgctttcaccagcccaagttagcaaactcaagagtatgcagcttccaagtcggcttcctgttccggtaaaaggtgtcgatcgagatgagctaaaagacacatggggagctgctcggagtcagggccgtagccacgaaggaattgatattttggctccacgtggaaccaaagtgtacagtgcaactgaagggctcattgccgatcttcgtaataataacctcggtggcaaagtcatctggattttaggcccagcaggaacatggcattattatgctcatcttgatggacataaacgtggcttaaacgtaggtgactatgtcaaaaaaggtgatttaattggctatgtcggcaacacgggcaatgcacgttatacttcacctcatcttcattatggtctttacttagatggtaaaggtcgtggtgctgttaatccttattcatatttacgc

SEQ ID NO: 8876 - DNA, 1287 bp, Acinetobacter baumannii
atgagccaaatcgttgacattcgtgcacgtgaaattttggactctcgtggtaacccaaccatcgaagcagacgtcatcttagaatctggggtggttggtcgtgcatgtgcaccatctggtgcttcaactggttctcgtgaagctttagaacttcgtgacggcgacaaatctcgttacttaggtaaaggcgttcgtactgctgttcagaatgtaaatagctcaattcatgaattgcttgttggtcaaagtgtttttgaacaaaaagcgcttgatgaaaaaatgattgcttttgatggcactgaaaacaaatctaaattaggtgctaatgcaactttggcggtatctttagcagcagctcacgcagcagctgctgaacaaaaacttccattgttccaatacattgctaacttacgtggtcaaactactttgactatgcctgtaccaatgatgaacattttgaacggtggtgctcacgcagataacactgttgatattcaagagttcatgattgagccagttggtttcacttccttcgctgaagcattacgtgctggtgcagaagtattccattctttgaaatcagttcttaagaaacagggtttgaacacagctgtaggtgatgaaggtggttttgcgcctaaccttcgttcaaatgaagaagcgattacagtaattcttcaagcaattgagcaaactggttataaagctggttcagatattatgcttgcacttgactgtgcatcttcagaattctacaagaatggtcaatatattcttgaaggtgaaggcaacaagtcttttacaagcaatcaatttgctgattacttagctggtcttgttaagcagtatccaattatctctattgaagatggtttggatgagtctgactgggaaggctggagttacttaacttcaattcttggtgataaaatccaattagttggtgacgatttattcgtaactaatcctaagattttacaacgtggtattgatgaaaaagttggtaactcaattttgatcaaatataaccagattggtacattgactgaaactttagatgcaatctaccttgctaaagcaaatggttacaccactgttatttctcaccgttctggtgaaacagaagattcaactattgctgatttagcagtaggtacagcagcaggtcaaattaagactggttcactttgccgttctgaccgtgtttctaaatataaccaattgcttcgtattgaagagttaactaaagctgtttaccgcggtaaagctgaattcaaaggtttaaac

SEQ ID NO: 8877 - DNA, 660 bp, Acinetobacter baumannii
atgaatcttaaaattgagaacccgcccgtaactttacgagagctgtgtttagataaagtgcgtaatgccattattacgggctatttcccttcaggaaaaagattggttgaaagaacgttatgtgaagaacttggcgtaagccgttctgtagttcgcgaagtgattcgttatttggaagcagaaggtttagtcgagattctgccaaataaaggccctattgtttcgctacttaactgggacatcgcttcacaaatttatgaaattcgtcttttgttagagcaaagtgctgtggttgactgcactaaaaatctagatgaaaaaactgctgaaaaattaaaacttctattagaagatcttaaagctgcgtttgccgccgatgacatcaatctcattattgcgacctctactcggctttatgaaactatttttactactgccaatcaccatattgcttgggaagtggttcaacgtttaaacggtcgaattagccgtcttcgtgccatgaccatgaaatcgacaaagcgtgaaatttcaggttatcaacgtattaaaaatatgtgtgaggccatttatcttcacaaagaccctgaaaaggcaaaacaagctgttgctgaacatattgctgaagctgctgctgtcgcaaaaaatattttagatgcg

SEQ ID NO: 8878 - DNA, 621 bp, Acinetobacter baumannii
atgaatagcgtattaacaatggcagtaaatgattcaccaataacatctgtaaaaacaacacaacctcttattgcattatattgtggctcacgagcaggaaataacccgatttatcgcgaaaaggcaattgaattagccagcggaattgctgaacaaggttttggtttggtgtacggcggtgccagtattggtttaatgggacaagtcgcagaaagcgtacttgcacatggtggagaagctgtaggggtcattcctgaatttatgcttgattatgaagtggcgcatgcaggactgaccgaactccatgtggtagaaaccatgcatgagcgtaaagccatgatggcagagcgcgcgagtgcttttatcgcgctacctggcggtttaggaacattcgaagaaattttggaaattgcgacttggggtcaactcaaccagcaccaaaaacccatgattttatataacgtaaatggtttttataatgcgttaattgctcagttagaccatgctgtacaagaaggcttccttcctcttcagcatcgagctaaattaattgtatgtgaagaaatcgaccaaatttataacgtcattaaaaacttaaaaatgccaaagagatttgttgtt

SEQ ID NO: 8879 - DNA, 573 bp, Acinetobacter baumannii
atgacggattcagcaatacaaataattcaccaaaatattcatcagcgtcagtctattggtcaattagttgagccagccccaaatacagatcagttagagttggcttttcaggcagctttaacagctccagatcatcatagacttaagccaacgcgttttgtaattgtgtcaggtgaccaacgtgctgcttttggtgaagttctggcaaaagcattggtcgatttgggtgagtctgatcctgcacagcttgaacgagtgaagcaacatccttttcgagctccgctacttattttagctcttacgcaattacaagatcatccgaaagttccacacttcgaacaaattttgagtacaggcgcagcagtacaaaatcttttgttatctttacaagctcaagggttcgcgaccatgtggcgtagtggtgccgttgtcgaatcaaactggttaaaacagcatttaggtctgcaaccgcatgatttgatttcaggtattatttatgtcggcacagcagctaaagcaattgcaccgcgtgcagatattgatagtaaagaattcgtaaaagtttggcaggct

SEQ ID NO: 8880 - DNA, 471 bp, Acinetobacter baumannii
atgcgccttacaactcgcggtcgctacgcagtgactgctctacttgatttagctttgcagccaactgaacaaacgatcacgctcgccgaaattgccgcacgtcaatctatttcagttgcttatttagagcagttgttcgcaaaacttaagcgtcatgggttagtttctagtgttcgcggtgcaaatggtggttatcatttggctcgaaacgctgatgaaattactgtgttagaaatcattgaagccgtaaatgaaaccgttgatgcaacgcgttgtgaccataaaggcaactgccaaaatggtgcaatgtgtcttactcacgatttatggcaagaactctctcatcatattgccgactatttagctaaaatcactcttgccaacctcattagccgagacaacgttcaaactgttgcattacgccaaaatgtaactggcacagattcagctcttttatcgggtacaggtatt

SEQ ID NO: 8881 - DNA, 2697 bp, Acinetobacter baumannii
atgacggacaagtcgattaaagagttagctctcagcgtaggacgtcctgttgagaagctcctagaacaggctcgtgaagcaggtttgcctcaacgtacagcagacgacattattaccactgaacaacaggacactttagtcaattatttgaaaaaggtgcatggtcaggaaagtggtaacacaggaaaaattgcgttgaaacgtaaaacaaccagtaccgctaaagttgcaagtacttcgggtaaagcaaaaactattaacgtagaagtacgtaaaaaacaggtttttgctaaaccaaacccagaacaaattgcagcagaagctaaagcgcgtgcagaagcggaagctaaagcgcgtgcagaacaacaagcgcgtgaagctgcagagcaaaaagcgcgtcttcaaacagagcaaaaagcaaaagcaactttagatgcaatgcgtgctgctcatcaacaagatagcgctgcacagtcagctcctaaagctgctgttgtagtgaaaaaacgtggtggtggtacagtaaaacctgcaccaaaaccagcagaaacattagagcaaaagaaagcgcgtgaagcacaaacagctcagttgaaagcaactgaagaagctgcacgtcgtaaagcggctgaggaagctcagcagcgtacgcttgaacaaatgcgtaagatggcatctaaatattcaaatgatgatgctactgcaactattcgtgtgattgatgattctcctcttgcttcaggtcttgttggccaagcttatgaagattcatttaatcaagaagaccgtgaaattaaacgtggtggtgctacaactaaccctcgcgctggtaagaaaggcggtcgtcgtggtcaagaagagcaaagcttcgttaaccataacaaacgtggtttaaaatcaagccaagcgaacaagcatggttttgaaaagccagttaaaaagcaagtctatgatgtagaaatcggttcaagcattgttgttgccgatcttgctcagaagatggcgattaaagtacgtgaagttatcaagacacttatgaaaatgggtgaattggttaaccagaaccagacaattgaccaagatacagctgcacttgttgtagaagaaatgggtcataaccctgttctagtttctgatacacaagcagaagataacttacttgaagcagctgaagaagcacgtggtgaacaaactactcgtcctccagttgttacaatcatgggtcacgttgaccatggtaaaacatcattgcttgaccgtatccgtcgttctaaagtggcggcaggtgaagcaggtggtattacccagcacattggtgcatatcacgttgaaacagacaaagggattattacattccttgatacaccgggacacgcagcatttacctcaatgcgtgcacgtggtgctaaagcaacggatatcgtggtattggttgttgcagcagatgacggtgtaatgccgcaaactgcagaagcgattgaccatgcacgtgcagcaggaactccaattattgttgctatcaacaaaatggataaagaatctgctgatccagaccgtgtgttaaatgaattaacaaccaaagaaatcgttccagaagaatggggcggtgatgttccggttgctaaggtttcagcacatactggccaaggtattgatgaactccttgatttaattctgattcaatctgaattgatggaattaaaagcatctgctgaaggtgctgcacaaggtgttgttattgaagcacgtgtggataaaggccgtggtgcagtaacttcgattcttgttcaaaacggtacattaaatattggtgaccttgttcttgctggttcatcatatggccgtgttcgtgcgatgtctgatgaaaacggtaagccgattaagtcagcaggaccatctattccagtggaaattttgggtctaccagaagctccaatggcgggtgatgaagttcttgtagtaaatgacgagaagaaggcacgtgaagttgctgatgctcgtgcagaccgtgaacgtgaaaaacgtatcgaacgtcaaagcgcaatgcgtcttgaaaacatcatggcatctatgggcaaaaaagacgttcctacagtgaatgttgttttaagaacagatgttcgtggtactttagaagcattgaatgctgcattacatgaactctctactgatgaagtaaaagttcgcgtaattagttctggtgttggtgcgatcactgagtctgatgtaattcttgcagagtcttcagaagctgtattgttaggcttcaacgttcgtgctgatacagctgctcgtcagaagagtgaccaagacggtatcgatattcgttactacagcatcatctatgaattgattgatgatgtaaaagatgccatgagcggtaaacttgctcctgaacaccgtgaaactatcttgggtgttgctcaagtacgtgaagtgttccgttctagtaagtttggtgctgctgcgggctgtatggttatggaaggcgtgattcaccgtaacaaaccaatccgtgtcttacgtgatgatgttgtgattttccaaggtgaacttgaatcattacgtcgttataaagatgtcgttgatgaagttcgtgccggtatggaatgtggtcttgccgtgaaaggttataacgacatcaaacctcttgataagattgaggtttatgatgttcaaatggttaaacggagtctt

SEQ ID NO: 8882 - DNA, 972 bp, Acinetobacter baumannii
atgcaagattttctagcattaaccttacaaggtgagcaacctgcaacgcgtgagggaaaacaagcaaatttttcttggcgttggttaggtgagggacttcttgaatgtacaccacatgcgcagtacgacaaagctgtcgtactgtcagctggagtacatggaaatgaaacggcaccaattgaattgctatctcatctttgcaccgttttatttgccgggcgtttaaagcttgcggtgagattattgcttgtattgggtaatccctatgcgatgcgtcaaggcaagcgttatgtacatgacgatgtaaaccgtatgttctgtggtgggtataaaaatctgcctgtaactgaagaatctaagcgtgctgaggttttagagcagactgttgccactttctttcaggaaagttcgagtcaggcaaaacgttatcattatgatttgcacacagcaattcgggcttcattattaccaacatttgctttatttccatatcaaacgcatagctatgatgctgatctaacggcaagtcttgaagcagctgatttggatgctttggtttatcataatgcggtaggtaaaacgtttacccattttacgagtgagaattttaaggcggcgagtgcaactttagagttaggcaaagcattgccatttggtcaaaatgacttgagtcaatttgcttcaattgatgaagtcattcgtaacgtggtttctgagcaagctttaccagtgcgtaataaaccaaaaattcgtgtgtttcaggtatctgactctttaataaaaagagatgaagagttccacatgaatttatctgctgaggctccaaacttttcaacttttactaaaggcgaaatcattgcgactcagccttctggtaactatgtagttgaacaagatcaggtctggattttatttccaaacccgaatgtgaagatcggtttacgtgcaggcttggttttaactgaaacaatc

SEQ ID NO: 8883 - DNA, 801 bp, Acinetobacter baumannii
atgaatatcccacgttttggtctaggaactttccgccttaaagaacaagctgtgattgattctgttaaaaatgcgctagatgtcggttatcgtgcaattgatactgctcaaatctatgaaaatgaagcagcaattggtcaagcgattgctgaaagtggcgtatcacgtcaggacttgtttttaactacaaaaatctgggtagataattttgctcaagagaagtttattccaagcttaaaagagagcttacaaaagcttcgtactgaccatgtcgatttaactttgattcactggccagcaccggatttaggcgtttcgattcctgaaatcatgcagcttttacttgaagcaaaacaacaaggcttaaccaagcaaattggtatttcaaacttcaatattacacttacccaacaagcaattgacacaattggtgtagagcatattgcaacgaaccagattgagctgagtccttatcttcaaaaccataaacttgtgaattttttacaagagaagaatattgatgtcacttcatacatgacgcttgcatacggtaaagtgcttcaagatcctgttttagcggagattgcagcagctcataaagtaacgacagcgcaaattgcattagcatgggcattgcagcgtggttttgcagtcattccatcttcgactaaacgtgaaaacctgattagtaatttaaaagcacaggatatcgagttaactgcggctgaaatgcaaatgattgccgaacttgatcgtaacagtcgtgaagttagcccagagccatgggcaccagtttgggac

SEQ ID NO: 8884 - DNA, 249 bp, Acinetobacter baumannii
atgaatgacgcacaacttatagacaagctaggtggtgtcacagcggtagcaagacttctggggattgctccgtcatcagttagtggatggaaagctatcccccttgatagaaaaatcaggctagcagttattgctgaagatcttggtttaacaacgcgaaaagagcttttccctgataactatcaagatatttggattgaacttcgtccccagacgacaaaaagcaaaaaccttggatcattaaccgct

SEQ ID NO: 8885 - DNA, 1161 bp, Acinetobacter baumannii
atgcgtgctcttacctatcatggtgctagggatgtacgagttgaatctgttccagatccagtgattcaggaaccagatgacgttattttaagggtgacagccaccgccatctgtggctcagatctgcatttataccggggaaaaatcccggccactgaagacggtgatattttcggccatgaatttatgggaattgtagaagaagtcggcccagaagtaaccgaagtcaaaaaaggtgatcgggtaattattccctttgtgattgcatgcggtcactgttttttctgtgaacatgaactcatggctgcctgtgaaaataccaataccggccgtggtgcaattctcaataaaaaacagatcccaccaggggcagctttatttggctttagccatttgtatggtggtataccgggtggtcaagctgaatatgtgcggatccccaagggcaatgtcggaccatttaaagtgccaggctccctgcctgatgaaaaagtattattcctgaccgatattctaccaaccgcctggcaagcagtaaacaatgcccaagttggtcgaggttccagtgtggcgatttatggtgctggcccagtcggtctgctggctgctgcctgtgcgcggatgctcggtgccgagcagatttttatggtcgatcaccatccttatcgtctgcgtttcgcacatcaaacctatggagtgattccggtcaattttgatgaagtcgatgccgctgaatttatcattcaaaataccacgggttatcgtggagtcgatgccgtcattgatgcggtcggttttgaagccaaaggcagcatgctggaaaccgtaatgactaacctgaaattagaaggttcgagtggttcagcgttaagacaatgtattgcagcggtccgccgcggcggtgtggtgagtgtacctggagtttatgccggtccaattcatggcttcctgtttggtgatgcctttgacaaaggtttaacctttaaaatgggacaaactcatgtgcataattacttgccgcagttgctagaacatattgaaaatggagatctgtctccagatctgatcattacccatcgcatgaaactggaagatgctgcggaaggttaccgtatttttgataaaaaagaagaagactgtcgtaaagtgattctgacgcca

SEQ ID NO: 8886 - DNA, 1092 bp, Acinetobacter baumannii
atgaatatgccagtgaaagtcgaatattttaaaaatcctaaaaatcgagatttgactccagcagaacttgaagcatttgcaaaagagcttgatcagatcaaacaagaagtattggatgatttgggtgaaaaagacgctaaatatatccgccgtgtctatgctgctattcgttatagtagctttttaggccgagcttgtttatttgcaggttggttcccgccagcgtggattttaggtacaggtttattaggtttctctaaaattatggagaacatggagctcggccataatgttatgcacggtcaatatgactggatgaatgacccgaaatttaatggtcaaacttatgaatgggatactgtaggtacctctgacaactggcgtcaaacccacaactataaacatcatacttataccaatattaaaggtattgatgatgacattggttatggcttacttcgcttattccctgaacaacgttggaagccagggttcttattgcagcctatttacagtattccattttgcttattgttccagtggggcgtagcaattcagaatcttgaaattgggcgtgtactttacaagcgtaaaactaaggcacaatttttagaagagttaaaaccggttaataaaaagattggcaagcaactctttaaagattatgttttcttcccacttattgcagggccggcagcactaccagtatttacaggtaacttggtcgcaaatggccttcgtaatatctggacctttagtattattttctgtggtcatttcacgaaagatgcagaagtgtttccaaaatctgttttacaagaagaaagccgtggacactggtatatgcgccaaattcgtggttcttctaacttaacaggttcagaagcattccatattttgtctggtcacttaagtcatcaaattgaacatcacttattcccagatattcctgctcgtcgttatcgtcaaatggctccaaaagttgaggcggtttgtaagaaatatggcttgaactataacaatgcaagctttgttaagcagtttggacaagtggttgggcgtattgtgaaatatgcgttcccatttaaaaaa

SEQ ID NO: 8887 - DNA, 4191 bp, Acinetobacter baumannii
ttgaaagacttgctcgatatcatgcgtaagaaaacggactcagatggtcatgcaccagttgagttcgaccgtatccgtattggtcttgcgtcaccagaaatgattaagtcatggtctcatggtgaagttaaaaaacctgagacaatcaactatcgtacgttcaaaccagaacgtgatggtttgttctgtgccaaaatctttggtccagtaaaagattacgaatgcttgtgtggtaaatacaagcgtatgaaatacaaaggcgtcatttgtgaaaaatgtggcgttgaagtaactacagcaaaagttcgtcgtgaacgtatgggtcacattgagcttgcttctccagttgcacatatctggttcttaaaatcgttaccatcccgtatcggtttattacttgatatgacacttcgtgatatcgaacgtgtattgtatttcgaatcatacgttgttactgatcctggtatgacaccatttgaaaagtatcaacttcttaatgatgaagaatactttactgctctagaagagcacggcgacgaatttgttgcaaaaatgggtgcagaagcagttcaagacttgttgaaagacatcgaccttgaagctgaaatttcacgtttacgtgaagaaattcctcaaacaacttctgaaacgaagttgaaaaaagcgtctaagcgcttgaaattgatggaagcattcaaagactcaaacaacaagccagaatggatggtaatgaatgtacttccggtacttccaccagatttacgtccattagttccacttgaaggtggtcgtttcgcgacttctgacttgaacgacttatatcgtcgtgtaattaaccgtaacaaccgtttgaagcgtcttcttgaccttgcagcgccggacatcatcgtacgtaacgaaaaacgtatgttacaagagtctgtagatgcgttgcttgataacggtcgtcgtggtcgtgcaattactggttctaacaaacgcccattaaaatctttggcagatatgatcaaaggtaaacaaggtcgtttccgtcagaacttgttaggtaagcgtgttgactactctggtcgttcggtaattactgtaggtcctactttacgtcttcaccaatgtggtcttccgaagaaaatggcacttgaattattcaagccattcattttcgcgaaattacaagcttcaggtcaggcaacaaccattaaagctgcgaagaaaatggttgagcgtgagaccccggaagtttgggacgttcttgcatctgtaattcgtcaacatccagtaatgttgaaccgtgcgccaacacttcaccgtttaggtcttcaagcatttgaacctattcttattgaaggtaaggcaatccgtcttcacccactcgtctgtgctgcgttcaacgccgacttcgacggtgaccaaatggcggtacacgttccattgacacttgaagcacagttagaagctcgtgcattgatgatgtcaacaaacaacatcttgtcaccagcaaacggtgagccaatcatcgttccttctcaggacgttgtcttgggtctttactacatcactcgtgatgcagtaaacgcgaaaggtgaaggcatggtgtttgcggatactcacgaagtaaaccgtgcacttgcaactggtcaagttgcgatccatgctcgtgttaaagtacgtgtgcatcaaacggttatcaatgaaaatggtgagcgtgaacagcaaactattattgttgatacaacaccaggtcgttgcttactttgggaagttgttccagaaggcttaagctttgacatgatcaaccttgagatgactaaaaagaacatctctaagttaatcaactcttgctaccgtaaacttggtttgaaagatacagttatcttcgctgaccaattaatgtacttgggcttccgtcaagcgactcgttcaggtgtatctgtaggtatggaagacatgttaattccacctacgaaacacacaattattgacaaagcggaaacagaagttcgtgaaatcgaacaacagttcgaacaaggtttcgtaactgctggtgaacgttataacaaagttgtcgatatttgggcgcgtacaaacgaccaagttgctaaagcaatgatggataacttgtcttatacacttgtgaaaaacaaacaaggtgaagacgagaagcaaaaatcattcaacagtatctatatgatgtctgactctggtgcccgtggtagtgcggctcagattcgtcagcttgcaggtatgcgtggtttgatggcaaaaccggatggctcgattattgagactccaattaaagcgaacttccgtgaaggtttgacagtactccagtacttcatttcaacacacggtgcgcgtaaaggtttggccgatactgcattgaaaactgcgaactctggttacttgactcgtcgtcttgtagacgtagcacaagacttagtaattactgagccagattgtggtacaagtggtggtctagtgatgactccattcattcaaggtggtgatgtcatcgagccattacgtgaccgcgtattaggtcgtgtaactgctgaagatgtacgtcgtgcatctgatgatgaagttgtattacctcgtggtacgttaattgacgagaaaatcgcggctcagcttgaagaggctggtgtcgatgaagttaaagtacgttctgtaatcgcatgtgaatcaacattcggtgtatgtgcgaaatgttatggtcgtgaccttgctcgtggtcacttggtaaacccaggtgagtcagtaggtgtaatggctgcacagtcaatcggtgaaccaggtacacagttaacaatgcgtacgttccacgtgggtggtgctgcaagccgaacttctgctgcaaacagtgttcaagtacgtaacaaaggtactgtacgtttccataacgtaaaaactgtacaacatgcgaaaggccacttggtttcagtttcacgttcaggtgaaattggtattgccgatgagttaggccgtgagcgtgaacgctacaaacttccttacggtgcgagcatcttgttgaaagatggtgagcttgttgaggctggtggtatcgttgcgacatgggatccgcatacgcatccattggtaacagaagttgctggtaaagcacgtttcagccaaattgctgatggtgtaactgcaacatctaaaactgatgatgcaactggtatgacaactgttgaaatcttgcctgtaacagcacgtcctgcttctggtaaagatttacgtccagcaatcgtattagatacaactgatggcggtgaacagttctacttcttaccacaaaacacaattgtgactgttcgcgacggcgaaacaattggtgtgggtgacgttatcggtcgtgtaccacaagaatcttcacgtactcgtgatattaccggtggtcttccgcgtgttgctgacttgttcgaagcacgtaagccgaaagaacatgcgatcttggcagaagtgtctggtatcgtaagcttcggtaaagagaccaaaggtaagaaccgtttagtgattactccagatgacggttctgaaatttacgaagagttgattccaaaatggcgtcaaatcaacgtgtttgaaggtgaacatgtgaaccgtggtgaaaccatttctgatggtccacaaaatccacatgacatcttacgcttgaaaggtgaagttgctttaactaactacatcgtgaacgaagttcaagacgtttaccgtctccaaggtgtaaaaatcaacgataagcacattgaagttatcgtacgtcaaatgttgcgtaaagttgatatcatcgatggtggtgatacaagcttcatcaaaggtgaacaagtggattacatccgtgttgttcaagagaaccaagctgtcttggcgcagaacaagttccctgcgaagtttgaacgtcaattgatgggtattacgaaagcatcgctttctactgactcattcatctctgctgcatcgttccaggaaacaactcgtgtgttaactgaagcggctgtaacaggtaaagaagatgatttacgtggcttgaaagaaaacgttgtagtgggtcgcttgattccagctggtactggtcttgcataccacttagagcgtcgtcgtcaagaagcggaagcagcagaacatgctcttcacaatgacttcagcgaagtagaccaagcatttagccaagctttaaactcagaacaattc

SEQ ID NO: 8888 - DNA, 1671 bp, Acinetobacter baumannii
atggcgagtccggcacaaatcattcgacataaatttctcaatacattcttttcacgccactctatttggttcttgtgtatttttactgtactcacaatcacgtggtttagaaccgtatatacacctcatagtatttattattttatttcggatactttactcaacggtttatgggtcgtcagtggcgcattaagcttattaggtctatatgatgtcttacaaaatagacattcaatcttaagaaattacccgattatgggccatttccgttttttatttgaagatatacgccctgaaattcgccaatactttattgaagcggatcaagatgcccttcctttctcgcgtatgcaaagaagtttggtttatcaacgtgctaaaaatgagaatgcagataaaccttttggatcaattattgatgtctatcaagaagattatcgctttattgttcattccattagtccatgtccaccagcggatcctaagagtttccgtattcaaattggtaatacccaatgccttcaaccttatagtgcatccattatgaatatctctgccatgagctttggtagtttaagtgcgaatgcaatacgtgcattaaacaaaggagcacaattaggcggtttttatcacgataccggtgaaggtagtctcagcccttatcatttagaaaatggtggtgatattgtttggcaaattgccagtggatattttggctgccgaactttagacggaaaatttgatgaacagaagtttgctaagcagtctcaattgccacaaatcaaaatgattgagcttaagctttcgcaaggggctaaaccgggccatggcggtattttacctaaacataagattactgctgaaattgccgagatccgtggtgtttcccgtgaccatgattgtatctctcctgcgaagcattcaagcttttcgacaccaattgaaatgatgcatttcttacagaagttacggactttatctggtggtaaaccggtaggtttcaaactgtgtattggtcaaccttggcaatttatgagtattgtaaaagcaatgcttgaaacaaaaattgtgcctgattttattgtagttgatggttctgaaggtggcactggcgcagcccctattgagtttagtgactatatcggaacaccattacgtgaaggcctacgttttgttcataacacacttgtaggtgctggcctaagagatcaagttaaaattggtgcaagcggtaaaattattagtgcatttgatattgccagcacatttgctctcggtgcagattgggtgaactcagcacgtggctttatgtttgcagttggatgtattcaagcgcaaagttgccatacaaaccaatgtcctgtaggcgttgcaacccaagataaagatcgccagaaagcactccatgtaccgaccaaagcagaacgtgtatttaatttccacaaaaatacattacatgcattatcagaaatgattgctgcggcaggtttacgtcatccatcggatattaaagctcatcatttagctcaacggattaatgaccgtgaaattaaaaactatgctcaattacacttcttcttaaaagaaggtgagcttttacaatctgaactgaaaaatgatgatgataatttctattatcgtatgtggaatatggctgacgccaatcatttt

SEQ ID NO: 8889 - DNA, 983 bp, Acinetobacter baumannii
atggtcatcgattttaagcaagacattctcgctcctgttgctacagactttgctgcgatggatcacttgattaatgaaggaattagctcaaaacgtcggcttggtcatgtcagtgagtaaacatgtagttgaagctggcggcaaaccgtatgcgcccaatcatgtgtttacttgcagcacgcgcttgcggcctcgacaatatgcaaaatgcacagcgtctggcagctattattgaaatgcttcataccgcaactttagtgcatgatgatgtagttgatgaatctggacttcgccgtggtcgtcctactgcaaatgcaacatggaacaatcaaacggccgtattggttggtgacttccttattgcccgcgcttttgaccttttggttgatttaaacaacatgaccttattaaaagacttctcaacaggtacatgtgaaattgctgaaggtgaggtattacaactccaatctcagcatcaaccggatacaaccgaagaaacatatttaaaaattattcacgggaaaacttctcgtttatttgaacttgcaaccgaaggtgcggctattttggcaggacaagaagcttaccgcgaacctttaagattatttgcaggtcatttcggaaatgcattccagattattgacgatattttagactacacttcagatgctgaaacattaggtaaaaatattggtgatgatttaatggaaggtaaaccgactttaccgttaatttcagcattagcacattcaaccggtgaagagcatgccattatcagacgcagtattgcgactggtggtgttgaccaattacctaaagtgattgaaattgtgcaaaagtctggtgctttagactattgccagcgccgtgcccaagaagaaacagaagcagcactgcaagccttatcaatcttgcctgatacaccttatcgtcaagcgttgattaatttaactcggcttgcattacatcgaatacagtagata

SEQ ID NO: 8890 - DNA, 1674 bp, Acinetobacter baumannii
atgaagtacaaagctcttctatctagtctttccattgctttatttagcttatctttagctggatgtaacgataatgattcacaagaaactgcagtaagtacaccaaagcagccgaatattttattcattatggccgatgacttaggctattcagatttaggagcttttggtggcgaaattcataccccaaacattgatagtttagcgcaagaaggtcgaattttaactgactatcacactgcacctacatgctcgcctactcgttcacaactcatttctggtactgatcatcacttggcaggcataggtgctatggcagagcttacccctgatcatttaaaaggacagcctggctacgaaggctatttaaatgaacgctcactatcgattgctcaggtgctcaaagataatggttatcgaacttatattagcggtaaatggcatttgggattaacacctgaaaccaatgcacatgctaaaggttttgatcattcatttaccttattacaaggtttagaccaccactttaaacaagctccaagtgcgtttaagcgaaattcaacctataccgaagatggacaaattattcctatttcagcattgcctgatgactttttctcgaccaattattttaccgacaaattacttagctatttagagtcaggtaaaaatagtggcaaaccattttttgcctatgcagcctatacagcaccccactggcctatacaagcgccagcagaataccgtgaaaaatatcgtggcgtttatgacgttggttacgatgctatccgtaatgcccgtattgcacgccaaaagcaacttggaattattccagtaaattttgaggctgccgaaccaattgcgactcaaaatgctccacaaaaatatggcaagtggaatgagttaacagctgaacaaaaagcgcttgaagcacgcaaaatggaaatctacgcaggcatggtagaaaatctcgacgccaatgtaggccgaattattcaatatctcaaacaaaataatctttatgacaacactttaattttctttgtttctgataatggcgcagaaggttttgttcgcggaagctatggtagtgaatcaggctttgataattctgtagcaaatgtaggtacccctacttcttatcattacattggtccacgttgggccgaggtcagtgcagcacctttccatttatggaaagatacagctggtgaaggtgcaactaccgctcctgctattgtgaaattaccaaaccaaaagaaagctgaagaaaccaatcatagctttgcatcggtactcgacgtttttccaacattattagattatgctcatattccagtacctcaagggcaatataaaggccgaaccattaatacgccaagcggttattcttggaagtctgtacttgaaaataaatcacaaacgatacgccctgccaatttcagttttgctgatgaattgcatggtagtaaatatgcaaaacaaggcgaatggaaaattgcacttcaaggtcgccctgaattaggaacaggttcttgggagctctataacattgccactgatcgtggagaaaatcacaatgttgcgcagctataccctgcaaaagttcaagagctattagcggtttatcaaaaatacactgaacaaaatggcgtacaggaatataacgccaaa

SEQ ID NO: 8891 - DNA, 873 bp, Acinetobacter baumannii
atgtctgatttacgccaacgcttttatatagaggactttcctgttcgcggtgaagtggttcatctagaagaagcattaaaaactattttagctcaacgcgactacatgcttgcggttcaaattctattaggcgagatgttgagcgctacagcattacttgcgagtactttaaaaatcaaaggtcgtatcagcttgcaaatccaggctaacggctctttcaaatgggctatggcagaatgtaaccatttaggtgaagttcgtgctttagcagactacgaaacagatccacgttttggtgaagcaacagatagcagcactgttttagcggctttggttaaccctgttttatttattaacatcgaacctgagcatggtgagcgttatcaagggattgtacctcttgatcaagcaaatttagcaggctgtttaatgcagtactatgacttgtctgcacaaattccaacccgaattgtactggcaagcaccgcacagcgttcaggtggtttgctcattcagttattacctcgtcatgatgaggaagagcaaaaactggttgatgaagatttatggccacgtttaaccatgctaactgaaacgcttaagtcagaagaactgacagagctttcagcaaatgagattttgtatcgtctttataacgaagaagaagtacgtttaccagaagttgaacacttaaaatttggttgtacttgttctaaagaacgctgtgccaaagccctcattcaaattggtgttgatgctgttcatgaaacattggaagcacaaaacccgattcaaatggattgccagttctgtaacacccgttatgagttcactgctgaagaggcattgggtctgtttggtgaacatttgagt

SEQ ID NO: 8892 - DNA, 1707 bp, Acinetobacter baumannii
atgttaaatgaagctgcttcagcggttttaaaaacacagccgcgtcgaaaaactgaatattcattaagatcaaatgttgctttagcagccgttgcaatcgctttaactttagcgattattgctcctttaatgatgttgtttgaaactgcattttttgatgaaaatcaaaattttgttggtcttgaaaatttttataactattttgtaagtccagctttactcagctctgtatttaactcggtgtgggttgcttgtgctgctactgtcattacagtatttcttgccagtatttatgcttttgctctcaccaatgtaaatataaaaggtaaaggcttctttaaattggtggcttttttaccgattttagcgccatcacttttgccttctttggcattggtttatttatttggtaagcaaggtgtgtttaaacctttgctgggcgatatacaaatttatggtccaatcggtattttaatcagttactgcttttggctatttccagcaattttaatgttgatgatggtgtcttttcgcagtgtcgatcagcgtttaattgaggcatctttgtcgctcggcaaaaatatctggaagacccattaccacgtcacactaccagcaattcggtatggactcattagcgcaagtctagtggcttttatttatgtattgaccgatttcggaattccgaaagtcattggcggttcatttaacatgatggcgcttgatgtctataaacagattattggtcagcaaaatatgagcatgggtgcggtgatttccatcttattgttgctaccagcagtgtttgtatttatttttgatcgaatacaaagcaagcggcatgcacggtttcaagcctttcagactaaaccttatgtttcagcatcgaataaaaaacttgaagttgttctaagcatattttgtggtttggtttcaggttcgattttactgattgtttttacggcagtgctggcttcattcattcagtcttggccttatgatttgtctttgaccttagcgcattacagttttgaatatgtcgatggtggcggttgggcagcgtactttaactcggttcgcatggcactctttagtacggtttttggaacagcactgatttttatggtggcactattaaccgaacgttttaaggcacatccacttattaaaaactatgtgcaagctttggttttattaccacttgctgtgccggggctggttctaggtattgcttatattttgttttttaaccagcagagtaatccgttaaacgtgctgtatggaaccatgaccattttggtgatttcaaccattgtgcattattacaccgtgccacatctgactttaaccaatgcgattaaacaaattccgctacagctcgaccaagcagcacaaactttaggtacatcgaagtggaaaaccttttggaaagtgtatttgcctatgtgttttccagcgctatgcgatgtatcggtctatatttttgtgaatgccatgaccactgtatcggctgccattttcctctattcaccagacaccagtttagctgcggtagctgttttaaatatggatgatgcgggagacacggttgctgctgttgcgatgagcattttgattttaaccacctcatgtgttgtaaaactcattcattggttatttaccagaaaaattatggcaagaagtcagcaatggcgtgaaagcgctcac

SEQ ID NO: 8893 - DNA, 1947 bp, Acinetobacter baumannii
atgaatgagatctatccagtaccagaggaatttaaaaaaactgctcgtactgttgaagcagactactttaaacgttatcaacactctatcgagaacccagatgaattctgggcagagcaagctaaaattgtcgattggataaagccatttacccaagttaaaaataccagttttgacaaagacaatttcaagattgaatggtttgctgatggtgagttgaacgtatcagcaaactgcttggacaggcatcttaaagaacacccccacaaacctgcaattatttgggaaggtgaccatccttctcgtcataaaatcgtttcttataaagagttacacgacgaagtctgccgtttcgccaacgttttaaagaaatatggcattggtaaaggtgaccgcgttgtgctgtatatgccaatggtgactgaggctgcaattgccatgttagcctgtgcccgtattggtgcggtgcactgcgtggtatttggtggtttctcaccagactcgttggcaagtcgtattgaagatagccaagctaaacttgtgattacggctgactcaagcctacgtgccggtaagttgttaccacttaaagaaaatgttgatttggctctagcattgccgggcacagagtgtgttgaaaacgtgattgtggtttaccgtaatgcaaacccaatcgagatgaaaccgggtcgtgatttgtggtatcaccttattattatggaggtggatgcaaactgtcctccagaaccaatgaaggccgaagaccctttatttattctttatacctctggctcgacaggtaaacctaaaggagtgttgcatactacaggtggttatctggtgtatgtggcgagtacctttaaagaagtttttgatttaaaacaagatgatgtgtactggtgtaccgctgatgtcggctggattacaggccatagttatctaatctatggaccattggcaaatggtacgacgaccttaatgtttgaaggtgtgcctcagtatccaacatgggcacgtcttggtcatgtggtcgataaacataaagtctctattttatatacagcgccaaccgcgattcgtgccatgatgcgagagggtgattcgtatgtacgtgaaagtaaccgtagtagtttgcgtttgttaggttcagtgggtgaacctattaacccagaggcttggaactggtactacaacgttgttggtgaaggccgctgtccaattgttgatacatggtggcaaaccgaaacaggtggtattttgattgcgccattaccgggggcaacagctttaaaacccggttcggcaacgcgtcctttatttggtattcaaccagcgattgtcgatggtgaaggcaatgaactagaaggcgctgccgaaggtaaccttgtgattaaagattcatggccgggccagatgcgtaccatttggggtgacccagatcgctttattgaagcttacttctcgacctttaaaaatacttattttacaggtgatggcgcccgccgtgatgaagatggctattactggatcacgggtcgtgttgacgatgtcttaaacgtttcaggccaccgtctaggtacggctgaaattgaaagtgctcttgtatcgcatgaatcggtggcagaggctgctgttgtgggtatgccgcatgatattaaagggcagggtatttgtacttttgtgaccctgcaggcgggggttccggaatcggaagaactgcgaaaagagttaattagctgggtacgtaaagtacttggaccagtagcttcaccagatgcactgcactgggcgccagcattacctaaaacccgttcaggtaaaatcatgcgccgtattttaagaaaaattgcagcgaatgaactggatagtttgggcgatacctcaaccctagctgaacctgctgtggtggatcaactgattgcgacagtttatcctgatagacaaaaa

SEQ ID NO: 8894 - DNA, 1248 bp, Acinetobacter baumannii
atggctccaattgatatcctgtttttatttggctttttaggtatttggattccacaagcattttgggcatggttaagctatcaagcgtggaagtattccaaaacggctgaaaaagagctgcaaaacttaccaataccagaaagatggccagtcttaagtgttttgatccctgcttataatgaaggcgttgtgattgaggacactttgcatgccattgctcaacaggactatccggcaaagtcttatgaagtcttactgatcaatgatggctccaaagacaacacccttgaaatcgcagaaaacctcgcaaaaatttatccttgcataaaaattgtcaatgtacccaaagggatgggtggtaaaggtaaatcaagaacgcttaataatggtcttccccatgccaaaggtgagttaattgttgtttacgacgccgatagcacccctgaacccgattgcgtccgattacttgcccaaaccttgttagccgataaaaagctagtcgcggtaaatggcaaagtcagaacccgtaactggcaagatagtattttgactcgttttattgcgattgaattcatctttttccaatggatctttcaaggtggacgctggcaacgttttgaactatcaacattaatgggaacaaattatgtcatctggcgcgatgctctagagactttgggcggttttgatgaaaaatcgctagtcgatgatacagaaatgagtttccgaatttttatcggacaaaaacgaattaaatgggttccctatgcaatcggttggcaacaggaccctccttcgttaagtgtattcgttaaacagcgctcacgctggactcaaggtaatttttatgtaacacgcaaatatttacctgtagcactcagaaccccattcccaatcggaattgaaattctaaataacattatgtgctatatcctttttgtaccggctttattctggagtcatattaccttaacgcttggcttacttgatattgcaggtatttcagttcctggtccatttacactactgtggggactctcattttgtctctatgtagcacaaatgtggtttacgctttctttagaaaaagttaaaccagaactctatttttattctgtcttatcttacgtaagttactcacaaatcttcttatttattgtgtttaaagccgcattcgacatgctaaaaaataaaatacagggcaactcccttcaatggtacaaaacggaacgtagcaaggagaaaaaa

SEQ ID NO: 8895 - DNA, 462 bp, Acinetobacter baumannii
atgacaaagaagtatgcgcgttttttacctacaacagaatctttcactcttgaagattttccatattattggattactcaggtccatgctcaatatgttcaaaatattgataatgccctcaaaaaatatggcctagataattcacgtcgacgtattatgcttgcgctaagtagtaaacctcacgctagcgtatcagaactatctgatatgattatttcaaaaatgtcgactaccactaaaattgtttatcgcttaaaagatgaaggcttagttgaaacctattcttgtcaatcagatggtcgtattacacgtgtatatcttaccgaacgtggtacagaaatgattaataaaattaatgatctaacgagtgtagtacttgaacaatcattcgaaggtatcacccctcttcaactagaaaaaatgatggaaagcttaaaattgcttttaaaaaatctttctcga

SEQ ID NO: 8896 - DNA, 1026 bp, Acinetobacter baumannii
atgtcgatgcattctgatcaaatcaatccagattcaaacgaaaaccaagatccaaacaatctgattgatcaattttttagttccaaaggcgttacaattccttcggattttaagagcggatttgtggcgattgtaggacgtccaaatgtgggtaaatctaccctcatgaaccatttattgggccaaaaactctctattacttcacgtaaacctcaaacaacacgccataaaattatcggtattgattcgcgtgaaaaaatgcaagcggtttatgtcgataccccaggtatgcataagaaagaagtacgtgcaatcaataaaatgatgaaccgtgctgcgcattctgcgttacgtgacgtgaatttagtcttatttgttattgatgcccagaagtggactcaaaatgacgatttagttcttgagaaactcaagaatgctgatatgccagttattttggtgattaataaagctgatacttttggagataagagagagattctccctttaattcaagaacgtgccaaacttatgaattttgcggagattgttcctgtttctgcactccgtggagcaaacttagagcacttaagtgaaacgattgaaaaatatcttccttatcagccacctttatattcaatcgatcaaattacggaccgttcagagcgcttcttggcaagtgaaatcatccgtgaaaaaatcatgcgtcagttgggtgaagagctaccttatgatttaacagtacaaattgaatctttcaaaacggaagaggcaactgttaatgaaaaaactggtcgtttaaaaccagcatgtacctatattgatgcaactatttttgtggatcgtcctggtcaaaaagcgattgtaattggtgaaaaaggtgccaagcttaaaacaattggcatggatgcacgtaaagacatggaaaaaatgttcgaacaaaagatcatgcttaccttatgggttaaggtcaaaggtggttggtctgatgatgaacgtgctttaaaaagtttaggatatagtgatatc

SEQ ID NO: 8897 - DNA, 768 bp, Acinetobacter baumannii
atgattcatgtcaagaatatcaataagtcatatggaaataagccaatactgactgacgtaaatgttgaatttcctacaggtcaggtgacgtcactcattggtccaaatggagccggaaaatcgactttgctcatgatgatggcacgtttaattgagccggataaaggcgagatttttcttaatcatcaaaatattgcggatattaaaaccgctgtttacgccaagcatgtcgcgactttacgtcaagcacccggctttaatttgcgcttaaccgtagaagagctggtgtcatttggacgctttccctatagccgtggtgttttaaccgagcaagatcatcaggtggttgatgaagctattgagtttctttctttagaaccactgcgcaaatcttacatagatgaaattagtggtggtcaaaggcaaatggcctttttggcgatgacgatcgcccagcaaacagacgtacttttattagatgaacccttaaataaccttgatatgaaacatgccgttcaaattatgcgtgcactcaggcgcttatgtgatgaacaagggcgcactgtgattttagtcattcatgacatcaattttgccacgaattattcggaccatattgtcgcgctcaagaacggcaagcttcatttcagtgggttaacggaacaagtgattacagaggcgcaattaaatgatctgtacgagcttgattttgaaattacatacagtgagcgtggctgtatgtgtaattacttcaactcatctggagct

SEQ ID NO: 8898 - DNA, 1068 bp, Acinetobacter baumannii
gtgcgtcaagcaacagtttatattgatcgccaagcgcttcaatataatttaaaccgtgtcaaacaactcgcagcaaattcaaaaatcgtaagcatggtaaaggccaatgcatacggacatggagtcaaagactgtttagcagccttaaatgcctcagatgcctttggtgtagcctgcctacaagaaggattagaaatccgtgaactcggtttcgaacaaccagttactttaattgaaggggtattttctgaagatgaaatgcccgtcgcaattgaacaaaaatttgaatgcgtcattcaccatcaacaacagtttgaatggttaattaaacacaaacaagcatatattgcccaaggcttaaaagtatgggttaaattaaatagcggtatgaaccgtttaggttttaaagacccagaaattattgaagtgattaagacattaaagtctgaaggttttacatgtgtacttgctatgcattttgcaaatgcagatgtagatcaccctttaaatgaacaacaaaaacagcaatttttgcatattaaagaaacttgcgatccaattttagcatcatgctgtaattcagctgccatctttaaatggccagaactaaattttgactatgtacgtcctggtattatgctctacggcgcttcaccttttgcagataaaacagtgcatgatcttgatttgaaacctgtcatgacttttactgcagaaataatagcgttaaaccatattgaagctggtgaacacgtaggttatggctctactttttgtgctcaacaggctatggatatcgccattgtttctattggctatggtgatggttatccaagagcttatgttaagcaaaattttgtcgctattgatggcaaactttgcccagttgtgggccgggtaagtatggatatgattgcgattgatgtcacaaatactcaagtaaaacttggcacccaagttgaactttggggaaatcaccgtttagttgatgatgtggctgaagcaaatggcacgatcggctatgaattactttgccgtctaagttctcgcccagtccgtcagggtact

SEQ ID NO: 8899 - DNA, 153 bp, Acinetobacter baumannii
atgtctgaacaaacagcccagcgtcaatattctattggctggattatgttgctcgctttactcacggctttagggccattatccattgatatgtacttacctgcgttgcctcaaatggcccatgattttggggtttctttcggcatatgccaa

SEQ ID NO: 8900 - DNA, 1467 bp, Acinetobacter baumannii
atgaataataccgaagcaataattaaatcttcttatgatgcaaaactgacaaatcaagacttagctcctttaaaaaagcaaacttggggcgcttataatatttttgccttctggatgtcggatgttcatagcgtcggcggttatgtcatggctggaagcctttttgcactcgggctcaatagctggcaggtacttctatctttactcatcggcattgcaattgttcagttttttacaaatctaattgccaagtctagccaacaaacaggcacgccctatcctgtgatttgccgcgcaaccttcggtgtgcttggtgcaaatattcctgccgttatccgtggtcttattgctgtcgcatggtatggcattcaaacctatttggcctcaagtgcattcttattggtcattttaaagttctttccagactggtcagcctatgctgatgtttcaacttacggctttcttgggctttcctatttaggatgggttggcttcatgctgctttggttactacaagcgattgttttttggtctggtatggacagcattcgtaagtttattgactgggcaggcccagctgtctatgttgtgatgtttgcgatggcagtatggctcatctggaaagctggctggcagaatattgatttaaatttaagtggggttcaatacgacggttttgcagttgtaccagtcatgattggtgctattgcgcttgttgtctcatatttttcagggccgatgctgaactttggtgacttctctcgttatggtaaaagctttaacgcgattaaaatggggaactttcttggcttaccaattaacttcttaggcttttctttacttactgtggtgtgtattgcggcaacgcttccagtatatggaaaacttattacagaccctgtcgagatggtcggtaaacttgataatacttttgtggtgattttaggtagtttgaccttaatgattgccactatcggaattaatattgttgctaactttgtttcacctgcatttgatttttccaacgtttcaccgagcaaaattagctggcgtatgggtggaatgattgcagcagtaggttcaattttcattaccccatggaatttgtttaataaccctcaagtgatccattacaccattgatattttaggtgcatttatcggtccactttttggtgtattgctcgccgatttttacctcgttaaaaaacaaaaaatcgtggtagatgatttatatactttagatactcaaggctcgtattggtacaaaaatggttataaccactctgccttttatgcgttaattccagcttcattaattcctattctctgcgtacttttaccacaactgtctgggctggctaatttcacatggtttattgggatgggattcggttttgtcatttaccgatttcttaaccaaccgcttgcccatgctaaatcggcaatgactaaggtaaaagtacaa

SEQ ID NO: 8901 - DNA, 1257 bp, Acinetobacter baumannii
atgacaatctttgctgctatatggtcgcatgccttaaaattcgttttctattatccattatttatgtcgtatttatggatgattggcgcgatcattttctattggaaggaacgtaaagctccgccttatgatcagccagctccattagaaagctatcctaaagttgctgtgcttattccttgttttaatgaaggggataatgcagaggaaacgattactcatgctttaaaattggattatcctcattttgaagtgattgcgattaatgatggcagttcggataatacaggtgaggtactcgaccgattagctgaacaacatgaaaaactccgtgttgttcatttggctcaaaaccaaggtaaagccatggggttgcaagctggaagcttaatgaccgatgccgagtttttaattggtattgatggtgatgctttacttgacccgcatgcagcaaagtggatggttcgtcattttcttcaaaatccgactgttgcagctgtgacgggtaacccgcgtatccgtacccgttcaactttattaggtcgtattcaggttggtgagttttcttcgattgtcggcatgattaaacgtgctcagcgtacctttggccgtttatttaccgtatcaggtgttattacggcttttcgtaagagcgctgttcaccaagtggactattggtcacctaatatgttgactgaagacatcgatattacttggaaattgcaacgtgccggctgggacattcgttttgaaccgaatgccttggtttggattttaatgcctgaaactttaaacggattgtggaaacaacgtttacgttgggcaatgggtggagcacaggtattaattaaaaatattgatgtgttcaccaaaccaaaattgaattttttatggcctttaatgtttgagctttgcttaactttagtctggtcatatttaatgctggcgatggctttgttgtggttggtacattttattttaccggtccctgcattagccgttgtgagctctccatttttaccgtatggtagcggtattttattgggggcaacctgtctcattcagtttgctttaagcaaatggatggatagtcgttatgaaccgcatctcggaaaaaactatttctggatgatctggtatccattggtcttttggctaatcaccatctcggcaactattgtggcatttccaaaagtcttacgacgtggagatgagaaacgtgcgcgttgggtgagcccggatcggggcattcgtgga

SEQ ID NO: 8902 - DNA, 1884 bp, Acinetobacter baumannii
atgagcgatatgcattcccctacttctcaagtagcggctctgattagccgaggcaaagaacaaggttacttaacttacgctgaggttaacgatcatctgccggactcgattactgaaagcgaacagattgaagacatcatccagatgcttcaagacgttggtattcctgtacacgagcgtgcacctgaatctgacgataccatgttcggcgaatcagctgatgcaactgatgaagttgctgaagaagaagctgctgccgtacttgcatctgttgaaaatgagcctggacgtacgacagaccctgtacgtatgtacatgcgtgaaatgggtacagtagaactgttaacccgtgaaggtgaaatcagcattgctaaacgtattgaagaaggcattcgtgatgtcttgaactcaatcgcttactggccaaatgctgttgaagttgtattaaaagaatataatgattttttaactggcgaacgccgtcttgccgatatcttatctggttatttagaccctgaaactgacgaagatattcctgaagttttagaagatgttgaagagcttgaggaagaagacgaatcatctacaaagtcaacgaaagaagttaagcttgatgatgacgatgaagaagaagagtctgaaggtgatgatgattctgaaggtgattcaggtccagaccctgaagttgcaaaagttcgttttgctgaattagaagctgcatgggctcaaactaaagctgtcatcgaaaaacatggccgtaatagccctgaagcaaatgaagctcttgagtctttagcaactgtatttatgatgtttaaatttactccacgtttatttgacatcatttcagaaatgattcgcggaactcatgaacaaattcgtgccaatgaacgtgaaattatgcgttatgcagtacgtcgtggccgtatggaccgtaaccagttccgtacatctttcccgaaacaggaatctaatcctgcttggttagatgaacaaattgctaaagctccagctgaaatcaaggctcacttggaaaaagtgcgtcctgatgttttagccttccagcaaaaaattgcagatatcgaaaaagagcttggcctaaacgttagtgaaattaaagatatttctaaacgtatggcaattggtgaagccaaagctcgtcgtgcgaaaaaagaaatggtagaggccaaccttcgtttggtaatttcgattgcgaaaaaatataccaaccgtggtttacagttccttgacttgattcaagaagggaacattggtttgatgaaagccgtagacaagtttgaataccgtcgtggttataaattctcgacttatgcgacttggtggattcgtcaggcaattacccgttctattgccgatcaggctcgtacaattcgtattcctgtacacatgattgaaacgattaacaaaattaaccgtgtatcgcgtcaattattacaggaaatgggccgtgaacctactcctgaagagttaggcgaacgcttagaaatggatgaggttaaagttcgtaaggttcttaaaattgcgaaagagccaatttcaatggaaactccaatcggtgatgatgaagattcgcatcttggcgatttcattgaagaccagaacatcacttctccaattgatgctgcgacttcagaaggcttaaaagaagcaactcgtgaagttttagaaaacttaactgaacgtgaagcaaaagtattgaagatgcgttttggtattgatatgccaaccgatcatactttagaagaagtaggtaagcagtttgatgtaacacgtgagcgtattcgtcagattgaagcgaaagcattgcgtaaattacgtcacccttctcgttctgaacacttgcgttctttcctagagaatgac

SEQ ID NO: 8903 - DNA, 579 bp, Acinetobacter baumannii
atgaatgatagaacagcaagacagaaaattctcgatgcagcggcaacactgttttataacgatggcattactgcaacaggaattaatacggttacggctaaagcagatgtagctaaaatgtcgctttacaataatttttcttcaaaaggtgaacttgttgatgcctatattgctgcacgacatcaagagtggttagacctttatcaaaagcgtttagaaaaaacaaaaacagcgaaagaagctattttggccgtatttgatgcctatcaagatcatgccgagtttgcttatgaaaagggttttagaggatgtgggctattaaatgctgccgcagagttcccagcaaatagttcagggcgaaatgctgtaagacagcataaagaacaagttgaggcgattgttgccgagcatttaaatcgcttattaaaagattcacagcgtgttagctatatcgcctcacaactttcttttttattagaagggtcgatggcaagagctggtttagagggtagtagccgtcaacttcaattagcgagacaaatggcagaagatgttttagatcgagaatgccaacatgat

SEQ ID NO: 8904 - DNA, 699 bp, Acinetobacter baumannii
atgaatagaaaattaatcagtactattgttctcatttctgtatttggagttactgcttgtagcaaggcatcaaatgaacaagcaaaggtagatactactgagaaaagcagctctcaaaacgtaaaaacggaattatccgcaagtgataaagcgattttagatagatatgaaacaatcacaaatgaagttgtgactgctggtgaagatgaaaagataaaacaaactttagcgcctttaatacctgaaattaagaaagttactgctaaaaaacaaagagaaatggcattgatgaatatttatatgctgtctggtatgtataaagaggcttatgagttaaatgagcaacaaatcaaagagaaacccttgcctcaacggataatgtttagatgtactttgcttgaaaaattaaatgaggccaaagtaaaaattcaacagtgtcacgaagcttctgcccaactcatacaaaccgaattgagtaaatcatctagcaaaaatgatccccagtacagagacgccgaatttgtatatttaactgaaatgtataaagctggtcacactgactataaagcaaaaatacagaaatttattgatgaaactaaagatgtcgcatcaaaagataaatataagtctttgtatgatgccgatattgagtcattttatggtactgattcaccaaattatgtaccagaatcattaaag

SEQ ID NO: 8905 - DNA, 930 bp, Acinetobacter baumannii
gtgacggttaagaattctccagccgagcttagttcggctcttgcgaatcagcgaaacgatgttccactgattcgctactcaggccggtttgcgccctcgccaaccggccctttacatttcggatcactcattactgctgttgccagttactgtgatgccagagcccatcaaggtcgatggttagttcgtgttgaagacaccgatattccccgcatctaccccggtagtgaagaccatatactcgcatcacttgaagcttttcagttcgatccggatgccgagatcatttttcaaaaagaccgcctagatatttacgaaagtgtattagaccaacttaaaaaagagggtctggtttacgcctgtcaatgtacccgtaaaatgctcggttcaaacgctatctatgcaggcacatgtcgagatttgcatctcgacttccaacatcaagccattcgggtaaaagttcaagatcagccaatctgtttcgatgaccgcctacaagggcttcattgttctaatctagagcatgaccttggtgattttgtccttaaacgccgtgatggaattattaactaccagcttgctgtcgtcgtagatgattacctacaaggcattactcatgttgtgcgaggtgcagacctgttagataacactgagcgtcaaatctggcttggtcagctcctcggctaccctaagctgagttacatgcatcttccgctcgccatgaacgaccaagggcaaaaactttcaaagcaaaaccttgcccatgcacttgatttaactaaagctcctgagttactacaacaagccatacaagccttaggtcaaccacaggttgatttagatcgccccgaagtgatgctcaagcaagcggtagcccagtggaatgtagatttgattcctcatggacaacaactttgcggaacatatcta

SEQ ID NO: 8906 - DNA, 1416 bp, Acinetobacter baumannii
atggcaggcaaaactttatatgacaaattgtgggatgaccacgtagttactcagcgtgatgatggttcgtgcttactttatatcgaccgtcatttattgcatgaagtaacgagtccacaagcatttgaaggtttgcaacttgctggtcgtcaaccgtggcgtttaagtgcaaacgtagctaccccagaccataacgttccaacatctaaaaaagaacgtgatcagggcatcgctggtattgaagatgatacatctcgtattcaggttcagaccttagatgataactgtaaggcatttaatattgttgaattcggtattaatgatattcgccaaggaattgtgcatgttgtcggacctgaacaaggcttaactttaccgggtatgacggtggtgtgtggtgactcacatacagcgactcacggtgctttcggttgcttggcacatggtattgggacatctgaagttgaacatgtgttagcaacacaatgtttggttcagaaaaaatctaaaaacatgttggttcgcgtcgatggcgtattgggtaaaggtgtaacaccaaaagatgtcgtgttggccattatcggtaaaatcggtactgcaggcggtacgggttatgcaattgagttcggtggccaagttttccgtgatatgtcgattgaaggacgtatgacggtatgtaacatggcgattgaagcgggtgctcgtgtgggtatggtcgcagttgatgataagactattgaatacgtaaaaggccgtagctacgcaccaaaaggtgagcagtgggaacaagccgttgcttactggaacactttacattcagatgttgatgccgtttttgatgctgtagttgagttaaatggtgcggagattgaaccacaagtgtcttggggtacttcacctgagatggttattcctgtctcgaaagctgtaccaactttagaacaagcgaaagatgacgtacaacgtaatgattggacacgtgcttatcagtatatgggcttaaatgcaggacaagctttagctgatattcaacttgatcgtgtctttatcggttcttgtacgaactctcgtattgaagacatccgtgctgctgctgaagtagttaaaggccgtaaagtggcacctagcattaagcaagccatgattgttccgggttctggtttagttaaacaacaagctgaaaaagaaggtttggataaaatcttcttggaagctggttttgaatggcgtgagccgggttgctcaatgtgtttagcaatgaatgcagacaagttacaaccgggtgagcattgtgcatcaacctcgaaccgtaactttgaaggtcgtcagggtaatggtggtcgtactcacttggtcagtccggcaatggcagcagcggctgcgattgcaggtcattttgttgacgttcgttcattt

SEQ ID NO: 8907 - DNA, 786 bp, Acinetobacter baumannii
atgaccaaacagtttgcagtaattggcaatccgatcgaacaatcacgctctcctgaattgcatcatgctttcgctgaaaaaacaggtgttgatctaaactaccaaaaacggcttgctcctcttgacggttttgaatcgagcatgcgaagtttctttgcaaaaggcggcagtggtatgaacgttactgttccttttaaagagcaagcttttgctttatgtgatgtgttaaccgagcgtgctcaaattgctaaagctgtaaataccttatggatggaaaatggcaaattgcatggtgacaataccgacggccaaggcttagttgccgcaattcaagctttagaatggaatcttgaaaatacaactattttaattttaggagctggcggcgcaacgcgtggtgttatttatccccttgtacaggctggtgccaaaaaaatcgtcattgcaaaccgaactttagctcgtgcagaacaacttgtagatgacttaaaaacagcagttccacaagcccaattacaagcaatttccctaaatgatttagaaggcgattttgatattgtgattaatgcaacttcggcaagtctttcaggcgatgctttacaactacctgaaaaattaaaatttaaatatgcctatgaaatggcttatggcaaaccttctagtttccttgatcaagcgaaacagcgtaatgtgccttatgcggaaggttttggcatgttagtaggccaagctattgaagccttctctatctggaataatgtacgaccacaattaaaagattttcta

SEQ ID NO: 8908 - DNA, 1335 bp, Acinetobacter baumannii
atgagttattttggaacggatggtattcgtggaaaatttgggcaaatgccgattacgccagagtttgctttaaaactcggttttgctgcagggaaggtattaaaacgaacgagtccgaaaaataagccacttgttgtattaggaaaagatactcgtttatccggttatattttagagtctgctttgcaggcgggattaaatgctgctggtgtatatgttcacttacttggaccattacctacaccggctattgcacatcttacccgtgccttacatgcacatgcagggattgttatttctgcatcacataacccatattttgataacgggattaagttcttctcaagtgaaggtaaaaaattaccagattcattgcaggaagaaattaataaagaattagaaaaagatttatttatcgaagacactgcaaacttaggtaaaagtgttcgtgtgaccgatgcaaatggtcgttatatcgaattttgtaaatctacattcccatatcattttgatttaaataatttaaaaattgttgtggattgtgctcacggcgctgcttacagcgttggcccctcggttttccgtgaactcggcgctaaagttgtcgctttatacaatgagccagatggtttaaatattaatgaaaactgtggttcaactcatccagagagcttacaaaaggcggttgtggaacatggggctgacttaggtattgcctttgatggtgatgctgaccgtgtagtgatggttgataagttcggtagcttaattgacggtgaccacatcttatatattttagcgactcaggcaaaaaataagccagcaggtgttgttggtacggtaatgagtaacatggcacttgaagttgcacttgaaaaagcaaatgttggctttgtccgtgcaaaagtcggtgaccgttatgtgttacaagccctagaagaaaatggatgggtaacaggtggtgagccttctggtcatattctgactttagacaagagcacaacaggcgatgcgattattgcagcattacaagtgttaactgtgatggttgagcagaacaaagcgctgcacgaattagttcacgactttaaactgtacccacaagttcttgtaaatgtacgtttggaacaaatgcttgatccatattctattcctgcattagttgctgagtttaataaagctgaagagcagctcaaaggacgtggacgtattttaattcgtaagtctggaactgagccagtcattcgtgtcatggttgaaggtgataacgagcaagaagtgaaaactttagctgaacatttagcaaatgcagttcgttcacaggcacaagtcgca

SEQ ID NO: 8909 - DNA, 966 bp, Acinetobacter baumannii
atgagttatctatttttgtcgtgtacagagaaaaaattaaatcagtggtttgattattatgtcggaattggctcttccgctgccgttgccataacatttattttaattaacgttttagaaaatggccaagataatgtactttttcatgcagcaatgatgtatgccattgtgattatctatggtgcggtaggcatgcgtttttatactgccattattgcaggatgggtcggcggtcttattggtattttggtaagcacctatttgaacggagacatagactggaccttcttgaaccgtacatatacgtttagtagtttcttaggcatgacccttgcctatgctacggatcgtcagcaccgtgaaaactatttacaaaactgtatgattgagctcaaccgtattgaactcatgcaacaagctcaacaactgtcactgctttctcaacaagatgctttaaccgggcttgctaaccgacgttatcttgatgaaacacttgataatgaatggcgacgcgcattacgccatgagactcctcttactattatgatggttgatattgacttctttaaaccatataacgatagcttaggccatctcaagggtgatcagtgtttaaaagatattgcgactgcaatttcctcaattgctgctcgtagtggcgatttggttgcccgttatggcggtgaagaattcttacttctgttcccaatgacaaatgcacaacaagccaaaattcaggccgaaagattaatgaatgcaattaagaaaattgctattgttcatccatgtagtagtgtttcaccatacgtaaccattagtgttggcgtggcgaccacaattccacgtttaaatgattcaatttctgcttttgttagtcgtgctgatcatgcgctctatcaggcaaaaacaaatggccgcaatcaatatcaaattgctttgaatgaagaacaaattgtagatctaact

SEQ ID NO: 8910 - DNA, 2712 bp, Acinetobacter baumannii
atgagcgtatcggaaatccgaccgattgccattgaggacgaactcaagcattcatatttagattacgcgatgagtgtaattgtatctcgtgcattgccggatgtgagagacggtcttaaacctgttcaccgtcgtgtgctttatgccatgcacgaattgggcaatgactataacaaagcctacaagaaatctgctcgtgtcgttggggacgtaatcggtaaatatcacccgcatggtgacttagctgtttatgaaaccattgttcgtatggctcaagactttagcttacgttatttattggttgatggtcagggtaacttcggttcgatcgatggtgatagcgctgcggcaatgcgttataccgaagtccgtatgactaagctggcacatgagcttcttgcagatttagaaaaagacacagttgactgggaagataactacgacggttcggaacgtatccctgaagtacttccgacacgtgttccaaacttgttaattaacggtgctgctggtattgctgtaggtatggcaactaacatggcaccacacaacatgacagaagttgtgaatgcttgtttggcttatgctgacaatccgaatatctcgattgaaggattgatggaatacattaccggccctgacttccctacaggcggtattatttacggtaaatcaggtattgttgatgcctaccgtaccggtaaaggtcgtttacacattcgtggtaaataccatttcgaagaagatgaaaagacaggtcgtacaaccatcgtctttactgaaattccatatcaagtaaacaaagcaagagttattgaacgtattgccgagttagtaaaagagaaaaagcttgaaggtatttcagaacttcgtgatgagtctgataaagaaggtatgcgtattgcaattgacttgaaacgcggtgaaaacgcagaagtcgttgtaaataacttattcttaaatacccagcttgaaaactcattcagcatcaacatggtttgtctagacaatggacaaccaaaattgatgaatctaaaagatattattgcggcatttattcgtcaccgccaagaagttgtgacacgccgtaccatgttcgaattacgtaaagcacgtgaacgtgggcatatcttggaaggcttgacagttgctttagccaatattgatgaaattattgaaaccatcaaaacttctgcaaaccctgctgaagcgcgtgagcgtttacttgcgggtgagtgggcaggtggtggcgttgttgcactacttgaaaaagctggtgcaatttctgttcgcccagatgaaattgaaggtgaagatccaaatcgtccatttggtttaagtgattcaatttatcgtctgtcaccaacacaagtaggcgcaattttagaattacgtttacaccgtttaactggtcttgaacaagacaagttacatgcggaatatactgaaattttaggtcaaattgctgaacttactgcaattttaaatgactttaacttgttaatgggtgttattcgcgaagagttggcacaagttttacaacaatatggtgatgcacgtcgtaccgaaattgttgaatctcgtgtggatttctgccgtgaagatttgattcctgaagagcaagtggtattaactgtttcacaaacgggttatgcaaaaactcaaccactttcagactatcaggcacagcgccgtggtggacgtggtaagtctgcgacttcaatgaaagatgatgactttattcaacatctgattgtggcatcgaaccatgcgaccgtactttgctttaccaacgtgggtaaagtgtaccgtctgaaagtttttgaagttcctcaagcatcacgtggggcaaaaggccgtccaatcgtgaatttgttaccactagatgcaacagaaaccgtaaccgcaatcttgccgttaaccgagttcccggaaaaccactatgtgtttatggcgacagcttctggtacggttaagcgtgttgagttagaacaatttgcaaacattcgttcaaatggtctacgtgctattgaacttaatgaagaagataccttaattggtgttgcgattactgatggtaatcagcaaatcatgttgttctctaacgaaggtaaagcaattcgttttgctgaaactgacgtacgtgcaatgggtcgtacagcgaaaggtgtacgtggtatgcgtgtaagctttgcaagcagcaccttaagtgaagaagatgcagatgttgaaaatgatgattcagatgataatgatgattcagcagattcaagtctagtaagtcgcatcgtatcgcttgttgttgtacctgagacaggcgaagtactgtgcgcgagtgccaacggttatggtaaacgtactccagtaaatgacttcccgaccaagaaacgtggtggtaagggtgttattgcgatcaagacaagtgaacgtaacggtgagctagttggtgcagtttctattgatgaaaccaaagagttattattaatttctgatggtggtacgcttgttcgtacgcgtgctgcagaagttgcaatgacaggccgtaatgctcaaggtgttcgtctgatccgtttaagcgaagaagaaacgctcgttggcgtagtttcaattgaagctgtagaagacgaagaagaacttcttgaaggtgaagtagatacgactgaaactgatagcgaagaagctgtatctaataatgaagatacttctgaagag

SEQ ID NO: 8911 - DNA, 1668 bp, Acinetobacter baumannii
atgagtaaatcaattgaacaattcccaaaggatttaagctcacctttaatacagcttaagtcttcagttgagaaaaactcaaaactacatataaaagagctttttgctttagagccagaacgttttcaaaattattctgtaaaatttgatcagttattttttgattatagtaaacaacgtattaccaaaaatattttggaacaactagttgctctcgcaaacaataaacaattaacacagtggattaatcgtcttttttcgcaagataaaattaattgtactgagcagcgtgaagcaatgcattgggctttgcgtttaccctcggaatattcgaaatttccggagctcacaaaacaggttcatactcaattacagcgtatgtatgttttggttgaaaaaatccatgctgggcaataccgcggtgctacgggtgaagtgattcaggatgtcgttaatattggtgtaggtggttccgatttagggcctcaaatggtgacccatgcactatgcgattttaaagtaaaaactgccaaaccacttaatgtacactttgtttcgactatggatggtagccagttatcagacctactccatcaactgcgtccggaaacaactttatttattatttcttcaaagtcatttggtaccattgataccttatcaaatgcacagacagttcgtcagtggcttgaaaaagctttaggaaaacatgatcgcgttgtaaaaagtcacttcattggtgtatctacaaaagctgaaaaaatgactgagtgggggattgctcctgaaaatcagttgttgctttgggactgggtaggtggacgttattctctttggtcttgtattggtttccctatagccctaacgattggtatagatggctttcaacagcttttggctggcgcacatgctgttgatgaacactttcaaaatacaaactttgagcaaaatataccggttctcatggcattactcggtatctggaataataattttttaaatattcaaacccatgcggtattaccttatgacggaagattaaagtattttgctgcctatttgcagcagcttgaaatggagtctaatggtaagtcggtacaacgtgatggccaaaaagttgaattagatacttgtccgattgtatggggtgaggttggtccaaatgcccaacatgcattttatcagctacttcatcaaggaacacaggcagtaagctgtgatttcattgcaccgatccaacgttataatgcagatcactttacgtatgtggagaatgctgaggcattgattgaacaacatcacctcgcattatcaaattgtttggcgcaatcacgtttattggcttttggtaatgaagctttggattcagctgaactaaagaatttaccaatttataaacaatatgaaggtaatcagccgagttcgacattacttttaaaagaactaaatccatatagtttagggatgttaattgctttatatgaacataaggtatttgttcagtcggtaatttggaatattaatccgtttgatcaatggggtgttgaaaaaggtaagcagattgctgatcagttacttccaattttaaatggtgctcaaaatgatctttcaacacttgatgcttcaacacgtggtttgattaaaattttattaggaaaagtcgatggc

SEQ ID NO: 8912 - DNA, 714 bp, Acinetobacter baumannii
atgagacacctccatcaccagacatcccagactaaattatgggcagttatccctgcggctggttcaggtagtcggttttccaaaactgaattaaagcaataccaatatattcaagatgctactgttatagaacatactgttaagcgtttaagtcagcttccgctgacgggttatgttttggcaattggaaaacaagatacttttgcctcaactttatcttttcaagataagcataaagcgcatttttgtaatggaggcgttgaacgtgtgcactcggtattaaatgctctgaattatctatcacagattgcggatgaggatgattgggtattagtacatgatgcagcaaggccttgtgtgacttttgaatgcttgaatactcttgttaaaaatgcaattgagactaatcagagtgctattttggcaattcctgtacgcgatacgctaaaacaagtgaatcaggaacagcaaattgacaaaactgtaagtcgagagctgttgtggcaagctcaaactcctcaaattgctaaaatcggaattcttaaaaaagcgatagaaacagcgctaaaaaataatttgactattactgatgaggcgagtgcacttgaatctataggagagagtgtactggtggtcatggggcgttctgataatataaaaattacttaccccgatgatttagaacttgctcgcttgattctacaatcacaaaat

SEQ ID NO: 8913 - DNA, 1251 bp, Acinetobacter baumannii
atgtttgccaatatttccatttctgaatttgatccagaattagctcaagcaattgcttctgaagatgagcgtcaagaagcacatatcgagttaattgcatctgaaaactattgctctcctgcggtaatggaagcgcaaggatcaaaacttacgaacaaatacgcagaaggttatcctggcaaacgctattatggcggttgcgaatttgtagatgttattgagcaaatggcgattgaccgtgctaaagaactttttggtgcagattacgcaaacgttcaaccacacgctggctcacaagctaactctgctgtttatctagcgcttcttaacccgggcgatacagttttaggtatgagcttggctcacggtggtcacttgactcacggtgcaaaagttagcttctctggtaaaacgtataacgctgttcagtatggtctaaatgctgaaactggtgagattgattacgaagaagttgaacgtttagcattggaacacaagccacgtatgatcgttgctggtttctctgcttatagccgtgttgtggattggcaacgtttccgtgacatcgcggacaaagttggtgcttacctttttgttgatatggctcacgttgctggtcttgttgctgctggtgtatatccaaacccagttcaaattgctgacgtaacaacaacgacgactcacaaaacgcttcgtggtccacgttctggtttaatccttgcgaaagcgaatgaagaaatcgagaaaaaacttcaatcagctgtattccctggtaaccaaggcggtccattaatgcatgcgattgctgctaaagcaatctgcttcaaagaagcaatgtctgacgactttaaagcttaccaacaacaagttgtgaaaaatgctcaagcgatggctgaagtattcatcgctcgtggttatgatgttgtttctggcggtacagacaaccacttattcttgttatctttaatcaaacaagacgtaactggtaaagatgcagacgcttggttaggtgctgctcacattactgtgaacaaaaactcagttccaaatgatccacgttctccatttgtgacttctggtatccgtatcggtactccagcagtaacaactcgtggttttggtgaagctgaagttcgtgaacttgctggttggatcgctgacgtgattgacagcaaaggtgacgaaaaagttattgctgatgtaaaagcaaaagttgaagctgtttgtgcaaaattccctgtatatgcaaaa

SEQ ID NO: 8914 - DNA, 2142 bp, Acinetobacter baumannii
atgaatacaattttattaattcctacaggtgaaggggttggtttaacctctgcctgcttaggtatgatttatgcacttgattgtaatgggattaaagcaggctttttaaaaccgttctctcaggtagatcaagaaaatttagaccgaactacatctttatttggtcatttatttcaaagcaaaactgtccaatccatttctcatgaaaaactaacccaacgcattgcggctggtgaagtcgatgagttacttgaagaagcagtaagtcttcatcgcagtatcgcagcagataataatgtgattattgttgaaggcttattaccaaatgggcaagaccattttgccagtgaacttaatgcaagccttgcacaagcgcttgatgctgaagtggttttagtcagtacagcagatattcaaaacccacgtaaaacagcagagaaagttgaagctcacttacggcagtttggtggtgcaacctctaaccgaacagcgggcgtactctttatgcgtacacgcgggttatctgaagagacagctcaaatacctgtcgcatttgacccgtcgttacgtccaaccgaagacatcgcaaaatttacggcagaattgcaaaaatataaccgctactttggatcaagcgatttaccaattattggtctagttccgtttagtaataccttaagtgtacctagaacattggatatcgcgagcgtgattgatggccaatggataaatcaaggcgaagcaaaaacacgtcgtattttgcactcaagtttaattgcctcaagcattgaatatgaactgaataaattcattgctggcgaactgattattagcgcttctgaacgtaccgatgtattactggcaagtagtctcgccaccagtaatggcattccactggcaggcttggtgttgactgagcgtgaagctcctgctcccaagcttttagagttttgccaaagtgcaattaaacaagggttgccaattttacatacccatttaaatacactagaaactgcgcagcgcctatccgattttggtaatgaaattccaaccgatgacactgaacgtgccgaacaagtgacccgatttgtttcaagtcacatagatgtcgaatggcttaaacagcatagtaataacggtgctataccacgtctttccccttctgcattccgtcatgaactggtgcaaaaatcaattgcagctaaaaaacggattgtccttccagaaggtgatgagccacgcactattgaagctgctactatatgtcaggctcgtggtattgcgcattgtattttgttagcaaaaccagaagctgtacatgacgtagcaaaagcacgtggtatcgagttaccggctgggttagaaattattgatccagatcagatccgtgaccaatatattgcaccaatggttgaactccgcaaaggcaaactcaacgacctacaagctaaagagcaattacaagatactgtagttctcggcaccatgatgctagctctagatcatgtggatggattagtttcgggggcagttcatacaaccgccaatacagtgcgtccagctttccaattgattaaaaccgctccagcatactcactggtttcatccattttctttatgcttttaccggatgaagtctatgtctacggtgactgtgcaattaacccggatcctacagccgaacagcttgccgaaattgcgattcagtctgctgactctgcaaaagcgtttggaattgacccacgtattgccatgatcagctactcaactggtacatctggaacgggtgctgatgttgagaaagtacagcaagcgactcaaattgcacagcaacgtcgccctgatttactgattgacggtccactacaatacgatgcggcttcagttgaaagtgtaggacgccaaaaggcgccagactcacgcgttgctggccgtgccaatgtgtttattttccctgacttaaatacaggcaacacaacctataaagcagtacaacgtgcagcaaatgtagttagcgttgggccaatgctgcaaggcctaaataagccagtcaatgacttgtctcgtggtgctttagtagatgacatcgtctttactattgcattaacagccattcaggccgagcagcaagctgctgccaaa

SEQ ID NO: 8915 - DNA, 1137 bp, Acinetobacter baumannii
atgtggtcatggtggctcagtaaaataaaaaagagtatatcacttgccgaagctcaacaaacaaagttgttttctacagcatatcgaaatcaaaattcctcctatttttttacgaaaattgatcgttggcaacatttattagaattaattatcgcaagtaatgttttagctctggttttagctttggctgaagcgcagtcttggcatgcattaaacggctcacgtcttttacaatatatcgtttttattaactgggtgattttgtctttttttgccttggttgaacattttcaggatttttttagtcagctacagcaaaaatatgctttggtaattggctttgttatgctgcaagcgatagttgtggtaaccaccataataagcaatttttttcagtttggagttttgaaaaaaacatctgttatagcgcaggactggagcatttattttaccaatgtccctttatatttaagttatggaatattattaggggccttttgtctgcgttatttatatgttcgagaacaatggttacaccaacaatatgcagaattaaatgcccgtattcaggcaatgcaggctcgcattcatcctcattttttatttaatagtctaaataatgtggtgagtttaataacgatagatccagataaagcagaaagtatgttaattagcctgtcacgactgtttcgggcgagttttcaagaattaaaattagtgagcttgcatgaagaaattgagcttagtaagcaatatttaatgattgagcaaatacgtttgggcgagcgtttaaaagtcgaatggaaagtggaaattgaacctttgcaattaaaacaggtcactattcctttattgacattacaacctttattagagaatagtatttttcatggggtagagccaatgatgggtaaagcaaccattggggtattggttgaaatattgcaaaatcaggtcagtatagtcattaccaacccttatacacacgatacaataaattcacggaaagggcatggaatcgctcttgaaaatgttaaacagcgcttaaaagcgtattatgggaattcagtgagattccaggtatataagggtgaggctttatataccactattatgagctatcaataccaatcaaaa

SEQ ID NO: 8916 - DNA, 1017 bp, Acinetobacter baumannii
atgaagttattggcttcattactcactttactcattctatgtggatgttcctcatctgagcaaaatagaaaaactcaagaaaactcaacctctcattcaatatgtgtttttgatagtacaaatacaaaagtctgtgtagccaaacctgcccaaagaattgtctctttgtttgagtcgggtttagatggcctctatatgctagggcaaggcgacaaagtaattggtatacctgccgaagtatacattcaacctttattatttaatgcctattcaaaaatagataaacgcattgctaataaacagcttgcagcaccttcgcaaggagccaatgcaaccaatattgaaagtctcgtgttgctaaaaccagatctggtgattgtaggaagcgggcagactcaaacgattgaactgttacggcagtttggcatcgctgtatatgtaatggagtcaggcacctataaacaagtgaaagaagaactgtctgaaattgctattctgagcggcgcccaaaagcgagctcaggaaattttaaatttctctgatgaaattgtggcagaagtcgcagccaaaacggcccgtcagccaaataaacaatcgatttactatgcttggtctggtggacgaattttttctacctctggacgagagtcgattaccaatgactttattgaactcgctggtgcttacaatattgttcagaccaatgctaaccagcctaatgtaaatcccgagactctcattgaatggaaccctgacaatattgtgctttggaataccaacccaaaactgatttatgaacgaaaagaattacagggtttaagcgctgtacaaaaccgaaaggtatttaatttgagtcctgcatttatatataacccgcacaccatcaaaatcattattacagcgatttatctaaatcacagtatttatcctgaacagtctgatttaccagtaagtgctttacaacagcgtattttaaccaagttgtatggtgagcagcttgctaaagtgttgatgcaa

SEQ ID NO: 8917 - DNA, 508 bp, Acinetobacter baumannii
atggctcttcttattgaagacaaaaaacagatcgttgcagaagtaagtgaagttgcttctaaagcgtttgcagccgttgcttgctgactatcaaggtttaagcgtagagcaattaacaacacttcgtgttgaagctcgtaagttaggtgtaactacacgtattgtacgtaacactttggctaaacgcgcatttcaaggtactcagtttgatatcttgaacgacaaccttgttggtccaacaattctaggtttttcaacttctgaagatgacatgggtgcagctgcacgcttgttcgaagaatttgctaaaactaacaaagcatttgaattaaaagctgctgcatttgacggcaaagtttatcaaggtgctgatgttagcgttattgctaatcttccgaaccaagagaaagcgcttactatgcttgcctctgtccttcaagctcctatttcgaaattgggtcgcctcattacagcactcaaagagaaaaacgagtcagaagctgcttaa

SEQ ID NO: 8918 - DNA, 738 bp, Acinetobacter baumannii
atgcaacaaaaacaccccggtagaacactcgtcttatggattatcgcagctcatctatttatgggaatggttgcatacgagtggctgcctgtgagttttagaggaagttggatttttattcttcttcttttaatttcaggtgcttttttagaagtcggtttgtctttaattgtaggtttagtggcttttattggagttgccgtatactttttactcgacttaggcgcacaaacacatattgaacgtcagttacttttactattcattattcccctaataccgctctttctaagtgccgtacgccacaatattgaaattaatgtacagaaataccgtgatattcaaagctatgaccgaaattatcgccgcgatattttcccgctcagtgctttaaaatactttcagcgtagtttttttaaattacttgatcaccacaatgtacaagattatgaagtattcgaaattcgaattcttaatcgcagtctgattaaagaaatgttaggcgatgatgtctggaaaacaactcaaaatgaaatgattaaaattttgagccaacatgaacccaacgagattgttttccagtttgcagatgatgatctggaaaatatttacagtattatgattcgccagcagaaaacagaagaagaccctgtattcttaaaaaaattaaaagaaattacgaccttgcgtcttgaggtggaatacaaaattgttcctcttccacccgaggagatgagc

SEQ ID NO: 8919 - DNA, 1410 bp, Acinetobacter baumannii
atgtcacaaaactccacactacagcggggcttaaacacccgccacattcgtttcttggcattgggctcagcaattggaactgggcttttctatggttcggcaactgctattaaaatggcagggccttcagtattacttgcgtacatcgttgcagggattgcaatttatattgtgatgcgcgcactgggtgaaatggcagtccataaccctgtctctggctcatttagccactatgcttctcaatacattggtcctttggccggctttacgacaggctggacttatgtttttgagatggtgattgttgcaattgccgatgtcactgcgtttggtatttatatggggttctggtatcccgatgtcccacggtggatctggattttgtctctcatcatgttcttgggcgcaattaacctcattcatgtgaaagtctttggtgaactcgaattttggctctcaattgtcaaggtgagtgccattgttgccatgattttaggtggcttaggtttgatgttctatggcttccatgctgaccatagcagtgtagtgccggggattcaaaacttatggatctatgaaggctttatgccacatggcattgcaggcttggttgcatgtttatctgtagtggtatttgctttcggtggtatcgaaattattggtattacagcaggtgaatcacaagacccgaaaaccactttaccgaaagcaattaatgctgttccggtacgtattttacttttctatgtactaaccatctttgtactcatgtcgattttcccatggaaccagattggtagccaaggcagtccgtttgtacaaatttttgaaaacttaggcattaaatctgctgcaaatattttaaatattgtagtggtaactgctgcaatttcggcaattaatagtgatgtgtttggtgcaggccgtatgttgtacggtatggcaaatcgtggtcaagcacctcgaattttccaaaaattatcgcgtaatggcgtgccttggatgactgttgtggttatggctggcgtactgttaattggcgtcgtgctgaactacctgattcctgaaaatgtgtttgtcatcattgcatcaattgcaacgtttgcaactgtttgggtatggctcatgatcttgctttcgcaagtcgcgatgcgccgtaaattatctactgctgaaattaaggcacttgatttccctgtatttggctggccatatgcccctgcttttgcaatcggttttatggtgttcattttagtgatgatgggctacttcccagactcgcgtcctgcaatttatgtaggaatcacttggcttgctctcttaactattgcttatcgtatttgggtaaaaccagagcaaagcttgggaaaggaaagtgagcctgtccagcaaaacatagaaatggaaagc

SEQ ID NO: 8920 - DNA, 825 bp, Acinetobacter baumannii
gtggattttgattttaatttaattcttgttcctgttacgctgattttatttgcagtgtggttgctagataagcttgtttttaaacagcgtgcaaataaagggcgagagaacgaaaattttgttattacatgggcctatgacttttggccggttttagctgttgtgcttgtacttcgctcatttctttatgaaccatttaatattccatcagactctatggttccgaccttagagactggcgattttattttagttaataaatttgactatggtgtccgtttacctatcgtcaataaaaaagtgattgatatcggtgaaccgaaacgtggtgacgtcattgtattccgttatccgccacaacctactattagttatattaaacgtgtaattggcttacctggtgaccatattgtttatgatcatggacaattgattattaatggtcaaaaaattcctaaagtaccaacacagtttagtcgcgaaaaagatgctttagatacaccaacttctatttatcataaagaaacaattggtgatcatacttttacgatgcgtgagcttgaaggcgtaaatgttgcgcgtcaggcaccatttatcaactatgttgataatggtaaatatgcaaaccaagacggtttatattgggaagtaacagttccgaaaggacattactttgcaatgggggataaccgtgatcaaagtgctgacagtcgtttctggggctttgtacctgaagaaaatttaacaggccgagctttctatgtctggatgcataaagaacctggtttccacctgccaagctttaaccgaaatgggaaaatagat

SEQ ID NO: 8921 - DNA, 1518 bp, Acinetobacter baumannii
atgcttgatcaatcaaaagaaataaaagtgtgcacttatctcggcctcaccactttaattttaagtgtagcccttgttgggtgtggtggtggtagcagtagcggaggttcatctaacacgcctaaaccgtctgaacccactcctgaagtcatgacggatattacgcttaaaacccctgtcgaaatgcgcaatgttcaactcaaggtatatgataataccgacaatagtattttgattgatacccaagttgccagtttaacgagttacgatattaaacttccaagcacaaaactaaatcgtctttatcgtgttgaagtcacgacccaaggctcatctcaagtatttgatccaaccaaatctgaatatcaaaatatttctggtgtttatcacgcttttattaccccaagctcgataagcaataaaacacaattgatcagcccaagttcagaagcaatttatcaacgtgctgtgattcgttcaggtcagttgcctaatgagacaattatcccaacccgtattgaacaattacatgttgacttagcctctcaagatgtctacagatctcttcttaatgcgtttaaagataccaatattccaagtttaagtccggcaagtacgcttacaattttaaatttattgaaatactcaaccacaaagccaagtacttatgtggatagttatctaagctttggttatcttcaatattggtcaagcatccataatacgaattcaccttatcaagatctcacccaaagtctcgctacagatttaaaagatggatatttagacggcaaaaaacttattggggacaaatcatcttttacccctatcttcacctcagcccctgataatattgatccagcaaaaaacacacttttagatatcgcagctaatcaaaaggtaacacgtgattattttgccactaatctaagagcagccacctttaaactagcagatttgcaagatcaatcccatttagacccaataggttatgatctactggacaagaaacaatattcggggattatacctgctggtaatacatctgaatttttccgtatagatggtgcgggagattaccgacgtgctgttggctttagtggtattacaacgacctgcaatggttcggcttatccgtgtaaacaaggtttaactagtatcaatatttctgacccaaaactaccagctacagactatttagttggtcactatgaagacagtacaacaggctgccaacttaacttccgtgctaatggtcaaattgaattaattaaaggctctcaaagctatcgctctgccttaagcgcagatagtacagataacttactgcaaaccgacgctgcaagttatagttatttacttaactcaagttcatccgaacctaacaattcaacacagcaatataattttatacagctacatattaaagcgaacaagattgttagtgctcaagcaggccttgatagccgcaaagcaccagatgtcttacaaacaacacaattagagtgtagctttagc

SEQ ID NO: 8922 - DNA, 1119 bp, Acinetobacter baumannii
atgccgctgagtcgtgttgaagaacttgtcgccgatattcgtgcaggcaaaatggtcatcttaatggatgacgaagaccgtgaaaatgaaggtgaccttgtcatcgcagcaacgcatgtacgccctgaagatattaacttcatgattacacatgcacgcggtttagtttgcttaactttaagccgtgaacgttgtaaacaattaaacctcccgctgatggttgaccagaacggtgcccagcatggtactaactttacgttatctatcgaagcagctgaaggtattactacaggtatttcggcagcagaacgtgctcacacgattcaagctgctgtggcagcacatgccaaaccaaccgatattgtacaaccgggccatattttcccactcatggcacagccaggtggtgtattacaccgtgcaggtcataccgaggcaggttgtgatttagcacgactagcaggtcttgagcctgcatctgtcatttgtgaaatcatcaaagaagatggcacaatggcacgccgcgcagatttagaaatttttgctgagaagcatggcctaaaaattggtacaattgccgacctaatccactaccgtatgaccaatgagcaaactgtagaacgtttggatcaaagaacgattcaaacagaatatggttcatttgagctctatcgctatcgtgagataggtaaccctgacattcatttggctttagtcaaaggtgagccaaaagaaggtgttacaacggtacgtgtacatggttttagtcctgttcgcgatttgcttaagctaaataaagctgacggtgaaccggcttggaatctagaccgtgcgctacaaacgattgcagcaagtgaccgcggcgttttagtctggatcggacaagatcatttgcaagacttgggaccagcgttggatgatttaactaagccaaaaccggtgaaatccaatgcagcactttcacatcaatatcaaaccattggtgttggtgctcaaattttgcgtgatttaggtgttgaaaaaatgaagcttctgagctcaccattgcgtttcaatgccttatctggctttaatttagaagtagtggaatatgtcactgctgatcaaatcacaacgaaa

SEQ ID NO: 8923 - DNA, 1149 bp, Acinetobacter baumannii
atgattatttcttctggcaatgattatcgtgctgcggcacaacgtcgcttacccccatttttatttcactatattgatggtggagcgtatgcggaatataccttaaagcgtaacgtacaagatttgtcagaaattgcattgcgtcaacgtgtgctgaatgacatgtccgcgttaagtttagagacaaaactgtttaatgaaacgctgtcgatgccagttgccttggctcctgtgggtttaacaggtatgtatgcacgccgtggtgaagtgcaagccgcaatggcagccgataaaaaaggtattccatttacgctttcaacggtttctgtttgtccgattgaggaagttgcacctgcaattaaccgtccaatgtggttccagctttatgtattacgcgatcgaggttttatgcgtaatgctttggaacgtgcaaaagcagcaggttgttcaacactggtatttaccgtagatatgcctgtaccaggtgcacgttatcgtgatgctcattcgggtatgagtgggccaaatgctgcgatgcgtcgttatatgcagtcagtgtttcacccacactggtcatggaacgttggcttaatgggacgtccgcatgacctcgggaatatctctaaatatttaggtaaaccgactgggcttgaagactatatcggctggttaggctcgaactttgacccatccatttcatggaaagaccttgagtggattcgtgagttttgggatggcccaatggtgattaaaggtattttagatcctgaagatgccaaagatgctgtgcgttttggtgcagatggcattgtggtatcgaatcacggtggtcgtcagttagatggcgtgatgtcttctgctcgtgcattgcctgcaattgctgatgcagtcaaaggtgacttagcaattttggctgactcaggcattcgtaatggtttagacgtggtgcgcatgttggcgcttggtgcggatacggttttacttggccgtgcgtttgtttatgccttggcagcagcaggtggacaaggtgtgtcgaacttacttgatttaattgataaggaaatgcgtgttgcgatgaccttaacgggtgctaagtcgatttcggatattaatgcggattgtttagtacaggcgattaaacaaggactt

SEQ ID NO: 8924 - DNA, 912 bp, Acinetobacter baumannii
atgcctgagcatccagaatggttaaataaacaagacttgcttagttttgaagcgctctttcaattttgtcattttatggtgcagcaaggtatccaaagtattcgcattacgggtggtgaaccattaatgcgtcaaggtattgttcatttcattcgagatctacagtctttaaaaagtttaggtttaaaacgtatatcgatgactaccaatggtcattaccttgctaaacatgccaagcagctaaaagacgctggattagatgatttaaacattagtttagatagtttagatcctgttcagtttaaagagttgaccaagaaaaaattggaacctgttttagaggggatacaagctgcaaaagaagtaggattaccttttaaaattaactgcgtgttaatgaaagatagaaatgatgatcaaatcttacctatggtgaaatggtcaattgctcatcatattcctttgcgttttatcgagtttatgccgcttgatggtgatgcactttggtcaaataaagatgtggtaagtgaggctgaaattttacaggtattgcaaccgtattattcggtacaagtcatcgagcagcaacatgagccagcgcgtcaatatctaattaacggtagctaccatttaggaattatttccacaattacacattcattttgccaccaatgtgaccgtatacggcttaccgcaaaaggcgaactatataactgtttatttgcgccagaaggcttaaatattaagcctcagcttcaaacgctggtaagcaaacaacatactccagaatacggtatgtatatccaaaaattaaagaatttggttcatccttatatctggcataaagccaaaggtttccatgccttacaacatcaacaaacccgtaaaatcagcatgcatatgcttggggga

SEQ ID NO: 8925 - DNA, 693 bp, Acinetobacter baumannii
atggcaaagttaactaaacgtcaaaaagccattgctgctgctgttgaagcgaacaaagtttacactttggaagaagcagtacaggttcttaacagcttgcctgctgcaaagttcaaagaatctttagacatctctgtaaaccttggcgtagatccacgtaaatctgatcaggttgttcgtggtgcgactacattacctgcaggtactggtaaaactgtacgtgtagctgtatttgctcaaggcgcgcaagcagaagctgcgaaagaagctggtgctgatgttgtaggttttgatgaccttgctgaaagcatccaaggtggaaaccttgactttgatgttgtaatcgctgctcctgacgctatgcgtgttgttggtaagctcggtacaattcttggtccacgtggtttaatgccaaaccctaaagttggtactgtaactcctgacgttgctggcgctgttaaaaacgctaaatctggtcaggcacgttaccgtgtagacaaagcgggtattattcacgctgcgattggtcaagttggctttgatgctgctgcaatccgtcaaaacgttgaaactttagttgctgacttgaaaaagttaaaacctgcaacttctaaaggtgtatacatcaagaagatcactttgagctcaactatgggtcctggtcttactgttgatgtaaacaacgtttctaac

SEQ ID NO: 8926 - DNA, 792 bp, Acinetobacter baumannii
atgggtcgtcttgccgttaacttatccatgatttttaccgaagttcctttaattgaacgctttgcattagcccatgcagagggctttgaacatgtagaaattcaattcccatacgagcttgccatttctgatattcaagaccaacttgaacgttacaacctaaatttatgtttaattaacgttcctgctggtgaccttatgcaaggtggaaatggcttagcaggtataccgggtcaagaggctgcatttcgtgaggcattacagttagcgattcgctatgccacagcattaaaagtacctcgtgttaatattttggcaggtaagcaacctcaagactctgacttactcccttgccttaagacacttgcaagcaacttaaaattagcctgtgatttactgacagaacacgatattgaacctgtatttgaaatgattaatggcacagatatgccacgctttttggtacagaacattgcccaagcccaagaaatgctagaagcagtcaatcaccctgccttaaaaatgcaatatgactgttaccatatggcaatgatgggtgaagatgtacttgaagggttacaagaaaatattcaccagattggccatattcagtttgcagattgtccgggacgccatgaacccgatacagctcaaataccgtatgagcaaattttttcatggattaagcaaagtgcttatgagggctatattgcggcagaatataaacctaaaaatggctcaaatcagtcatttacatggaaaaagaaatatttttccgatgatgtaaatata

SEQ ID NO: 8927 - DNA, 3831 bp, Acinetobacter baumannii
atgtttatcgtggccggtgcagcagcacattcttcttttaagaaagctcaactattaacacgtttatcgtcaattagttctgttcaatcttttgacagccaatgggtctatttgtttgatcaagcgctcaacgagcagcaacatcaatctgctttgcaattattaaatgacggtgagtcttttgaacttcgtcaacctgcaagtgatgagattcagattttagtaacaccacgcgtgggtacgatttcaccttggtcatctaaagcgactgacattttcaaaaactgtaatactccagttcaccgtttagaacgtggtcttttattcactttaaaaggtgtttctgaaatttctaatgaagtaaaacaagtacttcatgaccgtatgactgaaactgtttttgcacaaattgaagatgcaaaagcactattttcagaaacagcaccaaaacctttaaattcaattgatattttaggtcaaggtaaagaagcattagtaaaagccaacaacgaatttggttttgcgttatctgaacaagaaattgattatttaactgaagcatttactcgacttggtcgtaacccaaatgacatcgagttgatgatgtttgcacaagcaaactctgaacactgtcgtcataaaatcttcggttctgaatggacaattgatggtgaaaaacaaccattatcattgttccaaatgattaaaaacacttataaagaatctccaactgacgtgttatcggcatataaagataacgcatctgtaattgttggttatgacacgatgcgtttttatccgaaagcagatgaaaacggtcattttgtttacaaatataagagccaagctgctcacattttaatgaaggttgaaactcacaaccacccaacagcaatttctccatttgctggcgcagcaacaggttcaggcggtgaaatccgtgatgaaggtgcaactggtcgtggtggtaaaccgaaagcaggtttaacaggctttacagtttctaacttaaatattcctggttttgaacaaccttgggaagaaaactacggtaaaccttcacgtatggcatcgccattacaaattatgattgaaggtccattaggtggcgcggcatttaacaatgaattcggccgtcctgcattaaatggctatttccgtactttcgaacaaaacgtaaatggtgaagtgaagggcttccataagccaatcatgatcgcgggtggttacggtaacattcgtcctgaccatgtagaaaaagatgcgattcaaccgggtgacttgctcattgtattgggtggccctgcgatgttaatcggtcttggtggtggcgcagcctcttctgtagacagcggtacaatgggtgaaagccttgatttcgcatctgtacaacgtgaaaacccagaaatggaacgccgttgtcaggaagtgattgatacttgctggcgtttagaagactttaacccaatcgtgtctattcatgacgtaggtgctggtggtttatcaaatgcaatgcctgagcttgtaaacgatcatgagttaggtgcagttcttaaccttcgtaagattccttcattagagccgggcatgagcccaatggaaatctggtcaaatgaagcacaagagcgttatgttcttgcaattcgtccagagtctttagaacagttcgaatcaatctgtgctcgtgaacgttgtccatttgccgtgttaggtgaagcaactgaagctcgtcacttaactgttgaagatccattgttccaaaacaacgcagttgatatcccaatgcaagtgatgcttggtggtacaccgcgtatgcaacgttcttatgaaacaattgaacgtaaaggcaacgaatttgacgcttcaaaagttgatttgaaagatgcgattttccgtgtattgaaaaatcctacagttgcgtctaaatcattcttgatcaccattggtgaccgttcaattacaggtatggttgcacgtgaccaaatggttggtcgttggcagattcctgttgcagatgcagcagtaacgactaccagcctacaaggcttcactggtgaagcaatggcaatgggtgaacgtccaccagttgcattgttaaatccagcagcgtctgctcgcttggcagttgctgaagcaattaccaatattgcatgtgcaaacattgaacaaattagcgatatcaaactttctgcaaactggatggctgctgctggtcaaaaaggtgaagaccaagcattgtttgaaggtgtaaaagcaattggtatggaaatgtgtcctgctttaggaattgcgattcctgtaggtaaagactcactttcaatgcgtaccacttggaacgataacggtgaagataaagctgtaacatctccaatgactggtgtaattactgcatttgctccagtagctgatgttcgtaagactttaacacctgaacttaagaatttagaagactcagtacttgtccgtattgatttatctaaaggacaattccgtttaggtggttcgattcttgcgcaagtatataaagcaattggttcagtcactccagatgttgatagttttgatgatttcaaagcgttctttgctttaattcaagactggaataaccgtggcgtgattcaggcttaccatgacatcggtgatggtggtttactcgcaactgtagctgaaatgatgttcgcttcgcgtttaggtgtagcattagaagatcagactactgctggtttatttgcagaagaaattggtgcagtagttcaaatcaaagcagctgattgggaagctttacaagcagaagtagctgcttctagcttaaaagatgcaattgctgtagttggtcgcgtaaataatactgatcaattatctgtaaatggcttaactttagagcgtgctgagttacaacaggcttggtctgaagtatctcatcagatccaacgtttacgtgataacgttgaaactgctgaccaagaatttgctttaattactgataaatcacatcagggtttaattgcaaaacctacatttgatttaaatgaacctatcgaagcaccgtttattaatagccgtcgtccgaatatggcaatcttgcgtgagcagggtgtaaatggtcatattgaaatggctgcagctttcgataaagttggctttaacacaattgacgtacatatgagcgacttacttgctggtcgtgtgagcctaagtgatttcgaaggtttagtgacttgtggcggtttctcttacggtgacgtaatgggtgcaggcggtggctgggcaaaatcagttctgttcaatgcaaaactacgtgatcagtttgagcaattcttccaccgtgaaggtacatttagcttaggtatctgtaatggttgccaaatgttgtcacaattagcgccacttattccgggtgctgaacactggccacgtttccaccgcaatatgtcagaagtttttgaagcacgtagcgtaaacgttcgtgttgaaaaatcagtttctgtattacttgatggtatggaaggttcaattttaccgattgctgtagcacatggtgaaggccgtgcggttgctagcgaagctgatattgcaagcttaaatgcagcgaatcaggttgcattgcgttatgttgacagccatggtaacccgactcaacattatccattgaacccaaatggttcaccggaagcgattacgggcgtaacgtctaaagatggtcgtgcaacgattatgatgccgcaccctgagcgtactttccgtgctatccagcattcttggaaaccagaagagtggactgaagacggtgcttggttacgtatgttccgtaacgcacgtaagtttattggt

SEQ ID NO: 8928 - DNA, 1557 bp, Acinetobacter baumannii
atgagagcatactttgaaaagctgttagattcttcgcaacaacaaaaacagcttcctttaatttttccattgctcattgctttattttcaggtgccgtgttcagttttgcactggcaccttattattggtggtggctggcaattttgtctcctgctctactctatgcgacattgcataaccgctcagccaaacaagcatttgcaattggctggagctatggctttggtttatggtttgtcggggctttctggctctatacgtcgatccatgtatatggcgataccaatgcttttctaagcgtatgtatgattgctgttatggcccttgtgatgggtttatttacagcatttcagacatggatttatcgacgcttcttccctgaaacaccgctgactttcgcccctctctggattatttttgagtgggctaaaacttgggtatttactggtttcccttggctgtttgtaggttacgcttttactgaacgtttactcgatggttatgctccgctatttggtatttatgcaatttcctttgtagtaattgtattggcatgtgctttagttgaaattctacgtaagcgtattttctggattatccctgctgccctattggttttgggtgcatggggagcatcatatattcagtttgtacaacctaaagcggctaaaccgcttagcgtttcgctcattcaaggtaacattccacaagatttaaaatggctaactgaatatcaagttagaacattagaaatttatgctggtttgactcaatctgaatggggccgtgacctcattgtatggcctgagtcttcaattccactcttccaaaccgacattgaaccgtttttggatgcaatggatgcacaagctaaaaagaaccataccgcttgggtaactggcataccttattgggatgtagcgaaatcgcatcaagtcggaagtccactgtattacaacagtattatggcctctggcagcgattcaagcggcctttataaaaagcagcgtctcgtaccttttggtgaatatattccgctgtcaggtttgctttcttgggtgttaccagccatgcaaaatgatattagcatgagcggttttacacgtggtgagagtgatcagaaaccacttttaattaaagggcacgcgcttgcggctgcaatttgttatgaagtggcttacccgaatctgacacgtcgtaatgcagaagatagcgactttttggtaactgtatctaacgatgcttggtttacgggtactgctgggccttggcaacatttacaaatggtgcagatgcgtgcgaaagaaaatggtcgctggtttattcgtgcaactaacacaggagtaacagcgtttattgatcaaaatggtcatatcactgaacaagcaccgattgataaagagtttgtcttgagaggcgatttaccagccatgcaaggtcaaactctctataaccgtctaggtgattatccaattttaggttttgcaatattactgctggttttaggttggatctatcgtccacgtaaagtagacgtgtcttacaaatcacgtcgc

SEQ ID NO: 8929 - DNA, 273 bp, Acinetobacter baumannii
atgcctaatcaggttgaagacaaaaaaaagattcttctacgcgtcagaaagatcaaaggtcagacacaagcgattgaaaaagcgctagaagacaatgtggaatgtggtgcgattctgcaacaaatatgctctgtgcgtggtgctattaatggtctaatgaatgagatgttagaggttcatttaaaggacactttagtatcaggtgaaaccacagaacaacaacgaaaagaagaattggctgaaatcgccaagattctaaaatcatatttaaaa

SEQ ID NO: 8930 - DNA, 1344 bp, Acinetobacter baumannii
atgtcttcaaatattaatttagatgcaaaaaaagcgactgaaattaaattattcagtttttcaaccccagctatgcgtgctttccacatgacttggctcgcgttctttgtctgcttcttcgcatggtttgcttgcgctccattaatgcccgttattaaaggtgagttcggcttaaccaaagatcaaattgccaatattaatattgccgccgttgcaattacaattttagtgcggcttgctgtcggaccactttgtgataaatatggtccgcgtattacttacaccacccttctcttacttggcagtattcctgtatttggtgttgccgctgccaacagctatgaatcttttcttttcttccgtttactcatcggtgcaattggcgcaagctttgtcattacgcaatatcataccagtatcatgtttgcaccaaatgtcgtaggcacagcaaatgcagctgctgcgggttggggtaatgctggcggtggtgcaacacaagctctaatgcctttattactcggtgcaattgtaatgttcggtgtcgagcaaactatgggttggcgcgttgcattaatcgtaccaggcgtaatgatggtaattgttggggttctttactggaaacttacccaagattgtcctcaaggaaactttaaagaagttcgtgcacaaggtattgaggtgggtagcggtaaaaagggtggcatggcaatcttaatgcaagcggctcgtaactaccgtgtctggattttattcctcgcttatggtgcttgctttggtattgaaattttcatccataatgttgcggcaatgtactatgttgaccaattcaaaatggatttaaaaacagcagggttaaccgcaggtatatttggtcttcttgccttatttgcacgtgcattaggtggtattatttccgataaagtcgcacttaaaaaaggtttagacggacgtactaaagtgcttgtactgatgattttaggcgaaggtttattcttaatactcttctctcaaatgaacgtcgtagctcttgcaattatttccatgacagtttttgcattgtttacccatatggcttgcggagcaacatatgcactagtcccttttattgaccgaaatgcattaggcggcgtcgcaggtattattggcgcaggtggaaatgtgggcgcagtagcagctggtttcttactaaaaggcgtacttgatattcaaacttgtctatttattttaggtggactggttatggttgcaggctgtagtgtaattttgattcgcttcacaaccgagcacaaagaaaaagaaaaagtactttttgaacaggctctacttgaacgcaattccgcagcc

SEQ ID NO: 8931 - DNA, 2052 bp, Acinetobacter baumannii
atgggtcatgttgattacgatagcacattgatcgtcggctcttttattgcggctggcgctatttgctatattgtgatttccatggagcagttaatatttaagcaaacttataaaaagattgagccgtttattctattactcaatggattattactcgcagcagcgattagtattgtccatattgtcggcatgcatgcttaccatttatttgaagcagcttcctcgaacgttcctttaattacactggcttttggaattagtgctgtactttcaagtgtcgcaatttggctgacttctcgttttacacttcctatatttagactcattttaagctcagtcattatgggaattggaatttctgcttcttattatgtgagtatgttaggctggaatattgatatttataagaaagactacacttcctttcttattttattttctgtcttaattgccatgagcgggtcggggctagctttcttgctggcctataaattaaaagaaagtgaacggcaccgtataagtttaaaattagcctttgcagtgatgatgaccctaagtattatggggatgcactatacggcacttatttcgacaaatattaccgataagtttgtaagccaatatcaggctgaacatgacttgctactatttacaattattttggttacctgtctggtgctggtcgcgagttttattgttgccgtgctggaacaacgactgaaccagcgaaatctagaactgcgcaaagccaataaagaattagccaacctttctattcaagataacttaactaaattaccaaaccgactttatttagtggattacgccgaagtcctcctgtcagatcaccgttataaagaccaaaaaattgcttttctctatattgatttagaccgttttaaatcggtaaatgatgcgtttggacaccacattggtgatcaactgcttatacaaatggccaatcggttacattggcaactcaatgaaaaatgtaaattgcttagaattggtggggatgagtttttactcattgctgaaaacactgatactgaagaggcaatgcaacttgctgaaaaagtattacatcttattcaagacagttaccaaatttccggtaaagaaattaatatttcagcaagtctaggtatcgcactattccctgaacatgggcaaaatgttcaagacctgctaatgaatgccgatgctgccatgctgatgtctaaagagcagggccgcaatacttataccgtctttagttattctacccatcaacaagaaacaagaagtcagtcaaaactgatcaatgatttatacaaagcagtcgaagaaaaacaatttgttctctactaccagccaaaatttaataccaatcttgagatttgtggggtagaagcactcattcgctggaaccatccatctttaggtatgctgacaccgcatatgtttattggtggcgcggaaaagacaggtttaattattccaatgggatattgggcgcttgagcaagcttgccaacaaattcaggaatgggaacgtagcaatacgcagttttatccaatcgcagtcaatttatctgccttgcggttcgaaaataaaaagctctttagtactctcgaaggtttgttaaaaaaatatcaaattcagccgcatcacctcattattgaaattaccgaatcaaccgcaatgcggcatatcgacttaagcattcgtgcttgtgagcgactgcgcgatatgggcattcgtgtggcaattgatgactttggaacagggcactcaagcttcttatatttaaaagatttaccagtcgatgaacttaaaattgaccgtggatttattgtcgatttaaaaccgggctcaaaagaagaagtcattttagaaagtattattcatttggcgaaaaagttaggtttaaccgtaacagccgaaggggtggagacacagcaacaagttgagattttaacacgcttgggctgtcagcagttccaaggttatttgttgggtatgcctgtaaatgtagggcaactgattcagtcgcaaggtgctcattttgtt

SEQ ID NO: 8932 - DNA, 1833 bp, Acinetobacter baumannii
atgggcgcgataaaccctaaagaagattattcaaatattcaaaacctcactttcgatgctgttatcgttggtggtggtggttctggtatgcgtgcatcttaccaacttgctcaagcaggtttgaaagttgcagtacttactaaagttttcccaacacgttcacatacagttgctgctcagggcggtattggtgcgtcgttaggtaacatgcaagaagataactggcatttccacttttacgatacagtaaaaggttctgactggttaggtgaccaagacgcaatcgagtttatgtgtcgtgaggcgccaaaagttgtttatgaacttgaacacttaggtatgccgtttgaccgtaacgctgatggtacaatttaccaacgtccattcggtggtcactctgcaaactatggtgataaaccagttccacgtgcttgtgctgctgctgaccgtactggtcacgctttattgcacacgctttatcaaagcaacgtgaaaatgggtactcaattcttcgttgagtggatcgctcttgatttgatccgtaacgaagcaggtgatgtactcggtgtaactgcaattgaccaagaaactggtaacattgcagtattccaagcaaaagcaacattatttgcaactggtggtgctggtcgtgtttaccgtgcatcaacaaatgcttatatcaacactggtgacggtcttggtatggctgctcgtgctggtattccattacaagatatggaattctggcaattccaccctacaggtgttgcgggcgcaggcgtattgttgactgaaggttgtcgtggtgaaggtgcgatccttcgtaacaaagacggcgaaccattcatggaacgttatgcaccaactttaaaagacttggctccgcgtgacttcgtatcacgttctatggaccaagaaattaaagaaggtcgtggttgtggtccaaaaggtgattatatcttgcttgatatgactcacttgggtgctgacacaattatgaagcgtttaccatctgtatttgagattggtaaaaaattcgcaaacgttgacatcactaaagaaccaattccagtagtaccaacaatccattatcaaatgggtggtattcctacgaatatgcatggtcaagtgtgcttaccagagcctggtacagacaactacactaaacctgtaaaaggtttctatgcaatcggtgagtgttcatgcgtatcagtacatggtgcgaaccgtttaggtactaactcacttcttgacttggttgtatttggtaaggctgctggtgagcacattatcgattacgtaactaaacatcatggtgatgaatatgcgccgcttccaacaaatgtattagagcaaactttagctcgtgtacgtaaattggatgaatcaacttctggcgaaaatgctcaagaagttgctgatgcaattcgtgatatcgttcaagaccacgcaggtgtattccgtactcaagcattgcttgataagggtgttaaagagattcttgctcttgaaccacgcgtgcgtaacatccacttgaaagataaatctaaagtatttaacactgcacgtgttgaagcgcttgaagttgaaaacttatatgaagttgcaaaagctacattaatttcagctgctgcgcgtaaagaatgtcgtggtgcgcatacggtagttgattatgaattaccagctgatcacccaacttattcatacggtcgccgtgatgatgagtggatgaaacatactttatggtattcatcagataaccgtttggaatataagccagtgcgcttcaagccgttaactgttgatccaattccaccagcaccacgtacattc

SEQ ID NO: 8933 - DNA, 327 bp, Acinetobacter baumannii
atgaatttatcttatttaaaaacaagcctgtatacagccgctacaacagcgattttactttgctcaagtcaaagtcaggcacagcaatattataaatggatggatcaaagtggctcgacacattacaccacgacgccaccacctaaaggagcgaaacatttgaacaaagtttcgacttacggcagtcaaccattgttgaaaaatccaacatcaaacttagaacaaccatctcaggataaagtcgtgcaagaagtaactaacgtagcagtggaaaaaggtgcacctgctgtcccggtcccacctgccccgtctgtatcggcaccaaga

SEQ ID NO: 8934 - DNA, 534 bp, Acinetobacter baumannii
gtggcacgtcgtcccaagcgttatactgaagaagattttgattctttagaaggacgtgcaagtaaaaccgaacagaaaaaagcagttcaacgtatggctgctttaggtgagcagttagcacaactttctatcaaacaaattcaaaaacttcctgttgatgagcgtttaattgatgctcttttggaagttcagaatattagttcgttcgaagcgcgccgtcgtcagtttcagcgtgttggtaaactcttgcgcaatgaagatgagacagtcattttatcttatttgacccctcagcaaggcgcgaagaaacaagctcaactcatgcgttgggtagatcgtatgatcgagcagggtgaccctgcaatcaatgagtttagcaaaatctataatgcatcagaacgacatactttacgccagcatgtcttaagaattaatcgtgataaaacccagcaagttgcagaagcagatcttgaagcaactaaaatgaaatttattaactatgtacaacaggttgctctattgtcagatcaaggt

SEQ ID NO: 8935 - DNA, 615 bp, Acinetobacter baumannii
atggaagagcacttgctaacacaaaagttacagcaaagattgcgcttttccacccgcatacaagaagcacaagctgcggtacttattgcgattacgaatgaaaataatcctaaggtactgcttacacgccgttcaatacatatgaacaaccatgcgggggaagtttcttttcctggtggcaagcgtgaccctagtgatactagtaatattgttgtagcgctaagagaagcccaagaagagacggctttaaatccgtttgatgtgcagttgttaggcgatttgccgatgcaacgtgcaagaagtggcttgtctgtaaaaccgattgttgggcttattcctcctgaggtaactttaattcctcagcccaccgaaattgatcgaattttctttgtgcctttacagcaacttatagagacgcgtccgacgccatatgaagtgcgatatgctcatcaatctttatacttcccaagcttgcagattgataatgaaattatttgggggctcacagcgcgaatgttaattgccttatttaaatatggtttaggctaccaaaaagaatggccatttctactgaatgcaccaacgtttggaatgccaaaattttctcataaaaaa

SEQ ID NO: 8936 - DNA, 420 bp, Acinetobacter baumannii
atgaaagcaactaaattgattagagataaaggactgcaatacgcgaaggaaatcgtagattcagcacccgataacgcaactgaatggaacgagggttatgagttccaatgtggtcaaagtgtagaaatcagcccagcagatcgtgagaagtattttgtagatttggttgagcttaaacgtctggtggagtctttgaaaatcatcaacgatttaggtggagttgagaagctaacgcctgcattcattacgacagataagcatgttggttacacgcatgttcgcatggtgggaaatgggagattgagctttcttgatgatttttgcgacttcattccagatggttccatttcaattaagcgtgtgatgactgctatccgcgaccacgaatcaatatacggaggcggtgaatctcatgccaac

SEQ ID NO: 8937 - DNA, 1068 bp, Acinetobacter baumannii
atgcaagcaatcgaaaagagaaattctctattcaattcattaacacaagctgtatttgacaaaaatatggcgaacttctggctacaaaaaataaatcctttatggtctgtgcagcatggactagttcaaattgtaaaaaaagaattcgtagctcatgacactgtgagcctgacattaaaatgcaaccgcttagtgaaaatgggcgcggcaggtcaacatcatccagtgattgttgaaattgcgggccgtcgctatgaacgtacttatagcttgacgcaaattgatgcagagcacttacgtttaacagttaaaaaagttgctgatggtattgtcagtaactggtttattgcagaaagcaaaattggtgatgtttttgagcttgggcagccttatggcgacatgcaacaaaacattcagacaccgaaattaattatgttagctgctggtagtggtattacaccaatgttgagcttaatcacagcaattaagcaaagccaacagttagaaaaaacgcaggttcagcttttatattgggtcaaacagcgttctgatgctgcttttacagagtactttgaacaagtggctgaacaaaacccaaactttagctatcaggtgttttacacacaagaaacaccaaatgatgaacgtttaaatgccgaacatcttgcactggttgatggtattgaaaacagcacagtttatgcatgtggtccatcgggttttgtttcaactgttgaacagctttttgaaaaagcaccaactgtacttacagaagcatttagtttaactaatgaaagttctgcggatgacattggttatgtgaatgtcacattaacccagtctaataaagtgattgcaattcctaaaggccaatccattttggtcagccttgagcatgaaggccttaagccgacacatggctgtcgtatgggaatttgtaataaatgtgtttgtagtaaaacgcaaggttctacacgtaatttactaaacggtagccaaaatacggaaccaagccaattacttaaaatttgtgtgaactcagcacaatccgatctagttattgatctt

SEQ ID NO: 8938 - DNA, 507 bp, Acinetobacter baumannii
atggcatggcaaaatgtaaaagttgtccacgttgtcgcaatggacaaaaatcactgtattggtaaaggcaatgcgttgccatggcatatctctgccgacttaaaacactttaaagaaatcacacaaggtggtgtggtgatcatgggccgcaaaacgcttgagtctatgggccgtgctctaccgaaccgtgtgaactgggtaattacccgtgacattaactggcattttgacggcgtaaaaattgcgtattcaattgaagatgctttaaatgctgctttagaagatgccaaaaacaccgaaaagcaagctttattcattattggtggtggtgaaatctttaagcaaaccttgtcaattgcagaccgtcttgagctcactcatgttgacttagatgtacaaggtgatgcacattatccaacaataccgagtgaatttcacaaaactgcaagcgaacagcaagtagatgaaaaatcaggaacttcattcgaatttgccacttataaaaaa

SEQ ID NO: 8939 - DNA, 6795 bp, Acinetobacter baumannii
atgaataaagtttacaaggtcatttggaatgcttcgattggagcatgggttgcaacctctgaaattgcaaaaagtaaaacaaagactaaatcaaaaactttaaatgtatcagcggcagttttatcgggtgtaatttgttttgctccaaatgcttttgctgggacaaataccgaagggggaataggccaaggaacatctatttctggtacaacttcatgtcgtgaaggaagcgctaatacggctaatcaaaaagatattgctattggctgcggggcacaaactcaagaccgaactggctctaacatcgcaaatcgtaataatccatataataattctaccggtgcttatgctggcgcaatgaaacaaggcggagcaatcagtgttggtacgggggctgtagttgagaaaggcctaggaacagcaattggttcttatgcgacgactcaaggtatttcaggtgtggcaattggtacgggtgctttatcttctggaaatactgctcttgcagttggtcgtcaatctgcagcgacagccgacttctcacaagctattggtaatgttgctgctgcgacgggtaaaggttctttagccatagggcattcagccactgcagaaggttaccgttcaattgcgattggctcaccagatattgaaaatgctgaccctgttgctgggcaggtaggcgctgcttatcaaccaaaaatggctactaaagcaacgggtaaagactcgattgcatttggtggaggtgcggttgctactgaagaaaatgctttagcaattggtgcattttcagagtctaaaggtaaaaagtctgtcgcaattggtaccggtgcaaaggcacaaaaagataatgcagttgttattggggaccaagcagaagctagctttgaaggcggcgtagcaattggtaaaggtgcccgttctgaagcggaaaacagtattgctttaggtaaagattcaaaagccagtcaagcaactggtgaaagttacttgactaaacaatcagcaccaacaggtgttttgtcaatcggagatattggaacggaacgccgtattcaaaacgtagcagatggtgcagcagattctgatgctgcaactgtgcgtcagttaaaagctgctcgtacccattatgtcagtattaatgacaatggtcagcaaggtggtaactttgaaaatgatggtgcgactggtcgtaatgctattgctgtaggggtaaatgcttctgctgctggtcgtgaggcaatggcgattgggggtagtgcacaggcaataggttctggtgctattgcaatgggaagtagtagccaaactgtaggacgtggggatgttgctataggtcgtaatgcatcgactcaaggtgccgaaggggtcaatagtaaccaatctgttgcgattggtgatcagacgaaagcaattggggatcagtcagtagcaattggtgccgacgtgattgcaaaagggaactcttctgttgcaattggtggtgatgatgtcgataaaatcgcacgtgatacggaattaagtaatacctatacggaaattactggtggtactttacaggcaggtaaatatccaacaaccgaagcgaatcatggttcaactgctgttggggttcaagctgtaggtacaggagcgttttcttctgcttttggtatgacctctaaagcaactggtgatgcttcttctgcttttggcgtcatgtcaaatgcttcgggtaaaggtgccgctgcattcggtgctgttgcacaagcaacaggtgatggcgcatcggcaatgggtattaactcattggcatcgggtacaaattcaacagcaattggctctggtaataaaccgggtgaaggagcaaaagcgactgggaacagttctgcagcaattggtagtggtgcgcaggcaacaggtgataattcagcagcaattggtaaaggagctgaggctacaaatgaaaatgctgctgctgtaggtggtggtgctaaagccacgggtaaaaatgctgcagcgattggtggcggtgcaattgccgatcaagaaaatgcagttgcagttggccaaggtgctcagtcattagttgaaggtggtgttgctttaggcgcacgcagtaaagtagaagccaaaaatagtgttgctttaggccaagatgctgtagcgacagaagcaacaggaacttctttcctgactaatcgtgatgcttctcaatctaatggtgtgatttctgttgggtcggctggaaaagaacgccgtattaccaatgtagaagatggctcagctgactcagatgcagtaacagtacgccagcttaaaaatgttgatagtcgtgttaatcaaaatacgagcaatattggtaagaatacccagaatattactaacctgaatcagaagttagatgatacaaaaacgaatctaggtaatcagatcacagatacaaacaagaatctgaatgatgccaagaaagaccttggtatccagattactgataccaacaccaagttaaataccactaaagatcagttaacaactcagattaacgacactaaaactgagttaaacaacacgattggtaatacgaaaactgaactaaataccaaaattgacaacaccaagacagagcttgaaaacaaaggcttgaactttgctggtaacagcggtgcagatgtacatcgtaaacttggtgacaagcttaatattgtaggtggtgcagctgcgtcaactccggcggctaaaaccagcggtgaaaatattattactcgcacaactcaagatggtattcagattgaactgttaaaagactcgaagtttgacagtgtgactactggcaacaccaccttaaatacgaatggtttgactattaaagaaggcccaagcattaccaaacagggcattaatgctggtagcaaacagattaccaatgtagctgatggtatcaatgccaaagatgcagtaaatgttgatcagctcactaaagtcaaagagaacttaaatggcagaatcactgataccaataatcagttaaatgatgcgaaaaaagatttaggaaaccagatcgcggataccaacaagaatttgaatgatgccaagaaagaccttggtgaccagattactgataccaacaccaagttaaataataccaaggatcagctcacaactcagattaacgacactaaaactgagttaaacaacacgattggtaacaccaagactgagcttgaaaacaaaggcttgaactttgctggcaatagcgggagtgatgtccaccgtaaacttggtgacaagcttaatattgtaggtggtgcagctgcttcaactccgacggctaagaccagcggtgagaacgttattacccgtactaccaaagatggcattcagattgaactgttaaaagactcgaagtttgacagtgttaccactggcaacaccacattaaatacgaatggtttgacgattaaagaaggcccaagcattactaaagatggcattaatgccggcggtaagaaaattaccaatgtggctgatggtatcaatgccaaagatgcagtgaataagagtcagttggacaatcttgctgccaagcaaaatgcaaccgatgatgctgcggtgaaatacgatgatgccaagaccaaagataaagttaccttaaaaggcaaggatggtacggttttagataatgtgaaagcaggccacatctcatcgacttcaaaagaagcagtaaatggtagccaaattcacaatatttcaaacagtattaaaaacagtattggtggaaataccgttgttaatccggatggtagtctgacgaccaataacattggtggaacgggtaaaaacaacatcaatgatgcgattagcgaagtaaaaaatacagctaagaaagcaaagactactgtaactgaaggcgacaacattgttgtaaaagaaactgttaataaagatggcagcactaactacgaagtgtcgactaaaaaagatctgacattaaatagtgtaaccacaggtgacagcgtacttaataataatggtttgactattaaagaaggtccaagcattaccaaagaaggcatcaatgcaggtggtaagaaaattaccaatgtagctgatggtatcaatgccaaagatgcagtaaatgttgatcagctcaccaaagtcaaagataacttgaatggcagaatcactgataccaataatcagttaaatgatgcgaaaaaagatttaggtaatcaaatcgctgataccaacaagaatctgaatgatgccaagaaagaccttggtgaccagattgctgataccaacactaagttaaataataccaaggatcagttaacaactcagattaacgatactaaaactgagttaaacaacacgattggtaacaccaaaactgagctgaataccaaaattgatagcaccaagactgagcttgaaaacaaaggcttgaactttgctggtaatagcggtgcagatgtacatcgtaaacttggtgagaagcttaatattgtaggtggtgcagctgcgtcaactccggtggctaagaccagcggtgagaacgttattacccgtactaccaaagatggtattcagattgaactgttaaaagactcgaagtttgacagtgttaccactggcaacaccacattaaatacgaatggtttgacgattaaagaaggcccaagcattactaaagatggcattaatgccggcggtaagaaaattaccaatgtggctgatggtatcaatgctaaagatgcagtgaataagagtcagttggacaatcttgctgccaagcaaaatgcaaccgatgatgctgcggtgaaatacgatgatgccaagaccaaagataaagttaccttaaaaggcaaggatggtacggttttagataatgtgaaagcaggccacatttcatcgacttcaaaagaagcagtaaatggtagccaaattcacaatatttcaaacagtattaaaaacagtattggtggaaataccgttgttaatccggatggtagtctgactactagcaatattggtggaacgggtaaaaacaacatcaatgatgcgattagcgaagtaaaaaatacagctaagaaagcaaagactactgtaactgaaggcgacaacattgttgtaaaagaaactgttaataaagatggtagtacaaactatgaagtgtcgactaaaaaagatctgacattaaatagtgtaaccacgggtgatagcgtacttaataataatggcttaaccattaaagatggtccaagcattactaaagatggcattaatgccggcggtaagaaaattactgatgtggctaatggcgttattgcacaaaattctaaagatgctgtaaatggcggtcaggttcaccatatctctaatagcatcaaaaacagtattggtggaaatacagttgttaatccggatggtagtctgacgaccaataatattggtggaacaggtaaaaataacatcaatgacgcaattaagtctgtagatgaaaaagtcactaatggtgtaaatgacttgactcaaaaagggctaaattttggtgcgaatgaccagaaaacaacccaaggcaaagcagttcaccgtaagcttggtgacactatcaatattgtgggtggggctaatccagaaactgctgaagataaaactagtggcgagaacatcattacccgtaccacagaagatggtgtcaaaattgagatgttaaaagatgtgaagttcgatagcgtgaatgtcgggggccatgtcttaaatcaacaaggtctaaccattaagggtgggccaagcatcacagtgaatggtattaatgcaggtggtaaacaaattaccaatgttgcagacggtattaatgcaaaagatgcggtgaacaaaggccaattagacaagcaaattaacgaagttaaagatcaaattggtaaagatattggcaagctttctgatcatgctgtgcagtatgacaaagataaaaatggcaatgtcgacaagaactcagtcactttaggtggtggagaaaaaggtaccaatctgaaaaatgtagctgacggtaaaattgctgagggctctaaagatgccgtgaatggtggtcaattatggaatgttcaaaatcaagtcgataagaactcgaatgatattaagaatattcagaataacatcgataacatttctaatggtaaagctgggttagttcaacagcaaaaaccaaatggtgaaatcacggtcggtaaagattctggcggtactagcattaatatggctggtaaagagggtgatcgtgttgttcaaggtgttaaagatggtgagattaaagctggttcgaaccaagctgtaaatggtggacaaatccataaaatttcagaaagcatcaaaaacagtattggtggaaatactacgattgatcctaaagatggctcaattacaaccaacaatattggtggtacaggtaagaacaatattaatgatgcgattgggaccttaaaccagtcgaaccaagaattgggtaacaaaattaccaatctgggtgatcagttacaacaagtgttctatgacactaataaacgtattgatgacgttgagaaaaaagctaatgcaggtattgccgctgccatggccttagaaaatgcgccgtttgtagcaggtaaatatacctatgctgttggtgctgcatatcatggtggtgagaacgcagtcggtgtgaccttacgcaaaacctctgacaatggccgttggtcaattacaggtggtgtggcagctgcttctcaaggtgagccaagcgtccgcgttggtattagtggtgtgattaat

SEQ ID NO: 8940 - DNA, 1344 bp, Acinetobacter baumannii
atgttaatacaacgtggtggattaaaagttgtagcaggcttgggaatatcaggtgtttctgctgtaaatttcctgcatgaacaaggctaccaagttgctgtaacggactcccgccccacacctcccggacacgatcagattccggctggcgttaaaaccagttttggtcagcttgatcaagaattattattacaagcagaagagattattttaagcccaggccttgcaccacaattaccggaaattcaggcagctattgctaaaggtatttctgtggtgggtgatatccaattattgcgtcgtgccactgatgtgccgattgtggcgattacaggttccaatgcaaaaagtactgtaacgactttaattggcttaatggctaaggatgcaggtaagaaagttgcagtaggcggcaatcttggtcgaccagcgttagatttacttaaagatcaaccagagctactagtccttgagttatcaagctttcagttagaaaccacctctcacttaaacgctgaggtagcagtggttctcaatatgagtgaagaccatttagaccgtcatggaaatatgctggggtatcaccaagcaaaacatcgtattttccaaggcgctaaaaaagttgtatttaaccgagacgatgctttaagccgcccacttgttccagatacgacaccaatgcaaagctttggtttaaacgcaccagatttaaatcaatatggcgttttaagagatgccgacggtacgctttggcttgctcgtggtttacagcggttaattaaaagctcggatttatatattcaaggtatgcacaacgtagccaatgctttagcgtgtttagcattgggggaggcaattggtttacctatggagtcaatgcttgaaactttaaaacgatttaaaggattagagcatcgctgtgagtacgttaaaactgtgcgtgatgtccgttattataatgactctaaaggtaccaatgttggtgctacacttgcagcaattgatggcttaggtgctgccattgaagtgaaaaaaggtaaggttgcacttattttaggtggacagggcaaagggcaagatttttctcctttacgttcttctatcgaaaaatatgccaaagttgtggtattgattggtgaagatgcgccggtcatcgagcaagccattcaaggcgcaactaaaattttacatgcagcaacgcttaaagaagctgtcgagctgtgtcaacgtgaaacacaagctgaagatgtggtattgctatcaccagcatgtgcaagttttgatatgtttaaaagttataatgaccgtggtcagcagtttgttgcctgcgtcaattcgttggtt

SEQ ID NO: 8941 - DNA, 849 bp, Acinetobacter baumannii
atgaagcgtatacttatcgtgacaggacagtctggttcaggaaaatcttcagctcttcaagtattagaagatttgggctactactgtattgataatttacctttggcattgctgcctgagatcgtggcaaagctagatcatgaaaataatcttgagcagcttgctttaggggtggatgtacgaagtactcgggcagatatgcaagagttcgaccatgtttttgagcaattacaaaaacatggtacggttgatgtgatttatctgacgacacaagatcaagatttgattgcacgatttagtgcttcacgtcgtccacatccgttagcaaatcgtttcaaaagccttttacagtgtattcatgaagaaaagcagttgctgattccaattcagtttcgtgccactgttcacattgataccacagataaaagtgttcacgatttaaaacatatcttgctatcaaaattaggacaatcagataatctaattgttatattgcagtcatttggttataaacatggcattcctttagatgccgactatgtttttgacgtacggcatttaccaaatccgcattgggatttagaattacgccgcttttctggtttagacgagccagttaaacaatttttagaagcaagtccacaagcaaatgaaatgtttgaggacattctccacttcttaaaaaaatggctgccggcatttgctgaagggcatcgtcactatatgacgatttcaataggttgcacaggcggccagcatcgttcagtttatatggtagatagactaaaacaagcacttgaggcagaatggtctgttcaggtcttacacagagaaatgaagcactggtca

SEQ ID NO: 8942 - DNA, 1656 bp, Acinetobacter baumannii
atgaatattaaagaatatgattacattattattggcgcaggatctgccggaaatgtactcgctgcgcgtcttactgaagacaaagataccaccgttttactgctagaagcaggtggaccagattatcgcttggatttccgtacacaaatgccggcagctttggcctaccctcttcaaggtcgtcgctataactgggcttatttaactgacccagagccacacatgaacaaccgtcgtatggagtgtggtcgtggtaaaggcttaggtggctcatctttaattaatggtatgtgctatatccgcggtaacgccatggatttagaacaatgggcaacccataaaggccttgaaaactggacttatgccgactgtttgccttactacaaaaaagccgaaactcgtgacattggtggcaacgactatcatggtgatagcggtcctgtatcagtggctacaccaaaaaatggcaacaacgtgctgttccatgccatggttgaagcaggtgtacaggcaggttacccacgtactgacgacttaaacggttatcaacaagaaggttttggtccaatggaccgtaccgttacgcctaaaggccgccgttcaagtaccgcacgtggttatttggatatggcaaaaggtcgtccaaacctgactattttgactcatgcaacgaccaataaaatcttgtttaatcaaaagcaagcgattggtgttgaatacattattggtgctgatcaaaacaacttgcaacgcgctttggttaaacgtgaagtattactgtgtgcaggcgcaattgcgtcaccgcaaattttacagcgttcaggcgtaggtcaaagtaccttcttaaaatcaatggacattgatgtggttcatgatttgccgggcgtgggtgaaaacttgcaagaccacctggaaatgtacttacagtataaatgtaagcaacccgtttctttataccctgctttaaaatggtataaccaacctgccattggtgccgagtggttattcaatggtacaggtattggtgcaagtaaccagtttgaagcgggtggatttatccgtagttcggatgagtttaagtggccaaacattcaataccacttcttgccagtagctattaactacaacggtagtaatgcagtaaaagaacatggcttccaagcacacgtgggttcaatgcgttcgccttcacgcggtcgtatcaaacttaaatcgaaagacccgtttgcgcatccaagtatcttgtttaactacatgtcgactgaacaagactggcgtgagttccgtgatgcaatccgcatcacgcgtgaaatcatgcatcaacctgcgcttgacccatatcgtggtgatgaaattagcccgggcaaacatttgcagacagatgcagagcttgatgactttgttcgtaaccatgcagaaacagcttaccacccgtcttgtagctgtaagatgggcgaagacgaaatggctgttgtagatggtcaaggccgtgtacacggtatgaatggtttgcgtgtagttgatgcctcaattatgccgctgattattaccggtaacttaaatgcaaccaccattatgattgccgagaaaattgcagaccaaattcgtggacgcgaagcgttaccacgttcgactgcaccattctatgtagcatca

SEQ ID NO: 8943 - DNA, 684 bp, Acinetobacter baumannii
atgcaagccattattttagatacagaaacacatacactaaatggtttgcctattgaaattgcatatgccccaattgaaattaatgcaggcaagctcaccttagataaaagcaaattgtttgatcaactttatcaagttgggacccccatctcttacgcagctatggcagtacaccatatattagaatcagatttagaaaatcagccccactataaaacttttaaattgccagatactacaacttatattattggccacaatattgattatgatattgccgcgattgcgcgttgcggtgtagatgtttctcatatcaaaccaatttgtacgctagctttagcacgtaaaacctggcctgatgcagaagcgcataatatctcagcactgatctatatgatttctcaaggcagcagtaaagctcgtgaattactcaaaggcgcgcaccgtgccgatgcggatattattttaactgccaatatcttgatgcatattgtctatcatttaaatattcatgacattgaagagttgtaccgtgtttctgaagaagcacgtattcccacaacaattaactttggcaagcataaaggtacagctattgctgaactccctaaagactatattcaatggctattgcgccaagacgagctggacgtttacctacgtaaagcattagaaagtgcattt

SEQ ID NO: 8944 - DNA, 1323 bp, Acinetobacter baumannii
atgtcattgatcgcaaataccaccgttgtgcgtggtcgttttttagatattcaacaaactgtctctgagccaactgatattccaaatcaaatacgttatttggaagatggtgtattgattagtgaacatggaaaaatcaaatggtttggtgcatgggcagacgctcaacagcatcttcctgctggagttgaggttcaacattatccagaacaattgattgtacctggctttattgatactcatattcacttccctcaaaccgaaatggtgggagcttacggcgagcaacttttaagctggcttaatacttatactttcccaactgaaatccagtttcaagacaaaacatatgcaaacgaaattgcccagttctttgttcaggaactcttaaaacacggtacaactacggccctcgttttctgtacagttcatcccgagtctgttgatgccttatttgaagccgcagagcgcgttcagatgcgtttaattgctggtaaggtacttatggaccgtaatgcgccagaagcgctgtgtgacacgccagaaacggcttacagcgacaccaaagcactcattgaaaaatggcatggtaaaggccgtgctctgtatgcaattacgccacgatttgcgccgacttctacacctgagcaactagaaagagcagggcagttaaaacaagaatttccggatgtgtatgtccatacgcatttaagtgaaaacaaagatgaaattgcttgggtgaaatctttattcccggaacaagcaggctatctagatgtttatcaacattatggcctgactggtaagcgttctgtgtttgcgcattgcgttcacttagaagatgaagaatggcaatgtatgcatgatacacaatcggctatcgcattttgcccaacttcaaacctgttcttaggcagtggtttatttccattgaaaaaaacttgggaaaaacaagtgaaagtaggcttagggacagatattggggctggcacatcgtttagcttactgcaaactgttaacgaggcttataaggttcagcagttacaaggtgataaactctccgcttatgaagcgctttatcatgcaaccctaggcggagcaaaagcactcgatttgcaggatcagttaggtaacttcaacgtcggtaaagaagcagactttgtggtactaaacttaaagccaacagcattacaggaacttcgccagtctaaatctaagtctgttgaagattcactgtttgcattattcactttaggtgatgaccgtaatattgaggcgacttatatttatggaaaccgtgcttatcaaaaagaaacagccaaa

SEQ ID NO: 8945 - DNA, 1845 bp, Acinetobacter baumannii
atgctaaaagatttgagtcaaaatttagggcaaatgaatgataaaaataacaatgtagaaaatttcttaaagcaaatttatgaaaatatttttgatcaaaattccaatcgaacagcactcatttttgaaaaccgtagcattagttatgctgaggtagggactcaggtcgccaaggttatgtatgcgctaaaaatgcaagacttggcaacagggtcggtggttgcaatttgtctgagaaaaagtcctgagcatatttataccgctttagcatgtgcgctcactggcatcatttggctacctgtagatatggattctccgccgtcgcgactgaactatttattgacgaatagtcgggcagatgttgtggtgagtgactcatccattgcaggtgtgcaaacattaaatattaacgaaattttatcggctacaactgagtatgaaccgagctttaacgccgaaattaaccgacttccggcatattatttatatacttcgggaagtacaggaactccgaaatgtgtggtcttaaataatcaagccacagaaaacacgctacaacagacgatctcggaatggaaaattactgctgacgatgtgattatggcggtaacaccgtttcatcatgatatgtcggtatttgatgtatttgcttcaatggcagtgggtgcaactttggtggttccatcttttgagcaaagtaaaaatgctgttgtctgggccgatttagtagatcgttgcaaggttacgatttggagcagtgtgcctgccattgtcgatatgttgttcagtgtagctcaaaaagaacaattacaatctttgcgtttaattgcccaaggcggcgactatatcaagccctcacttataacgaagttaagacaacaattacttaacgctcgtttattttcattaggtgggcctaccgagaccacaatttggagtatatggcatgaaataaatgagcaggatcaggaaattattccgtatggaaaagctttagaaaataaccagtattttattttggatgaaaatctgaagccttgccaaatgggcgaggtcggtacgatgtacatgactggcctaaatttatctaatggttatttacttgatggggaaattaattataaagatttcgttgatattcaagtgagtgaaaatgaaactcaaactgcttttcgcatgagtgatcaagggtattttagggaagatggaaatattatttttgctggacgtgaggaaggttatttaaagataaaaggcgtgagaatctctgcggccgaggttgaaaatgctttaaccaagcacccgtatattcataattgtgtggtggtaagttgtgtacatccaacgactgaaactcaagagttagtcgccgtttataccctagaaaataaatacaaaactactcgcttaaatagccccgaattaaagaactttttaaaagtgcatttgccgagttcacatattccttcgaaatatttgagcatcgaaaccatacctctgacccgaaatggaaaaattgatcgtaaagctgtgcaagaaatcgctcaggagaaaatttatgtatcttctacgttgtctgcaaattccactaaaacactgtcatcagtcgctgagctgggagattcggttttatcgattttccgtgaatgcatagctgacagccaagctgaaaaaatggatattttttatagaagtgaaatattagcgataggaattcgtccgaaacaactcatgagtattgctcagaaactttctcagaagcttaatacacaaattgatttttatacactcattagctgcaaaacaattcaggatgtggtgaataaagtagagcagcaaataaaa

SEQ ID NO: 8946 - DNA, 1014 bp, Acinetobacter baumannii
atgcaaattttttacgataaagactgtgacttatcaatcatccaaagcaagaaagttgcgattattggttacggttctcaaggtcatgctcatgcacttaaccttaaagactcaggtgtagacgtaactgtaggtttacgtgctggttcagcttcttggaagaaagctgaaaacgctggtcttaaagttgctgaagtcccagcagcagttaagcaagctgacctcgtaatgattttgactccagatgaattccaatcacaactttaccgtgacgtgattgagccaaacatcaaagaaggcgcgactttagcatttgctcatggtttctctgttctatataaccaagttgttccacgtaaagacttagacgtaatcatggttgcgcctaaagctcctggtcacactgtacgttcagaattccaacgtggttcaggtgttcctgacctaatcgcaattcaccaagacgcttctggtaatgcacgtaacgttgcgctttcttacgcttctggcgtaggcggtggccgtacaggtattatcgaaacttcattccgtgaagaaactgaaactgacttattcggtgagcaagcagttctttgtggtggtgcagttgaactagtgaaaatgggcttcgaaactttggttgaagctggttatgcaccagaaatggcttacttcgaatgcttacacgaacttaagttaatcgttgacttgatgttcgaaggcggtatcgctgacatgaactactcagtttctaacaatgctgagtacggtgaatacgtaactggtcctgaagtaatcaatgaacagtctcgtgaagcaatgcgtaatgcattaaaacgtattcaatctggtgaatacgcgaagatgttcatccaagaaggtgcgttaaactacccatctatgacagctcgtcgtcgtcaaaatgctgcacacggtattgaacaaactggtgctaaattacgtgcgatgatgccttggattcaagcgaacaagatcgtagacaaagagaaaaac

SEQ ID NO: 8947 - DNA, 939 bp, Acinetobacter baumannii
atgcgatttggcttattctgtatttttatcattttatgtatttgttcgttattgctgggggctgaacaaatacagtggtctaccttattttctttttctcatgagagttggctcactcttacagccagccgtattcctcgtttaattactattgtgcttaccggtatcgggttggcggtatgtggcgtcatcttgcagcacattgtgcgtaacaagtttgttgaaccggaaacttcgggtggtttagatgctgccaaactgggaattttagtgtcgttaactttagttccggtaaccagcacgctgagcaagatgatatttgcgatcattttttgttttattgccagcttaatttatatcgcaattatccgccggatccgttttagaaatatggttttagtaccggtaattggtttgatgtacggcagtgtactgagcgctttagctgagttttatgcctatcgctttaatattttacaaagtatgcaagggtggcttttaggagatttttcaaaaattgtccaaggccactatgaagttatttacattatttttccgattgttgtcctgacttatctttttgcacaccgctttaccgtgattggtatgggtgaagagatggcttctagcctaggacttagttatgcagctatagccgctattggtttaatactggttgccattacggtttcgaccacagtaattacggttggtgctattccttttgtcgggctcgtggtgcccaatttggtcgcactgaaatacggagaaaacttagctaaaaccttgcccattgtggctttaggtggggcgtctctattactgatttgcgacattcttggtcgctcgattatttatccatttgaagtgccgatcggacttaccgcaggtggtgtggggggaattattttcctcatcctcattttgagggagttcaga

SEQ ID NO: 8948 - DNA, 714 bp, Acinetobacter baumannii
atgggcatgacttttacagacatagaaaataaatctgccaaacgcctaattggtattgctgcagtcatttttctgcatcttcttgttgcctatattctgatgtcaggtttagcaaacaatattcaaaaaccagcagaaaaacctgtggaattacaaattattcaggatattaagccacctcctccaccaaagccggaagagccgaaaccaaaggaaaaaccacctgagccaccaaaaatggtcgaaaaagttgccaaggttcctgagccaccaaaagaagtagagaaagtagcaacaccagtacaaaaaacgacgccagtagctcaaccgactaaagtcgctactccggctcctgctgcacctagtactccttctccgagccctgttgctgcacccgctccagtggcggcggctgcaccagcacctaaacccgctggtgtaactcgtggtgtttcagaaggctctgcgggctgtgaaaaaccggaatatccacgcgaagcactcatgaacgaagagcaaggaacggtgcgtatacgtgttttggttgatacatccggcaaagtcattgatgccaaagtaaaaaaatcgagtggcagcaaaattttagataaagcagcaactaaagcctacagcttatgtacgttcaaaccagcaatgaaagatggcgtgcctcagcaagactggtatgaaattgaatatccattcgtaattgaa

SEQ ID NO: 8949 - DNA, 1353 bp, Acinetobacter baumannii
atgagccagttatatgccagcttgttttaccaaaaagacgtcactgaaatctttagtgattcatctttaatcacctacatgattcaggttgaagttgcgttagcccaagcgcaggcacaagttggcgtgattcctcaaaatgcagcaaataccattgcccaagtagctgaacaggcgttagaaaagtttgacttttcggctttggcggtagcaactggcttagctgggaatatcgcaattccatttgtaaaacagcttacggcaattgttaaagatactgatgaagatgcttcgcgttatgtgcattggggagcaaccagtcaggatattttagacacagcttgtattttgcaatgccgtgatgcgttgaatattgtggaaggtcaacttcaacagtgctacaccacagcattacaccaagctaaacaatatcgccatcaagtcatgattgggcgtacatggttacagcaagctttaccaattaccttagggcataaacttgctcgttgggcttctgcatttaaacgtgatttagaccgtatacaagctatgaaatcacgtgtgctcactgctcagttaggcggtgctgtgggttcattagcttctttgcaagaccaaggttcgcttgtggtcagcgcatttgcgaagcaactgaatctgactgtaccaacaagtacatggcatggtgagcgtgatcgtattgtagaaattgcaagtgtgcttggcatgattgtcgggaatacgggcaagatggcacgggattggtcactcatgatgcaaactgaaattgcagagttgtttgagccaaccgcaaagggtcgtggtggttcatcgaccatgccgcataagcgtaatccagttgcggcagcatccgtattggccgcggcgaatcgtgtaccagcactgatgtctagcatttatcaaagcatggtacaggaacatgaacgtagcttaggtgcatggcatgcagagtggttagcaattccagaaatctttcagctttgtgctggagcattaagccgtactggtgaagttctacaaggttttgaagttaatgctgagcatatgcaacagaaccttgagtgtaccaacgggttaattatggcagaagcggtgatgatggcacttgcacccaagattggacgtttaaatgctcatcatttggttgaagctgcatgtaaaacagcagtagcacaaaaccagcatttgtttgatgttgttagccaactagatgaagtaaaagggcagtttagccaagaagagataaggaatattttcaaaccagaaaactatttaggcaatattcagcaacagattgatgcggttttgaaagaagcacaaggagagtcaaag

SEQ ID NO: 8950 - DNA, 642 bp, Acinetobacter baumannii
atgattagaaaactcattttattggtgatatttggattaatgtcatttgttacaaatgccaaaacccttgaattacaggagaagaacatgcgtcaaatatttgtgcttcacggttactcagcttctattaacgatcattggtttttggacttaaaacatcaaatagaagatgaaaatacaactgttactttaataccatttccagattctgagcatccggacgtcgatgcttggcagaaagtattagatgagcagattcctgcagttaatgaaaatacttattttgttgcccacagtttaggggtaattaccttgctacactttttacaaagacatgattatcaaaatattggaggaatgattttagtatctggattctctggtccaatttcagactcttcacctcttagtccttatataacaaagagtaaagtcgacaccaactatttccgtgacataaagaaaaagctggtttatttgtctgataatgatgatttggttccaccacaactaacgattcaattggctaaggatattgatgcgccttatattaccgttcctaatggtgggcactttttaggtcgggaaggttatacggaatttccgcaattagtcgattctttaaaagaaatgttagaaaat

SEQ ID NO: 8951 - DNA, 426 bp, Acinetobacter baumannii
atgcaaattaaaaatattttggtggtttgtattgggaatatttgccgtagccctatggcagaatatttattaaaacagcaatatcctcaactcaatattgaatctgcgggtatttcggggttgattgggcatcaagccgatgaaaaggcccagctctgtatgcagcgtttaggcattgatatgcagcctcatattgcgagaaagctcaatgccgagctcatcaaaaaagctgatcttattctagtgatgagcagtaaccaacaaaaacatattgaacaaacttggccctttgcaaaaggaaaaactttccgtttaggtcattggcaaaataaaaatgtgccagatccctaccaacatgagcaagctgtatttgatgaaacttgccaactcattcagcaatgcgtggctgactggaaaccttatatt

SEQ ID NO: 8952 - DNA, 831 bp, Acinetobacter baumannii
atgaacatgaaaacattattaagcctaagtttgcttgcactcccattttttactgcacaggtaaatgctgaacctgttgctttagctgctcaggcacaacctgccgctacagccgttaaaacgattgttccgattaccgcaaaaactaaagaacaagcattggcacaagctcaagtcattgcaaatacggcagatgctgatttagcagagttccgtatcgatttattaagctttgccagcgatacaaaacaagtgattgccttgggccatgagttgaaaaagattttaggcaataagccaatgattgccactattcgtacaaaaaacgaagggagtcagcttgaaattagtgatgctgattatggtaagacttatcaggcttatttaaaaaatccgttcatggactggttagatgttgaaatgttccgtgatcaaaaagtagtttcagaaattgttcaaaaagcacatcaaaagaaagtgcttgttgtcatgtctaatcacgacttccaaaaaacaccaagccaagatgaaattgaaaaacgcttgttaaaacaagatcaaatgggcgcagatgttctcaaaattgctgtaatgcctaaatctaaacaagatgtcttcactttaatgaacgcaactttaaaagtaagccagcaaaccactaagccattattgacaatgtcgatggggcaattaggtacgatttctcgtgttgcgactgccaatatgggcggaagttatagctttggcatgattggtcaggcttctgcaccgggtcaaattgatgtgactaagctcaaacagattttacaaaccgttcaaccaacaaacccg

SEQ ID NO: 8953 - DNA, 1326 bp, Acinetobacter baumannii
atgcgctatgcatttgcctatggtgcagatgccgtatatgcaggacaaccacgttatagcttacgtgtacgaaataatgcttttgaccatgaaaatttaaaaatcggaattgatgaagcccacgctttgggtaaaaagttttatgttgtggtgaatatccagccacataacagcaaattaaaaaactttattcgtgatcttgaaccgattgtggctatgcagccagatgcactcattatgtctgatcccggcttaattatgatggtacgtgagcattttccagaaatacaaattcatctatcggttcaagccaacgctattaactgggccactgttaaattttggaaagactacggcctaagccgtgtgattttatctcgtgaattatctttagaagaaatagaagaaatccagcaacatgtgccagatattgaactcgaagtttttgtacatggtgcactatgcatggcctactcaggccgctgtttactttctggatatatgaacaagcgtgatgccaaccaaggtgcttgtaccaatgcttgccgttgggactataaactgcatgaagcccaagaagatttaaacggcgatgtaattccagtcactcagctaaatacaccagaaaagtcttgctgctcatcaggacaatcagaaacaacctcggttcaaactttactcgtacaacgtaatgatgaagaaatgtttgctgccgaagaagatgaacacggcacctattttatgaactccaaagatttacgtgcggtacaacatgtagatcgtttaacaaaaatgggcatcgcctcactcaaaatagaaggccgtactaaatcctatttttactgtgcccgtactgctcaaatttatcgaaaagccattgatgatgctttagcaggtaaaccttttgacccaagattaatgactcaactcgaagggttggcaaatcgcggttataccgaaggctttttaagacggcatgtgcatagcgaatatcaaaactatgctgacggatcatcacatttcgactaccaacaattttgtggagaggttgtagaacgtcacggcaattatattcggattgaagttaaaaaccgttttgtggtgggcgactcacttgagctgatgacgcctcaaggcaatatcacctttaacttaaccgaaatgcgcgatttaaaaggcaacccaattacagatgctaaaggttcggggcattttgttgaaattccgctctcacaagatgttgatatcagttatgccctactcatacgcaatttgccgcatgcaaaagaaagtattactgcatctacattggcttattcagcgagt

SEQ ID NO: 8954 - DNA, 1131 bp, Acinetobacter baumannii
atgcaacaacgtgtcatcgtcggtatgtctggtggcgtagattcctctgtttctgcggcgctcttacttcaacagggttatcaagttgaaggccttttcatgaaaaactgggaggaagatgacggcacggaatactgtacggcaatggaagatttagccgatgctcaagcagtcgcagataaaatcggtattaagcttcatactgcaaactttgctatggaatattgggaccgcgtattcgaacacttcttggctgaatatgcagccggtcgcactccaaacccagatatcttatgtaataaagaaattaagtttcgcgcatttttagatcatgccatgaccttaggtgcagattttattgcaacaggtcattatgctcgtcgtgctgaaactgcttataactctaaaggtgaagcatatgcacctttattacgtggtttagataaaaataaagaccaaacttatttcttacatgcagtgcatggccgtgaaattaataaaacccttttcccggtaggggaaattgaaaaaccggaagttcgtagaattgctgaagaactggacttagcaactgcgaagaaaaaagattcaactggtatatgttttatcggtgaacgtcgctttaatgacttccttaaacaatatttacccgctcaaccaggtaaaattgtacttgataacggcaaagaagttggtgaacatcacggtctgatgtactatacgctcggtcaacgtggcggtattggtctaggcggtatgaaaggtgcatcagaaggtgcatggtttgtacttcataaagatgttgccaataaccgtttagtggtcggccaaggacatgatcacccacttatgcaaagtacacagctttggagtgaggccattgactgggtagcaggcgagcaaaatattccggctgaaggattacgttgcaccgctaaaacacgctatcgccagcctgatcaagcttgtacagtgtttattgatgaaaatagtgagcatggtgttcgtgttgagtttgatgaacctcaacgtgcagttacaccaggccaaagtgttgtattttattcggatgaagtttgcctaggcgggggtgttattcaccatacaaacgcccctacaccaaattttatt

SEQ ID NO: 8955 - DNA, 915 bp, Acinetobacter baumannii
atggctgagttctcaattattgatcaatactttaatcgtcagtcacatcctgacgttgcgcttggtattggtgatgactcagccttaattactccccctccaaatcaacaactggtgatctgtgcagatacacttgttgctggacgtcacttccctcttgaaacctcgccccatgcgattggctggaaaagtgttgccgtaaatctgtctgatattgctgcaatgggtgcaaaacctcatagtattttacttgcaatcagcttgcctcaagttgaccatgagtggcttgaaggatttagtcagggaatctatgactgttgtgatcaatttggagttgccttaattggcggagataccactcaaggtccgcaccttaccattaccgtcacagccatgggctggattgaaacaggaaaagctgtattacgttcaggcgctaaggtcggtgattatgtttgtgtaagtgggcagattggtgatgctgcttatgggcttcagcatttaggacattccctacaacaaagactggactatccgacgccacgttgtaagcttggagaagagctaaaagggctcgcctctagcatgatcgatgtgtcagatggtttagctcaagatttaggacatattttaaaagcatccacggttggagcacgactcatcctagaaaaattacctgtcgatcctgtactgcaacaactagaagaacgacaacgttggcaatatgccttggcaggtggtgatgactacgaattatgttttacaataacaccgcaaaattatgaaaaacttttgcaaaaacaactagacgttaagattacaatgatcggacagatcgttgagcaaacaaaactaacttttgagcatttgggttcagattacccattgcaaattcatggataccaacactttgca

SEQ ID NO: 8956 - DNA, 738 bp, Acinetobacter baumannii
atgaaggtgctaatttgtgatgacgaaccacttgcagtggaacgattgtcacgtttagtttcaaagatgggacatgaggttgtcgcaacagctcatcatggccaagatgccttggaacaggcacggcttcatcacccagatgtgattttacttgatatccagatgccgggtatgaatggtctcgtctgtgcggagcaattaagccaacttaatcctcgacctgccatagtgttttgcacagcttatgatcagcatgcattggaggcatttaagtcacaagcacaagcttatcttcttaagcccattgatcctcaagagctggagcagacatttaagcaattaacccagctaacgcaagcgcagctcagcgctttgcctaaacctgagcttttacaggatttaaaaacacaacgtcatcaaattgctgctaaaacctatcgtggggttgagctaattcctgttgaaaatatctattactttttagcagatcagaaatatgtcacggtacgtcataaaaatggcagcgtattgattgacgaaacacttaaagaacttgaaactgagttcgcagatcagttcatccgtattcaccgtaatgcattggtctcgattgcttatttagatggtttggagctagtaagttcgggccaatatcaggttcgcttacgtggcttagatgaaagactttccgtaagccgccgtcatttatctacccttagagaacggatacaccaactt

SEQ ID NO: 8957 - DNA, 861 bp, Acinetobacter baumannii
atgaatatgaccactgccaatacagcccgtttactgattacttgtgaagacaagcctgggatcgtacaggctgtatcgagctttttgtaccatcagggtgcaaacattaccgcgcttgatcagtatgcgacggaagctcaaggcggacgttatttcatgcgtgttgaatttgaacttgatcatttacagtctcgtaaagatgctttaattcagactttcgcagcaaatgtagcggaacgttatggcatgcaatggcgtcttgcttttgttaatgatattaaaaaggttggtattttagtttctaaagttgaccatgctttgcttgagctattgtggcgtcatgcacgtggttctttaccgtgtgaaattacccacgtaatttctaaccacgaagatttacgtgaagcggttgaaaactttggtattccatttacagtcattaaagtaactaaagacaataaagcagaagcttatgctcaaattcatgaaatgatgcaaggcaatgacttgttagttctagcgcgttacatgcagattttaagtgaagatttcgtttctaaatgggaaatgaaaattatcaatattcaccactcattcttacctgcttttgtgggcgcaaacccatacaagcaagcatatgaaaaaggtgtaaagttgattggtgcaacagctcactatgtgactgctgacttagaccaaggcccaattattgagcaagacgttgaacgtgtgagccatgattataatgttgagcagttacgtgagcttggcgaagatgttgaacgtaatgtattagctcgtgctgttaaatggcatttagaagaccgaattattgtagatggcaataagactgttgttttc

SEQ ID NO: 8958 - DNA, 1917 bp, Acinetobacter baumannii
atgagtgaacaagcatcacaaaattatagtttccaagcggaagtagcacagcttttacatttagtgacgcattctctctattcaaaccctgaaattttcttacgtgaacttatctctaatgcatcagatgcttgtgataaattgcgtttcgaaggaattaatcatcctgaatattatgaaaatgatcctaatttacatgtacgaatcagcttaaataaagaagataaaactttaacgatttctgataacggtattggtttaagccaacaagaagccattgataacttgggtaccattgcaaaatcaggtactaaagatttcatgtcaaaattgacgggtgaccagaaagcggatgctcagttaattggtcagtttggtgttggtttctactcaggttttattgttgctgataaaattacagttgaatcacgtcgcgcaggtctagatgcttctgaaggggtgcgttggattagtggtggcacaggtgagtttgaagttcagcaaattgataaagcttcacgcggtactgacattattcttcacttacgtgatgatgcgcttgattatttagagtcttataaagttaagcaaatcgttaataaatattctgaccacattagcttgccaattgaaatgcaaaaagaagtttggcaagaagaagaggttgctgaaggtgaggagcctaaaggcggccaaatggtcaaaacagatgagtgggaagcaattaactcggcaagtgcactatggacacgtaacaagagtgaagtgactgaagagcaatatgttgagttctataaaaacttaactcacgattttgaagctccgcttgcatgggcacataaccgtgtagaaggtagtacggaatatacccagttactttatattccaagtaaagcacctcatgacatttttacacgtgaagcaaaagcaggaattaagctgtatgtaaaacgcgtatttattatggatgatgcggacaatctaattccaaactatttacgctttgtacaaggtgtcgtggacagcgctgatttaccgcttaatgtcagccgtgagttgttgcaagaaagccgtgatgttaagacaatccgtgaaggtaacgcacgccgtgtactcactttgcttgatggcttagctaaatctgaagatgagaaagaccaagaaaaatttaaaacgttctacactgagtttggctcagttcttaaagaaggtttgggtgaggacttcggtaaccgcgaacgtattttaaaattattacgttatgcaacttccacaaatgatgaagtaacaacttctttcgcggactataaggcacgcatgaaagaaggccaaaaagctatctattatgtgactgctgaaagtttagctgctgctaagaactctccacagttggagttgtttaagaaaaaaggcattgaagtattattaatggcagagcgtgttgacgagtgggcaatgaactttgttcacgagtttgacggtacaccattgaagaatgtatctaaaggtgcagttgatttaggtgacttgcaagatgctgaagagaaaaaggcacttgagcaagcggctgaacagtttaaacctgttgttgagaaattaagtgactcattgaaggctaaaaccaaagaagtccgtgtaacgactcgtttggtagattctccggcatgtttagtgactagtgaaggggaattgtctcctcaacttattcgtatgctcaaacaagcggggcaagccgtacctgaaatcaagccaattttagaaattaaccctgagcatcctttagtgaaaaaacttgaaggttcagaacaatttgatgatttggcgaatgtgatttttgatcaggcggtgattgcagaaggtggattaccggaagatccggcagcttatgtgaagcgcattaatagcttgttgctaaaa

SEQ ID NO: 8959 - DNA, 1449 bp, Acinetobacter baumannii
atgaatacattacgtttaactactcttgcattaggtttgatggtttcaggcatagctgcggctcaaacttatgtggttgaccgttatcaagacgatagcaataaaggctctttacgctgggcaattgaacaagccaatgcaaacccaagcgaagctagcgaaattttgattcaagcagtaggcaaagcgccttatgcgattaaattaaatagtgcacttcctgaaattaaagcacctgtcaaaatcattggtactcagtgggataaaactggcgaatacatcgcaattgatggttcaaactatattaaaggcgaaggtgcaaaagcttgtccaggtgcaaaccctgagcagtacggcaccaatgtacgtactatgactttaccggggttggtattacgtgacgtcaacaatgtcactttaaaaggtttagacattcatcgtttctgtattggggtattgattaaccgttcaagcaataaccttattcaacacaaccgtattagtaataactatggtggtgctggtgttatgttgacgggtgatgatggtaaaggtaacccaactgcaaccacgactaataacaacaaagtcttagataacattttccaagacaatggtgatggcttagaactgacacgtggtgcagcatttaacttaattgcgaataaccattttgtttcaaccaaagcaaatccagaaccatcacaaggtattgaaattttgtggggtaatgacaatgccgtagttggtaataaattcgaaaactattcagatggcttacagattaactggggcaaacgtaactatatcgcctataacgaaatgaccaataactcgattggtttcaatatgacgggtgatggcaacattcttgatagcaataaagtacatggtaaccgtattggtgtagccattcgctctgaaaaagacgcaaatgcaagaattacattgactaaaaacctgatttgggacaatggtaaagatattaaacgttgtgaagcaggtggttcatgtgtaccagatcagcgtttaggggcaattgtatttggagtacctgcacttgagcatgaagggtttgttggttctcgtggtggtggtgtggtgattgaaccatctaagcttcaaaagacatgtactcagccaaatcaacaggactgtaatgctcagccgaatcagggtattaaagctcctaagttaacagcgaataaaggttcagttacagtagaagttaatggtttaccaaaccagcgctatcaagttgagttttttggcaaccaaaatgcagcatcaaaagaagctgagcaatatttaggaacaataacagtagctacagataccgaaggtaaagcaaaagccaattggaaaccaacagtcaaagttgcctcaattacagcaaatgtgactgatcgcttcggtgctacatctgagctcgggtttgtgcaagttaaa

SEQ ID NO: 8960 - DNA, 1377 bp, Acinetobacter baumannii
gtgtttattagtgtatttgatctttttaaaattggcatcggcccatctagctcccatacagttggacccatgcgagcggcatacagttttgtggatgatttattgaagcaagacgatttacaagccacggttagagttcaggtgaagttatacggttcgctgtcggcaaccggtgtcggtcatgcgacagataagtctgttctgttaggtttaatgggttttgaccctgaacatattgatactcaagtaagtacaagcttgattgaagatgttcttgaaaataaagccatccagcttaatcagcaaaagagtatttcttttgactataagcatgatgtgctttttttagatgaatctttgccttatcaccccaacgcaatggaactgattgcgtataacagggctcaagaaattttatatgcagaaacttactattcggttggtggtggctttattgtcagtgaaagacaattaacacacacccaaactgaaaccaacgacgttaaagttccatatccatttcacagtgcggctgagcttttaagcttatgtagaactcatcatttatcagtgagcgagttaatgcttgaaaatgaaaaaagctggcggagtgaagctgagattcgtagcaagattatggaaatctggaaagtgatgcagcaatgtattcacaacggattaattaatgaaggcatattaccgggcggattaaacgtaaaacgtcgggctaaaaaaattcacgataagttattaaataagaaaaactcaaacctgattgtgacgacttttcatgcaatggaatgggtcaatttatttgccttagcggtaaatgaggaaaatgctgctggcggtcgagtagtgacggcacctacaaatggtgcagcaggaattattccggcagttttatattactacgtgactttctctaaagacttttccgaagacaaagtagttcgcttttttctaagtgcggcagccgttggcattttatgtaaactcaatgcttctatttctggtgcagaagtagggtgtcagggcgaagtcggctcagcgtgtgcgatggcttcggcgggtttagccgagattttaggagcgtctcctgaacaggtggaacatgcggctgaaattgggcttgaacataacttgggtttaacgtgtgacccgattggtggtttggttcaggtgccttgcattgaacgaaatgcaattgcagctgtaaaagccattaatgcagcccaaatggcacttcatgatgacgatgaacactttgtcacgctagataaagtgattcaaaccatgaaagaaacaggcagagatatgtctgagaaatataaagagacttcaaaaggtggtctcgctgttaacgccattgagtgt

SEQ ID NO: 8961 - DNA, 540 bp, Acinetobacter baumannii
atgtgtgttcaaggaaatatgcaaaattttgtttataatagaattaccctttttttactaagttattgcttagctatgcttgatcatttagaacaatttcttcccaataaagaaccgtcgagtattcaaaacttcccctttttttggatttcccaagttaatggtaaatattcacaacttattgaaaaatctataaagaaacttggcattgataatactcgccgcaaaattattttaagcactaatgcgcttggggaagccagtatcactgacattgccaatctttctactttaaaactcaccacagcaacaaaggctgtatatcgtttggtagaagatggaattgtggaagtctactcttctaccgctgatgaacggatttcgatggtgaaattaacggccaaaggtgttgagctggttgaacagattaaccaaattagtgtggttaccttagcggggatcctcaatgctttttcagaagatgaactgcataatctaaatcatcagttaaaaaaattatttgatctcatgccatcaagt

SEQ ID NO: 8962 - DNA, 1260 bp, Acinetobacter baumannii
atgtctgatcctcagctctctcttagtgaatatctcggtacagtgcaagaagtcatacgcctgacttttgacgagcctgtatgggtgagagcggaaattcgtaatttaaatgttaaaggtggacattattatttagagcttgcagaaaaagatgctgacaccgacaaggtcattgcaagctgtaaagcaaccatctggaaattttcagcaagtaaaattgttctcaagtttgaacgtgaaacaggtattgagttagctagtgatttaaacgttttaatcaaaattagagcgcgtttcgatccgcaatatggattttcagtcaatattgaagaaatagactcaagttttacacttggagaaattgcaaaacgttatcaacaaattgtagaacgtttaactcaagaagggttaatacataagaataaacttcttcctactccttttgatattcaaaatgtattagttattgctcctcaaaatgctgcgggtttaggtgactttaaaaaggatgcggatgctcttgagcgaaatggggtttgtcattttgtttatcaaagtgcgacctttcagggaaatacggctgccgtcagtcttatggagtcgttggcaacaggtttaaaacaatgggcaaataattttaactttccacccgacctgattgtaattattcgcgggggtggtgctgtaaatgacttagcttacttaaatgattatgagcttgccgccctcctctgtaaacgtagcgtaccgatttgggttggtatcggacatgaaaaagatcgtactatccttgacgagatcgcacaccgttcgtttgatactccaagtaaagtgattgcgggtattcgcaaccatattgttgaacgtgtacaagaagctgtagacaacctacaaacaatcaaactcttgtcacaacatcaaattacgacctaccaaagtaagagtgatcaatatctacaacatattaaatcctctgcccaagctcagcttaattcagctcaccagttccttgagcagataaaggaacgcattcaatttgtttcacagcaacaagttaaattttctttgtcgcaaactgaatcccttatgcgagaaattctcttgcaaaacccgaaacagattcaagcaaaaggttatgcaattgtaagatcagaaggcaaagcaattcgttccattcaccaaatcacaagctctaccattactgttgatatgcaagatggagcaattaacgctaatattaccgaggtaattccaaatgaa

SEQ ID NO: 8963 - DNA, 1992 bp, Acinetobacter baumannii
atgattacccgctttgcatctcctttgttgaacctcacgcttggcttggctctagcaggcttgtcaggtatggcattagctaacccacctaaaatagatgcttcaacacttacggtcattgggtatcatgaaattaccgatactaaaaatgccttaattcctcaatatgcggtcaccactcaacaatttactgagcatgtcgattggctgcaaaaaaatggcttccattttattaccgtagaccagttgatccgtgctcatcagggcaaggcggcacttccaaccaagcccgttttattaactgtagatgatggttatcagtctttctaccaaaatgcatatcctgttattaaggctaaaaaaatcccagtggtacttgcggtagtgggttcatggttagagccaaaagcagggcagaaagtcgatttttcgggtgaagaaattccacgtgataaaatcttaagctggggtgagctcaaagaaatgcaagatagcgggtttgttgaaatcgcaagccatagctatcatttacaccgcggtattacaggcaacccgcaagggaactctgaaccagcggcaacgacacgtttttatgatgtaaaaactaaaacttatgaaaatgacagccaatatcaggctcgtatttataatgatttaaaaaagaataatcagctacttaaagagcatggtatacgttcaccacgtattatggtgtggccatatggtcgctataatatgcaaacggtccaaattgctaaaaagcttggtatgccaattaccatcacgcttgatgatggcgcagatcatgcgaaacaatctctacaaaatatgagccgtattttggtagagggcggaatgagtactaatgatttggctcaagagattaagaaccgtgaattaaacttaacggataacaaccgtccgcaaaaaatcatgcatattgatctcgactatatttatgatccggatccgcaacaacaagaacgaaatttaggtcacttgttagatcgaattaatgcgatgggtgtaaatacagtttatttgcaggcattttcagatccggatgctaatggttctgccgatatggtatatttcccgaaccgtcatatcccaatgcgtgcggacttgtttaaccgtgtagcatggcaaattcaaacccgtacgcctgtaagccgtatttatgcttggatgcctttattggcttgggaattaccaaaaactgatccggtatcaaaagatttagtcgtgacagagcaggcaaaagctggtgaacacttaaatatggggtatatccgtttaagtccgttctcaccagaggcacgccaaactattcgtgagatttatcaagatttggctaagtcagcatctttcaatggaattttattccatgacgatgtcacattatctgattatgaagatgcaagcccagatgcattaaaagcttatgcgaaacaaggcttaccaacagatttggcaaaaatccgtgaaaacgatcaagatttgcaaaaatggaccgcatataagacaaaatatctagatgattttgcaatgcaacttgttgaagacgtgcgacaatatgaaccgttcttgcttacagctcgtaacttatatgcgcaagttgccttaaaaccatatgcggaaaactggtattcacaatcgcttgaagagtcattaagacgttatgattttacggctattatggcaatgccttatatggagcaggtcgataacgccgatcaattttataaagacatgattgatcgcgtgaaaaaatatccaaacggcattaagaaaacagtttttgagctacaagcaacaaactggcgtaacaacgaaaaggtaccgtcaactgaaatggcagcaacaattcactcactctatcagcaaggtgcaatgcacgttgcatactatccagatgacccaatcaaagatcatccggacgtgaacgtgatgcataaagcatttgctgaaaaatcatctcgtcttgtgcca

SEQ ID NO: 8964 - DNA, 1089 bp, Acinetobacter baumannii
atggcagggaacagtattggacaactctttcgtgtgactacatgcggtgaatcgcatggggttggtttaatggcaattgttgatggagtgccaccaggccttgcattaactgaagaagatttgcaaaaagatctggatcgccgtaagccgggaacctcgaaatttgcgactcagcgtaaagagcctgatcaggttgaaatcatttctggtgtgtttgagggtaaaactactggtacgccaattggtttactcattcgcaatacagaccaaaaatcgaaagattatggaaatattgcacaaacttttagaccgggtcacgcagattacacttatacgcaaaagtatggtttccgcgactatcgcggcggtggtcgttcaagtgctcgtgaaactgctatgcgtgttgcagctggtgctattgcgaagaaatatctagcagaaaaatttggtgttgtgattcgcggtcatgtgactcaaattggtaatgaagttgctgaaaaactagattggaatgaagttccaaataatccatttttctgtggcgatgtagatgctgttcctcgttttgaagcattagttacatctttacgtgagcaaggtacaagttgcggtgctaagttagaaattttagccgaaaaagttcctgtaggttggggtgagcctgtctttgatcgtttagatgctgatattgcacatgcaatgatgagtattaatgcggttaaaggtgttgaaattggtgatggttttgctgtagcaggacagttcggacatgaaacacgtgacgaattgactagccatggttttctagcaaatcatgctggtggtattttaggtggtatttcaagtggccagaccattcgtgtggcgattgcactaaaaccaacagcaagtattactactccgggtaaaacgattaatttaaatcgtgaagatactgatgtgttaactaaaggccgtcatgacccgtgtgtgggcgttcgagcaactccgattgcagaagcaatgttagcgatagttctaatggatcatttcttacgccaccgtgctcaaaacgcggatgttgttcctccatttgcgccaatcgaacca

SEQ ID NO: 8965 - DNA, 687 bp, Acinetobacter baumannii
atgtctttttctggctatgggccactccttctcagcggaacatggatgaccatacagcttgcgctgttatcactcttgctttctgtcattattggcttaattggtgcgagttcaaaactctctaatattaaagctttacgttatattgcaaccgcctataccacgcttatccgtagtgtgcctgacttggtgattatgctgttgttattttatagcttgcagttgggtctaaaccaaattactgaagcactgcaaatggatcaaattgatatcaacccatttgtggctggtgtgattactttagcgttcatttatggtgcatattttaccgagacctttcgtggtgcatttcagtcggttccaaggggacaaattgaagcagcaatggcctatgggatgacgccgtggcaggtttttcaccgtgtattattccctcaaatgatgcgttttgcattgcccggcattggtaacaactggcaagttttgattaaggcgaccgcactggtttccattattggcctgactgatatcgtaaaaattacgcaagatgcaggtagaagtaccatgcaactgttcttttttagcatcgtcgctgctgccatttatttggcaattaccacagtgtcgaacctgatcttaatatggcttgaacgtcattattctgctggtgtgaggaagggacaatta

SEQ ID NO: 8966 - DNA, 900 bp, Acinetobacter baumannii
atgaatactattgatattacgaattccttagaaaaggataagttagtgaatactgaacaatctcaacttacagatacacaactgcatcatggcacttcgtacgtttcgcattttgaaccacatgcttcaaaaaagccaaactcaaccgaaatcaagatcagtgcacaagatgcccatgtttattatggtgactttgaagcgattaaaggcatcgatttagatatttatcaaaatgaagtaattgcgtttattgggccatcaggctgcggtaaatcgactttcctgcgtactttaaaccgtatgaacgacacgattgatggctgtcgtgtgacaggtaagatcactctagataacaaaaatatctatgatccaaatctggatgttgtattgctgcgtgcacaggttggtatggtgttccaaaagccaaatccatttcctaaatctatttttgataacgtggcatatggtccgaagctacacggtttagcacgtgacaaatatgacctagaagaaattgttgaaaatagcttgcgtaaagcaggtctatgggaagaagtgaaggatcgtttaaaccaaccgggtactggcttatctggtggccagcaacaacgtttatgtattgcacgtacaattgcagtaagtccagaagtgatcttgatggatgaaccttgttctgcacttgacccaatcgcaacggcaaaagtggaagagctgatttctgaactgtctgatcaatacacaatcgttattgtaacgcactcgatgcaacaagcagcgcgtgtttcagaccgtacagcttacttccatttaggtgatttgattgaagtaaactctacagagaaagtatttactcagcctgaccatcaattgacagaagcgtacattactggccgtttcggt

SEQ ID NO: 8967 - DNA, 459 bp, Acinetobacter baumannii
gtgactactcaagtatggtttgaaattgctcgttcatggctcagtgagattagatttttggtcaatacgcccaataaaaatgtgattcaattatttgaaagttttgacgtaaatttacatctttcacatccagttaccccattagcatttgaatatctgagtactcaggaacgaatagttttgctttcaatgttggatcagattatggatattccatgtgacttattggtacaacgatcaaaggaatatggagtaagtcgtgcaaatttttgggacaagcgcaagaagttgcctgttcagcttcaacagatgaaagatttaatgattaagcctacaagacgttatcctgtctctcgtgcagcaataactgttactaagccaaaatctaaagcgactgtacaacgtcaatggttaaatttattaagaagaagcaataatagtggagcgatgcatattgac

SEQ ID NO: 8968 - DNA, 1866 bp, Acinetobacter baumannii
ttgtggctaataatacttggtgttctgattttaattttcagtaatatcagtgaccgcaataagccaactgcaatgaaatattcagattttgttgcagcggtgaatgctggccaaattaagcaagtcacgattgacggtttaaatattagtggtgaaaaaactaacggatctcagtttgaaactgttcgtccgcaggttgaagacactgaacttatgccaagcttaaacaagcaaaatgttgttgtagagggcacagcaccacaacgtcaaggcattttgatgcaacttctcattgctagtttccctgtactgttaatcattttgttattcatgttctttatgcgtaacatgggtggtggtgcaggcggcaaaaatggtccgatgagttttggtaagtcgaaggcaaaaatgctttctgaagaccaaatcaaagtgacttttgctgacgttgccggttgtgatgaagcgaaacaagaagttgtggaaattgtagatttcttaaaagatcctgcaaaattcaaacgcttgggcgctactattccacgtggcgtgcttatggttggtcctccaggtactggtaaaacgttattagccaaagcaattgctggtgaagcaaaagttccattctttagcatttctggttctgactttgttgagatgtttgtgggtgtgggtgcgtcccgtgtccgtgatatgtttgaacaagcaaaacgtcatgcgccatgtattatctttattgatgagattgacgcagtaggtcgtcaccgtggttcaggtacaggtggtggtcatgatgaacgtgagcaaaccttaaaccaaatgctcgtagagatggacggttttgaaggtaatgaaggcgtaatcgttattgctgcgactaaccgtgttgacgtattagataaagcattgttacgtccaggccgcttcgaccgtcaagttatggttggtttacctgacatccgtggtcgtgaacaaattctgaatgtacatttgaaaaaattgccttcagttactggtgtagatgttaaagttttatctcgtggtacacctggtttctctggtgctcagttggcaaaccttgtaaatgaagctgctttgtttgctgctcgccgtaataagaacactgtcgatatgcatgactttgaagatgcaaaagacaagatctatatgggtcctgaacgtaaatcaatggttctacgtgaagaagagcgtcgcgcaactgcttaccatgaagctggacatgcaattgttgctgagattttaccgggtactgaccctgtgcataaggtaacaattatgccgcgtggttgggctttaggtgtaacttggcagttacctgaacaagatcagattagccactataaagacaaaatgctaaatgaaattgcaattttgtttggtggacgtattgctgaagaagtcttcattcagcaacaatcgactggtgcttcaaatgacttcgaacgtgctacaaaaatggctcgtgcgatggtaacgaagtacggtatgtctgacaaaatgggtgtgatggtttacgaagatgaaaaccaaaatggattcttcggtaacgtaggtagccgtacaatttctgaagcgactcaacaacaagttgatcaggaagtacgccgtattttagatgaacaatataaagttgctcgtgatatcttggaaaataataaagatatcgcccatgcaatggttaaagcgttgatggaatgggaaactattgatcgtgaccaaatccgtgacatcatggaaggccgcgaacctcaaccaccgaaagtttatattgctgaaaatccggtatctgcgtttgagccgccaaaagatggtccatctactccgccgccattaccagcgatgaat

SEQ ID NO: 8969 - DNA, 345 bp, Acinetobacter baumannii
atgaagcaacgtttagtatgggtaaaaataaataaaaaccaatatttaagtcgtcgtttttctcatcacccattgggaatgaaagaacctatggcgactcgcggaaaacatgtagcacagcttgatttgctacttatgccacttttagcttgcgatcactatgggacacgtattggtatgggtggtggttattatgatcgtacattagctagtgctaaacataagccctaccgtttaggattggcacatcaatttcaatttattgaacacactttagaacgtcaaagttgggatcaaccattagatggtttactgactccacagcacttttattattttaaaaga

SEQ ID NO: 8970 - DNA, 1602 bp, Acinetobacter baumannii
atgactacatatcaaacagcgattgatgcagtacgtgaattaaaagcaaaattcggcaacacttgggcagacattagcccagaagatgctgctcgtatgcaacttcaaaaccgtttcaaaacaggtttagatattgctaagtatacagctgcgattatgcgtcgtgatatggctgaatacgatgctgattcaagcaaatatactcaatcattaggttgctggcatggtttcatcgctcaacaaaaaatgattgctaacaaaaagtatttcggtacgacaagcaaacgttatatctacctttctggttggatggttgctgctcttcgttcagaatttggtccacttcctgaccaatctatgcacgagaaaacttcagtacctgctttgatcgaagaaatctacactttcttacgtcaagctgatgcaaaagaattaaatgacttgttccgtgctttaaataaagcaaaagaagctggtgactctgcgaaagtagctgaaatcacagctcaaatcgacaacttcgaaactcatgttgtgccaattattgcagacatcgatgctggtttcggtaacgaagaagcaacttacttacttgctaagaaaatgattgaagctggtgcttgtgcgcttcaaatcgaaaaccaagtatctgatgcaaaacaatgtggtcaccaagctggtaaagtaactgttccacatgaagacttcatcgctaagatccatgcacttcgttatgcattcttagaaatgggtgttgaagacggtgttatcgttgctcgtactgactctgaaggcgctgacttaactcagaagatccctgtagttaaagagccaggtgatatcgcatctaaatatattagctacttagatactcaagaaattgatatctcagaagctcaagaagatgagatcttaattaaacgtgatggtaaattacatcgtccaactcgtttagcttctggtctataccaattccgtgaaggcactcagattgaccgtgttgtacttgactgtatcactagccttcaaaacggtgctgacttactttggatcgaaactccgactccaaacgtacaagaaattgcacacatggttaaccgtgtaaaagaagtagttccgaatgcgaagcttgtttataacaacagcccatcattcaactggactttaaacttccgtcaacaagcgtacgatcgttgggttgcagaaggtaaagatgtatctgcttacgaccgtgctaaattaatgagcgctgagtacgacaatactgaattagctgctgaagctgatgaaaaaatccgtactttccaagcagatgctgcgcgtgaagctggtgtgttccatcacttgatcacacttcctacataccacactgctgctctttctactcatgaattagcacaaggttacttcggtgaccaaggtatgttagcttatgttgctggcgtacaacgtaaagaaatccgtggcggtatcgcatgtgtgaaacaccaagcaatggctggttctgacatcggtgatgaccacaaagaaatcttcgctggtgaaaatgcacttaaagctggtgacgatgctaaaaacacaatgaaccaattctcagctcac

SEQ ID NO: 8971 - DNA, 1335 bp, Acinetobacter baumannii
atgtctcttaagcctaaaccgcataaaacactaaatttaagcccaccttctctgttagcactgggctttctgggctttattgtctttggcacattattgcttaaacttcctattgccaataacggacatgttagttggatggatgctctatttacggcgacctcggcagtcactattacaggtctatccgttttaaatattcatgaatcttttacacttttcggacaggtcattattttattattgattcagtcaggtggtttaggctttatgacttttgccattttggcagcattaagtttatctcctaaagttggccttaaacagcaaatgatggctcaagatagccttgggcagactagtctttcaaaggttacttttgtagcaaaaggtgttgttacttacacacttctttttgaactgattggaacagtgatcttaactaccgcatttacaccgatttatggctttgctcgaggactatattatgcagttttctatagtatctcatcatttaacaatgcgggtttttcactatttagcaacagtttagttaacttccaaagcaactaccttatatgtattacgattagtttgctctatacattaggtggactgggttttttagtcctcatggatatcaaacaaaataaaaaatggaaaaaactcagcccaaatagcaaactcatcctaacaactattgcgattattaatttggttgcgtttgtattaatttgggttttggaagcacaaaatcctcataccttaggtctgctcaatgtaggtgatcaagctttaaatgcatggtttcaagcgactgttccacgttcttcagggttcaatactattgatactggagcaatgaccaacagtagttctttacttatgatgctactcatgttcatcggtggaggttcactcagtactgctggaggtataaaagtcggcacctttatcatattagttttaagtgtactttcctttttaagacgtaccgatgaaatcagggttttcaatcactccgtttctcacgaaactacttataaagccttagctgtcaccgcaattaccagtattctcatatttatcgggttctttattcttttacttttagaacctaaagcagactttatgaacttattatttgaagtcgtttcagcagcctgtacggtaggcctttctcgcggtatcacgccagatttacacaatggtagtttatttattttaagcctacttatgtttgcaggccgtttaggccccttaacactcgcctatttaattgctactcctaaaaaaagccgtctcaaacatcctcaagccaacattcaaattggt

SEQ ID NO: 8972 - DNA, 840 bp, Acinetobacter baumannii
atgcgtgcatatttagaccttctacaacatatccttgataatggcggtgacaaaggcgaccgtacaggcacaggaacccgttctgtatttggtcatcaaatgcgttttgatctctctaagggttttcctttactcaccacaaaaaaagttcactttcgttctatcgtgattgagttactttggttcttaaaaggcgatactaacgttaagtacttacaagacaataaagtcaccatttgggatgaatgggcaacagcagaacaaactgcccgtttcggccgcccagaacatgagcttggcccagtttatggccatcaatggcgtaatttcggcgcaactaaaaatgccgatggtacttataaccaagatggttttgaccaaattaaatggttaattaatgaaattaaaaccaacccaaattcacgccgtttaattgtctctggctggaacccaaatgaggctggacaagttgctttaccgccttgccatacgctcttccaattcttcgtacaagacaacaagttgtcatgccagctttatcaacgtagtgctgacgtattcttaggcgtgccatttaatattgccagctatgccctactcacccatatgattgctcaagtgtgtggcttaggtgttggtgattttgtttggacaggtggcgatacgcatctttatgccaaccattttgagcaggcaaaactacaattgacgcgtgagccattaccactttgccaattaaaacttaatccggatgttaaagatattttcgacttcaaatttgaagacatcgagattgtaggttacgagtcacatccggcaattaaagcaccagttgcagta

SEQ ID NO: 8973 - DNA, 1254 bp, Acinetobacter baumannii
atgggttatcagaagatcgtggttcctgccgacggtgataaaattacagtaaaagcagacctgtcactgaatgtaccaaatcatccaattattcctttcattgagggtgacggtattggtgtagatattacaccggcaatgaaaaaagttgttgatgcggcaattttaaaagcctatggcggcaaacgctctattgaatggatggaagtgtattgcggtgaaaaggccaataaaatttacggtacttatatgccggaagaaacctttgaagcgctgcgtgaatttgtagtttcaattaaaggccctttaactacaccagtcggtggtggcattcgttcacttaatgttgcactacgccaagaactggatttgtatgtatgtgtgcgtcctgtgcgttggttccaaggcgtcccttcacctgttcaacatcctgagttaactgacatggtgattttccgtgaaaactcggaagatatttatgcaggtattgaatggaaagcagattctgaagaagctaaaaaagttattaaattccttcaagaagaaatgggggtcacaaaaattcgtttccctgaaggatgtggtattggtattaaacccgtttccaaagaaggaacacagcgcttagttcgtaaggccattcagtttgcaatcgataatgacaaaccttcggtgactcttgttcataaaggcaacattatgaaatataccgaaggtgcctttaaagaatgggggtatgagttagcgctagatcgtttcggtggtgaattaatcgatggtggcccatgggttaaaattaagaatcctaaaaatggtaaagacatcattattaaagacgtgattgcagatgctttcttgcaacaaatcttgatgcgtcctgctgactactctgtaattgcaacccttaatttaaatggtgactatatttcagatgctttagcagcagaagtagggggaatcgggattgcgccaggtgcgaatattggtggagctattgcagtgtatgaagcaacgcatggcactgcacctaaatatgctgggcaagataaagtcaacccgggttcaattattctctctgctgaaatgatgctccgtgatatggggtggacagaagcagcggacctgattattaaaggtatttcaggagcgattgcagctaaaaccgtaacttacgattttgagcgtttaatgccgggagcgaccttgttacgttgctcagaatttggcgatgccataattcagcacatggaagat

SEQ ID NO: 8974 - DNA, 1830 bp, Acinetobacter baumannii
atggtagataagcgaacaaagcaaacacgaaaaaaacagcagtctatttcggaaaaaccaagtcttgcctttgatatgtggcggttttatctgctctgggcagtcgtgctactgtgttttgtggtattaattgcacgtgcattttatgttcaagtcattaataaagactttttgcaaaataaggccaatgctaatattttgcgtactgaacgtatagaggctatgcgtggagtgattagtgatcgccacggtgtacctttagcgattagtagtccaatcatgaaaattgtgattgatccgcgtgattattttgagaccaagcatttatatgatcaaattacggctgaactaaaacaagatccaaacaaccgtaaattaaaacgccagttaccagataaaaatttaaatcttgatgaacttgccgacgtggtgggtgttgatcgtgctgatcttaaaaaacagatgaatgcgcgtccgcgttcccgctatctggttttgaaaaaagaagtacctcctcagcaagctgacctcattatgaaaggtaatttccaaggggtgtatgcagaaaaaacttataaacgttattacccgcaacctcagccaaatgcccaaattattggtttgaccaatagtgaaggtcaagggatcgaaggcttggaaatgcagttgaataagcaactgtcaggtgtagacggtgagcaaaaaattattcgcgataagcgtggtaaccgtttaaaagtttctgaggtaattcgtgagggtgaaccaggtgaaaatatcactttaagtatcgactcacgtttgcagtacattatgtaccgtgaattaacggctgcaggtgtggctaacaatgcgcgttcagcaacagcaattgcagttgatgttaaaacgggtgaaattctggcaatgaccagttggccatcttataacccgaatgataagaatggcttatcaaataaagatgctatgcgtaaccgtggtgcgatcgatatgttcgagccaggttcaaccatgaaaccttttactatttctgcagctttagaaactggtcaatatacgccaaatacgattgtaaatacctctcctggctcaatgcgtttaggctggcatactattcgtgatacccataactatggggctttgaccgtaagtggtgtcattattaagtcttcaaacgtgggttctgcaaaaattgcattatcacttccgaaagaaactttgccgagcttctttaatcgtgttggttttggtaagcgttctgcagtaaggttccctggggaaagttcaggtctggttttacctgttaataaattaaactcttctcaaatcgggaccatggcatatggttatggcttaaacgcgacaatccttcaattggctcaaggttatgccatgcttgcaaatcatggtgtcaaaatgccattaagcttgcataaactagatcagccacctaaaggtgagcaagttttaaatccgaaaattgccgatcaagttttgttaatgcttgagcaagtgactatgccgggtggtactgcaaaacaagtcaatattcctggttatagggtaggtggtaaaacaggtactgcacataaattgcgtgcggatggtaaaggatattcaaataatgagtatcgtgccttatttgcgggtgtcgcaccaattagtgatccacgtttagccgttattgtagtggtggaaaacccacaaggtcgctattacggtggtttggttgccgctccagtttttgctcgtattatgcaagagtcgttgcgcttaatgaatgtgccgcttgataagccacttaatactccagaaaatcctattcgcagg

SEQ ID NO: 8975 - DNA, 525 bp, Acinetobacter baumannii
atgttattgacatatgaagcgacgaaagacttaccagttgtggattgtgagattgaaggttgggctggcaatgttactactcagcgtatcgcgggtaaaaaaataacgattgtaccgattttgcgtgcaggtatcggtatgcttgatggtgtgcttaacctaattccaagtgcaaaagtaagtgtgttagggcttgagcgtgatgaagcaactctagaagtacgtacttactataaaaagttagtttctgatgtcgctaaccgtattgccatgatcattgatccaatgttggcaacaggtaattctttagttgctgctattgatgtattaaaggcaagtggatgtaaagatatccgtgttatggtgttagttgcagcacctgaaggaatcgcgaaagtagaggcagcacatcctgatattcagctttatactgcatctattgacaatggcttaaatgaacatggttatattgttccaggtttaggcgatgctggtgacaagatttttggtagtgttcaaaaagac

SEQ ID NO: 8976 - DNA, 1002 bp, Acinetobacter baumannii
atgaagcatcttaaagaagctctactagagttaaccaacgatgaagatgtaaccgagcatattttaaaagagcattacttttgcgacaccgtagttaatcgcatggtttcaaaactttctaatcagaatttatatcgtcaacttcgtattaagcataattttcttgaacagcatttagaagatgtggagcaagaagaccaaatcgaaattgaagactgtaataaactgaatcaagaacaactaaatcaggcttctatctatgttgataacatgcgccgtaatttccagccgggacatatcttacaaagcatggatttaatcttgttccatagtgaaactgatatgccaatctatgtagagaaaggcagtcctttacttgaaaagttgcgtcaggtggtattggttgaccaaattactgacattcaactcattaaaaatcgtttatggaatggtgtacatgcgatgcttgcttggtatgcatctttaatgggttatgaatctattggtgttgccatgggtgatcatttagttaaagcatttgcagagaacttaattgcagaagtgaagcagggacttgctattgtattacctaactatgcaaaagatctggatcgaatgtcacaaagttttctagactcatgtgaatatgcatttaaagatccttgtcaacgcgtagctagagatccactacgcaaactcaatcataatgaacgtgtcatggcatcaattgctgtgaatatttgtcatgatttgccttataaaaatttattaaaaggtgctgctttaggttatgcctatgcgattcaatttttagaaattgaagagactaaagctgttgaacagctgcagcaacaaattcagaacctagacttgagtacaactcaaagaagacagcttgaagctgaattggttcaacttatccaatatttgttttctgaacaaggtaaacaacctttggacattaagctgaacaataccaaaactacatcaaatcaatatgtt

SEQ ID NO: 8977 - DNA, 774 bp, Acinetobacter baumannii
atgttatgtatgggggttgctgttgcacttttgacaagtggttgtcagacttcgcaaacggttaaaaaggacccggaaaaagcagtaaaagtgcgtacgcagcttgctgccgaatacattcgttctggtgacttggattctgcaaagcgttctcttgaccaagcgttaagtgtcgatagtcgtgatgcaacggcaaatatgatgatgggtattttattgcaacaagaaggcagtaaacccaatttagaaaaagcagaacattactttaagcgtgcaatttcatctgaaccagacaatgctcaggcacgtaataattatggtacgtatttgtaccaaatggagcgttataatgatgctattgagcaatttcgtattgctggtgcaacattaggctatgatcaacgttaccaggccttagaaaatctggggcgaatttatttaaaactaggcgatattgcgagtgctgaaaaaacattcaaacaagcacttcttgctaaccgcgactcttacatttcaatgttagagttagcagaaattttttatttgcagcagcagattccggctgctacacaaatgtatgaacaatatgttcgtacagtggggcagaaaaatcagggtgcacgcgcactttggattggtttaagagtggctcgagccaatgcggataaaatgggaatgcaagttttagtaaaccagttacgtgctttattcccggaaagtccagaatatcaacgttatttgcaattacagtatagtactgaggccgtatggaaa

SEQ ID NO: 8978 - DNA, 789 bp, Acinetobacter baumannii
atggaaataaatcctaattcacagcagccaactggctcaagcttaccgacttctgctttaggaaatattcaacgtcctggtgagtatttacgtcaaattcgtgtttctcagaaaaaagaattagagcaagtatcttcagatttaaatatgccgctgaaaacgctcaatgcgttagagcaagacgactataaatctttgccagaagcgacttttatcaaaggctattatcgttcttatgcgaagtatttaaatactgatgcaactgcaattatccagcgttttgatgagatttatgcaaacgatactgggcttttgccaaatcatgctttaaacaactcaccaattaaaatcatgggtaaattaccgggttctaatagtgatcgtaacaaaaaatggttaaagcgcgcactgcttgcaattttgattattgctgtcgtgtcattaattgtgatgggtgtccaaaaatggacctcaaacaaaggagatgctgagctgccaaaagcaaatcagtctaatgttgaagttttacctatgaaagggaacacctctgcaacagcgggtgaccaattggtgttaaactttaaccgtccaacttctgttcatattgtagatgcaacagggaaggttttagcgacgggtcgtcaggcatcgactttaaccttaaatggtgagtctccattccagattcgtcttgatgatgcaacggctgtgtcattaagtctaaaccaagaacagatttcattgtctccatatacggtaaacggtaaagctgaattccgtttatcccgc

SEQ ID NO: 8979 - DNA, 2427 bp, Acinetobacter baumannii
atgtctgaacttattatgaatgaaaaaactgacttagagcctcaggttccaagtgtattaccactattagccttacgtgatgtggtggtttatccacacatgcagattgcgctatttgtgggtcgtgaaaaatcgatcaatgcagttgatgtggctcgtaacagtgacaatttagtatttgtagttgcgcaaaaagattcgcttacagaagaaattgatcacgacaatttataccagtacggtacagtcgctaagattgtacaagtagttaatcatgaaaatgatgaaaactgcattaaagtacttattgaaggcttacatcgttctaagttgaaaaaaattatcgatgaagatagttatttgactgccgaacatgaattaagtccaatgacgattaatgtagataaggcaacgcaagaaactcgtttacaagagttacgtaatttatttgctcaatatgcagaagcaaaattacgtaatgcacgtgaactggttgctgctgccaacaaaatcgaagacttattgcaattgatgttcttcgtagcaactcgtgtgcctctaaatattgaaattaagcagaaatttttagagtacgatgagtttgaagctcatttgcaagagttgatgaactacttgatgaatcaatctgctgaacagcaaattgagcaaactttacatgacagcgtaaaacgccaaatggaaaagaaccaacgtgaatactttctaaatgaaaaaatgaaagtcattcaacgtgaactttccgatatgaatggcggtgctgaagatgacgttgctgaaatagagaaacgtcttgctgaagctgatttacctgaacacgtacgtaaaaaagccgaagctgagttccgtaaacttaaagcaatgcagcctgcatctagtgaagctgctgtggtacgtaactatctagaagtgattctagatacgccatggaacaaagcgagcaaagtcagtattaacctgaacaaagcgcaagagattcttgatgccgatcattatggtcttgatgacgttaaagatcgtattgttgaatacctagctgttcaatcacgtgtgaaaaaactcaaaggccctatcctttgcttggttggacctccaggggttggtaaaacttcacttggtgaatcagtagcgaaagcaacaggtcgtgaatttgttcgcatggcgcttggtggcgtacgtgatgaagcagaaattcgtggacaccgtcgtacttatattggtgcgatgccaggtaaaatcgtgcagtctttaacaaaagttggtgtgaagaacccattgttcttactcgacgaaattgacaagatggcacaagactaccgtggtgatcctgcttctgctttgcttgaagtgcttgatccatcacaaaacagtaagttcaacgatcactatttagatcttgatcttgacctttctgaagtgatgttcatctgtactgcaaacagcatgaatattccagaagccttgttggaccgtatggaggttattcgtctaccgggttataccgaagatgaaaaagttaacattgctgagcgttaccttgttcctaaagcaattaagaacaatggtctacgtccaaaagagttaactattcatgaagaagcgatccgtgacattgttcaacgctatacacgtgaagctggcgtacgtaatttagaacgtgaagtttctaaaattgcacgtaaagtcgtaaaagaagcggtaagtaaaaaatctaaaaacttacagcttgacgttacctctgccaatcttcctgaatacctaggtccacataaatttgactttggtatggccgaagatgaagcacaagtaggccgtgtaaatggcttggcatggacttctgtagggggtgaattgcttactattgaagttgccgcagttaaaggtaaaggtaaattcattacaaccggttcactcggtgatgtaatgaaagaatcaattaccaccgcaatgactgtagtacgcacacgcgccgatgaacttggaattgaagcatctcgctttgaagaaactgatgtacacgttcacttacctgaaggtgcaactccaaaagatggtccatctgctggtttggcattaacaactgcacttgtatcagcatttactggaattgcgattcgaccagatattgcaatgacaggtgaaacaagtctaggtggtcgtgcgatgcgtatcggtggcttgaaagagaaacttcttgctgcacatcgtggtggaatcaagctcgtctttattcctcaagataacgttcgtgatttggcagaaattccagacaatgtgaaagaaggattagaaatcaaagctgtgaaaagcattgatgaaatcttacctttagcattaacttcgatgccaaagcctttacctaaaacaccgattgtaaaaccggtggaaggctcaaaagcagcgcgtcac

SEQ ID NO: 8980 - DNA, 1026 bp, Acinetobacter baumannii
gtggaaaagttaaatatgtcagaacaccgtaaacctgaacagggtgtaaaacttcgtggcgcagaaaaagtcgcaagaattcctgtaaaagttgtacctacggttgaagtgccgcgtaaacctgactggattcgtgtcaagatgacggcaccagaagaagttcagcgtattaaaacaactttacgtgctcaaaaactccataccgtttgtgaagaagcagcttgtcctaaccttccagaatgctttggcggtggtacagcaacattcatgatcatgggtgatatttgtacacgtcgttgccctttctgtgacgtagcgcatggtcgtccaaatgcattggaccctgatgaaccacgccacatggcagagacaattgccaatcttaagctcaaatatgcagtaatcacttcagttgaccgtgatgacttgcttgacggcggtgcacaacattttgtggactgtattaaagaagctcgcgcacttagcccaaatacattacttgaaattttagtaccagacttccgtggacgtatggatattgctttacgcattatgaccgaatgtccaccagacgtatttaaccacaacattgagactgtacctcgtctatataaagcgatgcgtccaggttcagattatcagcactctttaaacctattaaaaatgtttaaagaatactgcccagacatcccaacaaaatgtggtttgatggtgggtattggtgaaactgaagaagaagtcattgcattgcttgatgacttacgtgctcacgatgtcgactatgtcactattggtcaatacttgcagccttctaaacagcatgcaccaattgaccgttttgtaacaccagaagaatttgaacgttatgcagagcatggccgtaaacttggctttagaaatatttggtctgcaccaatggttcgttcaagctattttgctgatcgccaatactatggtgaacctgttcctgaagttcgtcgcaaggtagatcctgcgaaaaaaattgcggtacaagcaatcgaagct

SEQ ID NO: 8981 - DNA, 1146 bp, Acinetobacter baumannii
atgaatatggcattaaaagtttctatggcttctaaatctgctcatttaacccctgagcaaattgaagaatttggccgccgtgttgaacagattcgtcaagatgttatgcaaagtcttggtgagcaagatgcaaaatatatctacaaagtccgtaactttgttcgctataccgaaatcgcatcacgtggcatgttgatgtttggtggctggattccacctgtctggttattgggtacaggtatactaggtatttctaaaattgtagaaaacatggaacttggtcataacgttatgcacggtcagtttgactggttaaatgaaccaagtctgaatggtaatacctatgattgggataccattgcctctggtgatgactggcgtgaaacacacaactatgtacaccacacctataccaatattgtcggtaaagatcatgatgtcggatatggtattttgcgagtaagtgatcaacagaagtgggaacctcgtcacctatttaatattcctctggctctacagttaatgtttttctttgaatggtatgtaggtgtacaaaatctacatcttgaagatgcgttggtttataaaactaagagttggaaacaggtttggaaagattctgctaaagtccgtaaaaaagcaacgcgccaagttttaaaagattatgtgtttttccctgtgatctctggtcctatgtttttaccggtttttgcaggcaatgtagttgctaatattattcgtaacttgtggtcatctgctgtgatttttaatggtcactttactgaagatgcagaaacgtttgagccggataataccgacactgaaactaaggcagagtggtatttacgtcagattcgtggttcaagtaattttagtggtacagaatggcttcattttatgagtggtaatttaagccatcaaatcgaacaccatttattcccagatatgccagctaaccgctataaagaagtagcaccgaaaattaaggcactctgtgcagaatacggcattaactacaatgaagctaatttcatgcgtcagttctggagtgtatgggtgcgtttagcaaaatgctcattaccaaaccacaccactgcaaaagtgatgcagacattagaaaaattaaaagcaaaattcaaatttgcc

SEQ ID NO: 8982 - DNA, 906 bp, Acinetobacter baumannii
atggatttattttgcagagcgaaatataatggcaaaactattgctttaattatatttgaggatcgaatgtctcaaaacacggaaactgaaaaaccaataaattttgatgagatacgtttagatcctatttcgcatatacatcgggaaaacaacccgcaatttattgcttctttagcacgcggtttagaacttttaagatgcttttctgcaaataatcaggtgcttggcaaccaagaattagcaaaaatgacaggtttacctaaaccgaccattgcacgtattaccaatacccttgtgtcattaggttatttaaaacaattgcctaactcgaccaaatatacattagatattggcgttttatctttaggatatgcagcattatctaacatctcgattcgtaatattgctcatcaatatatggaagagatgagccagtatgttcaagcgcctgtagcgatggcaacgcgtgatcgcttaaatatggtgtatatcgatgttgtgcaaattgaaactgcattaaacatgcgccgtccaattggttcaactttaccactgcatagcagttcaatgggccgagcatgcttagctgcgacccctgaacgtgaacgcaactttctacttgatgcactaaaacaaaagaaccccgaaaactggccagccataaaacgctctttagaacgagctttccgtgattatcaagattatggatattgtttgtcgttaggtgagtggcataaagaagtgaactcggtggctgtacctttggttagttctaaacacggtctttatgtttttaactgtggtgcgccaagttttcatttaaatccagaaaaacttgaaggtgaaattggaccacgtttaatccacatggtgcacaatattcaagatgctttgaatgaaacgcac

SEQ ID NO: 8983 - DNA, 1377 bp, Acinetobacter baumannii
atgtggggtggtcgtttttctgaagcgacggatgcttttgtagccgaatttaccgcctctgttcaatttgaccagcgtttttataagcaagacatcgctggttctattgcgcatgctaccatgcttgcgaaagttggcgtactgacagaagcagaacgagacgacattattgaaggtttaagcaccattcgtgcagaaattgaagctggaacttttgaatggcgtatcgatcttgaagatgttcacatgaacattgaatcacgtttgactcaacgtatcggtattacaggtaaaaaacttcacactggccgtagccgtaacgaccaagttgcaactgatatccgtctttatctccgcgacgaaattgacgacattttaggcttattagagcgtttacaaaaaggtttgttgggcttggctgccaaaaatgtaaatactattatgcctggctttacacacttacaaacagctcaaccggtaactttcggccatcacttgttggcatggtttgaaatgttagttcgtgatactgaacgtcttcaagactgccgtaagcgtgttaaccgtatgccacttggttctgcggctctcgctggtacaacttacccgattgaccgtgcttatacagcagagttactaggctttgaagctgtatctgagaactctcttgatgctgtatctgaccgtgattttgctatcgaatttaatgcagcagcatctttaatcatgatgcatttatcgcgtatgtctgaagaacttattctttggacttctgcacagtttaaattcgtaaatattcctgatcgcttctgtactggttcttcaatcatgccgcagaagaaaaaccctgatgttccagaactcatccgtggtaaatctggccgcgtatttggtgacttaattagcttacttacgcttatgaaaggtcaaccactggcttacaacaaagacaaccaagaagataaagaacctttatttgatgccattgataccgtccgtggttcactcatggcgtttgctgacatgatccctgcattggttccaaatgttgaaatcatgcgtgaagctgctcttcgcggattctctacagcaactgatcttgctgactacttagtgaaaaaaggcgttgcgttccgtgatgcgcatgaaattgtaggtaaagctgttgcattaggtgttgctgaagaaaaagatttatctgagttaacacttgagcaattacaacaattctctgacctaattacagcagatgtatttgataaagctttgacactagaagcttcggtaaatgcacgtgatcatattggcggaacttcaccaaaacaggttgaagctgcgattgcacgtgcccataaacgtctagaacagttatacgct

SEQ ID NO: 8984 - DNA, 819 bp, Acinetobacter baumannii
atgtcagcagctccacgcattggtattttgggtgcaggcggccgtatgggtcgtacacttattcaggcagttcaacaagcaggctatcaattggctgcggcagtagagcgtccagaaagtagtttggtcggcacagatgctggtgaacttgcaggaattggttcagtgggtgtgaaggtttcaggaagcttggctgatgtacttaaagattgcgatgtaatcattgattttactgcaccagctgcaaccgcccagcatttaaagctatgtcgtgaagctggggtggctatggtgattggcaccacagggatgtctgatgagcaaaaggctgaattggatgaagcagcaacgcatacacctgttgtatatgctgcgaactactctgttggcgtaaatgtatcaatcaagttacttgagcttgcagcaaaagtatttggcgatacagtagatattgaagtaattgaagctcaccaccgtcataaagtagatgcaccatctggtactgcattaatgatgggtgaagcaattgcggatacgttaggccgtaacttaaaagaagttgctgtttatggtcgtgaagggcataccggtccacgtgatcgtcaaaccattggttttgaaaccatccgtggtggcgatattgtaggggaacatacggtcatgtttattggtgagggtgagcgtgttgaagtcactcacaaagccactaaccgtatgaactttgccgccggtgcagtacgagctgctgcatgggtagtgggccgtgaagcgcgtaaatatgacatgaaagatgttttagggttgaacgacgtacaggtg

SEQ ID NO: 8985 - DNA, 1263 bp, Acinetobacter baumannii
atgtcagacacccatattccacttcctgaacgcctgcgcccgagagacttgtctgaaattattgggcaagatcatttgttaggtgaacatgcgcccttacgtcaaatgattgatcagggacatttgccttctattattttttgggggccgccaggcgtcggtaaaacgacaattgctttgcttttagctcaggcaatagatcgtccatttgtgagcttatctgcgctaaatacgggcgtaaaagaattacgtgaagtgattgcagaaagtggtgacttactgacacctgtagtttttattgacgaaatccatcgctttaataaatcacagcaagatgcattattaggtgccgtagaaaaaggtaaaattaccttaattggcgccaccactgaaaacccgtcttttgaagtcaatagtgcacttttatcacgctgtcaggtctataccttaaacagtttagacagtgaggcaattcagacgctacttaacaatgcactccaaaacgatagatttttaaaagaacgctatattcatattgaagagtatgatgctcttttacagtttgcagcaggtgatgctcgtaaggcactcaatttacttgacttaattgcaagtacttttgagcccgaagttgaaaataccattaccaatgcggttgtagtaaaagtcgctcagcaaaatattgcgcgttatgacaaatcgggtgaacagcattacgacctcgtttctgcctttatcaaatcgattcgtggtagtgatccagatgcggctttgtactggatggcacggatgcttaaaggtggggaagatccggtttttattgcaagacgtatgttgattgccgcttcagaagacattggaaactcgaatccaaatgcactattgcttgcaggtgaatgtttccgttctgtacaggcggtgggaatgcctgaggctcgaattattttgggtcaaacagcagtttatttagcgaccagtgcaaaaagtaatagtacttacctcgcaattaataaggccttggaacttgctgagaaaacggcaaatttaccagtacctttacacttgagaaatgcgccaaccaaactgatgaaacagcaaggttatggaattaattatctctatcctcatgactacccagagcactttgtgttgcaagactacttgccacctgagttaaagggaaccaaactctatgagtcggcaagaaacaagcgtgaagttgaaggtgaacgcctacaacaacgcagatggcagcaggaacaa

SEQ ID NO: 8986 - DNA, 258 bp, Acinetobacter baumannii
atggctttaactaacgaagaaatcttaaatgcagttgctgaaaaaactgttcttgaacttgttgaattaatttctgctttcgaagagaaattcaacgtatctgcagctgctgtagctgttgctgctccagctggtggcgctgctgctgctgctgaagaacaatctgaattcaacgttgagttgacttctttcggtgctaacaaagtagctgtaattaaagctgttcgtgaagcaactggtcttggtcttaaagaagcc

SEQ ID NO: 8987 - DNA, 2616 bp, Acinetobacter baumannii
gtgacacaaaaacttgatcaagtgacatcttcaactttatcactcgctaaaacaaacaccacaaacgtcacaataaatgcatttccttcagcttttgagcaacctgatattaaaatgactttagataaaacagcgttaaaacccgaacaacttacgcatattccaaattttgaaaatattccagcctcaacaaaacgcatcaagccgctcaacaactttttagggcaagatcgcgccaaagcttcggtagaagccggtatttccttaccctactctggttataacatttttgcggtaggaacagcaggcttaggtaaacgcaccatgattaagcgtttactacaacaacatgccaaaacagtgcctactccagatgattgggtatatgtttataactttaaacaggctcgtcagcctattgcgctacgctttcctgctggacaaggaaccaagtttcaacaaactcttcatcaaacttggcaaattattttaaagcagcttgaacgtcgttttagcgcagagacttatcataaccgtatcgagcgaatccgtcaggaaactggtgatgaacagcaacaagcacttgtcgaattaacgaaagaaggcgaagaacttgatctaaaattgatttctcgaaatgagaaacatggctttgtacctgtacagttaaaagataatcaggttcaagaactgactcaaacagaaattgacgctttaaatagcaaacagcgtgctgagattgcagccaatattcgctatatggataaaaagcttgagcgtcttggtctgcatttgggcgacttagaagatgatgcacgcgacaaagtttctgttttaaatcgagacatcgccactcaagtggttatgccacgcatggacttaattttaaataaatatgggcaagtgaaaggccttgaagattatttaaaacagtatgctcaagatatcattgacaatgttgagttaattttagaacaagaagaagatgactttgctcctgctatgttcaatcgtgtaccagcgcgttatcaagcaaatgtgattgtctcaaacaagccaaatagcggtgcaccagttatttttgaagatttcccaacgcactacaacttgctgggtcatgtagaacaactcacccacaacggcacaattactacagatttcactcttattcgtcccggtgccctacatcaagccaatggtggttttttaatgctggaggctgaacaactactcgaacagccttatgcatggcaaggtttaaagcgtgccttaaaatcgggccaactcaagctctcttctcttgaacatatgttgactttaaccggcagtatctcgatagagcctgctgctattccacttgatattaaagtggtactgatggcagagcctgagatttattatgaaattttagaagtagaaccagagcttggtagcgtatttaaaattcgcgcagattttaccgatacattacaacgtaatgacgaaaatgaacaagcttatatgcagctgattgcagactatgtacaagccgataaactgcttccatttgaccgcagtgctctagcggcattactgacagactcaagccgtcaggccgaagaccaaagctcattgtcgttacatgcttcaacgttgggtgatcttattcgtgaagcgcatcatcatgcatttaaagccaatgataagatggtaaccgaccagcacattaaccttgccctacaacaccgacaatatcgcttaggctatttaagagaactttactggcaagatttatcgcgtggaacccagttaatcgaaacttctggccatcgtttaggtcaaattaatgccctctctgtcattcactatgcagatgttgagtttggtttaccttcacgcttaactgcctcggtttatcaaggcggtggtgatattcttgatattgaacgtagcgtagaactaggtggttcattgcatgccaaaggcgtgttactcatgtctagcttcttaaaagctcactttggacgtgaacagattttacatttttctgctgctctggcttttgaacagagctacggccaagtggacggcgacagtgcaacagttgccgagctttctgcattaatctctgcaattagtcagttaccaattgatcagtcatgggcaattaccggttctatgaaccagttaggtcaagttcaaccaattggtggcgtaaatgcgaaaattgaaggcttctatgatgcatgtaagctacaaggtttaactggcaaacagggtgtcattattccacgccaaaacatgcaacacttaatgctacgtcaagatgtgattgatgcggtgcgaatgggtcaattccatatccatgcaattgatacaattgatcaagcacttgagattttaatggctcgccctgttggtactctcgacaaaaaaggcaaatacagcaaacactctatttatgctgctgtaatggaacagcttgaatactggcaagcgatcgaagatggcgcagaagttgaagaggagccaaagaagaaaaagaaaaataagaaaaaaattaaaaagcatgaagagctcacagccgatgatcttcctcaagaaactcaagaggaagttgctacgctaaagcaaaaa

SEQ ID NO: 8988 - DNA, 2778 bp, Acinetobacter baumannii
atgaatagtattccaagcgttgaaatcgatagctccgaccatgttgcaaaaatcactaaaacaacatgtccatattgcggtgtaggttgtggtgttagtgtaaacgttcaacaaaaacctcaaggacctgtggtgcaagttgagggggatgctgagcacccttccaactttgggcgcttatgtattaaaggtagccgacttgcggatactttggggttagaaacacgtttacttcaaccgatgtttggtcgtaagccacttcggactgtaaccacatgggatgcagcaatcaataaaattgccgataaattccagtcttgtatcgacaaatatggtcgtgacagcattgcattttatgtttcaggtcagcttttgactgaagactattatgtggtgaacaagtttgtaaaaggctatttgggcactgcaaatatcgataccaactcacgcctttgcatgtcatctgcagtggcaggtcacaaacgtagtttcggtgaagatattgtgcctgcaagttatgaagattttgaacatgcagatatggtggttttggttggttccaataccgcatggtgccatcctgtgctgtatcagcggattatgcaggctaaaagccacaatccagatatgtttgttgtggtgattgacccacgttttaccagtacttgtgagcaagcggatttacatttaccgattttaccgggccaagatgtcgcattgtttaatggtctattccaatatttatatcaaaatggtcatgccgatcaggtttttgtggatgcctatactgaaggtttgcaagaggttttggcaagtagtcagcaagaaacggatattgcctatgttgccaaacgcagtggtatttctttagacaaattacagcagttctttgagaagtttgcgcagactgaaaaggtaatcacgctattttcaatgggtgtgaatcaatcaagtcagggtgtgaataaggccaacagcattattaactgtcatttattaacaggcaaaattggaaagctcggcgctgcaccattttcaatgacaggccagcccaatgctatgggtggtcgagaagtgggtggcttagctaatatgttggctgcccatatggatttagataatcccttgcaccaaaaagtagtgcaaaccttttgggacagcccatttattgcaactcaagctggcttaaaagctgttgatttgttccatgctgttgaagctgggaaaattaaagccatctggattatggcaaccaatccagtggtaagtttaccagatgccgatcaggtgaaacgtgctttagagaaatgcgaattggtcgttgtgtcagatatctgtgtcgataccgatactacggcttacgccgatattttgcttccagctttaggttggggtgaaaaagatggaaccgttactaactctgagcgtcgtatttcacgtcaacgtgcttttttacctgcgccgggtgaagcaaaagcggattggtgggcaatgagtcaagttgcgaaaaaattaggctttaaaggttttgactttaataatgctgttgatatcttcaatgaacatgctgctttgtcagcacaagataatgcggacattgaagcacgtgagcaaactgatacgttccgttatttcaacttaaaaggtttaatgaacctaagtactgctgagtatgacgctctacaaccagtgcaatggccagtatgggataaaaaacaagacgctaaagccgttcaccaactgttttgcaagggccagtttagccataaaaatgctaaggcaaaactaattccgactgttgctattaatccggtacatgcaatttcagaagattatccgctcattttaaatacggggcgtattcgtgatcaatggcataccatgacccgtactggtttgtcgccaaatttaaccagtcaccgtgctgaaccattctgtgagattcatccaagtgatgcattaaagtttggtgtacgtgatcaaggcctggtagaagttcgttcgaaatggggcagttgtgtactgcgcgtgacattctcatcaggtgtccgtcgtgggcaaatttttgcaccgattcactggactgaacaggtcgcatccgacgcgcgtattggtaaagtcgttaatccggaagttgatgcaatttcaggtgagcccgagttcaaacatacgcctgtaactattcagccgttctataccacttggcaaggtgtgctctatattcgtgaaggatacgattcgcatattcaagaatcgctacatcactgtgcatggtggactaaagttaaaatggtgaaaaccaatcgctatgaacttgcagaccgccaaacttttcatgatactcaaaagaatctgaaaagctttttgccatttgccgatgaaacctttgaatggttaagcatagaagatatttcttcacaactgagccatagtattattttgaaagatggcattgtaattgcaagtctatatattgcaccgccagatttattgccagaccgtgactgggtagcaagtctgtttaaacgagaacgtttgagcgccttgcaccgtaaagctttactagcaggtatgccaatgtcggctaccaataatgatgggcctttggtgtgtagttgttttaaagtaggtaagaataaaattatcgaagcaataaaaacacaaaacattacccatgaaaaacaggtcactgcttgtttaaaagctggtggcaattgtggatcatgtttacctgaaatccgtggcttaattaaagcttgccagcaagaggtagaagtg

SEQ ID NO: 8989 - DNA, 309 bp, Acinetobacter baumannii
atgtacgcagtaatccaaagcggtggtaaacagcaccgtgtagttgagggtgaaacccttaaagttgaattattgaaggctgaatctggcgcaactattacatttgatgatgtattaatggttgtaaacggtgacaacattcaaatcggtgctccagttgtagctggcgctaaagtaactgcagaagtgattggtcatggtcgtcacgacaaaatccgcatcatcaaaatgcgtcgtcgtaaacactaccgtaaacaacaaggtcaccgtcaatggttcactgagttgaaaattactggtatttcaggc

SEQ ID NO: 8990 - DNA, 774 bp, Acinetobacter baumannii
gtgaccgagcttcaagatatcgattttgtagagttaagtgatgaagaaatgcatctctatagccgtcagattttacttgatggatgggatattgaagctcaggaaaaacttaaactggccaatgtattgattgtcggtgctggcggaataggctgtagtagcgcggaactacttgcacgagcaggagtcgggaaaattaccctcattgatgcagataccattgagataagtaatttacaacgacaaatcgcatttggtcatgaagatattggacgttataaagctgaagttttagctaaacggttacagaaaattaacccttatatctgtgttgaatactttaatgaacgtttagacggacataacattgataaactagttgaacatcaagacgtcgttttagatggctgtgataactttacaacgcgttatttagtgaatgcagcttgtaaaaagcatcaggtcgcattaattagcgcttctgcaattggttttcaggcgcaaatgtttatggttgaaggtgattcagcttgttatgaatgtttgttcccgaaagaacaacatgccaatgaagggctgcgatgtgcggaatctggtgtgcttgcgactacacctgtaatgattgcgtcattacaagcacatcacactttattgtatttaggactaaacagaacgccgctaaaacaaaaactgttactttgggatgggttaaatatgacgcaacgcattgttagttttgataaagacataaattgtccactttgtcaggcaagc

SEQ ID NO: 8991 - DNA, 225 bp, Acinetobacter baumannii
atgcatgatttttcaaaaccgcctcatgtgacgagtccggaagagactgcaaaaaaaagaagattgccagtttatattttaattattgttgggctttttcttctcgcacttgtggtttatatggttgctgatcacagcaaaacgccaaaagaggaagccgcttttcaacatgagaccataccacaagtcatcagtggtacttctgatttgaagacctatgaaggg

SEQ ID NO: 8992 - DNA, 2288 bp, Acinetobacter baumannii
gtggttgcatacgattatggtgtcaaaaccaacatcttgcgtatgcttgcagaccgcggttgtaaactcactgttgtccctgctgaaactccggctgaaaaagtattagcacttaatccggatggcgtattcctttcaaacggccctggcgacccagctgcttgtgattacgctatcgaagctgtaaaaactattgttgaaaccacaacattacctgtatttggtatctgtttaggacatcaaatcttggcactcgcttctggtgcaaaaactgtaaaaatgaatcatggtcaccacggtgcgaaccaccctgtacaaaatcttgaagatggtacagtgatgattacatctcaaaaccatggttttgctgtagatgcagaaacattaccggctaacttaaaagcaacgcataaatcattgttcgatggcactctacaagggattcatcgtacagacaaaccagctttcagcttccaaggtcaccctgaagcaagcccaggtccacatgactgtgcacctttgttcgatcatttcatcgaacttattgaagcatctaaacagtaattaaggagcgaataatgcctaaacgtacggatattaaaagcatcttaattattggtgctggtccaattgtcattggtcaagcttgtgagtttgactattctggtgctcaagcatgtaaagcacttcgtgaagaaggctatcgtgttattttggttaactctaacccagcaaccattatgactgacccttcaatggctgatgcaacttatattgagccaattacttggcaaactgttgctcaaatcattgaaaaagagcgcccagatgcagtactccctactatgggtggacaaactgctcttaactgcgcacttgcacttgatgaaaatggcgtattagaaaaatacggcgtagaacttattggtgcaacaaaagaagcaattgaaaaagctgaagaccgtaaattgtttgatgaagcaatgcgcaaaatcggcttggaatgtccaaaagctgccattgctgaaacaatggaagaagcattggaaattcaatctcgctttggtttcccagtaattatccgtccgtcattcactatgggtggttcaggcggtggtattgcatataaccgcgaagaattcctagagatttgtgaacgtggtttcgacctctctcctactcaccaattattgatcgatgaatctttaattggctggaaagaatacgaaatggaagttgttcgtgacaaaaacgacaactgtattatcgtatgtgcgatcgaaaacttcgacccaatgggcgttcacacaggtgactcaatcactgtagcaccggctcaaaccttaactgacaaagaatatcaattgatgcgtaatgcttcagttgcagttcttcgtgaaattggtgttgagacaggtggttctaacgttcagttcggtattaacccgaaagacggccgtatggttgtgatcgagatgaacccacgtgtatctcgttcttctgcgcttgcgtctaaagcaactggtttcccaattgcaaaaatcgcagccaaacttgctgttggttacacccttgatgaattgaaaaatgacatcactggtggcgtaactcctgcaagctttgaaccatcaattgactacgttgtaacaaagattcctcgttttaacttcgagaaattcccacaagcagaacctgtattaaccactcagatgaaatctgttggtgaagtcatggctattggtcgtaacttccaggaatctgtacaaaaagcattacgtggtcttgaagttggcgtaagcggtttcgatgagaaagtcgaagctggtgcaacaaatgtaaaagaaactattctaaaagagcttaaagttccgggacctgaacgtatttggtacgtagcagatgcattccgtcacggcttctctttagatgatgtatttgaagcaactaaaattgaccgttggttcttgatccaaattcaagatattgtcaacacagaagctcaagtaaaaactttaggttttggtgatctcactgctgaaaatatccgttcgttcaaacgtaaaggtttatctgaccttcgtattgcgaacctcatgggtatttctcaaaagcaattccgtaagcaacgttggaacttgggtgtttaccctgtttacaaacgtgttgatacatgtgctgccgagtttgaatctggtacagcatatatgtactcgacttacgatgaagagtgtgaagctaacccatcaaatcgtgacaagatcatggttattggtggtggtccaaaccgt

SEQ ID NO: 8993 - DNA, 756 bp, Acinetobacter baumannii
atgaccaagctggcaaaaaccttttctgcaccacgctacaatacccttattgggattgttttagcttgtgttatgggggttctcacctacttcggtctgttctaccagcaaaaagctattgctcaagattacccagttcaaggctttgatgtctctcaccatcaagaaaatattaactggaaaaaaatatcacccaaaaaattccagttcgtctatttaaaagcgactgaaggcggtgattataaagatccaaaatttcaagaaaactggttaaaagcacgcgaacatggctttcatgtcggggcttatcatttttatcgtttatgtcgtgatggcaaaacacaagctgaaaattttatttcaaccgtacccaacaaagctgatgcccttcctcccgttattgatctggaatatgacagcaactgtattaattctcataccaaagaacaattacttaaagaaataggcatcatgcatgacagcttaaagcatcattatggtaaacagcctatcttttatatttccaaaactttttaccatattgtattaataggtagtttccctcatacacctctttgggtcagagattacgaagggaaacctgagctgaaagacaagcgaaaatggctcttttggcagcatagtaatcaaggtaaaattgaaggcatcaccaagccagtagacttaaatgtttatgaaggttcagtcaaagaatggcaccaatttttacagcagcaaggcatcgtgaaagcacaa

SEQ ID NO: 8994 - DNA, 1134 bp, Acinetobacter baumannii
atgaagaaaatttttatttcaattgtatttggtactcgtccagagctcataaagttggctccggtaattttattagcaaaacaagactcacgatttcaggtagaagttatttttacaggacaacatgatgaattagttcgagatgcgatagatttctttggggttgaaattgatcatcgtcttaaaattatgaatgctggacaaagcctgaatcagcttttaattcatggcttaacgcaacttgaaaatatctatacagatagtcaaaaaagagatgcaattgttattcaaggtgatactacaaccgtattagctgctgggctagttgcattttcaatgaagattcctgttgcccatgtcgaagcgggtttacgttcttatgatttagatcatccatttcctgaagaaggcaaccgccagttagtttctcgtattaccaaatggcattttgcccctacagaacaatcaaagcgtaacttgttaaatgagcagattccaccttcattgattacagtgacagggaatacggtagtcgatgctgtgtatttaggaaggaaactcatagctgaaaagacgggtttgaaaaatcaacttgagccttacggaattgaattaaaacaaaatgataaagttgtacttataactgctcaccgccgtgagaattttggcgaaggaattcagaatatttgtaatgctgttgagtatttagcaaaacatcatcctgatttacattttatttggcctgtacatttaaatcctgctgtacataatgtagtgcacgataagtttaaaaatcatgctcaaattcatcttgtgaagccactcgattatccaagtttattggccgttatcgaccgctccacctttattttaacggactctggtggtttacaagaagaaagcccatcatttaataagcctgtcttaattttaagagacacgactgaacgcccggaagtggtagaggtgggagcaggggtattggttggaacaaatcagcagaaaattattgaagaggctgagaaacttttaacggattcgcagcattaccaaaaaatggctcatgttgaaaatccgtttggtgatggatgtgctgcccagcgaatattagatgaaattgccagaacttataac

SEQ ID NO: 8995 - DNA, 630 bp, Acinetobacter baumannii
atggatactcctctaattaacacaccagtccgccattggtgtgaatttgagtttatttccaaaactgtgaaaaatccaaatatccatattaaagggaattactcttactactcggcatattgggatcaaggttttgaacgctgtgtagtgcgatatctacatgacaagccttctactccagacaagccaattgatcagctctatattggtaattttgtttgttttggcgctgaatgcgtgattatgatgggtggtaaccaacttcatcggccagactggatatcgacattcccctttgacacccgaagttttttagccgctggtgacactataattgcagatggctgctggattggaagtcgtgcaatgattatgcaaggtgtaaaaatcggtgaaggtgctgttgttgcaactggagctgtggtcactaaagatgtccccccttatacaattgttggtggcgtacctgcaaaaattattaaataccgttttcctcaggagcaaatagaaaaactacttgctttaaaaatttatgatttagatgaaaaacaagttttaaaaatgcgggaatatttacaaacggatgatatagatgcattaacagcacatcttaaaaaattacagagcgaa

SEQ ID NO: 8996 - DNA, 4378 bp, Acinetobacter baumannii
gatactgatggttatagacttggtagattggcgatactggttagtgcaacagcgactgaccctgcaggcaacacttcattgccaggtacaggcacagtttcagcagacatcacagcacctgtggttgcgctggatgatgtgttgacgaatgacagcacaccagcacttactggtacagtgaacgatccgacagcaactgtagttgtcaatgtggatggcgttgactatccggcagtgaacaatggtgacggcacctggacgcttgcagacaatacacttccaacactcgcagacggtccacacaccattaccgtgactgcaacagatgcagcaggtaacgtaggtaacgatactgcagtggtgaccattgatacggttgcaccaaatgcaccggtgcttgatccgatcaatgcaacagacccagtgagcggtcaggcagagcctggttcaaccgtgacggtgacttatcctgatggcaccactgcaacagtggtagcaggcacagatggtagctggtcagtaccaaacccatgtaaacctgcatggatggcagatatcactctgcgtcgcaatcaggcgaactgacccgagcccggcaacagcgtgtcatccgccagatacaggagcatcattcttcagcagacaattcacagcacctgtggttgcgctggatgatgtgttgacgaatgacagcacaccagcacttactggtacagtgaacgatccgacagccactgtagttgtcaatgtggatggcgttgactatccggcagtgaacaatggtgacggcacctggacgcttgcagacaatacactgcctgcattaacagacggtccacacaccattaccgtgactgcaacagatgcagcaggtaacgtaggtaacgatactgcagtggtgaccattgatacggttgcaccaaatgcaccggtgcttgatccgatcaatgcaacagacccagtgagcggtcaggcagagcctggttcaaccgtgactgtgacttatcctgatggcatccagagtctacacatgatggtagcatggaaccaggactggaatggtggtcaagtaccaaatcaccaaggaagacatggtggaagacgagacagtgacggcaacagcaagggaaccctgcaggcaacacttcattgccaggtacaggcacagtttcagcagacatcacagcacctgtggttgcgctggatgacgtgttgacgaatgacagcacaccagcacttactggtacagtgaacgatccgacagccactgtagttgtcaatgtggatggcgttgactatccggcagtgaacaatggtgacggcacctggacgcttgcagtacatatacaccttccaacactccgcagagcggtccacacaatccattcacgcgtgatcgtgctatacagatgccagacaggataacgtaggtaacgatactgcagtggtgaccattgatacggttgcaccaaatgcaccggtgcttgatccgatcaatgcaacagacccagtgagcggtcaggcagagcctggttcaaccgtgactgtgacttatcctgatggcaccactgcaacagtggtagcaggcacagatggtagctggtcagtaccaaacccaggtaacctggtggatggcgatacagtgactgcaacagcgactgaccctgcaggcaacacttcattgccaggtacaggcacagtttcagcagacatcacagcacctgtggttgcgctagatgatgtgttgacgaatgacagcacaccagcacttactggtacagtgaacgacccgacagccactgtagttgtcaatgtggatggcgttgactatccggcagtgaacaatggtgacggcacctggacgcttgcagacaatacactgtccaagcacttcgcagaccggttccacaacaccattaccgtgactattcaaaatcagtgcggctacgtgctcatcagttagtgatgatcgattatcttgctattctgaatgaccacttgattacgcgttgcatccaatagtgctaccgcggatgcttgactccgatcaactgcaacaggacccagtgagcggtcaggcagagcctggttcaaccgtgactgtgacttatcctgatggcaccactgcaacagtggtagcaggcacagatggtagctggtcagtaccaaacccaggtaacctggtggatggcgatacagtgactgcaacagcaactgaccctgcaggcaacacttcattgccaggtacaggcacagtttcagcagacatcacagcacctgtggttgcgctggatgacgtgttgacgaatgacagcacaccagcacttactggtacagtgaacgatccgacagccactgtagttgtcaatgtggatggcgttgactatccggcagtgaacaatggtgacggcacctggacgcttgcagacaatacacttccaacactcgcagacggtccacataccattaccgtgactgcaacagatgcagcaggtaacgtaggtaacgatactgcagtggtgaccattgatacggttgcaccaaatgcaccggtgcttgatccgatcaatgcaacagacccagtgagcggtcaggcagagcctggttcaaccgtgactgtgacttatcctgatggcacaactgcaacagtggtagcaggcacagatggcagctggtcagtaccaaacccaggtaacctggtggatggcgatacagtgactgcaacagcaactgaccctgcaggcaacacttcattgccaggtacaggcacagtttcagcagacatcacagcacctgtggttgcgctggatgacgtgttgacgaatgacagcacaccagcacttactggtacagtgaacgatccgacagccactgtagttgtcaatgtggatggcgttgactatccggcagtgaacaatggtgacggcacctggacgcttgcagacaatacacttcctgcattcacagacggtccacacaccattaccgtgactgcaacagatgcagcaggtaacgtaggtaacgatactgcagtggtgaccattgatacggttgcaccaaatgcaccggtgcttgatccgatcaatgcaacagacccagttgagcggtcaggcgagagcctggttcataccgtgatctgtagtacattatcctgatggcaccgatctgcacatcagatggatatgcaagtgccacaaatggtagctggtcagtaccaaacccaggtaacctggtggatggcgatacagtgactgcaacagcaactgaccctgcaggcaacacttcattgccaggtacaggcacagtttcagcagacatcacagcacctgtggttgcgctggatgacgtgttgacgaatgacagcacaccagcacttactggtacagtgaacgatccgacagccactgtagttgtcaatgtggatggcgttgactatccggcagtgaacaatggtgacggcacctggacgcttgcagacaatacactgcctgcattaacagacggtccacacaccattaccgtgactgcaacagatgcagcaggtaacgtaggtaacgatactgcagtggtgaccattgatacggttgcaccaaatgcaccggtgcttgatccgatcaatgcaacagacccagtgagcggtcaggcagagcctggttcaaccgtgactgtgacttatcctgatggcaccactgcaacagtggtagcaggcacagatggcagctggtcagtaccaaacccaggtaacctggtggatggcgatacagtgactgcaacagcgactgaccctgcaggcaacacttcattgccaggtacaggcacagtttcagcagacatcacagcacctgtggttgcgctggatgatgtgttgacgaatgacagcacaccagcacttactggtacagtgaacgacccgacagcaactgtagttgtcaatgtggatggcgttgactatccggcagtgaacaatggtgacggcacctggacgcttgcagacaatacacttcctgcgttaactgatggtccacacaccattaccgtgactgcaacagatagcagcaggtaaatgtaggtaatcggataatacagtggtgactctttgatacggttgtcaaccataggcaacagtacttgatcacagatcaaggcaacagacccagtgagcggtcaggcagagcctggttcaaccgtgactgtgacttatcctgatggcaccactgcaacagtggtagcaggaccggatggtagctggtcagtaccaaacccaggtaacctggtggatggcgatacagtgactgcaacagcgactgaccctgcaggcaacacttcattgccaggtacaggcacagtttcagcagacatcacagcacctgtagttgcg

SEQ ID NO: 8997 - DNA, 480 bp, Acinetobacter baumannii
atgacagtaaccacatatattggcttaggaagtaacctaggtgactcacgccagattctgtctgaagcgatagccaaacttaaatctcttggtgaagtgaaagtatctaaactttaccaaagtccccctatgggtccccaagatcagccgaattatctaaatgcagtcgctcagctaaaaaccgagttacttccgcttgacttacttgaccagttacagcgttttgagcaggaagctgggcgggtaagactccgtcattggggggagcgaactttagatcttgatctactgatttatggcaatgaaaaaatacaaaatgagcgcttaacggtgccgcatgtaggaatattacaacgagattttgttgtgattcctttattagatttagatgctgatctacatattaatgatcagccacttaaaaatttagaactcatacaacagccaacgctgactgtacttgctgatgagtcttgggct

SEQ ID NO: 8998 - DNA, 1011 bp, Acinetobacter baumannii
atggaccctagaagtgaagtgatattaagacaacatgactatttaaaaggtagggtcttgttaattaatgcaccgaatgacgccctagtcagtcaattacccactgagattgatgcatcagtctggacgtggaattatgctgactatcagggttttttaaatgcaggcgcaacagctcatttctcggttgagtttccattacaagaatttgatcaggctataatttttgttccaaaatcaaaagagcttttaaactatatattgcatgtagtgatgagccatctgaaaattgaccaatcagtttttttagtaggtgaaaaaaaaggtggtgttgagagagcggcaaaacaactacaaagctttggcaaaatacttaaacttgatagtgcccgacattgtcagttatggcatttaaaaattgagaaaactgaaaagatcaaacctcttgaaagctggttaaaaacctatactgttcaagtaaatgagcaagaacttaccatttgtgccctacccggcgttttcagccaaactcatctagatgtcggaactgccgttttactcccttatctaaatcaggtgaaatcaggtagaattgccgacttcgggtgtggagctggaattatcagttgctatttggcaaaagcaaattcaagtaatattatccatgccctagatattgatgccttcgctttacagtcaacggaaatgacttttagtcgaaatggaataggttcagaccagttgagattgcagcctgttacaggaattgcagacgccccaacagaacttgatgccattgtcagtaatcctcccttccatcagggtattcataccaactatgatgcaagtgaaggactctgccagaacgctaaaaaacatttaaaggcatcaggcgagctatggattgtagcgaaccgttttttaaactatccgatcttaattgagaagcactttggtcagtgtgagattaaaactgatcttcaaggctttaaggtgttatatgcctgtgca

SEQ ID NO: 8999 - DNA, 2690 bp, Acinetobacter baumannii
gctgcctcttttgcacaaacaacattagtaaaaagtaagcaaaatgttgaggaatataaattagataatggttttcgggtagtgcttgcgccgaatgacaaagaaaataaaatctttattaataccatttatttaacgggttctttaaatgatccacagggtaaaagtggtttagcacatttactcgaacatttagcatttaaaggcacgcaaaatgtaaaaggtgaagaattccaacgccgtttagatcaatatacgttaatgacgaatgcgagcacggattactattcaaccaaatacaccaatattgtccgtccagaaaaaacagcactcgatcaagtgctgtaccttgaatctgagcgcatggacaaattagttctacaagaaaaatttgtgccttctgaaattgaaatcgtaaagcgtgaacgtgaagtccgtatggatcagccttttgctgtcttgatggatcaaatgtggaagtcggcttatggtaatcaatatctaggtcgattaccgattggtgatttacctgagcttaagtcaattaaaatgcctgagttgaaccagttctatcgcagttggtatgcgcctaataatgcggtcatggtgatttcaggcaagtttgataaaactgatgttttgaaaacgatagaccaatattttagcccaattcctgcgcgagctgtgcctaagcctgttcaagtgcctgtgttagattctacaaaactcaaaaaccgtgagtttgtggtgaaaaagggtagtgatttggccaaattccatatctatatggatggtaaaaacacaaaaattcaaccggaactggctttcgcacctatgttgtataccatgcagccaagtggtcatttgtaccaaaatatggttgaaacaggtgttagtacagacgttcaggcatcaacatggctagatcaagattttaacgtcgtatttttaggtgctatttattcaccaaaaaatgaccctaaaaaagttgaaagcgctttgctctctggaattgaaaagggtaaaccttttacagagactgagctaaatcgtgtaaaaagcttaatgaaaacgcaaggtgagttagtcaataaagatgccgttgctttgggttcccgtttaagtgattacactgtagcggatgggcaatgggaccaatatttcaaagatttagattcaattgataaagtgaagctcaacgaggtaaatcaaaccttaaaacagttccttgttgcaggtcatcgtattgatggcgatatttgccaacaccagaagaccaaaagaaagcattacaactcgacgcaaaagataagcctaaaacattagatcaaacagatgttaaagcagagcctttaaaagatccgaaagtttatcaacaagaagttgccgagtttttaaaaacgtctaagcaatatgccgaaagtaatgagaaaaagatccttcgcggaaaacttaaaaatggaatgaagtatgctttattccctgtagaaacccgtgatgatcgtacctatgccaccattactatggattttggtactgaaaaatctttattcgataaaggtacggttgttgatttaacttcatatttattgcttcgcggttctgataaatatagcttgcaagatattgccgataaatcgattgatgcaggtggcgcagcttatgcaagtgccgatggcaatggtatgaccattaatattcaatctaaaactgaaaagttcgatgagtttttcaagtttgttctagaggtcatgaaaaatcctaaatttgaacaatctcaatttgacttaattaaatctcaaagcttatctagtcttgatcgtccttataccgaaccggatgtggtagcaggtctaacattatctcgcttggtagaagaataccagccgggtgatttgcgttatcactttgaaccggagctggctaaaaaacaattaaagaatgtgactcaagagcaagtcaaagagctttatcagcatttctttgccatgaatcatgcgcaaattgcgattacaggtgcatttgatacccaaaaaatgaaaaagctattgaatcaagagttcggaagctggaatagcaaacaaccgtatgaaaaaatcttgattcaacatgttgattttcctgcccagcaagtacatgtcttatctgagcagcgtgagtttggtagttatcaaagtgtacttgcattaccggttgggaaaaatcatcccgacgcttctgcattaattttaatgaattacattttgggtgaatctcaaatttcatcacgtttggctcaagagcttcgtgaaaaaaatgcattggtatatggttttggtactggtttgcaattagatcgagacacgaatgtaggtgcgttaagcattagtgcaaattatacggctggtcgctcagcacaagtttctgcttcagttcataaggttctaaatgacttaattactcatggtattacagagcaggagcttgcagcagcgaaggcggatattatgaagaaacgtgttactgccttagaagatgaacgtaatatccacggtatgttaaatctagagcttgagtcaggtaaaacattacttgaccgtgttaaacatgaccaagagttaacaaagttaacggttgctgatgtgaacgcagttattaaaaaatatattaaaccttcaaatcttgttgaagttatggctgaccagtatggt

SEQ ID NO: 9000 - DNA, 1302 bp, Acinetobacter baumannii
atgagtcaggttacttcaaattcatcacgttttaacctgcgcgctcaagtcgtccagaccttgctaaaagttcagcaaggtcaatcgctcgctagtattttaaatacacagctgaatcaagtagcagagcgtgatcgtgcactatttcatgaacttgttttaggtacattgcgccaatggttcgcacttaagtcaattagcctgcctttactcagcaaacctttaaacaatgagactgtagaaacctgcctatacgtgggcctttatcaagttttatgcacgcgtattgcagcgcacgctgccatctcggaaacagtcgatgcaactaaacaacttggtttccctgcactcagtggtattgttaatgcaattttgcgtcgagcaactcgtgaaactgatgactttcagcaaggtttacagcaagcacatggcttaccaagttggctttttaaacggttaaaaaaggattggggagaacaaacagaagctctctgccaatcgttaaagcaagccgcgcctttaactttacgggtgaaccagcgtcatattggtcgagatgcttatttagcaaaactacaaagtttagacattcagtcacgtgcgtgtttgttttccgaagctggtattgtccttgagcaatctgtacaaatcactcagttaccgggttttgaacaaggctggttctctgtacaagatgaacatgcacagctatgtgccaccttgttgcctgatttaaacaataaaacggttattgatgcttgtgctgccccagggggtaaaatggctcatttgcttgaaaagtttaaaccagcacagctcatcgccattgatcaggaccccagtcgtttagtccgtgtgattgaaaacttaaatcgcttagcactcgatcaaagtcatacggaaattttggcagccgatgcaaccaagtggaatcctgttcaacctgtagattgtatcgtacttgatgctccttgttctgcgacaggtgtgattcgacgtcatcctgacatacgcctattgcgccaatctagtgacatagcccaaaccattgagctacaaaagcagatcttagagcacatgtggcagcaactcaaagttggcggtacattgctttatatcacctgctcaattttaaaatctgaaaacgaacagcagatgattaacttcttcacagaacatcctgatgcaaaagaagtgaaaatcgaggcagattggggaattgaacaagttcatggcagacaactgttgccagaagcacaatctggtgatggattttattattgtaaaattcaaaagattaca

SEQ ID NO: 9001 - DNA, 2622 bp, Acinetobacter baumannii
atgactatttctcacattgacccagaatatcaagcaaacacgattgaaccatcagtccaacaagattgggaaaatcgtaaagtctttaaagttgccgacactgtcgaaggtaaacatcgctacatcctgtcaatgttcccttacccaagtggcaaactgcacatgggtcatgtgcgtaactataccattggcgatgtaattagccgtttttaccgtttaaaaggcgaaaccgtattacaacctatgggttgggatgcatttggtttaccagcagaaaacgctgcaattgcccataaagttgctccggcaaaatggacatttgaaaacatcgcttacatgcgtgaccaattaaaaaaattaggtctatctgtagattgggaccgtgaatttgcaacgtgtacaccagagtactatcactgggaacaatggttgttcgttcagctttataaaaaaggtttaatctaccgtaaactttcaacagtaaactgggacccggttgaccaaacagttttggcaaacgaacaagttgaaaatggtcgtggctggcgttcaggtgcattggttgaaaaacgcgatattccaatgtactacttccgtattacggactatgcacaagaattattagacgacctagacactctacaagacggctggcctcaacaagtgttgaccatgcagcgtaactggattggtcgttcgacaggtatggaaattaccttcccatctgccaatactgaaatttatgctgacggcttaactgtttatacaacacgtgccgacacacttatgggtgtgacgtacgttgccgttgcagcagaacaccctcttgcgcttaaagctgctgaaaataaccctgaattggctgcatttattgaagaatgccgcatgggttcagttgcagaagctgacttggctacagccgagaagaaaggtatggcaacaggtttgtttgtaaaacaccctgtaactggcgaagagcttcctgtctggattgcgaactacgtattaatgtcttacggttctggcgcagtaatggctgtaccagcacatgatgaacgtgactttgaatttgctaacaagttcaacttgccaattaagcaagtcattgatgccaaaggtgctgacgatgcagattattctgctaccgagtggcaagaatggtacggttctaaagaaggtaaacttgttaactctggcgagtttgacggtctagaattccaagctgcattcgatgcattccttgcgaaattagaaccacaaggtttagcaaattctaaagttcaattccgtttacgtgactggggtgtttctcgtcaacgttactggggttgcccaattccaatgattaactgtgatacttgtggtcaagtcacagttcctgaagatcaacttccggttgtattaccaactgatgttgttccagatggttcaggtaatccactaaataaaatgcctgaattctatgaaactaaatgtccttgctgtggtggcgatgcacgccgtgaaacagatacattggacacattcgtagaatcatcttggtactacgcacgttatgcatctccagactttactggtggtatggtaaaacctgaagcagctaaaaactggcttcctgtaaaccaatatattggtggtgttgaacacgcgattcttcacttactttatgcacgtttcttccacaaattaatgcgtgatgaaggtgttgtacaaggtaatgagccatttaccaacttgttaactcaaggcatggtgcttgcagatactttctatcgtgaagcagaaaatggtaagaaaacttggttcaaccctgctgatatcgaattagaacgtgatgagaaaggtcgcatcatttctgcaaaatattcaggtgatggtcaagaagtgattatcggcggacaagaaaaaatgtccaagtcgaaaaataacggtattgacccacaagccattattgatcaatacggcgcagatacagctcgtgtatttatgatgtttgctgctccaccagatcaatctttagaatggtctgatgcaggtgttgaaggtgcaaaccgtttcttgaaacgtgtatggcgtctggtagcaagcttccttgaaaaaggaaactctgcaacagcaatcgataaagcaaacttgtctaaagatgctcaagatttacgtcgtaagacacacgaaaccattcaaaaagtaagtgatgatattgagcgtcgtcatgcgttcaatactgcaattgctgcattgatggaattgttaaacgcaagcaataagtttgaagcaaaagatgacaatgacgttgctgtagaacgtgaagcaatcaccacattgttaactttacttgctccatttgctccgcatttaagccagactttattggctcagtttggtacggacttaacagaagcaactttccctgaagttgatgcttctgcattaacccgcaatactcaaacgattgttgtacaagtaaatggtaaacttcgcggtaaacttgaagtttctgttgatatttctaaagatgagttattagctcaagcgaaagcattaccagaagttcagcagttcttaacaggaccaaccaaaaaagagattgtggttccaaacaaattggttaacctcgtggtt

SEQ ID NO: 9002 - DNA, 249 bp, Acinetobacter baumannii
atgtggtcacttattgttgctattgtggttggtttcttcgctggcttaatcgctcgtgctttacacccaggtgatgataaagcaggttttattgttactactttaattggtattgcaggttcacttctagccacttatggcggtcgcttacttggtctttatggagaaaattcagcggcgggctttattgcttctgtcattggtgccgtcattattctctttatctataacctaattgcacgaaaaagc

SEQ ID NO: 9003 - DNA, 1023 bp, Acinetobacter baumannii
atgacaaggctgtccgccccaattaaagcctctatgaaaaaaactgctactgcactgactttggcttgtagcttattgtcagtcatgagcatttctcaagcgcaggcagccgataatattgatgtcagctttcaaacaatattacagcaagaacgtaactgggcaggactgcaaagcaaaagcctaaaggtgggtgatatcacttggtcatatagtgaaggtggctctagcacaaagccaactttactactcattcatggcctagcgggcagtcgagataactggaaccgagttgcccattatctcacgacaaattatcacgttattattcctgacttaccgggcagtggcgaaactatcgtctcgcaagactttgattattcggttcccaacttagctgaaaaattacgtcgctttgttgaagccgccaatttaaaaggcccaattcatattgctgggcactcactcggcggatctattgccctactctatgctggacaatatccatttgaaaccaaaagtctatttttagtcgatagcggtggtattttccgttctgccaacacaatttatctaaaagatccaacctatctaaaacaacttttagtctctaaaaaaggtgattttaattatttattaaaacaaaccatgtttaatcctccgtttattcctaaagagttcctgcaagctcaagaaaaactgatgattaatcaagcacctcaaacccagaaactggttgatcaattgattgcactcaataaagtctataccccagattcctttgcggtacttactaaaacgattgacgcccctacactcattttatggggtaaacaggataaaattattaatgtagaagtagcaaacgagctaaaacggcttttaaaaaatgcccagcctccagttatcttagaaaacgtaggccatatgccaattttggaagctgaacagttggttatccaacaatacgtaccgtttttactgaaagtagaaacaaaccagtcgtcaaaaacgacaacacct

SEQ ID NO: 9004 - DNA, 912 bp, Acinetobacter baumannii
atgattaagtggatcatattagcgatttttgtgatatctgcattgtatatccaacatcgcggcaaagtgcgtcactcgttttatcgtcaattttttgaccattcaaccttgctcgcaccgattaactttttaatgtacatcttttcaaaggtaccgaatcaaccctatatcgacactcaacactttaaagatttaaaagtgttagatgaaaattgggaaatgattcgagatgaagcgaaagctttatatgaccaaggtgggattaaagcatcaagtacctataacgacttaggttttaactcgttctttaaaacaggatggaaacgtttttacctcaagtggtatgaatcaagccatccttctgctgctgagctttgcccaaaaacaacggctttactcaaaacattaccaacgattaaagcggcaatgtttacagagcttgctcctgacagccgtttggtcagacaccgtgatccatatgcgggctcactccgttatcatttaggtctgattactccgaatgatgaccgttgtttcattgacgtagatggtgaaagatactcttggcgtgatggccaaagtgtcgtgtttgacgaaacttatattcactatgctgaaaataagactgatcaaaaccgtatcatcttctttgccgatgttgaacgtccaatgaaagtaaaatggatggaacgtttcaaccattggtttggtcgtaatgtgatgactgcggcaagttcaccgaatgaaactggtgaccaaacagggggcttaaataaagcctttggttatgtttaccaaattcgtattaaagctaaagctttaaaagctaaaaaccgtaaattgtattacttcttgaagtggttcctcatgcttggaattttcttcctgatttttgttcgaccatacgtgttt

SEQ ID NO: 9005 - DNA, 218 bp, Acinetobacter baumannii
atgctttcagcggttatcccttccgaacatagctacccggcgatgcgactggcgtcacaaccggtacaccagaggttcgtccactctggtcctctcgtactaggagcagatcctctcaaatttccagcgcccacggtagatagggaccgaactgtctcacgacgttctaaagccagctcgcgtactctttaatggcgacagcaataccttgggactgc

SEQ ID NO: 9006 - DNA, 1171 bp, Acinetobacter baumannii
tcgttatttaataatataaaaaaaattctgctcgggaatggagctgcacaattaatacaatttgcgttccttccactttctgcttttctatatacacctgaacaatttggtgtttttggtacgatacaggcttatagtacagcccttacagtttttattagccttcaactatatgtagcaattccttttgaaaaaaatcaatttttattaaatgatttaatagttttaaactttaagtgtatttttgctgttacaacttttttgttaatactatatggtctatttaatattgattatttttcaattttagcaatttttttagcaagtatcactgctgtaactaatacattacgtagtttaattgtttactcagggaatttcactaggttatcaactagttatgtgatccgagctcttgtaatagttatatctcaagcggccttgtcttttagtactgctataaatggattaatttatggtttattgctaggtgaagtaatatatagtgggttattacattattttattaaaaaaagtattgatttaccaagttttagtttacgctctttatttaaagttcccataaaaaatatatttacgaaatatagaccatttagcttatacggttcaatattagagctaacgtcagtatttattttttatgggcctatagttatattttcttatatctttaatgggaataataattatatagggcaatatagttttatatcccgccttgtttggcctcctataattttaatatctacatcttgtactaacgctttatattttcatattactaaaattaataatttagaagtaaagtcattaactttaaaagcaacggcattaggtggtttcataatagctattgctccttttttaggttggtgtggtcattatataattaatttgttaataaaaactcccacatggaatttagtgtctgatttcggattttatattataactttagcttttgtatttatgggaactatatatgttagagttgtaataagatataaacatctacaaaaatatcaattgaataatggatattttttttatagcaatcgtggcaataattctttattttcgagagaaaataggcatatctgacgtgtttgaaattcttaaaagttatactgttatatattttatttatagt

SEQ ID NO: 9007 - DNA, 1035 bp, Acinetobacter baumannii
atgaaacagtatgttcaacagacaattaaactcggtactgcatcagttttaggtgtagtagttgctattcaaatgggatgttcatcagcaacatcaaaacaatcagaagaaattacagtctatacggcagtggaagccgaccaacttaagcaataccaagaagaattacacaaagcttatccagagctaaaagtaaaatgggtacgtgattcaactggtgtaatcaccgccaaacttttggcagagcagaaaaacccacaagcggacgtggtttttggtgtggctttaaccagtttgttggtcatggaaaagaaagacatgcttgagccttttaaacctgaaggtattcaaaatttaaaaccagaatttgtaagtcaaaaacctgtaccaacgtggacgggtatggatgcatgggaatctgcaatttgtgtcaataaagtcgaattagaaaaacgtaagttaccgattccaaaaacttggaaagatttaaccaaccccatttataaaaacttgattgtgatgccaaacccagcttcgagtggcacaggctatttagatgtcacggcttggatgcagatttggggcgaaaagcaggcatgggactatatgcaggctttagataaaaacatttcacaatatcctcactcgggttcaaaaccttgcaagatggcagcacaaggtgaaattccaattggtgtttcttttggttatccggcatttaagttaaaagcagaaggtgcacctttagaagtggtttatccaactgaaggtttaggctgggaaatggaagcctcagcaattgtgaaaggaaccaagaaattaagtagcgcgcaaaaatttataaattggtcggtaagcaaagcggcaaacgaagcctatgcccataacttttcaatggtggcctataaaggcattgaaaatactactatggacttcccgaaaaatcttcctcaaatgctcataaaaaatgatttttattgggcggccgagcagcgtgaacgtattttggctgaatggtcaaagcgttttgaaaag

SEQ ID NO: 9008 - DNA, 1977 bp, Acinetobacter baumannii
atgcaaattaagacccctgatattggtgtagataaagcaaacgtcgctgaaattttagtaaaagttggcgaccgtgttgaagttgacgacagtatcgttgtgcttgagtctgataaagcaactgttgaagtgcctagcacttcagcaggtgtcgtaaaaagtatcttgattaatcaaggtgatgatgtgactgaaggtgttgctttgattgagatcgaagcagaaggtgcggcacaagcagcaccggaaccaacaccagctcctgcggctgaaaagccagctgctccagcaccggcgcaacaaactcaggcttcagctcaacctgctgctacatcaactgcaactgttgaagtgactgtacctgacatcggtgttgaaaaagcattggttggtgaaatcctcgttaaagtgggtgaccagatcgatgtcgaacaaagtattgtggttgtagagtcggataaagcgactgtagaagttccaagtagtgttgctggtactgtagaaagtattcaagtgaaagaaggcgataccgttaaagaaggtgttgttcttattcaagtgaaaacagcagctgcatctaatgcgcaagcagaagctcctactactacaccagctccagctgcggtagcagaaccggttgctgcaaagcaagaaactgtggcagcggctccagctcagtctggttcagttgatatcaatgttcctgacttgggtgtagacaaagctgttgttgctgaaatcttggttcaagttggcgataaagttgatgtagaccaaagccttgttgttgtagagtcagataaagcaactgtggaagttccaagtaccgttgctggtgttgtaaaagcaattcacttgcaagcaggccaacaagtttcacaaggtgtattgcttgcaacaattgaagctgaaggccaagcacctgctgctgcaccagcggcaaaagcagaagcagccccagctccacaggcagcagcacctaaagcagccgctcctgttgcaactcagtctgcacctgcggcgtctacatctggtactgataagttaacgaaagagcaagaagcagaaaacgctaaagtgtatgctggtcctgctgttcgtaagctggctcgtgaacttggtgtaatcttgtcacaagttaaaacttctggtgagcatggccgtgttgtcaaagaagatatctttgcttatgtgaagagtcgtttaactgcaccgcaagctgcaccaatagctcaagctaccgctgctccggctggattgccgtcattacctgactttactgcttttggtggcggtgaagtgaaaccaatgacgcgtttacagcaagtttctgtaccgcagttgtctttaaacaactacattccacaagtaactcagtttgaccttgcggatattactgagctagaagcttggcgtggtgagttgaaagacggctttaagaaacaaggtgtgagcctaacaattttagcatttattgcaaaagcagtagctcacttgttgaaagaagagccttatttcgcgggtcacttagcagatgatcagaaatctgtattgctccgtaatgaaatccatatgggtattgcggttgcgactccagatggtttgacagtacctgtactacgtaatcctgaccaaaaatcaattaagcaaattgctgttgaattaggtgagttgagtaaaaaagcgcgtgataagaaattaacaccgaaagatttacaaggtgctaacttcacgatcacaagcttgggctcaattggcggtacagcatttacgccactagttaactggccacaagttgcaattttgggtatttcacctgcaacgatgcagcctgtatggaatggtaaagactttgatccacgcttaatgttgccgttgtcattgtcttatgaccaccgtgtaattaatggtgcggatgcagcgcgctttacaaataaacttacgaaacttcttaaagatattcgtactttattaatc

SEQ ID NO: 9009 - DNA, 699 bp, Acinetobacter baumannii
atgcgtactttagcaatatctactcttctccttggtacggtactcagccctatggtttttgcccaagatgataatgcccttcactacaatattgtaaatgttcaagcagaagcttctcgccaagtttcaaacgatgaaatgcatgcaactttatatattgaaaaaagcaataagcagcctgcagagctttcaaatcaaattaaccagttaatgaaccaagcactcgcaacttcgcgtaaatacccacaagtgaaagtggaaactggtgcccaaagcacttatccaatttatgacaatgacagtaataaattaaaagaatggcgtggccgcgcggaaattcgtttagaaagtaaagattttaaagctgctagccaattaattaatgagttacaacaaagctttcaaactcaatccattaattttagcgtctcagatgagcaacgtaaaaaagttgagaatgaattgatggtagaagcgtctaaaaactttcaacagcgtgcgcaaatgttgactcaagcatggaataaaagccaatattctttggtcactctaaacctgaacacgaataactattttcctcaacctgtaatgcgtgccagcctagctaagttcgctgctgctgaagcggcaccagctcaagatatggctgctggtgagtctaaaattactgtaaatgcaaacggttcaatccagtttaaa

SEQ ID NO: 9010 - DNA, 3696 bp, Acinetobacter baumannii
atgaactcaagagtacaggtgtcttatcaacctattattgatattgaatttagtggactgcatttaattgaggcttcggcgggtaccgggaaaacctatacactgtcgagtttaatggttcgtatttttcttgagaaatatttaccgggccaagtcattgcaacaacattcacccgtgctgctgcggctgagttaaaaagccggattcgtgcgcgtttggtcgaaacccaccgttatttagatgccaagcggagcttgactgaaaaagagatccttttgcaggccgagcaagaatctgacttattactgcaacatattctcaagcattttgcgacacgtattgcctatgcctgtgagcgtttaaagctcgtgatcgatcagctagatgagctatttgtcggaacactcgatagctttagccaaaagctattacgtgagtttgcttttgagagcggaaaaattgaacgtgcccaaattaccgatgatgccaaaacctatagccgacaactgattcatgatgttttacgtgaatggatacagtctcagcctcaaaccgtgattgatgcattgtatctggcaggtgagttaaaaagtgtcgacagttttgtcaaactggtcgaagactcactgaattttagttcggctcactttaaacttcccgaaaagcctaccattcagtttgaacagcttgctcagctcaaacagctggcagcagaaattgatatcagtcttctagaaccgtattactcgcttgatggcgaccactataaacatgtaagcggcacaatatttcgtaatggagcatttaataagttatttagtgaatgtttgccacagttattacaagttttaaagcaaagcgacagtattttagtttttgatgggtctttggcaatacaacgggaactcgtttttaagtttttaggccagcttgccgatcagaaagttttcaagaaatgtcctgccgaaatttcagatggattttatcagcatccttgtattcagcagattcagcagttgtttggtgtgctgaaaaactatgctgaacagttcgatcagcttcatatttatttaaaagcctatttgtgtatagaggttaaaaaacgtttaccacaggttttacaaaacaagggcgagacgaccttttctcagcaaattcgcactttgtcagaagctttaaagggcgagcaggggcaacgtttcgccgtatttgtgcaggctcgataccccttaattttggttgatgagtttcaagacaccaaccaagaccaagatgacatgctcgccagcatttggcgtcatccagaacgttaccaaaaaggttgcatgattatggtgggtgaccgtaagcaggcaatttacggtttccgtggtggggatatgctcaccttcttgaatgcctacaaagatattcaggcaaagcatggtcgcgaatataagttaattcataaccaccgttcagtcgctgacttggttgaagtggttgatgcgttattccaaaggcaaatcgactttggtgaacaggttcaatatgacccgattcgggcagggactcgacctcatccggttttaattgatcaaaaccagcctaatccgcatcctttacgttggctcatgctaaaagacaaggaaacggaagcacagcaagtcgcgtggaaaatacgtgatttactcaatcagtcacatgctggacaactttattttcaaaaagatgctcagactcaaaccttaaatgaagatgatattgcggtcttgtcgcgtaatcatgatggtcttgataaagttcaatttgaattagaacgtttaggaatacgagttaatcggccatcaaaacgaagtgtttttgattgcacaatagctcaggatgttggggccttactcactgcgattcttcatccttacgatgaggccaaagtgaaacgagctttgattagccgtttatttgctatggaccttaaacagctgttgcaactcgaacaaacggccgaaggtttaagccagtttatgacgggttttgatactattcgggaattgtggtcagctcagggctttttagtagcatggcagcaatgtttaaaccaatttggcatttggaaaaatctggttgctgtccagagtaaagataatgagcgggttgtggtgaacttgcgtcatttgaccgaaattttgagccaacatagcgagaaatatcagggcgcgcaaaatctctatcactggtatctcaagcaattacaatcaccgcttgatcgtgaatgggagttagagcgtagattgtcgagtgaagctggcgtacagctcatgaccattcaccagtcaaaaggtcttgagtttaaaattgtctttttgctcggggccgacaagccatttcgggaaaataacaaaacacttaacttctcgacccaagatataacggtttcggagtcggctcaaactctaacacaacgtgttgttgcgattgccgataaaacatatttaaacgaaaatgagttgaagcagcatgaagaacgggctttggcggaacaaaaccgtctatggtacgttgctttaacccgggcaagtcatcgtgtttacgcgctcttacaagatacggatggcaagtctgtttcaggtttggcattttggaaaaacagagcggaaccattccagcaccgttgttgtaccgatgaaataattttggagcaaccacctgctgcaagacatttaaatcaacacatcaatattattgagatacaggcgcagcattttcctgatcagcgcttttattcgagaggcaaaaccagttttagttatctggcacagcatttaagacataaagtaggtacagatttactcgcgagtcagagccatgaagctgttttagccgaagatgaactcgatcaggttatttctgttgaggcgcccgcagcacagcccattagctggatcaaaagcaattttccgagagggacgctcgcaggtaatttcttacatgaaatttttgagcatattgattttcaatgttcagatgagtgggtaagcgaaatacgtcgtcgttttaaaaatgactacagtagtttgtggcaagatttattaatcaaataccaagaaagctttcccgaagaacaagaagcggaatattcgctttatcacgctgtagccgaatggttgcaagagattttaagcacgccgttatatcaaggttttcgcctaaatcggttacagccagagcactatttatcagagtgtcctttttatttggcactgtcggatcgtgtgttagccatgaaacgtattcagcagctgtttgctgaatatggtatggaaatgcccgagttattagaggctcgttctgcacgctatttaaatggttcgatagacttggtttattttgatggacagcgttatcacattgctgactataagagtaactacttgggtgaaaaccttgctgattacagtgtagaaagcattgcacaaagtatgtctttagccagctattggctacaagcaggcctgtatttggttgcgttacatcgttatttaaaagtcaaaatgcagaattatgatattgaacaacacttaggtggggcgacttatctttacttgcgcggtatgaatggcgaagctgagcagggttattattattggcagccaagtacagaatttgttctacgactcgatgctattttagggtactttgctgaggataaaattgca

SEQ ID NO: 9011 - DNA, 338 bp, Acinetobacter baumannii
atgctttcagcggttatcccttccgaacatagctacccggcgatgcgactggcgtcacaaccggtacaccagaggttcgtccactctggtcctctcgtactaggagcagatcctctcaaatttccagcgcccacggtagatagggaccgaactgtctcacgacgttctaaacccagctcgcgtacctctttaaatggcgaacagccatacccttgggacctgcttcagccccaggatgagatgagccgacatcgaggtgccaaacaccgccgtcgatatgaactcttgggcggtatcagcctgttatccccagagtacttttatccgttgagcgatgg

SEQ ID NO: 9012 - DNA, 930 bp, Acinetobacter baumannii
atgctagacagagaaatacttctaaaaaaatggttagatgaatatttattagcaaataaatctaatgaaacaatatacacgcttaaaaatagtttaaatctattctttgaatataccaatttagcattagaggaaatcgaagcatcagatattagaacatttatagcttatagagctcaaaatggagtaggagtttctacactaaaaaaaaatatctctgctataagaacatttttccattatttaactaaagaaaaattaattaatttcaatccagcagaagatattaaaattaaaaaaagtagtaaagttttacctaaatttcatgaagtcacagtaataaatgaagtattagattcaaataagaatttagaatttgaacgaccatcaagcacagttatttttaaaagagacttagcactaattgaaatagcatactcatgtggtttaagacttgaagaaatacactcattacaaatagaaaatgtagaggtaaaacgcaaacaagtaagagttacaggaaaaggaaataaaactcgtattatacctttgggttcaaaagctattgaagcgtatctagaatggttgcctttaagagaagaaattatgaataaagataccaatcaaaaacataattatgtttttgtcaccacaactggagctcaactatcaagagtccaaataaataaaagaattaaaaatgcttttaaacttgctggttatccaattcaatccaacccacacatgttacgccattcatttgcaactcatctaataaataattctgtaggtattcgtgaaattcaggaaatgctgggccatagtaatttgaatactactcagatctatacagatctggaccatacttcaatgacaaatgtttatatggatacacatccaagagccgtaaaaaatactgaaggtgagaac

SEQ ID NO: 9013 - DNA, 951 bp, Acinetobacter baumannii
atggaaacaatcggcaatttatggctgtacatagcattctttggcatagtcattgtcatgcttctgattgacttcttgggctttaagcaaaaacaaggtcaagatgtctcaattaagcaagctgcttactggagtgtggcgtgggtaagcgtcgcagccttatttggtggcggtttatggctttacttacaacaaacagttggggtgaccttagcaaatcaaaaaaccatggaatactttgcaggttacttactcgaaaagtccctcgcaattgacaacgttttcgtgtggttaatgattttcgcagcgtttgctataccagctgcgctacaacgtaaaattttgctctacggcgtattaggtgcaatcgtactgcgtaccctctttatttttattggtgcatggttcgttcaagagttttcttgggtactttatatcttcggtgcgttcttggtatatacaggctttaagttcttaaaaggccaagaagaagaaaccaatattgaagatatcaagcttttaaaatggttacgtaaccatatgcgtattacgccacagcttgaaggtgacaaattttttgtacgccaaaacggtttattatgggcaacaccgttatttctagttttgattttggttgaagcttcagacgtgattttcgcagtagattctattcctgctattttcgcggtaactagcgacccgtttattgttttaacggcgaacttaatggcaattttaggtttacgcgcaatgttctttttacttgctggcgctgcgactaaattgcattacttgccatacggcttaggtattatcttattgttcattggtgcaaaaatgttattgcttgatgtattccacatgccaatctggatctcattaagctttatcgtcatagtgttagcaatcactgcttacctctctttacgtcataataagcgacaaatctca

SEQ ID NO: 9014 - DNA, 477 bp, Acinetobacter baumannii
atgttgctgtcttataagtatatcaattcgcctgttgggcaattaaagctggttgcgaatgaaaatgctttggtggcagtactttgggacaatgaaaatccaaaacgtgttcgactggcagagctggtcgaacaacttgagcatccagttttattaaagaccgaacaacaattacaagaatattttgaaggcaaacgccgtgaatttacattgccactagatttcgaaggaactgcatttcaaaagcaggtctggacggcattacttacgattccgtatggtgaaacaagaagttataaagatattgccgttcagatcggaaatgaaaaagcagtgcgagcagtgggtgctgcaaatggcaaaaatccgatttcaattattgcaccttgtcaccgagtaattggtgcgggcggagctttggttggttttgccggtggtcttgataagaaagatattttattaagattagagcaaaaa

SEQ ID NO: 9015 - DNA, 1086 bp, Acinetobacter baumannii
atgaaagcgtcactccgtttacgtcttgatcaactctgtgatcgtcatgaagaacttactgcattgcttgcagatgcagaagtgatttccgataacaaacgtttccgtaaactgtctcgtgaacatagtgatttaactgaaattaccgaagtttggggcaaataccgtcaagcagaagaagatattgaaactgctgaaatgatgaagtcggaccctgactttaaagatatggcagaagaagaaattcaagcaaataaagcattgcttgaagaattagaaagccagcttaatattttgatgattccaaaagatccaaatgactctaatgctgcatatttagaaattcgtgccgggacgggcggtgatgaagctgcaattttctcaggcgatttattccgtatgtatagcaaatatgccgaatcgcaaggttggcgtattgaagtcctttctgaaaatgaaggcgagcatggtggttttaaagaagtcatttgccgtgtagatggcgatggtgtgtatggccgcttaaagtttgaaagtggcgcgcatcgtgtacaacgtgtaccagcaactgaatcacaaggtcgtgtgcatacgtcagcttgtacagtagcaatcttgcctgaaattgacgttgatactaacgttgaaattaacccggcagatttgcgtattgatacttaccgtgcttcgggtgcgggtggtcagcatattaacaaaaccgattcggcagtgcgtattactcacattccaaccggtacagtcgttgagtgccaagaagaacgttcacagcataaaaacaaagctaaggcgatggcattgttagtatcacgtcttgaaaatgctaaacgtgcagcagccgatgcggcaacttctgaaatgcgccgtgatttggtcggttctggtgaccgctctgaacgtatccgtacttataactacccgcaaggacgtatgacggatcaccgtattaacctaactttatataagttggatgccattatggaaggtgatctaacggaattgctcgatagtttacatcgtgaatatcaggcagatcagcttgcgatgcttgcacaggaaaatggcggc

SEQ ID NO: 9016 - DNA, 1386 bp, Acinetobacter baumannii
atgtattgcaccaatttaattcattactatgctgaggaccgtgcattgaaatataacaacctgaatgaattcctgaattacgtgcaagcgcgtgatccgcatcaacctgagtttttacaagctgtcgaagaggtcatgacaagcttgtggccatttattgaaaaaaatccagaatatgccgagcagggattgctagaacgtttggtggaaccagaacgtgtgatccaatttcgcgtttcgtggatggatgatcaagggcagactcaagttaaccgtgctttccgtgttcaatacaattcagcaattggtccattcaagggtggtatgcgtttccatccgtcggtcaacctatctattttaaaatttttagggtttgagcaaacttttaaaaactcacttacaactttgccaatgggtggaggaaaaggtggttcagattttaaccctaagggtaaatctgatgctgaaattatgcgattctgtcaggcacttatgattgagctttaccgtcatttaggtccaaatactgatatccctgctggagatattggtgtgggtgcacgtgaagtaggttatatggctggcatgatgaaaaagctcagtaatgacacggcatgtgtgtttacaggtaaaggaatttcatttggcggtagcttaatgcgccctgaagcaacaggctacggtacggtttattttgcagaagaaatgctaaaaacacgtgggcagtcttttgctggtaaaactgtttcgatatctggttctggtaacgttgcgcagtatgctgctgaaaaagcaatgttcttaggtgcaaaagtggttacgctatcggactcaaatggtaccgtttatttaaaaaatggttttacagatgagttgcttgctgaagttatggaactcaaaaatatccagcgtggccgtatttcagaatttgcttctaagcatggctttgaatattttgaagggaagacaccttggcatattcctgtagatattgccttaccatgtgcaacacaaaatgaattaactggcgaagatgccaaaacgctcatcgctaatggggtaatttgtgtggctgaaggcgctaatatgccatctacacttgaagctgttgagcattttattgaagctaagattttgtatgcgcctggtaaagcttctaatgcaggtggggtggcaacgtctggtttagaaatgtctcagaatgcgattcgtttaggctggacacatgctgaagtcgatgaacgcttacatgcaattatgaaagatattcatgccaattgtgttagatacggtactaaagaagatggtactgtgaattatgtagatggtgccaatattgctggttttgtaaaagttgctgatgcgatgcttgcacaaggtatctat

SEQ ID NO: 9017 - DNA, 225 bp, Acinetobacter baumannii
atggcacgtttttaccgtcgtcgcaagttctgccgctttacagctgagaatgttgcgtacatcgactacaaagatatcgatactttaaaacagtacatcactgaaaacggcaagattgttcctagccgtatcactggtactaaagctcgttatcaacgtcaattagcgcttgctatcaaacaagctcgctacttgtctttgattccgtacactgacaaccataag

SEQ ID NO: 9018 - DNA, 2265 bp, Acinetobacter baumannii
atggaccaactcggctgggatgcgtgtgactttattttagtctgtggcgatgcttatattgatcatccatcatttgtatcgggtgtgattggacgggtattggaagcgcaaggtttccgtgtcggtattattgcacagccagactggaccaatgttgaaagtttccgtgtattgggtaagccaacgattgcttggggagtgactgcgggcaatatggattcgatgatcaaccgctatacggcagatcgtaaaatccgttcggatgatgcatattctcctaataacgaaccaaataaacgtcctgaccgtgcggcaacggtttattgccaacgttgtcgtgaagcattcccagatgtacctgtactattaggtggtattgagggtagtttacgtcgtattgcgcactatgattattggtcagacaaagtccgtcgttcaattttgatggattcaaaagccgatatgcttatgtatggtaatggtgaacgtgccattattgatgtgatgcaccgtttggcaaaaggtgaaaaaatccacgaaattacagatgttcgtggtacagcatttattattaataaacataacaaagcggctaaagcaaaatttgttgaaattgccagtaatgatgtagatacgattgggcgtgttgacccaattattaacccatatgtcatgactgaagatattgatggttgtgaaattgagaaagataaaggcaacacactagctcagtatcaaggttttcaaaaagaaattgttgcaaatccgattgtacgtgaaggcgaccaacttgatgaaaatactcagattgttcagctaaagcctgctcagtcaaaagcgattaaacacaagttacctccgcgagaattggctgtaattcgtttaccttcttttgaagaagtggcgaatgatcaagtactttatgcacatgcaaaccgtattttgcaccttgaaaccaacccgggtaatgcacgtgctttggttcaacgtcatggtgagcgtgatgtctggatcaatccacctccaattcctctaactacagaggaaatggattatgtatttgatttgccatatgcacgtttgccgcatcctgcatatggagatgcgcgtttccctgcatttgatatgatcaaattctcggtcaacattatgcgtggctgttttggtggttgtacattctgttcgattacagaacatgaaggtcgtattatccaaaaccgttcggaagattcgatcttacgtgagatcgagaaaattcgtgatacagcgccgaacttcaccggtattatttcagacttaggtggtccaacagcaaacatgtaccgtttgcattgtaaagaccctgaaattgagaagaactgccgtaaaccttcttgtgtatatccgggtgtttgtcaaaacttgcataccgatcatgcacctttagtacagctttatcgtaaagcccgtgcgattaaaggggtgaagaagattctgattggatcgggattacgttatgaccttgcagtattgaatcctgaatatgtcaaagagctggtacaacaccatgttggcggttatttaaaaattgcaccagagcatactgaacaaggccctttatctaagatgatgaaaccgggtattggtacgtatgaccgtttcaaacaaatgtttgatcgctttagtaaagaagcaggaaaagagcaatatttaattccttactttattgctgcacacccaggtacttctgattatgacatgatgcatcttgcgatctggctgaagaagaatggtttccgtgccgatcaggtacagacgttctacccatcaccgatggcaactgcgacaaccatgtattattcagggaaaaacccactcgcaaaagtggcgcgttacactgaaaatgtagacattgtaaaaggtgaaaaacgccgtcgtctgcacaaagcattcttacgttaccacgatccaaataactggccattacttcgtgaagcacttaaagaaatgggccgcgctgatttaattggtaattcaaagcaacatttaattccaacttatcaaccgaaaggggcggaaggagaatataaatctgcacgtaagaagaactcgactgttgcgggcgattcagtgaagcgttcaggtcaaacagttcaaaataaaaatcagcataaacggccgcaaaaagggcaggtactgactcaacatacgggtctaccacctcgtgaaacaggtgaaaagagaccatttggtggtaaaagtaaaccaaaatcaaaagctcgtgga

SEQ ID NO: 9019 - DNA, 735 bp, Acinetobacter baumannii
atgagtacagcaattaaaacccgtgaaattcaatatactgcaccagatggtagccatttaattggttactttgcggctccagaaagtgaaacacctgtaccaggtgtcattattggtcctgagtggtggggtcgtaacgaatacactgaacaacgtgcgcgtgaacttgctgaacacggttatgctgcacttgcaattgacatgtatggcgataaaaaagtaacaacgactgcagctcaagcttatgaatggatgatgcagacatttgaagatctagacactgtgactgatcgtgccaacgcagggcttcaaactttagctgctcaaccagaagtgaacagtgaaaaacttgcagcggtaggtttttgctatggtggcaaagtggtactcgatctagctcgctcaggtgctcccctcaaagcaactgcgacattccatggtacattaactcctaaggctcctgctcaaaaaggcaacattcaaggcgaggtattggttctacatggtgaactagacagcatggtcaccttagaagatgttgctaattttgaaaaagagatgcaagctgctgaggttaaacatgaggtagtggttttaaaagatgctaaacatggctttagtaacccgcttgcagatgaaagagctaaagcgaatggtgtagaccttggctacaacagcgaagcggagaaacaaggccttgctaaaatgtacgctttattagaacgtactttaaaa

SEQ ID NO: 9020 - DNA, 477 bp, Acinetobacter baumannii
atgaaactttcttctatacctgtagtcaagttaccacttgttgatgtcagtacagacccgttagatttattggtagcaggtttggcgctgcgtatgaaacagttggcacgtacaagtcctaagtttattgagctagtgcatgaccgtgcattccgcattcaaattggtactgatttaggtgtggcacgccaaattattattaatcatggtcacatcgatacagttgctggatcacctgaaaaagctgactttattttgcagtttgcagatagcgaacaaggcgtaaaaactttactcaaaggtgacccaacagcatttatgacgggtatgcaagacggtagcattaaaatggaaggtgatttcagtttgctcgtttggtttaaccaagcagctaaattgattccaccaaaattaccaaaaccagtaaaagataaagtacgtcaagcacgtgcctttattaaagaaaaaactggtcgt

SEQ ID NO: 9021 - DNA, 878 bp, Acinetobacter baumannii
atgagtcgcagaaatattgccatttggtttgatcctgctacgcaatggtatgctccatcaaaaggcaaacaagggcgaaatcaaacatactccgacgcagccatcgaatgctgcttaatgattaaatccttattccgtctgactttacgtatggttactggctttttgcaaagtctgattaaactttgcggatgagcagccccgaatatcagtgatattcgtacaccacgctttgtagaagacaaaagcatattgatattgtaatcagctaccaaaaaagtagcgatgggctgcatctactcatggactctacaggcatgaagtttctaggtgagagcgaatggaaacgcaagaaacatggacctgaatatcgtcgccaatggcgtaaacttcatattggcatagattctaaaaccctacaaatacgagcagttcagcttacaaccaataatgtcagtaattcacaggtgcttggtgatttacttaatcagattccacaagatgagaggattgactctgtttataccgatggagcttatgacaccaagcaatgccgtcaggtcattgcagatcggcaagcgcatgcggtgattccacctagaaaaaatgcgaaaccatggaaagatacaaagagtagctcgctagagcgaaatgaattacttcgaacagttaagcgtttaggcaggacactatggaaaaaatggtcaggctatcatcggcgaagtttggttgaaactaagatgaactgcattaaattattaggggataaactcagtgcaaggagttttgatagccaagtgaatgagatccatgcacgtgtagcagtccttaacagatttacggaattaggtcgaccacttacccaagttacgccttaa

SEQ ID NO: 9022 - DNA, 1011 bp, Acinetobacter baumannii
atgagtaatgttgatcagcgtccaattattttgacaggcgaccgcccaaccggacaacttcacctcgggcattttgtcggttctttgcgttctcgtgtaggtctacaggatagccatcatcaacatctcttattagcagatgcacaagcgttaacagacaatgccgataacccagataaagtacgccgtaacattttagaagttgctctagactatttagcggtaggcattgatccaactaaaaccacaatttgtgtacagtcatgcttgcctgcactgaatgagcttacaatgttatatcttaactttgtaactgtagctcgtttggagcgtaacccaaccatcaaatctgaaattcaaatgcgtggttttgaacgtgatattcctgccggtttcctttgctaccctgtagcacaggcagctgatattacggcttttaaagcgactgtagtaccagtaggcgaagatcaaattccaatgattgagcaaactaacgaaatcgtgcgtcgtgtaaaccgtcaaattggtcaagaccttttacctgaatgtaaagccttgctttctaatatggctcgtttacctggttttgatggtaaagcgaaaatgtctaagtcattaggcaataccattgttttaaatgcttctgacaaagacatcaaaaaagctgtaaatgcgatgtataccgatccaaatcatcttcgcatcgaagatccgggtcaagttgaaggaaacattgtatttacttatttagatgcatttgatccaaataaagaagaagttgaagagctaaaagcacactaccgccgtggtggtcttggtgatggtacagttaaaaaacgtcttgaaggtgtactaaaagaattaattacacctatacgtgaacgtcgagaagaacttgctaaagatcctgactacattatggatgttttacgccaaggtactgataaatgtcgaatcattacccagcagactttggacgaagttaaagatggcttaggcttatttaagttc

SEQ ID NO: 9023 - DNA, 906 bp, Acinetobacter baumannii
atgagccgccaaatctcaactttaatcggtgtttcagctttattactttggtccactttagttggcttactcaggctttctacagaaagttttggtcctatctatacagtgacttatgtatataccatcagtgctattattttatttttaacatatggcctgcccgatttaaaaaaggtttcaaagaagtttcttattttatctagcttgctttttgttgtttttgaattgtgttttgccttttcaattactctagcaaattcatcagaaaaatcgattgagatgaatattatttttaatatgtggccaactttaattattattatgttggcagtattaaaagaagaaaaagtaaacttattgaccatattaggagtgatcgtaagttttgcagggatagttgttatcaactatcatccaaatctaaactttattgataacttttcaaaaaatccgattagttacttgctcatttttttagctgctattctttgggccgtttattgtatttataccaaaaagcaaagcaatggaactaatgctgtatcactttattttatcttaactgctatagctttatggattcttactctctctactcaaggattccacctaccccatgttcaaggtattaatggctatatattcgtcttaattaatgctgtttttttctctatgggttatctagcttggaatattggtattatcaaagggaacatgcccgttttaattatgctttcttatttttctccaattttctcatcggcattctcagcttttgttttgaactccaatttaacaatcaatttttggtacggtgcattaacggttactttaggatcgttaatctgctggtactcaattcgaaaaaaccatgttcaacataaccaagcgaaattagcttcc

SEQ ID NO: 9024 - DNA, 213 bp, Acinetobacter baumannii
gtggctttaggtttattatacgccacccatcaaggtaaaggcttcgttcgtttgctgaaagatgcacgagtcgaattgcgtcgagtaacttggccaacaaaacaagaaacagtcacaacatcgtggcaggttctattggttgtagttgttgcatcattagttttatggtgttttgactatggtttgggttggttaattaagttgattatcggg

SEQ ID NO: 9025 - DNA, 2527 bp, Acinetobacter baumannii
acagtggtggcaaggcacagatggtactgtccagtacccaacccaggtcaccttggtggatgcgatacggttactgcaacagcgactgaccctgcaggcaacacttcattgccaggtacaggcacagtttcagcagacatcacagcacctgtggttgcgctggatgatgtgttgacgaatgacagcacaccagcacttactggtacagtgaacgatccgacagcaactgtagttgtcaatgtggatggcgttgactatccggcagtgaacaatggcgacggcacctggacgcttgcagacaatacacttccaacactcgcagacggtccacacaccattaccgtgactgcaacagatgcagcaggtaacgtaggtaacgatactgcagtggtgaccattgatacggttgcaccaaatgcaccggtgcttgatccgatcaatgcaacagacccagtgagcggtcaggcagagcctggttcaaccgtgacggtgacttatcctgatggcaccactgcaacagtggtagcaggcacagatggtagctggtcagtaccaaacccaggtaacctggtggatggcgatacagtgactgcaacagcgactgaccctgcaggcaacacttcattgccaggtacaggcacagtttcagcagacatcacagcacctgttgtttgtcgtctgggattgcccggattcagtaatgcaggttaacctggcttatcgaaactaatacgactcactatagggagaccggcagatctgatatcatcgccactgtgctggcaatgaacaatggtgacggcacctggacgcttgcagacaatacactgcctgcattaacagacggtccacacaccattaccgtgactgcaacagatgcagcaggtaacgtaggtaacgatactgcagtggtgaccattgatacggttgcaccaaatgcaccggtgcttgatccgatcaatgcaacagacccagtgagcggtcaggcagagcctggttcaaccgtgactgtgacttatcctgatggcaccactgcaacagtggtagcaggcacagatggcagctggtcagtaccaaacccaggtaacctggtggatggcgatacagtgactgcaacagcgactgaccctgcaggcaacacttcattgccaggtacaggcacagtttcagcagacatcacagcacctagtggttgcgctggataaagtgctgataggaagaaaagcacaccagcactaaggtggcacaatggaagacgacgccagcgaacgtgtactagtcgatggtggatggcgttgactatccggcagtgaacaatggtgacggcacctggacgcttgcagacaatacacttccaacactcgcagacggtccacacaccattaccgtgactgcaacagatgcagcaggtaacgtaggtaacgatactgcagtggtgaccattgatactagtttgccagttgtatctttagatgatttaactactaatgacacgactcctgctttaacaggagctattgatgatccaacagcaaccgttgttgtaaatgttgatggtatcgattatccagcgactaacaatggtgatggtacttggacgctcgcagataatactttgcctgcattaatagatggtccacatacagtggctgtaactgcaactgatccagctggtaatacggctacagatacagctacgcttactattgatacagtccctgcagacctgatcggtgcgatcacgattcctgaagacctaaatggcgacggtatcttgaatgcagacgagttaggcacagacggcagcttcaatgcacaagtggcgttgggaccggatgcgcttgacggcacagtggtgaatgtcaatggtgtgaactacaccgtgactgcagctgaccttgcaaacggctatatcacagcagcgattcctgtgacaggcgaaggccctgtagcgatccatgcagaagcagtggatgcacaaggtaacgtagatgttgcagatgcagacgtgacagtaacggttgatacagttcctgcagacctgatcggtgcgatcacgattcctgaagacctaaatggcgacggtatcttgaatgcagacgagttaggcacagatggcagcttcaatgcacaagtggcgttgggaccggatgcgcttgacggcacagtggtgaatgtcaatggtgtgaactacaccgtgactgcagctgaccttgcaaacggctatatcacagcagcgattcctgtgacaggcgaaggccctgtagcgatccatgcagaagcagtggatgcacaaggtaacgtagatgttgcagatgcagacgtgacagtaacggttgatacagttcctgcagacctgatcggtgcgatcacgattcctgaagacctaaatggcgacggtatcttgaatgcagacgagttaggcacagatggcagcttcaatgcacaagtggcgttgggaccggatgcgcttgacggcacagtggtgaatgtcaatggtgtgaactacaccgtgactgcagctgac

SEQ ID NO: 9026 - DNA, 384 bp, Acinetobacter baumannii
atggcttatagcgaaaaggtaattgatcattacgaaaatccacgtaatgttggtgttttagacaaaaactctgagaatgttggtacaggtatggtgggtgcacctgcatgtggcgacgtaatgcgtttacagattcaagtaaatgacaacggtgtaatcgaagaagcacgtttcaagacttatggttgcggttctgcaattgcatcaagttcacttgtaacagaatggttaaaaggcaagactcttgatgaagctcaagcaatcaaaaacattgatattgcaactgagctagctcttccgccagtaaaagttcactgttctgtattagctgaagatgcaattaaagctgcgattgaagattatcgtagtaaaaaatcaaaagct

SEQ ID NO: 9027 - DNA, 855 bp, Acinetobacter baumannii
atgtcacaattaaaaccacaagaagttgtacgtttaggcgatatacaaatggcaaatcatttgccatttgtattatttggcggaatgaacgtactcgagtcaaaagatttagcttttgaaattgctgaaacttatattgatatttgtaaacgcctagatattccatatgtatttaaggcgagttttgataaagcaaaccgttctagtttgcattcattccgtggtcctggacttgaaaaaggtattgaatggttaggcgacattaaaaaacattttaatgtaccaattattaccgacgttcacgaaccatatcaggcagcgccagttgccgaagtcgctgatattatccagcttcctgctttcttaagccgtcaaactgatcttgttgaagcaatggcgaaaacccaagctattatcaacattaaaaaagcacagttcttggctcctcatgaaatgcgccatattttgcataaatgtttagaagcgggaaatgacaaacttattctttgtgagcgtggctcagcatttggctataacaatttagttgtagacatgcttggctttgacattatgaaagaaatgaatgtacctgtattctttgacgtgactcatgctttacaaactccaggtggtcgttcagattcagctggtggtcgccgtgctcaaattacaacattggcacgtgctggtatggcaacaggtttagcgggattattcctagagtctcatccagatccagacaaagcgaaatgtgatggaccatctgcattgcgcttgtcacagcttgagccattcttggcacaactaaaagaattggatactttagttaaaggattcaaaaagttagatactcat

SEQ ID NO: 9028 - DNA, 1566 bp, Acinetobacter baumannii
atgagcaaaacaactcaagaaaatccagcagtcgagaattctgctcaggaaaaagtgtcaaatacatcaaagtcggcttctaacacggctaagcataacagcactactcctaaagcagcaactaatacaccaaaaacgacacgtactcgttcaacgactgcacctgcacgtagccctcgtagtaagagcgctgcttcagcaaccccgtctacatcttcaaatgtagctgcagcaccaaaagcaacaaaaaccaaaacttctgttcaacaggataaaaccatgagtcaaaacactgttcgccgcgttgcaatccttggtggcaaccgtattccatttgcacgttcaaatactgcctactttaaagcgtctaattctgacatgctgacagcagcattgaatggtttggttgagcgctttaacttacaaggtaaacgtattggcgaagttgttgcgggcgctgttttaaaacatagccgtgacttcaacatgactcgtgaagttgtattgagcacagatcttgctcctgaaactcctgcttacgacatccaaattgcatgtggtacaggtttacaagcagcatttgttgttgctaacaaaattgcgcttggtcaaatcgacgtaggtattgcaggtggcgtagatacaacttctgacgcaccgattgctgtaggtgatggtttacgtaaagttttacttgagcttaatgttgctaaaacaggtaaagaccgtcttaaagctctaacaaagattgattttaaaaagcttcttgatgcaccaagcaatggtgaaccacgtactggcctttcaatgggtgagcaccaagcaatcactgcattagaatggggtatcactcgtgaagcacaagacgagctagctgcaagcagccatcaaaaacttgctgctgcttatgagcgtggtttttttgatgacttaatgactccattcttaggtcttaaccgtgacaacaacttacgtcctgacagtacagttgaaaaacttgctaagttaaaaccagttttcggtaaaggcgaaactgcaacaatgacagcgggtaactcaactccgttgactgatggtgcttctgtggtattgcttgcttctgaagaatgggcaaaagaaaacggacatgaagttttagcttatctttctttctctgaaacagcagctgttgacttcattggtaagagcgggcctaaagaaggcttattgatggctcctgcttatgcagtacctcgtatgcttaagcgtgctaaccttaagcttcaagacttcgatttctacgaaatccatgaagcatttgcatctcaagtactctctaccttaaaagcttgggaagatgaaaaattctgtaaagaacgtcttggcttagatgcaccattgggttcaattgaccgctctaaactgaacgtaaatggttcatctttaggtgcaggtcacccatttgctgcaactggtggtcgtatcttggctactgcagctaaattaattaatgaaaaaggttcaggccgcgcattaatctcgatctgtacagcaggcggtgaaggtgtggttgcgattgtagaaaaa

SEQ ID NO: 9029 - DNA, 1707 bp, Acinetobacter baumannii
gtgccgcatgacgtagatttaattattttacttgctgttggtttcggcgttgccctgttttttggctatattgccgcccgactacgacttccccctcttattggctatctcattgccggaattattattagtcctaatactcctggtgttgaagcagatattcatcttgcaaaccaacttgctgaactcggtgtaatgttcctcatgtttggcgttggtatgcatttttccttaaatgatcttttacttgttcgccgcattgccttgccaggtgcaatcttacaaattgctgttgcaactttactgggtattggcgtttcaatgttatggggctggagctttggctccgcactcgtttttggcttaagcctgtcatgtgcgagtacagttgtattattaaaagctttaggagaccgtggccttctagattctgtaaacggcaaaattgctgtgggctggctgttagttgaagatttagtcatggtacttgttttagtacttcttccagctacagctgttttactcggcggaaaagctccagcaggcgcagaaggtaacatctggctaactcttggaatcaccctattaaaggttattggctttatcgcctttatgctgattgtcggtaagcgcgttgtgcctattattatgcagtttgttgctcgcttaggttcaagagagctatttacgcttactgtagtcgctgctgctgtatcgattgcctatggttcttatgccatctttggagtttcaatggcattaggggcattctttgctggaatggtcgttaaagaatcagattttagccatcgcgcagaagaagaaacgctaccattacgtgaaattttctcgattttatttttcgtttcagtaggaatgttgtttgatccacatatccttattgaacgtccactacatatcttggctgttatcgcgattattatggtgggtaaaacacttgctgcaatggccttggttttattcttccgttatccaatcaatactgctttaacagtcggggccagccttgctcaaattggtgagttttcatttattttggctacccttggtgtctctttaggtctattaactttagaagctcaaaacctgattttagcaggcgcattattctcaattacactgaactctttcatcttctcggcaattgagccggtacaacgttggattcgtgaacgctctcatttagcacgacttcttgaacgtagtggtgacccattagccatgctgcccgatgaagtcgatcaatcttatctacgcgatcaagtggtgattgtagggtatggtggcgttggacgacgtattactgaaaatttaattaatcaaaatattaaagtcgtaattgcagaagagaatcgtgaaatcgtagaaaaactacgtcaggcaaatattgcagctgtaagtggtgtagcaaccgaacctggcgttttaattcaagcacatatcatgcacgcacgactcttggtaatttcacctatggatattttagatattcatcggattgtagatattgcgaagcaattgaaccctcaaattcaggttttaatttgtgcagaaagtaaagaagaagccgcagtgattagagacgaacacattggtgaagtattctatgcgaaagaagaaatggctaagaatatgagccatcatattttaaatcaaatcgaacttgcgcatcagtccacacatcat

SEQ ID NO: 9030 - DNA, 1386 bp, Acinetobacter baumannii
atgaacgctttaaccgcactatcaccattagatggacgttatgccagcaaatgtgatgcgctacgcccttttctttctgagtttggtttaattcatgctcgtgtcactgtggaagtgcgttggttacaagcgctttctaaccgtccggaaattgttgaagttgctcctttctcagctgaaacaaatgcagcactagatgcaatcgtaagcaacttctctgaagaagatgcgaaccgcattaaagaaattgaacgcacaactaaccatgacgtaaaagcagttgaatacttcttgaaagagaaaattgcaggtattgctgaattacaaaatgcgggtgagttcattcactttgcttgtacatcagaagacatcaataacttgtctcatgcacttatgcttaaaaacggtcgtgaagttttagtatcaagcatgaagcaaattttaaatgcaatctctgctttagctacaactcatgctgaacaaccgatgttgtctcgtacacatggtcaaactgctagcccaacaactttgggtaaagaaatggcgaacgttgcatatcgtttagctcgccaaatcaaacaatttgaaaatgttgaattactaggcaaaatcaatggtgctgtaggtaactacaatgctcacctttctgcttatccaaatgtggattggccagcgcattcacaagcttttgttgaatctttaggtttaacatttaacccatatacaactcaaattgagccacacgactacatggctgaattatttgacgcgttacgtcgtttcaatacaattttgatcgactttaaccgtgacgtatggggttatatctctttaggttacttcaagcaaaaacttaaagaaggtgaagttggctcatcaactatgccgcacaaagttaacccaatcgactttgaaaactctgaaggtaacttaggtattgcaaatgcagtgttggctcacttaggcgaaaaattaccaatttctcgctggcagcgtgacttaactgactcaactgtacttcgtaacatgggtgttggttttgctcaaagcttaattgcttttgatgcttgcttaaaaggtattggtaaacttgaactcaatgcaaaccgcttaaatgaagatcttgaccaagctcaagaagttcttgcagagccaattcaaacagttatgcgtcgttataatgttgaaaaaccatatgagaagttaaaagcattaactcgtggtcaagcaatgacgcgtgacatgatggttgacttcgtaaatggtaacgaacttgctcaagtaccaagtgaagagcgtgcccgcttagctgagcttacacctgcaacttacacaggtaatgctgctgaacaagctaaacaaattaacgaattaattagcaaaatc

SEQ ID NO: 9031 - DNA, 534 bp, Acinetobacter baumannii
atggctgaactcttgacgttggcacgtccgtatgccaaagcagcatttgcttatgcttctgagcaaggtgcaacagacaattggtcgaatgcgttacaagtgctcagtgctgcggtgcaagacgaagcattttccgcttatttaaatcgccctgaacttactcctgcggagcaagtgaagctttttgctaaagttttaggtgaagatcagtctcaagcagtgtctaactttttgacacttcttgcagataacgatcgattagtgttgttacctgaaattgcagcagaatatgaacagcttaaatcacagaataacaacaatgtggatgtcgtgattgaatcggctttcccgttaactgctgaacaagagcaactgttgaaatctgctttagaaaagcgttttaacagcacagtaactgtttcagttgaagttaaacctgagcttattgcaggtgttgtaattcgtgcaggcgatcaagtgatagatgattctgcgcttaacaagcttgaaaaaatgcgtactcgtcttcttgca

SEQ ID NO: 9032 - DNA, 807 bp, Acinetobacter baumannii
atgattagtctaagtgacttaagaaaatttaaagccgaaggacgtaagttctcttgcctaacttgttacgatgcaagtatggcaaaagcaatggaacttgctgaaattgatacgatcttaattggtgattctcttggaatggcaattcaggggcgtgactcaactttacctgtaactgttgaagacatggcctatcatacagcggcagtccgtcgcggtaatcagcatgctttaattatgactgacttaccatttatgagttatgccactttaaacgatgctttgcagaatgcgaaaacagttatgcaagctggtgcccaaatgatcaaaatcgaaggtggtgcatggctaagtgaaactgtccaagtgttaacacgtaatggtgtgcctgtatgtgtacatttaggtttaactcctcagtctgtacatgtatttggtggctacaagttacaagctagaacgcgtgaagcagccgatcagcttattgccgattgtacggcggtggttgaagcgggcgcggcagttttattactcgaatgcgttccggcacaattaggtcaagaaattgctgaattgttcccaaatactcctgtgatcggtattggggcaggtaatgcgactgatggtcaggtattggttgtacaagacatgttaggtctaacgtttggtcgagttgcgcgttttgtacgtaactttatgaaagaacaatctggtgaaacagcgattttagatgcttttaaagcttttcatgctgctgtacaagatcagtcgttcccagctaaagaacacactttccaagttgagctg

SEQ ID NO: 9033 - DNA, 2835 bp, Acinetobacter baumannii
gtgctaccgataattatcttattaccgttaatattaggcaccacccttgtttcattgcttcaacggttttcacgtggagtaacggctttaggggcgatcggagtcagtttaaccagttttggtttattactgactcaggctaaaactgtgcttggtggtgcaagcattcaacaaagttgggattggttaccacaattaggaattaatctgagctttagacttgatgcccttggtttattattttctcttcttattaccggtatcggtacactcatttatatttatgcctattattatctaggccctaaaaattcattaagtaaattatatttattactcatgctgtttatggcagcaatgctcggtatttctctttctaacaatttaattattttattagtcttttgggaacttaccagtatttcatccttcctattagtcggttactggagccattacgaagctgctcaacgtggctcgcgtatggcacttaccattacaggtatgggtggactcgccatgctaggtgggtttgtcttattaggacaaatcacaggaacctacgaaattaatgatattgtcggaatgaaagacctcattcaaagtcactatctgtttgttccgacgcttttgcttattttactgggtgcatttactaaaagtgctcagttcccgttccatttttggttacccaatgcaatggcagcgcccactcccgtgtcggcctatttgcactctgccaccatggtaaaagctgggattttcttattagctcgtcttgcacctattttcattggcgctgcgctttatcacaacattgtcacgtttgtcggcctatttacactttgtatggccgcatgcttcgcaatttttaaagaagatctaaaagggctactagcctattctacaattagtcatttaggtcttatcgtttgcctgcttggtattggttcacctttagctgttgctgcggcaattttccatattattaaccacgccacctttaaagctgccctgtttatgattgccgggatcattgaccatgaaacaggtacacgtgaccttagaaagttaagtgggatttggcaactattaccgtttaccgcaacactgactatgattacagcggcatccatggcaggtgttcctctcactaatggctttatttctaaagaaatgttctttaccgagctattagcgagcctttcaggatcaactgttatctttgccagtattattgcgacgcttgccggtatttttgcagtcagttattcaattcgcttagtacacggcgtattttttgatggccccgtaggtaaacaagttccaaataaaaatgcccacgagccacctatcggcatgcgagcaccagctatattgcttgcgacactatgtattttggtcggtattttccctgccctactggtcgagcctctagttaacagtgtaacacgtgcaagtcttatgcaacctgattttgcaggtactcatcttgcaatttggcatggatttaatgcgccattaatcatgagtattattgctctggttggcggtacgcttttctattttgccctagcaaaagatggcatgattcgtaagatcgaccttgacccacgtttagggcgcttacaaggccgtattttatttgacttattcttaaagcatttattattaacaagccgaaaaattaaacaaaaaaccgaaaatggttctttgcaaagttacctgttcttaatcattgcttttagcatcgtcatggttactctgcctttgttcaatcagggccttaccacaggtacacgtgagctgactcacgcaccatggattgcagtagttctttggctgaccttattctcaggttgctggatgatgctttggttccaccacgaacgtatcaaggctgtactcattagtggtgcaattggtcttgtggttaccatggtatttgtcaccatgtcggcacctgacttagcactcactcaaattacggtagatgtagttacgactgttctgttgttgatgagcttatcgttactccctcaacttacgccatatgaatctcgtcgctcaagacgttggagagatgctgcgttagcaattattggcggtttaggaattggttggattacatggcttattttaacgcgtgatcataattcgatttcatggttctttgctcagcaatccttaccacttggcggcggttcaaacattgtaaatgttattttggtggacttccgtggctttgatacctttggtgaaattacagtactaggcattgctgcgattggtgcgctatgtctcatggatggcatgcgcgtacatggcaccaccatgacccaaggcctcacctaccgttttaacccatctccactcatgttccgtattacggcctcttgggtgttacctttagcattggtcgtaagtgtctatatctttatgcgtggacacaactacccgggtggtggctttattgcaggtctaattacctcaatggcactgattattcagtacattgctttaggtcaagatcaagcagaacaaatgttaaaagcccaatccggtcgtctttacgaaatctggattggctccggattaacaattgcaggccttactggcattgccgcatggttctgggcacgtccattcttaaccagtgcgcacgtctatgttgaattaccagttttaggtaagttgcatctggcttcagcagcaagctttgatctgggtgtgtatatcaccgtagtaggcgctaccatgctactcatttctgtattaggggactctcgccactcgagtatgtctggtcctgtacctcatggggagaaatcatca

SEQ ID NO: 9034 - DNA, 489 bp, Acinetobacter baumannii
atgagacatattatttctgtactcgttgaaaacgaagctggtgcgctttctcgtttggtgggcttattcagtcaacgtaactacaacattgaaacacttaatgttgcaccaaccgaagatccgacattatcgcgtttaacgttaacgacttatggcgatgaccataagatcgaacaaattacgaaacagctcaacaagcttgttgaggtggtaaaagtagttgatttatcagaaggttcacacattgagcgtgaactcatgctaatcaaagtaaaagcattgggtgcttcacgtgctgaaattaaacgcactgcggatattttccgtgcgcaaattgtagacgtgacaccaacgacctataccattcaaatagcagggacaactgaaaaattagatggttttatcgatgcgcttgcagaaaacaccattcttgaagtcgttcgttcaggtgtatcaggtatcgcccgtggcgaaaaagttttagccatt

SEQ ID NO: 9035 - DNA, 1467 bp, Acinetobacter baumannii
atgtcaaactctttatttataaacggtgtctggttacaaggcagcggtacaacatttgtaaaaacaaacccggttgataaccaaactgtatggtcaggcgctgaagctacggctagtgatgttgagaaagcttgccaagctgctcgtacagcattcccagcgtgggcgcgtttaccttttgctgagcgtgtggcgattgtagaaaagtttgcagctttgcttgaagaaaataaaaagcatttagcggaagtgattagccaagaaaccagtaaacctttttgggaaacattaactgaagttcagtcaatgattggcaaggttgcaatttcgattcgtgcttatcaccaacgtaccggtgaaagctcaactgaaatggcagatggtgtggcatctttacgtcaccgcccacatggcgtacttgcagtttttggtccatataacttcccgggccacttgccgaacggacatattgttcctgcgttacttgctggtaacacagttgtattcaaaccaagtgaattaacgccttggactgctgaagaaactgtaaaactctggcaacaagccggtttgccaaatggtgtaatgaatttggtgcaaggtggtcgtaccacgggtgaagcgctagctgcctcacatgaaattgatggcctgttatttaccggaagcgcaaacacaggttatcacctacacaaacaaatggcgggtgctcctgagaaaattcttgcgcttgaaatgggcggcaataatgcattgattatcgatgaaatcgaaaatatggatgctgttgttaacctcactattcaatctgcatttgtttcggcagggcagcgttgtacatgtgcgcgccgtatcttggtaaaaaatagtgcgcaaggcgatgcatttattcaacgttttgttgaggttgctaaaaacttaaaagttggtcgttggaatgatgagcaacaaccatttatgggcggcgtaatttcatcggctgctgcaacaaacatgatgaatgcccagcaaaagttgcttgagcttggtgcaaaaagcttgttgccaatgacacgtcctcaagaagacagctcattacttactccaggcattattgacgtaacaggtgtggcgggtattccagatgaagaatatttcggtccgcttaccactattcagcgttatgacagttttgatgaagcattaaaaattgccaatgcaactcgtttcggcttgtcagttggattagtttctccaaaacgtgaattgtttgatgacttactcattgaagcacgtgccggaattgtgaactggaacaaaccattaacaggagcatcgagtgcagcaccatttggtggtgtaggagcttcaggtaatcaccgtgcgagtgcattttatgctgctgactactgtgcttggccaatggcttcactcgaaagtgaaagcttgacgttgccagaaaaattatctccagggattgtgttgcct

SEQ ID NO: 9036 - DNA, 471 bp, Acinetobacter baumannii
gtgattcatgttgttctatacgagcctgagattcctgctaatacaggtaatattattcgtctatgcgcgaatacaggcgctcaattgcatttagttaagcctttaggctttgaacttgatgataaaaagcttaaacgtgcagggcttgattatcatgaatgggcaagaatgcaaatttgggacaacatagagctttgtcttgcggacttaaaagcaaaaggtgttgagcatgtttttcctttaactacgaaaggttctgctacgcctcatacagttgatttaaatagacctgtggctttattgatggggccagaaacacgcggcttgcctgaacatgttcgtctgatgttccctcaagaacaatggattcgtttaccaatggcagaaaactcaagaagtttaaacttatctaatgcaactgccgtaattgtatatgaagcatggcgtcagcaaggctttaaaaaattaggt

SEQ ID NO: 9037 - DNA, 999 bp, Acinetobacter baumannii
atgttgtctcaatttgttaataaaactttaaaagtgcttgccttgtgtactggccttattagcacaagtcattttgctcaggccaatgattttgtaactcatcctaactatttaaattttaaacaaaaagccatgagcacttatggcttaagcggtgaacaggttgacgccgctatgaatggtgcaaaaaatttaccaaacattataaatattatgactcgccctggtgaaagtaagccttggtacgactatcgctctatgtttttagtcgaaggtactattcaacgtggtgtccgctttaaaaaccaatatgccgatgctctcaatcgtgctgaacaacaatttggtgtctctcaagcggttattctaggcattttaggtgttgaaacaggttatggagccaataaaggctcgtttattactcgtgatgcacttgcaacgttagcttttggctacccacgccgtgctgaatattttggcgatgagttagctgctctcattgcatggacttacaaagaaggttatccaaccaatagtattgtaggttcttatgctggtgccattggcttcccgcagtttatgccaagcaacattagtaagtacggggtcgactttgatggtaatggtcatatcgacctacgaaactctgcagaagatgcgattggttcaatcgcaaattacttagcaaaacaaggctggcaacgcgatcaacctattggttttatggctcgttacacaggttcaaatccggaaagtatcattgctaaagatttgacccagcccactccgtatggtgcactaaaaaatcaagggatttcccctttaaatccgttagtcaaaattgatgacttagatatggtaaatgttattcaattacaagactataacggtccaatttactatttaacctatccgaactttcaagtaattacgacttataacaaaagccgaatgtatgcgactgccgtatggttgttaggtacagaagtagctagccga

SEQ ID NO: 9038 - DNA, 918 bp, Acinetobacter baumannii
atggctctaagacatttcctgactttacgtgatctatccactctagaacttaatcgcattttggaacgcgcaagcgaacttaagaaaatgcagcaaagcaataaggtatatcaaccttttgttggtaaagtattgggaatgatttttgaaaaatcgagcacacgcactcgtatttcttttgaagctggtattaatcaatttggtggtagtgccattttcttatcaccacgtgatacgcaattaggccgtggcgaaccgattgaagattcagcacgtgttatttcaagcatgcttgatatcgtaatgattcgtacttttggtcacgatattgttgaacgttttgcatcttattcaaaagttcccgttatcaatggcttaactgatgatcaccatccttgtcagttacttgcagatttacaaacttatattgaacatcgcggcagcattgaaggcaaaaccgtagcttggattggtgatggcaataatatgtgtaattcatacattgaagctgcacacatgatgggtttcaaactcaagattgcatcaccaaaaagttatgaacctaaacctgaatttttagcagagtttgggcattgtgttgaactttttgataatgcggaagatgcggctgtaaatgctgatcttatcgttacagatgtatgggcaagcatgggacaagaagaagaacagaagctccgtgaaaaagcctttgctgattttcaggttaacgagaaattaatggggcttgcacacccggactgtttattcatgcactgcttacctgctcatcgtggtgaagaaatttctgaaaccatgctcgaccataaaaatgccgtagtatgggacgaagcagaaaaccgtctgcatgcacaaaaagctttaatggaatttttactcaacgaaaatttgaaaaaagct

SEQ ID NO: 9039 - DNA, 3192 bp, Acinetobacter baumannii
atgtttaataatatttttcagatcttagagagttttggttttctctcacagcatcgttcggtgtatctccagttttcagatgcatccctgaatagtcaggtttttttacaacgtatagatgggcaacattatcttaatcagggcatgacagccgagctgatttgtttatcaaccaatgctcatattccactcaaaacatttattggggtgcaggttgctgttgatcaagtaacagatcgaggaagttttttccgtactacaggtattattactggagcatcacaagggcaaagtgatggtgctttaactttatataaacttgctataagtgatccaacttatctctggcataaacgcagaaatagccgtgtgtttatgaacaagagtgtgaaagaaattagtgaaattctgtttcaagagtggcaaggaaaaagcccattatttgcttctagtctgactctagatttgagcggcttgaaacagacctacgatgtccgtccttttgttatgcagctcaatgaaagcgactatgactttttaactcgcttatggcgtagtgaaggtattagctggctcattgatgaagcagagcttaccgtggcgagcaatatggacaatattcagccacaaaaattacgtcttattgatgataataaccaatatcaagctctgacaagaagagcgattcgttaccaccgcagtagtgcaactgaacaatttgatagcatgaccagcctaatggctgatcgcagtttacagccgacttctatatttgtgcagcgttggcagccagacgtattacaacaaacagatggggcaggtagtgtccaaagtaaacatcagcatagtactaactacgacaatcaaagcttaagccttgaagaagcatggcactttagtccggcatggatgcaggatttaaatggcgaagatggggcaacctcagcaagtaatcaacaactagaaaagtttaaccagaacctaagtgcttattatgatgctcagtctaagcagtttattgcaaaaaccacagtacgagatacacaagttggctattggtttgaactcaatgaacaccctgaaattgatcagcatgaaagcacagataaagagtttttaatcataggtaagaattattataaccaaaataatttacccaaagatttaaaccagcaaatccaaactttagttcaacaaagcgattggcaagcgagtaataccgacgagcgtcaagcgaatcagttaattttacaacgtcgttatattccaacaacaccagcttataacccacagactcatagcccagtcgctcatccacaacgtgcgaaagtggtgggtcctgaaggtgaagaaatctatgtagatgagtgggggcgtattaaagtccgcttcctatttacgcgtagtgatgaccatagccatgatgggggcgcagggaccaataataatgacaccgattcagcttggattgacgttttaacgccatgggctggagaaggttacggtgcacgttttttaccgcgtattggtgaaattgttgttattaacttctttaatggcgatattgaccgaccgtttgtgatgggtcgagtgcatgaggcacagcgtcatccaactaaatttgataacaaaggtaagcttcccgatacgaaaaagctaagtggtattcgttctaaagaggtgtcaggtggtgggtttgggcaactcagatttgatgatacaccgggacaaattagtactcagctacaaagcagtcatggtgcaagtcagttaaacctcgggaaattgagccatcctaaagataaagcggaaagtgaagaccgtggagaaggatttgaactgcgtacggaccaatggggagctttgcgcgctgggcaaggcttattggtatccacccataaacaggataacgccaaaggagaccacctcgatgccgaagttgcgaaaaagcaacttgaaggtagtcaaactaacagtaaagcactgagtgacattgctaaaaaccagaaaaccgatgaaatcgaatcgattgaacagttaaaagattttgcctcacaaattcagcagcaaatcgctaaattcgaaaaagctttacttcttttgagttcaccggatggtatagctctaagtagttcagaagatattcacatctcggctgatgcacaaattaatcagattgctggagatagcattaatataagtactcaaaagaatgtgattgcccatgcccaaaataggctcagcctttttgctgctcagagcgggctaaaagctgttgctgcacaaggcaaggtagaaatacaagctcaggcagatgcactggatgtactgagtaaacttggaattactatttcatcaaccgatgacaaggtcatcattagtagcccgaaagaagtcaaaatcacgggcggctcatcgcaaattactctaaatggttcaggaatctttccgaaaactggtgggaaattccaagtcaatgctggacagcatttgtttatgggaggagcgagtgcaaacgccagtgctcctgagttgcctaaagctaaacctatgcagggagcattggagctactgcggagttatggtggagataacttcttcaagcaaaatagctataaagtcattgattcattaggtaagcaaattacgggcaaactcgatggaaatggttttgcacaagtaacaggtattgcacccggaccagctaaagtagtttttgagaaggataatacaagtgcatggctacaaagcagtgattttaaacgtaattatacgtgggctgaaccagtcaaaagtgttcaaggattaatgaaaaatgccctagaagcagtggggcaaaatacgatgtctcaattgcaaaataatcttctttcaacggataaaaatagtttcaaaaacttaggtaagaatactttagataatttagctggccaaacagtagcccagattaaaaatcaggtaactaatactgcccttaatactgtttcaaaacaacttaatctcaatttatctgccgatcaaatgaaaagtcttggtcaaatggcgacgaatccaagtcaatctcttgaaatgcttaaagagcagggcggagattttttgagtgatcaaatgaccgcaaaattatttaagaccacaaatcaagagtcacctattcagcagggcgatttagatacttttgtacggtcaaaaaag

SEQ ID NO: 9040 - DNA, 918 bp, Acinetobacter baumannii
atgaatcacacatttaaatggcaaggccgacatgatggcgagggtgaggcacatcaacgtattcaccatatagtgaacaccacccaacatgctgaatttgccctgattggttttagctctgatgaaggcgtaaaacgtaataaaggccgtgttggtgctgccgacgcaccagatgcgattcgtacccaacttgctaacttaccaattcatcgtccagtcagtattgtcgatttggggacggtgacctgtgaatatggcaatttagagcaagcacaaagcgaattagctgaacaagtcgcaaatagcctagaacatggcttaaaacctgttgtattgggcggtggacatgaagttgcatttggcagctttagcggtctgttccaatatgtacaagcccacgcaccaaataaaaaaatcggcattattaatttcgatgcccattttgatttgcgtgaagcagagcatgccacctctggaacaccttttttacaggcagctcgactttcagaacagcatcaaaaacaatttaattatttatgtattggggttgccaaccatgccaatactaaaattttgtttgatactgccgatgcgctgaattgttcatatttacgtgatcatgaggttaatatgtttaacctaaacaacgtgctcgtagcggttgatgcttttattgaaaaagtagactgcttgtacgttacgattgatctagatgtcttcacggctgcggttgcaccgggagtcagtgcacctgctgtaaaaggaattgatttagcgacttttgaagcaatttttaagcatattcaagagactggaaaaatcaaacttttagatattgctgagtgcaatccaaaatttgatttagacaatagaactgcaaagttggctgcctatattgtttatcaatatttgttttct

SEQ ID NO: 9041 - DNA, 1104 bp, Acinetobacter baumannii
atgggcattcgtatcacaggtactgggctatttcacccaacagaaatcatttctaatgaagaactggccgacagtttaaatgcttatgtggaacaatataaccaagagaatgcagagaaaattgcagcaggcgaactagaagaattacgtggttcaagtgctgaatttattgaaaaagcttctggtattaagcgccgttacgtgattgaaaaatcgggtattcttgatccaacacgtttacgtccgcgtttgtctgaacgttcaaatgatgaactttcaattcaagcagagtggggcgttattgctgcaaaacaggcaatggaaaatgcaggtgtaactgctgaagatatcgatgttgtaattttggcttgttcaaacatgcaacgtgcttatccggctgtggcaattgaaatccagtcggcacttggtattcaaggttatgcttacgacatgaacgttgcgtgttcagctgctacttttggtttgaaacaagcggcagatgcaattcgttcaggtgctcgccgtgttttattagtgaatgttgagattacatctggtcacttagactaccgtaaccgtgattgtcacttcatttttggtgatgtggcgaccgcttctattattgaagaaaccactactaaaactggttttgaaattttagatattcatttattcactcaattttcaaacaacattcgcaataacttcggtttcttaaaccgtagcgaagatgcagtggttgacgacaagttattccgtcaagatggccgcaaagtatttaaagatgtttgtccgttggtggcaaaaatcattaatgcgcaattggaaaaaatgcagttaactgcaaacgatattaagcgtttctggttacaccaagccaatgccaacatgaatgaattaatcttgaaatatgtggctggtaaagatgcagatctaagccgtgcaccaattattctagatgagtttgccaatacctcttcagcaggtgtaattattgctttacaccgtacaggccacgaagtggatgatggcgaatatggcgtgatttcatcttttggcgctggctattcagtaggttcgattgttgtacaaaagcatgttgct

SEQ ID NO: 9042 - DNA, 975 bp, Acinetobacter baumannii
atgagtcgcgccatctcgcacattgatacatttcagggcttaattcttgccctacaaaactattgggccgaacaaggctgcgtcgtactacaaccttacgacatggaaatgggcgctggaacattccacaccgcaacattcttacgtgctttagggccagagacttggaacgcggcatacgttcaaccttcacgtcgtccaaaagatggtcgctacggtgaaaacccgaaccgtttgcaacactattaccagttccaagtagtacttaaaccaaacccagacaatatccaacagctttatctcgattctttaaaagcaatcgggattgatacgcttactcacgatatccgtttcgtagaagacaactgggaatctccaactcttggggcttggggcttaggttgggaagtttggcttaacggtatggaagtaactcagttcacttacttccaacaagttggtggtgttgaatgttacccagtaacaggcgaaatcacttacggtttagaacgtcttgcaatgtaccttcaaggcgttgactcggtttatgaccttgtttggacgaaaggccaattcggtactgtaacttacggcgacgtattccatcaaaatgaagttgagcaatcgacttataactttgaatacgctccagttgacaaactatttgaactatttgatttctacgagtcagaagctaaccgtttaatggaagctaaacttccacttccagcttatgagcaagtcgttaaagcgtctcatacctttaacttgcttgatgcacgtggtgcaatttctgtaactgagcgtcaacgttacattttacgtgtacgtactttggcgcgcgctattgcacaaagttatgtacaagcacgtgcagagcttggcttcccaatggcagaaccgcatttacgtgatgaagtattggcacagctaaaagcacaagctgaaagtgaagcagcaaaggcggagaaaaac

SEQ ID NO: 9043 - DNA, 1233 bp, Acinetobacter baumannii
atgtcaggttgtggtgctgagcatggattaatcagtatagatgaagcgctagatttagttattaataagcctaaaaacttaagctctatacaaaagactctaaaaaatagcctaagtagttatcttgccaaagagatttactctgaaattaatctacctagcttttctcaaagtgcggtagacggttatgcactttgtagccatacagaagatttaaataatcaaaagttccaagtcacaggtgagattcgtgccggaagtgagagtcacgacatactcggtgaaggtcaggcaattcgtatatttacgggcggcaaaattcctgaagggacaacgcatgtagcacggcaagaaatcgtatcggttatttcggctcaagaaatttgtttaacggaatatatacgccctcaagccgatatccgctttaccggagaagaaatccagcaagggcagttacttgctcaagtaggacagtttctaaatattggaagcttggctgctttaagtatggcaggtgtacaagaacttactgtatatcgtagaccaaaagttgcagttttagtcacaggtgatgaagttgctcaaacggcagaagatttaatcgatggaaaagtctttgatgcaaatggtccattactaaaagcttggtttgaagattatggtttagatgttgaactcattcatgtggcagatgaagcagatcaggtcacccattactttaaccagctaaaagacagccatgatgttgttataacgactggcggagtttcggtaggagactacgactttgttcggccctgtgctttcgaagttgggtttgaacaaatcttttggaaagttaaacaaaagccgggtaaacctttattctttgccgaataccataattcacaagctagccattcctgttatttgttaggcttaccgggcaatccggctgcggtatatgtcgcaatgcaagtttacggtaaatctttgcttgatgcattgcagggcaatagacatggaccagaatggtttaccgcaattttagagcatgatttaaaagaagatgcacgtgagcgttttttacgaatgtatgcttattttgatgcaggacaacttagggtgaaaagtttggccaagcagcagtctcatatgctgagtaaccttatgcaagccaattgtttagtccgtattcctgcgagtacaaaactagcatcaggaactgtgctaaagggaatctttatttcaaat

SEQ ID NO: 9044 - DNA, 1227 bp, Acinetobacter baumannii
atggaacgtgttgtcatcacaggtatgggaattaattcttgtattggaaatacattagagaaagtaaccgagtccttaaaagcaggccgctcaggcattcgctataacgaagtctatgcaaaactaaactttcgaagtcatgtgagcgccactgccgaaatgaattttgaaaatattgatcctgagctaaaaaaacacatgggcgtttgcgcgatgtatgcctacaactcggcactcgatgcgctacaacatgccaagcttgatgtaactgacattgccaataacccaaaatatggcgtgattgggggaacaggcggcacctcaacagcgtctatcatcgacatgttgcataccctaaaagaaaaaggcgcaagcgaagtatcacccgatttagcaccacgctacctcaccagcaccattagctctaacttatcacgcgcttttaacctaaaaggcgtatctcaatcggttgcgagtgcctgcgccacgtcagcggacgcaattggctatgcatatcaccttattgccgctggcaaacaagacctcatgctggcgggtggcggcgaagaagaccattggtcccaaaccgcaatattcgatgcgatgggagccttatgctctaaatataatgacgcaccagaaacggcttcacgcccatattctgtcgataacgatggctttgtgatcgctggcggcggtggcatggtagttttagagtctttaagtcatgcccaaaagcgcggagcaaaaattttggccgaagtggttgggtacgctgccaatagtgacggtgtcgatatggttgccccaagtggtgaaggtgcgactcgctgcatcaaactggcactcgcagaagccaagcaaaacggttcagacaccatcgactatatcaacacgcatggcacttcaacgccggcaggggacattcccgaactattggccatagagcgagcttttggtggcgaagaagtaccaccactcagttcgaccaagtcaatgactggccatagtttaggggccgcaggggtacacgaagctatttattctattttaatgctgcaaaatagctttatcgcgccgagcattaatattaccgaactgcgcgaagaagctaaaaagtttgatattgttcaaacaagccgagaaaccgaactaaaaacagttatgagtaatagctttggttttggtggcgtaaatacttgtctggtttttagaaagtgggaagag

SEQ ID NO: 9045 - DNA, 123 bp, Acinetobacter baumannii
gcgacgaagcatttacctattcacatgacacgtattgcgcaaggcgtaccacaaggtggcgagcttgaatatgtggatagtcataccttaagtcaggctgttcataaccgtatgcgtatgaaa

SEQ ID NO: 9046 - DNA, 1674 bp, Acinetobacter baumannii
gtgacaacaacgacaacaaaatttcgtgatgtagaaattcgtgcaccacgcggcactgaattaacggctaagagttggttaactgaagccccattgcgtatgttgatgaataaccttgatccggacgttgcagaaaacccgaaagaattggtggtatacggtggtattggccgtgcagcacgaaactgggaatgtttcgacaaaattgtagatacgctaaaaaatcttgaaactgacgaaactttattagttcaatcaggcaaaccagtaggtgtatttaaaactcataaagatgcgccacgcgttttaattgcaaactcaaaccttgtaccgcactgggcaaactgggaacactttaacgaattagacgctaaagctttggcaatgtacggtcaaatgacagcgggttcgtggatctacattggtagccaaggtattgtacaaggtacttatgaaactttcgttgaggcaggtcgccaacattacaatggtgatttaaaaggtcgttgggttcttactgctggtttaggcggtatgggtggtgctcagcctttagctgcaacacttgcaggtgcatgttctttaaacattgaatgccaacaagcaagtatcgatttccgtttacgtactcgttatgtagatgaacaagcgactgatttagacgacgctttagcacgtattgatcgctatacaaaagaaggtaaagcaatttcaatcgcacttcatggtaatgctgctgaaattttacctgagcttgtacgccgtggtgtacgtccagacatggtgactgaccaaacaagtgcacacgatccacttaatggctacttaccagtaggctggacttgggaggaatatcgtgaacgcgcgaaaacagaaccggaagctgttgtaaaagctgcaaaacagtcgatggcaaaacacgtacaagccatgcttgatttccaaaaaatgggtgttccaacatttgactatggtaataacatccgtcaaatggcgaaagaagaaggcgtagcaaacgcttttgatttcccaggcttcgtacctgcatacatccgtccgttgttctgtcgcggtattggtccattccgttgggcagcgctttctggtgacccagaagatatttataaaacagatgccaaagttaaagagttaattcctgatgatgagcatttacatcactggttagacatggctcgtgaacgtattagtttccaaggcttaccagcgcgtatttgctgggtaggtttgggcttacgtgcaaaacttggtttggcatttaacgaaatggttcgtagcggtgaattgtctgcaccgatcgtgattggtcgtgaccacttagactcaggttcggttgcaagtcctaaccgtgaaactgaagcaatgcaagacggatcagatgcagtatcagactggcctttattaaatgcattgttaaatacagcaggcggcgcaacttgggtgtctctacatcatggtggtggtgtaggtatgggcttctctcaacactcaggcgttgtgattgtgtgtgacggtacagatgaagctgctgcacgtattgctcgcgtactaaccaatgaccctgcaacaggtgttatgcgtcatgccgatgcaggttatgaaattgcgattaactgtgccaaagagcaaggcctacacttgccaatgatcacccaa

SEQ ID NO: 9047 - DNA, 1431 bp, Acinetobacter baumannii
atgcaatcattaaattatcggaataatgatgcatcgcaacatggaagttctgcacctttgaaacgagcaatgagtactcgacatttggtgatgatctcccttggcggtgccataggtacaggtctttttcttgggtctggcgacgtaatctctcaagcaggtccaattggcgcaattatctcttatttcttgggcggtctaattgcctataccgttatgctgtgtctcggtgagctagcggttcatgtccctgagtctggctcttttggtgaatacgcacggcgttatatcggtccaggtacggggtatatgattacttggctatattggctgacttggactgcaactttggggactgagtttaccgctgcggccctgttggttcaggagtggtttccatctacctcggtatgggcttggactcttttctttggcgccttggttttctttcttaatgtaagttcaacccgcttatttgcagagtctgaattttggttggcgcttgtaaaagtaatcaccattatctgttttattggtttggggctgcttgcaattttcggctttattccttatcaggggcatgaaacagcaccattgttcagtaatttgactgctcatggttggttcccaaatggtcttttcccaatttttgccactatgcttatcgttaactttgctttttctggcacagaattaattggggtggcggctggcgaagctgagaatccagcaaaaacagttcctaaggcaattaatgcggctatttggcgcttattgattttctttgttggtacgattgtagtgattagttcactattgccataccacctagcaggtcttagtgcaaatgatgtgagcagtagcccatttgtgactgtatttaattacattggtattccgtatgcagaggatattatccgtttcgtaattattacagctttactatcagctgctaactcgggtttatttgctgcatcacgtatgatgtggtcgctttcagcaaaaaatcaattacctaaaatttttgcgaaactcacgccgtctggaacacctattattgccattattgtgacaatgtttggtgctattccaggattgctttcagaacaatttgcaccagaaacaatttttaaaaatttgttgggtgttgctgcttttacaatggttgtcgtttggattgcaatttgtatttcgcaatttaacttccgtagacagtggtataagtcaggaaaaacagtaaaagatctacgtttcgctgcaccactttttcctcttactccaattgtaggcgggctattctgtatagttacttgtatcagtatggtatttgatccttctatgcaagtgggctttatctgctgcattatttttatcttgctatgctatgtcagctatttcatcttttatcgtaaaaaagatatagctcaaaac

SEQ ID NO: 9048 - DNA, 882 bp, Acinetobacter baumannii
atgcaaatgaagaagcattctttattatttattgccttaatgagcaccacttctctatacgcaaatatccctatcgagtctcgtggtttaagtcaaaatgatggtagtgcatctaatacttcttcaagcaatatttcagttcctacaaatttaaactgggaactcatgcaaaaaaaccaacaattagaaaatgatattcgtacattaagaggtcagcttgaagaacaagctaatgatattgagcaattaaagaaagatctagcaaaccgatataccgacttagatcaacgtttagaattattacaccaaaaagttgaccctgacagtgctacacaagatgatagttcgaatgcaacatccgataacactactcctgctagtgcaccagcccctcaaaccacagagagtaataaagtagctgcagtaccagccacacaaacttctgagcagcagcctagcgcaccaacaaccactactcaaccagcaccagctgctgcgcaaaaccagtcaaattccctcgaattagaaaaagctgcttatactgtagctttagatgcgtataaacaaggcggtgctaaaaaagcaattgctccaatgcaaaactttataaaaaaccatcctaatagtatctatacaggtaatgcttatttttggttagccgagtttcatttagcgacagatccagtaaattataatgaagcaaagaaaaactataatgtcgtagctaaccaatacccaaattcaagtaaggcacctcgagcattgtaccaactttatagtatcgctaaagatgttgataagaatactgtgtcagcaaatcaatacaagaacaagttacttagccaatatccaaagtctgaagaagcaaaattctttaacaaa

SEQ ID NO: 9049 - DNA, 1908 bp, Acinetobacter baumannii
atgaatgcacttcagcccgtttatcaagtaatggaccaaggaatcttacaggattttatcaatagccttctggttgaaacgattattcctgaacagtttatttttgattttgcgactgcccaaactgcgctaaatcaacatggcaaaaatcttcaagaagtatttaaaaacacgtctgaacaattttcttttgtgctattacacgaagagagtcggcaaggcttggtcatgtttgcggtacaaaaaggtattactcaagcctggaagtttgctaatgaaacagaagtttttctattggaacgcacaaatgatcatgttcagatcaatgtgattgggataatagaactttttgagtttattcaagcgataggtctttttaatcagtgtagcactgataaagttcaagccttttatgagcagctgcaaaaatgtttaaagcaatatcatttattacaacaacatcgggtaaatgcacatgatttattgaatcaaagcttggcacatagattccgcattttagagcaatatgcaggttatcgggaccgcccatatcatcctttagccaaattaaaagaaggtctcagtcagcaagagtatatgcaatattgtccggaatttgctcaagaattatctattcattgggtggctgtacataaggataaaatgatgtttggtgaaggggtagaaaatattttcaaacaacagccaagcgaaatttttattcctcgtgctgagcgatatcaattaaaacaggaaatgtttcaacgtgggttaaatgaaacccacattgcaatgccaattcatccttggcaatttgagcatttatttcccaagttctatgcggatgatattgccgacggtgtttgtcatcctttgaattttatctctaaaggaatgtatgccagtgcgtctatgcgtagcctcttatcaaaaaatgttttagaagaaagtctaaaattaccgatagggattaaagctcttggttcattaagatttttgcctattgtgaaaatgattaatggtgaaaaaaatcagaaattattacagcaagccaaggcaaaagatgctgtcttaaaacaaaaattatggctttgtgaagaaacacaatggtggtcatatttacccgagaagcaaaatgatcggacagcagacaatgagtggttatttgtagagaaacctacccatttggcagctcagcgccgtcatattccagctgaattattgcaagaaccttatcaacttataccaatggcaagtcttggacatacaattatgggtgagcctgccatttttgattatattttgcagcttcaacacaaggacataaactccaagcagatacttatcgagtttgagaaactgtgtacatgtttctttgatgtaaatttgcgattattccgcttagggcttatgggtgaaattcatgggcaaaacatatgtcttgtgttgaaaaatggcgaatttgatggattgatgttccgtgatcatgattcattacgtatttatttaccttgggtagagcaaagcggattgaaagatcctaattatttgagtccccatgattttagaaatacgctttatcatgaatcggtagaggctctgttattttatattcaaactttaggtattcaggttaatctagggtgtattgttgataatttagcgagtcattatcaaattgaagttaaggatctatggtctgtacttgctcatgcgttacagcaagttattcaaaatctaaacttccagccagagattttgacccagctccaacatttactatttgaagtgcctgaatggccatataagcagttacttcgacctttgctagaacaagatacacggattggtagtatgccaacgggaattgggaaaacccgaaacccactttggtatgccttaaattgt

SEQ ID NO: 9050 - DNA, 1461 bp, Acinetobacter baumannii
atggttgaagttgagcttaagtttcagttacctgaatcgaagaaaaaaaccgtccagcaatatttaaaaaaacataaagcacagtatattcatttacaggccaagtattacgatacgccagaccgcctacttgcaaaaaatggtatggccttacgcttacgtaaagaaaatgatctgtgggtacaaacctttaaggctgccggccaaagtcatttacatcgtgtcgaagaagaagtttttttaggaaaatgcgatcaagaacctgacttaaaccttgagttatataaagacaataaagccgtcacagatttgattactcaagctttaggctctgaagtcgaaaagctaagcttacagtttgagactgatgtacaacgtacctatcatgtttttgaagcagatgacacggcaattgaagtctgtcttgatgacggcgccgtaaaaacagcaacagcacaaagcaaaatttgcgaagttgagttcgaacttaaacaaggtgcagtcaaaacactgattcaatttgctcagcaatggattaatcgttatgaactttggctcgatgttagaagtaaagccgagcgcggtaatttactcgcattggggcaagctgcttcaccggctgttcacgcaaaaaaactgaacttagataaaaacatttcagcagaacaggcactcaaaaagattgtagaaaactgtttgggacaattcttgcctaacatggccgcaattgccgatggagttgccgaggctgagcacattcatcaggcacgcgtaagcttacgccgtttacgtagtgcactaaaacatttttcagcatggtcagacgagttaaaccctgtgtgggaagagcaaattgccgaactattccgtcagcttggggacacgcgagacgaagatgctattcgtaccgaaattttacctatgattgtgcagcatggttcacctgagcttttacttccgatctctgaacagccattaaaagatcttgccacactgtttaaatccgcagataccattaagcttatactcgccttattagcatttgcctattcagaagaagacgatcaaaacgccaaaggaaaattgaaaaaatatataggaaaaagcttagataagttacaccatcaagtggtgagtaatgccgatcatttcactgaacttgaagtcaccgaacagcacagaacgcgcaagaaagccaaacagcttcgttactgcattgagtttatatcgagcttatatcctcgtaaaaatgttcagcagtttttaaaacaattacagcctgtgcaaaatactttaggactttataacgacttatttattgccgaagatctatttaataaagcggttgaacacgacccacatttttggtttgcattaggatgggttaaagccaaacaaccttatttacaaaatcaatctgccgaagctttgcaaaaatttaaacaggcaaaaacattttgg

SEQ ID NO: 9051 - DNA, 903 bp, Acinetobacter baumannii
atgattagccttattaaaaatagtagttatggtggcactattgcaattttagtagcctctttcttatggggaaccacggggacagccgcagcatttgccccaacacttggtccacttgcaattggcgcggttgctatggggggaggtgggcttttacaggcattgattgcatctcgggccatccgggaacaccgacaatttattgggcgaaatatttctattattcttttaggtgttgtggcagttgggatataccccctagctttttattcttccatgcattatgccggaattacgattggtacggtggtttcaattggttcggctccactcattgcagcagttttagagcgattctttgaccgtaaagttttatctaaaacatggttcctaagttttgtgttgggtgttgtaggggtaagtttgttatctatgggcgaaagccacgcagcacaagagagtacaaatgaatggaataaaatttttggtatttttcttgggctggtagcgggtgcaacctattcactttattcatgggctgcaaaaagattaatagaccgaggtattgcagctaaagctgcaatgggcatgattatgggaggtggggcagtcatcttgcttccaactttattaattacaggtggtgggctactgcaaagttcaacaaatttacttgttgctggctatatgatgctgattcctatgtttttgggttatttgctttttggtttcgggttaaaaactgtaaatgccagtcaagccaccactttaactttatttgaacctcttgttgcagcgatttttgccattgttttggttggcgaaagtgtctcatggattgggtgggcaggcatgtttttgattttcatttgtattttgatgttatcaaagcctgaaaataca

SEQ ID NO: 9052 - DNA, 1539 bp, Acinetobacter baumannii
atggcattatggcgatcgacttttattgtcagtgcgatgacgatgttgtcacgggtattgggcttagtacgagatgtcgtattgctcaacgtgtttggtgcgggtaaagatttcgataccttcgttgtggcttttcgtattcccaacttctttcgacggttgtttgccgaaggggctttttcacaggcttttattccggtattgaccgaatataaaacaggtcgtgtgcatgcagaagttcaaatcctgattagtcgggtatttggctgtttgctgacagtcatgactttactgactttcgtggctatggttttagctccagcaattatctatatgtatgcgccgggcttccataatgaccctgaaaagtttgatttagcggtcagtatgttccgtctgaccattccctatttaatgtttatgtcgcttacggcttttgccagtagcatcttaaacagttatggctcgtttgcctcgccagctttttcacctgttttactgaacgtagcaatgattgcaggggcttggtggcttacaccgtatatggctgagccaatcaaagctttaggttggtcagttgttgcggctggtattttacagttagcgatacaaattcctgagttatggcgtaaaaacttactgatcccaccgaaagttgattttaaacatgaaggtgtagaacgtattttaaaattaatgcttcctgcattatttggtgtctctgtgactcagattaacctattgctaaatacgatttgggcatctttcatgcaagatggttcagtgtcttggctctacagtgccgaacgtatgactgagctacctttaggattaatcggtgttgcgattggtacagtgattttgccttcactgtcagcacgtcatgcagagcaagaccaagcgaaatttcgtagcatgattgattgggcagcgaaagtgattgtattggtggggttaccagcaagtattgctttatttatgctttctacaccgattattcaggcattgttccaacgcggtgagtttgatttacgcgatacacaaatgacagcactcgcattgcagtgtatgagcgctggtgtaatttcctttatgttaattaaagtatttgcaccaggtttctatgcgcagcaagatacaaaaacaccagtgcgtgtgggtttaatgtcggttgcagctaatgcgattttaaacgttgtatttattggattttttaaactaatcaattggcatgcagagcatatggcgcttgcattagcctcctctggttcagctttagtaaatgcaggtttgctctatttttatctgcataagcgtaatattttccgatttggtgcacattggaaaaaactggcacttcaatatggtttggctaaccttgcgatgattgcagcactttggttcgggttaaattggtataacggtgaactctctcaatggattcgtgttgcagaggtagtcggtttatgcgttgtaggtgtgatcgcttacttaagtggcttattactgacaggctttagaccgagagatttaaaacac

SEQ ID NO: 9053 - DNA, 864 bp, Acinetobacter baumannii
atgcaatttcgaaaaacgttgaatattggcattatgctgaaaattgttttgagtgagatcggcatgacacaaggacttttagcaggtaaacgctttttgattgcaggcgttgctagtaaattatcaattgcttatggtattgcacaagcattacaccgtgaaggtgctgagcttgcatttacttatccaaacgaaaaattaaaaaaacgtgtagatgagtttgctgagcaattcggttctaagcttgtgtttccatgtgatgttgccgttgatgctgaaattgataatgcatttgcggaacttgcaaaacattgggacggcgtagacggtgttgtgcactcaatcggctttgcacctgcacacacgcttgacggtgactttactgacgtgactgaccgtgacggttttaaaattgctcatgacattagcgcatacagctttgttgcaatggcacgtgctgcaaaacctttattacaagctcgccaaggttgtttattaactttgacttaccaaggttctgagcgcgttatgcctaactacaacgtaatgggtatggcaaaagcatctttagaagctggcgttcgttacttggcatcaagtttgggtgttgacggtatccgtgtaaacgcaatttctgcgggtccaattcgtactttggctgcttctggtattaaatctttccgtaaaatgctagatgctaacgaaaaagttgcgccattaaaacgtaacgtaaccattgaagaagtgggtaatgcagcgttattcctatgctcaccttgggcttcaggtattactggtgaaatcctatatgtagatgctggtttcaatactgtaggtatgagccaatctatgatggatgatgaa

SEQ ID NO: 9054 - DNA, 1416 bp, Acinetobacter baumannii
atgtataaatcagaacaactcgcccatagcattcgccaacttattgaaagcggcactctaaatgcacatgagaaattaccttcattaagagatcaggtccaacgttctggttttagtttaatgactgtgatgaatgcttatcaggagcttgaatcacaaggtctgatctattcaaaggaaaagtctggctattttgttgccgagcaaattgcactaaagccactggaacaatattcgatcgtttcacttaattctaaaattgaaattaattctttagtttttaaatatcttaaatcgattcaacatgagtctgttgtgccttttggttcagcttttcctgatagtcaacttttagctgcttccaaacttattcaaattatggggcaacttgcacggcaaaggcaaagctatgaccagacagcaagcctacctcccggtaatttagcgttaagaaaactaattgctcagcgctactgtatgcaaggcatacagaccgatccagatgacattgtcattacatctggaggattagatgcactcaatctttctttacaagcagtagccaaaccgggtgactatattctattgcaacaaaccgtgttttacggtgcttggcaggctgctgaacgtttagggcttaaggtcattaccattcccgaacatccacaacatggttttgacctagaggcttttgagcaggttattcatacatatccaattaaagtatgttggctcatgttaaatagccataatccgattgggtttacggtcagtgatgagattaaatataaaattgccaaactgcttcatgaacaccaaatttacttaattgaagatgatgtctatgaagagctttattatggcgggcaaaaaccactttcgatgaagtactttgaccaacaaaatctggtactgcactgctcttcattttctaaaactttaggggcaggttttcgggtaggttgggtctatgcgggtaaattttcggaccatatccaacacttgcagctcatgagtactatttcagtgaatgcactcatccaaaatgccttggttgagttcttgtctcatcatcattatgaaaagcatttgcgcacacttagactttcacttgaacgttataaaaagcagttttaccactatttgaagcaacatctgcccgcgatctgcgagatttattattacccaagcggttattttctatgggttaaattgcctcataaactcgatagcatgcaaatttatgaagaactcatccaacaagatattggtgttgcgccaagcccactctttagtgtcttacccgcacagcaacattatttaagaatcaattgttcttttgagtggaacgaaaaaattcaagctgctttagatcaagtcatcaaaactattcaacaaagggtcgaagcaagcctg

SEQ ID NO: 9055 - DNA, 1233 bp, Acinetobacter baumannii
atgaataattttgcagtttctcgtggtgactttaacgagtggatggttccagtatttgcaccggcaaatttcattccggtacgtggtgaaggttcacgtatctgggatcaagaaaataaagaatatatcgattttgcaggcgggattgcagtaaatgcattaggtcatgcgcatccagtggcagtcaatgcgttaacagaacaagcaaaaaaactttggcacgtcggtaatggctataccaatgaaccagtactacgccttgctaaacaactcactgaaaatacatttgccgataaagtattcttctgtaactcaggtgcagaagcgaatgaggcagctttaaaacttgcgcgtaaagttggactcgacagcggtgttgcaggtaaaagtggcattgtggcatttaacaatgctttccacggccgtaccttatttaccgtttcagcaggcggccagccaaaatattcacaagactttgcaccacttccaaacggtattagccatgttgcttataatgatttagaagcagctaaagcagtcataaatgaacaaacttgtgcagtaattgtagagcctgtacaaggtgagggcggagttattccggctgatatcgaatttttaaaaggtttacgtgaactgtgtgatcagttcggtgccttacttatttttgatgaagtacaaacgggtgtgggccgtacaggtgcactttatgcctacatgaactacggtgtgattccagatgtacttacgactgcaaaagcattgggcggtggtttcccggtcggtgcaatgttaacaactgataagttcgcaccgcatttttctgtaggcacacatggtacgacttatggtggtaacccgttagcaagtgcggttgcaggggcagtctttgagtttattaatacgcctgaagtgctgaatggagttaaagagcgtcacgactactataaaaaagctttaaatcaattaaatgaaaaatatgaagtctttaaagcaattcgtggcagtggtttattgctcggatgtgttttaaaagacgagtttgctggtaaagcaaaagatattaataaccttgcgggtgaagaaggattattgagtctgattgctggtccaaatgtagtccgttttacaccttctttaatcgttccatttgctgatattgatgaaggtttaaaacgctttgaacgtgcgcttgctcgctttgtggaacttcaaaaggatgaacaagcagca

SEQ ID NO: 9056 - DNA, 750 bp, Acinetobacter baumannii
atgcccagaacatcaaaacaagaacatactgagctttcgattgaagctgatagtccagttcctttatatcagcgcgtaaaacagctgatttcacaaaagatttatgaaggctcttgggctgtaaataaaaaaattccttcggaaagtgaactggttaatcaactcggctgtagccgtatgacggtaaaccgtgcgctacgtgagttaacaacagaaggcttacttgttcgaattcagggtgttggttctttcgttgctgaagggcaaggccgaactgcactttttcaaattaacaatattgccgatgagattattgcacgaaaccataagcaccatgctgaagttttagtcttagaacaaatttatgcaaatgcagagcaaagcgtgttaatgcagactcgcgaagggcaaaaattatttcactcgattattgtgcattatgaaaatgatgtgcctgttcaggtcgaagatcgtttagttgatgcggcactgattccagattatttagaacaagattttaaaaccattaccccaaatgcttacctcatggcaaaagcacccgtgacagaaggtgaacacattgttgaggccgttttagcatcgcctcaagagtgtaagtggttaaagattactaaagctgaaccgtgtttactcatccgccgtcgcacatggtcaaacaaacaactcatttcaagtgcacgattgatttatccgggcagtcgctattatctcgaagggaaatttaatcca

SEQ ID NO: 9057 - DNA, 3177 bp, Acinetobacter baumannii
atgaatatttctaaattttttattgatcggccgatctttgctggtgtgctatcagtcttgattttactcgccggtctcctttcggtatttcagttaccgatttctgaatatcccgaggttgttccaccatctgtggtggtacgtgcccaatatccgggtgcaaacccaaaagtgattgctgaaacggttgcttctccgctcgaagagtcaatcaacggcgtcgaagacatgctgtatatgcaatctcaagcaaacagcgacggtaatttaaccattacggtgaactttaaactcggtatcgacccagacaaagcccaacaattggttcaaaaccgtgtgtctcaggccatgccccgtttacctgaagatgtacagcgcttaggtgtaaccacactaaaaagctcacctactttaactatggtagtgcatctgacctcaccagataatcgctatgacatgacctacttacgtaactatgcggtgctcaacgtaaaagaccgtttggcacgtttacaaggtgtaggtgaagtcggtttatttggatctggtgactacgcgatgcgcgtatggctcgacccgcaaaaagtagcgcagcgtaacctcaccgcgaccgaaattgtgaatgcaatccgtgaacaaaacattcaggttgcagcaggtacaatcggtgcatcaccaagtaattcacctttgcaactttcagtgaatgctcaaggtcgtttaaccactgagcaagaatttgccgatatcattttaaaaactgcccctgatggcgcggttacccgattgggtgatgttgcacgtgttgaactcgcagcctctcaatacggcttacgttcattacttgataataaacaagcggtcgcgattccaattttccaagcaccaggtgcgaatgctttacaagtttccgatcaagtgcgtagcacaatgaaggagctttcaaaagattttccatcttcaattaaatacgacattgtttatgacccgactcaattcgtacgggccagtattaaagcggtcgttcataccttacttgaagcaattgcactggttgttgtggttgttattttatttttacaaacatggcgtgcctcaatcattccattgcttgccgtaccagtttcaattattggtacattcgcactcatgctcgcttttggttactcaatcaatgcgctatcactgttcgggatggtacttgccatcggtattgtcgtcgatgacgcgattgtggtcgtcgaaaatgtcgagaggaatattgaagcaggcttaaacccaagggaggcgacttaccgtgccatgcgagaagtcagtggaccgattattgccattgctttaacacttgttgcagtattcgtacctcttgcctttatgacaggcttaacagggcaattctataaacaatttgccatgactattgccatttcaacggttatttcggcatttaactcgcttaccctatctcctgctttggcagcgctgttactgaaaggacatgatgctaaaccggatgccttaacacgtattatgaatcgtttattcggtcgtttctttgcactgtttaaccgtgtgttttcacgtgcttcagatcgttatagtcaaggtgtcagccgtgtcatttcccataaagcttcggcaatgggtgtctatgcagcacttctaggtttaaccgttggtatttcctatattgttccaggtggtttcgttcctgcgcaggacaaacaatatttaattagctttgcgcagctaccaaacggcgcgtcattagatcgtaccgaagcggtcattcgtaaaatgagtgacactgcgcttaaacaacctggtgtagaaagtgcggttgcctttcccggcctatcaattaacggtttcaccaatagctcgagtgccggtattgtctttgtgaccttaaagccattcgatgaacgtaaggctaaagacttatctgcaaatgctattgcaggtgcactcaaccagaaatattcagctattcaagatgcttatatcgctgttttcccaccaccaccagtgatgggcttaggcacgatgggcggctttaaactgcaacttgaagaccgaggtgccttaggctattcagccttgaacgatgctgctcaaaactttatgaaagcagcacaatcagcccctgaactgggtccaatgttctcaagttatcaaattaacgtacctcaactcaacgtagatctggaccgtgtaaaagctaaacagcaaggcgttgctgttacagatgttttcaacactatgcagatttatttaggttctcagtacgttaacgactttaaccgctttggacgtgtttatcaggttcgtgcacaagccgatgcgcctttccgtgctaaccctgaagatattttgcagcttaaaacccgtaatagtgccggacaaatggtgccattatcttcattggtgaatgtaactcaaacctatggtcctgaaatggtcgttcgttataacggttacacatcagcagatattaacggcggccctgccccaggttattcatctagccaagcagaagctgcggttgaacgtattgctgcacaaactctaccgcgtggtatcaagtttgaatggacagatttaacttaccaaaaaatcttggctggtaatgctggactttgggtattccctattagcgtattactcgtgttcttagtattagctgctcagtatgaaagcttaaccctaccattagcagttatcttaattgtaccaatgggaatcttagcggctctgacaggtgtctggttgacagctggagataacaacatctttactcaaatcggtctaatggtactggtcgggctagcctgtaaaaatgccatcttaattgttgaatttgcgcgggaacttgaaatgcaaggtgcgactgcctttaaagcagctgttgaagcaagtcgtctacgtttacgcccaattttaatgacctctattgcatttattatgggtgtagtgccactggttacttcaactggcgcaggttctgaaatgcgacatgcgatgggtgttgccgtattcttcggcatgatcggtgtaacattctttggtttattcctcaccccggccttttacgttctgattcgtaccctcaacagcaaacataaactgcattctgcggcagttcatgaagcgccgttagctagcccacacgatcat

SEQ ID NO: 9058 - DNA, 888 bp, Acinetobacter baumannii
atgttggatagtaagcagtgtgaagcttttctggcggttgcagaagtcggaagttttgatgcagcaggagagcatttatgtataactccctctgctgtatcactacgtgtacaagccctagaaaaatatttagggcagattttaataatacgtggccgtccatgtgtgcttacacaagcagggcaaactttactccagcatttacgtcatacaaggttaatggagcaaaatcttttacaaggtttaatgggcaaatcttctgaatcagaattttataaaattgcgttggcttcaaatgcagactcattggcaacttggcttttacccagtattcagcaaacactttttaaagaaaaaatagtattagagctaaaaattgatgatcaatcacatacgcatactttgctagaaacgggtcaggtcaatgcatgtattacagcagaagagcaggtgatggcgggttgcttagctcagcctcttggtaaaatgcgctataaaatgctggcatcggccgagtttgtaaatcggtggtttagtggtggagttaaccgagaagttttaagaaaaacaccggcggttatttttaaccataaagatttaatgcattcagaggttttattaaaaggatacggtttaccaatgcagagttatccttatagttttattccggcgacagatgcctttgtgaaagcaattcaactaggtttaggttatggcatggtgcccgaacttcaggttcaaccattactcgaaaatggaatacttgttgatattatgcctgaggctcaacttgatgttcctttatattggcatcactggaaaagacagtcgaaacaacttgatgtactgactgagaccattgttgaatcagcaaaacagatattgaga

SEQ ID NO: 9059 - DNA, 687 bp, Acinetobacter baumannii
atgaataaatattttgctgaattcttaggtacgttttggctagtctttggtggttgtggtagcgcagttttagccgcagctttccctgaacttggtattggctttgcaggtgtagcccttgcctttggtttaaccgtactcacaggtgcttatgctctagggcatatctcaggtggacatttcaatcccgcggtaagtgttggcctttgggtcggtggccgcttcgatgttaaagatttaattccgtatattgttgcgcaagtggttggtgcgactgctgctgcatttgttctttatattattgctcaaggccaagcaggctttagtggtgttggcgggtttgcaaccaatggttttggtgacttatcaccaaataaatttggtttaggttctgctttcattattgaagtggttcttactgctttcttcttaatcattattttaggagcaactgaccgccgtgcgcctgctggcttcgctcctatcgcgattggtttaggcttaacactcattcacttaatcagtattccggttacgaacacatcggtaaacccagcacgtagtacaggtgttgcgttctttgctgaaacggctgctttaagtcagttgtggttgttctgggtagcaccgattttaggggctgtgattggggcgattatttataaggtagttgctggggataaggat

SEQ ID NO: 9060 - DNA, 2838 bp, Acinetobacter baumannii
atgcaagaagttgctgacgcattgcgtcttgacactgaactttccgctgatagtgcagcgtatattgaagaactttacgagcagtacctgacttccccaacctccgtcgctgaggactggcgccaatatttcgataaatatccaaagggtgaccaaccacacagcgctgtgcgtgagcaattcctattactaggacgtaatgctaatcgtgttcaacctgttgtacaaagtactgtcagtactgaacatgagcgtcgtcaaattggcgttttacaactcattgctgcttatcgcaatcgcggacatcaaaaagctaagttagatccgttaggtcttgctaagcgtgaagatattcccgatttagatctttcagcacacggtttaaccaaatcagatttagacacagtattcaacacaggcaatcttgagatcggtaaaagcgaagcaacgcttgctgagatgattgaagcaatggaagcaatctattgtggttcgatcggtgttgaatatatgcatatcgtggacacaaaagagaaacgttggattcaacaacgtcttgaaagtgcccgtggtaaattcaatttctcaaatgaacaaaagaaaggcttcttagagcgcttaactgctgctgaaggcttagaaaaatatctcggtaataaatacgtcggcgctaaacgttttggtgttgaaggcggcgaatcttttattcctatggtaaatgagattatccagcgtgctggtgccgtaggttgtaaagaagttgttatcggtatgccacaccgtggtcgtttgaaccttcttgttaatattatgggtaaaaaccctgcggacttatttggtgagttcgaaggtaaagcacttcataagaaaggttctggtgacgttaaataccaccaaggtttctcaagtaatgtaatgactccaggtggtgaagttcacttggcattggcatttaacccatctcacttggaaatcgttggccctgtagttgaaggttctgtacgtgcgcgtcaagtacgtcgtagagacatcggtggtgatgacgtattaccagttattgttcatggtgatgctgcatttgcaggtcagggcgtgaacatggaaaccttccagatgtcacaaactcgtggctatacggttggtggtacagttcatattattgtgaacaaccaagttggtttcacaacttctgatccacgtgatgcgcgttcgacagaatactgtactgacgttgctaaaatgattcaggctcctatcttccatgtaaatggtgatgatcctgaagctgttatctttgctactcaattagcacatgatttccgtcacgaattccgtaaagatgtagtcatcgatttgttctgttaccgtcgtcgcggccataacgaagcagatgagccatctggtacacaaccattgatgtatcaagtgattgcgaagaaagcaactactcgtacactttatgctgatcaattggtacaagaaaaagtacttgaccgtgctgaagctgaccaaatggttgaagattatcgtgctgatttagaagcgggtaatcatgtagcgaatgctttgattcttgagccgaacactaaaatgtttgtagattggactccatatttgggccatgaatatacagacgattgggatacttcatttgacataaatcgccttaaagagttaggcgagggcatgagcaagcttcctgaagggtttgtaatgcagcgtcaggttcaaaaagtaattgaagaccgcgtgaaaatgcaaactggtgaaactccattgaactggggtgcagcagaaactttagcttatgcaactttattagatgaagactatctagttcgtattactggtgaagacgtgggtcgtggtaccttctcacaccgtcatgcgaaattgcataaccaagttgatggttcaacttacattcctctttgccatgtgaaagagaaccaaccgcgttttgcgatttatgactctcttttatctgaagaagcagttcttgcgttcgaatatggttacgcaactacaattcctaagagcttgattatttgggaagcacaatttggtgacttcgtaaactgtgctcaagttgtgattgaccagtttattgcttctggtgagactaagtgggagcgtgtttgtggtttaacaatgttgttaccacacggtttcgaaggtcaaggtccagagcactcttcagctcgtttagaacgtttcttacagttatgtgctgaagacaacatgcaagtgatcactccaacgacacctgcacagattttccatgcattacgtcgtcaggctgtacgcccaattcgtaagccattaatcgtaatgtcaccgaaatctttacttcgtcataaacttgcgacttctactttagaagagctagcacatggttcattccaaactgtaattgacgaaatcgatcaaattaacaagtcagatgtaactcgtcttgtactttgtggcggtaaagtttattacgacttactcgaaaaacgtcgtgaacaaaacttaactaatgttgcaattgtacgtattgaacagttgtatccatacccagagcaacgtcttgcggaaatcttggctgcttatccaaatgtgaaagaactcgtttgggcgcaagaagagccgaagaaccaaggtgcttggttgtttatcgcaccgcgtttatatgacgatatcttaaaatctggcaaacaaatccgtatcagttttgcaggtcgtgaagcttctgctgcaccagcttgtggctcaccgtacttgcatgcaaaacaacaagctcagctaattaatgatgcattggcaatcgaagctgaacaatcaggagattctcaa

SEQ ID NO: 9061 - DNA, 1722 bp, Acinetobacter baumannii
ttggaacttttatctggtggtgaaatgctcgttcgcgctcttgcggacgaaggcgttgaacatgtttttggttatccaggcggcgcagtattacatatttatgatgcgctatttcaacaagacaaaatcaatcattacctcgtgcgccatgagcaagctgctggtcatatggcagatgcctactcgcgtgctacaggtaagactggcgtagtactggtcacttctggtccaggcgcaaccaatacagtaactccaattgcaacagcttatatggactcaatcccaatggtggttttgtctggccaggttgcatcacatctgattggtgaagacgctttccaggaaactgacatggttggtatttcacgtcctatcgtgaaacacagctttcaggtccgccacgcaagtgaaatccctgcaattattaaaaaagcattctatatcgcatcaagtgggcgccctggtccagttgtagtcgatattcctaaagatgcgactaaccctgcagaaaagtttgcatacgaataccctgaaaaagtgaagatgcgttcatatcaaccaccttcacgcggccactctggtcaaattcgtaaagcaattgatgaattactaactgcaaaacgtcctgttatttatacaggtggtggtgtcgtacaagggaatgcttctgcgttattaaccgaacttgcacatttacttggttatccggtaactaacacacttatggggttaggcggattcccgggcgatgacccacagtttattggcatgttgggtatgcacggtacatatgaagccaatatggcaatgcaccatgcagacgtaattttggcgattggtgcgcgttttgatgaccgcgtaacaaataacccagccaaattctgcccgaactcaaaagtgattcatgtcgatatcgaccctgcaactatttcaaaaacgattatggcgcatattccgatcgttggtgcagtagagccagttcttcaagaaatgttggcacagttaaaacaattaaatgtgtctaaaccaaatcctgaagcaattgcggcttggtggtctcaaatcaatgaatggcgcaaagttcatggcttgaaatatgaaaatccatctgatggcactatgaagccacagcaggttgttgaaactttatataaagtgaccaatggcgatgccattattacttctgacgtaggtcaacatcagatgtttggtgcactttattataagtacaaacgtcctcgccaatggatcaactcaggtggccttggcaccatgggtgttggtttaccttatgcaatggctgcgaagcttgctttcccagaccaacaagttgtttgtattacgggtgaagcttcaattcagatgtgtattcaggaactttcaacctgtaaacaatatggcttgaacgtaaaaatcttgtgcttgaacaaccgtgcattaggtatggtgaaacaatggcaagatatgaactatgaaggtcgtcattcaagttcttatgttgagtcattacctgactttgccaagttaatggaagcttatggtcatgtaggcattcaaattaatcatgccgatgaacttgaatctaagcttgcagaagcaatggcaatcaatgataaatgcgtatttatcaacgttatggttgaccgtagcgaacacgtttatccaatgcaggttgcaggtcaatctatgcgtgatatgtggatttctaaaggggagcgcatt

SEQ ID NO: 9062 - DNA, 579 bp, Acinetobacter baumannii
atgcgtggtgtaaataaggttattttggttggtactttgggtcgtgatcctgaaacaaaaacttttccaaatgggggctcgttgacccagttttctatcgcaacaagtgaagtttggaccgataaaaatacaggtgaacgtaaagaacaaacagaatggcaccgtattgttttgcataaccgtttaggggaaattgctcagcagtttttacgtaaaggttctaaagtttatatcgaaggttcattacgtacacgtcagtggacagaccaaaatggtcaagaacgttacactacagaaatccgtggcgaccagatgcaaatgttagatgctcgtcaacaaggtgaacaaggttttgctggcggtaatgattttaaccaaccacgttttaacgcgcctcaacaaggtggcggctatcaaaataacaaccaaggtagtggctacggccaaaacaatggtggttatggtggccaaggtggtttcggtaatggtggcaatagcccgcaaggtggtggtttcgctcctaaagcgccacaacaaccagcatctgcaccagctgatttagacgacgatttaccgttc

SEQ ID NO: 9063 - DNA, 1761 bp, Acinetobacter baumannii
gtggataagtgtgtggacaatctaaatagccctgaacaaagcgatttaagctggttaacgacttggagtacctttctaaatcaagccccgtttactgcacagacacaagctccagaggcagcttattttttgcagcagctgattgaagcgagcttgcagggtgacagttgtattgagattagcccagagcaaatagaaacacttggccaactggtgatatctgctgaacaagcaaagtctcaagttgccccttgtgtccacgacgagcaggggttggcattataccgatattggaacctagagcaacgtctagctgagcaaattcgccgattaaagcaacaaccaattcaacctgtttcatgtgaagagcatttagacttattaacagatcctcatcagcaagctgctttgcaaatggtgactcggcagagcttaagtattattacaggtgggccgggtacaggtaagacctatacgctcgctcgtattattgctgtgcttagtcaggcaattccacatattcgtgtagcgatggctgctccgacgggtaaagctgcacagcgtatgcaagaagccttacaaaactcctttaatgacccaaaactgcttgagtcggggttaataagtgctgagctaagaaaccaaagtacccaaactatccatcgattattaggtatggggcatagtcaaactccacggtttaatcaaaaacagcctttgccttatgacgttattgtggtggatgaagcctctatgctggacttaaatctggcaacgttattatttgaagcggttcctgagtcttgtcgaattattttattaggtgatgccaaccagcttgcttccgtagacgtcggagctgtacttgcagatttacagcaaatcgaggctttgtctgaaaaccgtgttcaccttcaaaccagccgtcgttttgcggaaggggctttgattggtcaggttgcccgatttattcaaatgcaaaccagtcaaatcaaccatgagcaaattttacaaaaatttgaaatcgatattgttcaggtttcagagttacgttcaatacctttagaaaccgacatgcccgatgtggttcagcttgaatatttacccgaagagtcacctatagcgctagaaacttactaccaaaaattgatggtggattttcaaggctatgtgcaaagcttaaaagcttatatacaagatgatcgttcacttgaacatattgaaaatatcgttaggtcattcgatgactaccgtattttaactgccgtacgtcatggaccatttggtttacagcaacttaatcaatatgctgaacgctggttacaacaacagctaggtattgtgactttaggaggatggtatgttggccgtccggttatgatgacctataacgattaccagctcggtatttcaaatggtgacattggtttatgttttgaacatagaacccagccgcaacagtttgaagtgtattttccaagtttaaataagtgggttgctgcaaatcggctacctaaaagtattcaaagtgcatttgccttaacaattcacaaatcacaaggttctgaatttacccatacagctgttgttcttgatcaggctgccaagaatttgttaagccaagagttgatctacactgcgattacacgagccaaaaaagtagtgagtttattggtcgatccagaggcgttacttcaatcttttacagttcgcacgacaagaaaaagcggtttagttgaaaaagttaatcggttagttcgt

SEQ ID NO: 9064 - DNA, 1461 bp, Acinetobacter baumannii
ttgcaaaccttgcgagcgtcaaaatgtggtttgtccacagcccaacttccttcttcgattttagatgtgatcgatagtctgactaaagcaggctatgaagcttatattgttgggggtggtgtccgtgatttaatgctaggactcaatcctaaagatttcgatgcagtcaccaatgcaacaccttctcaaattaaagaagtttttggtcgtcgatgccgaattgttggccgtcgatttgaattggcacatgtctattcaggacgtgagctaatcgaagttgccactttccgtgcgcctcctaaaaaagcggtgaccagtgcttcgggcatgattttacgtgacaacaactggggaaccatcgaacaggactttgctcgacgcgatttttctatcaatacactgtactatcagccgcgtaagggtattgtgctcgatttctgtaaagcaattgatgatgtcaaaagtaagactttacgtttattgggcgatcctgtgcaacgttttgaagaagatccggtgcgtatgctccggacattacgttttgcagctaagctcaactttaaaattgattcggcaattctcgacatttttgatgttgagatgacgcaattacttcgggatgtttcaccacaccgtttatacgatgagtctcaaaagcttttcacaatggggcatttggcacgcgtgttaccaatgttgattgactttggtgtgtggaaacagctttttgcagatattcgtccggatctcactccatttattcaacgtgcagcaaaaaatactgatcaacgtattcaggtgggtaaaacgattaatccagcatttttctatgcggttttattgtggcagccatttttagagcgttgtgatttttatttatcaaaaggcgttgttccggccgaagcacgtgctcaagcaggtttggatgttttaaaacgtcaagcaacacgcacagttattcctcgttttgccgaaacttttattcgtgaagtttgggaaatgcaaacccgtttgcttaatccaaaaccacagcaaattgaagcattggcaagccatgctcgtttccgcgctgggtttgacttcttattacttcgtgaaaagtcaggtgatgacacaacacagggaatgggaagctggtgggaagcttaccaagaaatgtcaaacgacgaaaaagaagctgcgattagccaatataatcgtcagaaggcgaaaagtcgtcgtaaggttgctgctgagcctgttgaaagcaataaagttgatacggaaattgagcctttggttgatgttccagagtctcgaagccgtcgtggtaaaaaagaacgtgcacgacaagagcagtctattgaccgttttattgaaaaatcttccgcagcacaaacgaatgtgatgagtgatcatccaattttaaagcgcaagcgggtacaacgtgatttgagccaagttatttttgggccgacacaa

SEQ ID NO: 9065 - DNA, 378 bp, Acinetobacter baumannii
atgaaaatgacggctaaaattgcattattcagtgcagcaattgtaactatgggtagtttggctgcttgtcaatcaacaactcaaccacctaagccagaacatggcatgatgcaagatggcccacgtgatggtcaccaccatcgtatgaaacaccgtgaatttacgcctgaacaaaaagcagcatgggaacaacaccgtgcagagcgtaaagctcgttttgagcaaattcaaaaagcatgtgaaggtaaagctgttggacaaactgtcaatgttcaagttggagataaaacacttgaaggtacatgtaacctccgctttgagccaaaacgtcctcaaccaccagtcaatgcacctgctccagtagcatctcaagcaaaa

SEQ ID NO: 9066 - DNA, 594 bp, Acinetobacter baumannii
gtgtttagtgatagatttgaacaactcgttcaagctttacgtattttgcctagcgttggaccgaagtcggcccaacgtatggctttacatcttttgatgaaaaatcgtgaaggtgcatttgctttagcacatgctctacatgaagcatcaagttatattcatgaatgtagtgtttgccactctttaacagagcacgaaatttgtgatatttgcgcttcaacagaaagagatgatcaattgctttgtgtagttgagtccccggcagatgttatggcaatcgagcaaagtggtagttttcgtggcaaataccatgtgttgggtggacacctttctccattagatggaatcgggccagaagaaataggcattccttatctaatccaacggttaagccaaggtacgatcgaagaagtcattttggcaactaatgctactgtggaaggtcaggcgacagcgcattatttggttgaagcgacgaagcatttacctattcacatgacacgtattgcgcaaggcgtaccacaaggtggcgagcttgaatatgtggatagtcataccttaagtcaggctgttcataaccgtatgcgtatgaaa

SEQ ID NO: 9067 - DNA, 675 bp, Acinetobacter baumannii
atgaaagcctttattgttcgcgtgttgttaatttttattggggcaattctccttattcagctttggatcttttcaagtttggtttggtggcgtacacatgaagttgataccaccatgtttatgcgaattgattattggtcagatccatctgagccgatcattcatgaatggcttgactatgatgatattagtgacaatttcaaacatgcaattttagcaggggaggacgcaaaatttattcatcatcatggttttgactgggatggtattcgttttgcgctagagcgtaacaatgagcaaggagaggttgttgctggtggttctaccgtatctcaacaacttgcaaaaaacttgttcttatataataaacgttcatttattcgtaaaggccaagaaactgtagcgacatggatgatggagcgcatgtggtcgaaacgtcgaattcttgaggtgtatatgaactctgttgaatttggcaaaaatttgtatggcgttgaagcagcggcccaatattattatggcaaaagtgccaaaagcttaactcgcgaacaagctgcttttttagccgcgttattgcctgatccgaaatattatcaagatcatcgcaacgatcgtaaactacaatatagaaaacgcgttattttacgttatatgaatagcacccagattcctgaa

SEQ ID NO: 9068 - DNA, 1356 bp, Acinetobacter baumannii
atggagacggttcagggtggcatgttgcttgtctatactttaattgcgatcgttgctttgattgtcatgatcgcgaagtttagaatttacccctttttagttcttattattgtttctcttggtttagctcttgcagttggcatgccaatggacgggattgttaaatcatatgaagcaggtaccggtaaaacactaggtcaccttgcgattgtgattgcgttaggaaccatgcttggcaagatgatggccgagtcaggcggtgcagaacgaatagcaattactttaattaaatggtttggtgaaaaacatattcactgggccatgatgttcattgcgttaattgtagggcttccggtattttttgaagttggttttgtacttcttattccaattgcattcaatattgccaaacgtacaggtaaatcattattaattgttggtttacctatggttgcgggtttatcggtcgtacatgggttgattccaccccatccagccgctttgcttgcggtacaggcttaccatgccgacatcggtaaaaccattatgtacagtttattggttggcgtcccgacagcagttgttgcaggtccattgtatgcattatggattaacaaatatgtcaaattgccagaaaataatcctttagcaaagcagtttgttgaagcagatgctaacaacacacgtgaattgccgagctttgggattaccttatttacgatcatgctaccggttgcattgatgctagttggtagttgggcagatgttttctttgcaccaaaaacattcccaaatgagttattacgctttattggtacttctgatattgcattgcttattgctgttttggtcagctttattacttttggcactatgcagggttttaaccgtgaacaaattgaaaaattctgtggtggatgtctagcttcaattgcgggtattttgctgattgttggtgctggtggcggtttcggcggtattttaagagacagtggaatttctaatgaaatcgtctctactgctttaaaagcaaacctttcaccattgttattaggatggcttgttgctgctctcatacgtctggcaacaggttcggctactgttgcgatggccacggcttgtagcattgtcgcacctattgcggcagcagcaggtgtagtcgttagacctgaacttttagtattagcgacaggttctggatcattaattttctcgcatgtaaacgatgctggtttctggctaatcaaagaatattttggaatgacagttgggcagacactgaagacttggtctgtactggaaacaattatttcggtacttggtttgtctttcacattgttgcttagtgctgttttg

SEQ ID NO: 9069 - DNA, 624 bp, Acinetobacter baumannii
atgaaatttctaaaatttttaacttttagcacgattcttaccttatccgcacatacctatgcgacagtgggtggtggacaaaaaattgaagtattgggctatcagcaaaaagagaagaaactttatgtattaagacattatgaagatggccgaggacgcctaccacaactatattattatctattaaatagtaaatcgcctgataaactgattgaagttaaatctctctatatcaatccaaaaacacataagattgattatgatcaagatagtacagcgtttaataaggcacttaataaaattaaaaggaatttaactcctttgatcgtaagtaatagtaagactgtaaaaattcaaacattaaaaactcatcagaatcagatatcgtcttggtttgatccttcaggaaagatcacgcaatataaaacagaatatgttgtaaaatcgccgtctttacaaagtaagacccatgttgcggttcattacagcaaagcaataaaaatttcccaaaattatagtgtgcctaaacaaaataagaggttggttatcgttaaatatttgggggttccagaagaaactggttacgatattgaagaccctgttttactactacctataaaaaaa

SEQ ID NO: 9070 - DNA, 669 bp, Acinetobacter baumannii
atggcgacaaacgactcaaccagtaaaaagaaaacaaaaactgtgagtaaagaacgtcagttcaaagggttatctctgtctgagcgcaaagaggcacgccgcgaaaaactcattgaagccggtattgcaacttatggaacccttggctttttttccgtgacggtaaaagatgtctgccaagaagcaaaactcaccgaacgttatttttatgaatcatttaaaaagagtgaagatttattccagactatctttttaaaaatgattgaagaattacagcaaaacttgatgcaagccgtcattaaagcggctccagaccctgagcaaatggtcgatgctggtttacgtgctctactgagtactttaaaagacgaccctcgtttggctcgtattgtatatgtcgatgcaattttggtccaagaattacataatcaggccaccattcaggaaactctcgcccagtttgatcgtatgattcaagcttttgtgatgctaaccatgccgcaaatccagcataacgaaaatgaactctcattaatcgctactggtttaaatggatacgtgacacaaattgccgttcgatgggtgatgggcgggtttaagcagtctctagagcaagttttagcggcctgccgtatcgtttttttagctttgctcgcgaaagtttcaaaa

SEQ ID NO: 9071 - DNA, 864 bp, Acinetobacter baumannii
atgaattttgatcgtaatactcctattgcttttttaggcataggacttatgggaagccgtatggcaagccgtcttatacaagccggctttcaggtcgcagtatggaatcgaacagcatctgcttgtgaagaacttattgatattggcgcgcatgcactcgatctttccaacatcggacagtaccctctcattttgacttgcttagccgacgataaagctgtgcaagcagtatttgatcaaattcaaacaaacttaaaagcgggtcaggtcattgtcgacttctcaagtctctctgttgctgcgacaaaagcacttgctcaggctgctgcttcacaagatgtgatatggattgactcccctgtttcaggaggtacagctggggcagaacaaggcacgctagtcatttttgcaggtggcgatgctcaaactattgaagctttaagtcctgtttataatgttctttcccaacgtgtcacaagaatgggagatacaggcacaggacaagcaactaaaatttgcaatcaactcattgtggcagcaaacagcgccctgattgccgaagcagttgcactggcagatcgggcgggcgtagataccactttactcgctcctgccctagctggcggatttgccgactcaaaaccttttcaaatactggcaccacgtatggcgactcatactttcgaacctgttcagtggaaagttcaaacattatcgaaagaccttaacaacgcagtaacattggctaacaatgttaatttagacatccccgttgcacaaaaagctctattacagctacaaactcaccaaaaaaatggctttgctgagaaagatttagctactatgattcaagtagtagagcaa

SEQ ID NO: 9072 - DNA, 1935 bp, Acinetobacter baumannii
ttacaaggatgtggagatgactcctcgtcagatcagcccaaggatgattcaaatacaaccccacccaatttaattgtagataatgacccgaccagttgtagcaaactggcccaagacggttcaagtgtggtggtcggttcaaaccaaaatggtgacccagccgcgcccgagggtgcatcgggttatagactcggtaacacggttaaatacgcagataaatatatggtggtggcaaacacgccacttgcggtaaaagcaggttgtgatgttttaaaagcaggcggtagtgcagtcgatgcagccgtagcagtacaagccgtgcttggtttggtcgagccacagtcgagtaccattgccggtagtggttttatgatgtattacgatgccaaaaccaaacaagtcacggcttatgatggccgtgaaaccgcaccagcggcagccaacgaattttatttaattcgccaaaatatatatgacccaaattcacctccacctgtaccaaatgcccgccgtagcggtcgctcgattggtgtgccgggggtgatgcgtttattggaacaagcccaaaaagaacatggcaagcttgaatggaaacagctttttggtgaagccattggtttggctgacaacggtttccgtataccggggcgtttggcagatgccattgcaagtaatgcaagcaatttagcactcgatgcaaatgcaatggcgacttatttctacccagatggatcaccacgtaaagtcggcgagaccatgaccaataaagcctatgccagaacactcgaagcactcgcttcacaaggggcaaacgcactacacactggtccaattgcgcaagcgattgtggcaaaagcagggcaaaccgtgggtgacgacccagcaaaaactccaattaccccaagtttgatgaccttgcaggatttatcgaactatcaggtgaaaaacgcgacccgatttgtacgacgtaccgtgaccgttactatgtatgtaccatgccacctccaatcttcgggagggattgcggttgcacagacgttgggtattttagaaaactttgatatgtcgctttacccacctaaaaaccctgaaaatgaaggcggtgtgcccgatgtcatgggcgtgcatttagtgtctgaagcagagcgtttggcctacgccgaccgtgataaatatgtggcagataccgactttgttcgtttgccggcacagggtattccaagttttattgataaaaactacttgaagcagcgtgcagcactgattaacccgaaccaaagtatgggcgtagcaccggcaggtaatttcaatacagcggcaggtgtagataccactgttgaacatggcacgactcagttcacgattgtagatgcctatggcaatgtggtttcaatgacatcgactgttgaatcgagcatgggttcattccacatggtggatggtttcttgctgtcgaaccagttaactgactttagcgcgaacccttatgacagcactggggcaccagttgccaaccgtgtagaaggcggcaaacgcccacgtagtactatggcgccaaccttagtatttaaaggcaccacgccagatgagttttatatggcaacaggctcaccaggtggcggtaccatcattcaatatgtagttaaaaccttggtgggtgcattggactggaacttaaatgcacagcaggccacttcgcttgttaactttggcgcaaccaatagcaaaaataccaatattgatagctcgaatgtacagctttccttagttgacctaattgaaggcttaaaagcaaaagggcatggcatttctaacactgcgcaaaccagtggtatttcaacgattatgaaagtaaatataaataatcaaagtaaatacgcaggtggggtagacccacgccgtgaagggattgtgttaggcaatggtgctttatag

SEQ ID NO: 9073 - DNA, 609 bp, Acinetobacter baumannii
atgactgattctttactcaagtaccgcgagcaacataaacaccgtttaaattatatgccatggctatattggacattgaaacccaaacaccgtgtttgggcggaagaatggcaaaaagaatatcaggcttatttaatggatatggaaacggtcgagatcggggagaactgttttatttcaccgttagcccatatttttgccgagccgggccggaaaattaagattggtaataattgttttatcgcggcagattgtagtttgcatggaccgcttgagattggtaatgaagttgctattaaccaccactgtattttagatggcggtcgagcaggcataaaactacatgatcaagttcgtattgctgcttattgtcatctctatgcatttgatcatggcatgcaactcgaccgtccactttaccaacagccggttcgctcacagggtatcgaaattgaaaaagatgtttggttaggtgcgcatgtggggattaaagacgggattaaaattggtaaacatgctgtagttggcatgaatagtatggtgacaaaagatgtggagccgtaccatattgtgggaggaaacccagcaaaatttatccgtttaagagaa

SEQ ID NO: 9074 - DNA, 576 bp, Acinetobacter baumannii
atgtcccaatcatatattgcacctgtagagttagaaaaagcttatcgtttgttaaatcatggtccaactgtactagtctctgctcagcatggtgatgaccgtaacgtgatggctgccgcatgggcatgtgccttagagtttaaacctgccaaagtgacggtcgttttagataaaagtactaaaacccgacagctggttgagcaaagtggttatttcacactacaagttccttgctatgcacagctcaatatgaccaagcaacttggtaccattagcaaattagatgacccacaaaaacttgaacactgcggggttgagctgttttatcaaaaagatctgaccagtccgcttgtatcaggttgtatcgcatggctggtatgtaaacttattcctgaaccacataatcagtcagctcatgacctatttattggttctgttgtaggtgcatgggcagatagccgcgtttttagagatgggcattggcattttcaacatgtaccaaaagaacttcgtagcctgcactatattgctggtggcacattttatttaattggcgaggaagtgaaagccgatctt

SEQ ID NO: 9075 - DNA, 1536 bp, Acinetobacter baumannii
atggaattactgatccaaccgggaaaactgaccttagccgatttacgtcaagcttacctcaacccaattaaagttaaactagatgaaagtgcttcatctgcaattaatgcaagcgtggcttgtgtagagcaaattgtaaatgaaggacgtacagcttacggtattaatacaggttttggcttacttgcctcaactaaaattgcgcctgaagatttagaaaaattacagcgttcattagttctttcgcatgcggcaggtgtaggcgaagcacttgatgatgcaatggttcgtttaattattctattgaaagcaaatagcttggcacgtggtttctctggtattcgtcgtaaagtcattgatgctttgttggccttaattaatgctgaagtttacccacacattccacttaaaggttcagtaggagcttctggcgacttggcaccacttgcacacatgtctttagttttacttggtgaaagtaaggcacgttataaaggtgaatggttaccagcagttgaagctttaaaaattgcaggtttagaaccaatttctttagcggctaaagaaggtttggcacttttaaatggtacacaggtttcaacagcttacgctttacgcggcttattcgaagcagaagatttatttgctgccgcgacagtttgtggtggcttaagtgttgaagcaatgcttggttcacgtgcacctttcgatgcgcgtattcacgaagtacgcggccaacgtggtcaaattgatgtggctgcggcttatcgcgatttattgactgattcgagtgaaatctctcgttcacatgaagaatgtggcaaagttcaagacccatattctttacgttgccaaccacaggtgatgggtgcatgtttaactcaaatccgtcaggctgctgaagtattagaaattgaagcaaatgctgtatctgataacccgcttgtgtttgctgaacaaggtgacgtgatttctggtggtaacttccatgcagaacctgttgcaatggcggccgacaatttagcattggcaattgcagaaattggttcactgtctgaacgtcgtatttccatgatgatggaccgtcatatgtcacagcttccaccgttcttggtagcaaatggtggtgttaactcgggctttatgattgctcaggtaaccgctgctgctcttgcaagtgacaacaaagcgcttgcacatcctgcaagtgtggatagcttaccgacttcagccaaccaagaagaccatgtatcgatggctccaaatgctggtaaacgtctttggtatatggctgataacgttcgcggcattttagctgttgaatggttaggcgcttgtcagggtctagacttccgtgaaggtttaaaaagctcgcctaaacttgaacaagctcgtaaaatcttgcgcgaccaagttccttactacagtgaagaccgtttctttgctcctgatatcgaacaggctagtgaattgcttgcgagtggttgcctaaacgagttactcattccaaaactactccctagtttatctgaagtg

SEQ ID NO: 9076 - DNA, 1243 bp, Acinetobacter baumannii
gcagcatcaaatcatgatagtgatgatgattcttcagcacctgttgataccactccaccaagtaccgatggcgtaactttctcggttgaccctgttacttctgataatgtgattaatgcatcagaagcatccggtaatgtcactattacaggtgttttgaaaaacattccagcagatgcggccaacacggccgttacagttgttattaatggggtaacttataatgcgactgtagataaagcagcaggtacatggacagtaagtgtaccgggcagtggcttagttgcggatgcagataagacgattgatgccaaagtaacgtttacagatgcagcaggtaacagcagcagtgttaacgatacacaaacttatacacttgataccactgcaccaaatacaccagtgattgacccagttaacgggacagacccgattacaggtacagcagaacctggttcaacagtgactgtgacttatccggacggtagtacgaaaactgttgttgcaggaccagatggtacttggactgtgccaaacccaggtttgaatgatggcgatgaagttacagctgtagcaacggaccctgctggcaatacatcaggaccaggaacagctattgttgatgcagttggtccaaatacggatggtgttaatttctgctgttgattcggtaacagctgataatgtgattaatgcatcagaagcggctggcaatgtcacgattacaggtatattgaaaaacgttccttcagatgcggctgctacagccgttacaattgttattaatggggtaacttatactgcaactgtagacagtgcagcaggtacatggacagtaagtgtaccaggtagcggtttggttgctgatactgataaaacgattgatgctaaagtaaccttcactgatgcagcaggtaatagcagcacagttaacgatacacaaacttatacactggatacagctgctccttcagcgccagtaattgaccctgttaacgggacagacccgattacaggtactgcagaacctggttcaaccgtaacagtaacctatcctaatggtgacacagcaacagttgtagcaggacctgatggcagctggtcagtaccaaacccaggtttaaatgatggtgacgaagttgaggcaattgctacagatccagcaggcaacccatctttaccaggtacagctattgttgatgcagttggtccaaataccgatggcgttaacttcacggttgat

SEQ ID NO: 9077 - DNA, 426 bp, Acinetobacter baumannii
atggctaagaagattgacggctatatcaagctgcaagttccagctggtaaagcaaatccatctccaccgattggtcctgcactaggtcaacgtggtgtaaacatcatggcattctgtaaagaattcaatgctgctacacaaaaagttgaaccaggtcttccaatccctgtagtgattactgtgtacaacgacaagtcgttcacattcatcatgaaaactcctccagcttctattcttcttaagaaagctgctggtatccaaaagggttcatctgtacctaacaaaactaaagttggtaagttgactcgtgctcaattagaagaaatcgcgactactaaagaaccagacttaactggtgctgacttagacgcgcgtgttcgtaccatcgctggttctgcacgttctatgggcttggaagtggagcta

SEQ ID NO: 9078 - DNA, 837 bp, Acinetobacter baumannii
atgcaagaggaaccgagtccgtcgtggggtatgcgaggcttacgaaagtggttaggtacagcgccagaaacccgagatgaattattaaaactagtccaaaattcacgtcgttttttagaacctgatactgttgccatgcttgaaggtgttcttgaccttcctgctacaaaaattcgtgaagtcatgacgccacgaacagcaatgatcagtatgcaagaagatgatcagttacttgatattcttcacgtattggttgagtctgctcactcacgttttccagttttctcagctgaccagcctgataatgttgttggtattttactggcaaaagatttactaccatttttgactgaaccaaatactaaattagatattggctcgctcatgcgtcagccattatttgtgcctgaaagcgcacgttcagatcaagttcttcgtatgcttaagcatacccagacccatatcgcgattgtgattgatgaatatggatcaacagcgggactggtcacgcttgaagatattcttgaagagatcgttggtgaaattgaagacgaacatgatactgcggatgaagatgcacagtacattgttccagataacgaccatacaatagcgaatgcatggatggtgcaggcacttacaccaattgaacacttcaacactgttttagatgctgatttttctgacgatgaagtagaaactgtcggcggtttattgcttcaagaaattggtctagttagtgatttacaaggtcagactgttgagcttggaaattggttatttacgattgttgaagcagatgcccgcactattcatctgattcgagctgtacgtcaa

SEQ ID NO: 9079 - DNA, 1155 bp, Acinetobacter baumannii
atgagctcaaatgaaacaacaacaggcttcaaaccaaaaaaatcagttgcactaagtggacaagttgcaggcaacacagcactatgtaccgtaggacgtagcggtaacgacttgcactatcgtggctatgacattcttgaccttgcggcaggtagcgagtttgaagaagttgctcacttgctcgtacatggcaaattaccaaacaaagctgaactcaaagcatataaagcaaaattaaaagcacttcgtggcttaccagcagcacttaaaactgcacttgagcaattaccaccatctgcacatccaatggatgtgatgcgtactggtgtttcagttctaggttgtttaacgccagaacatgaagaccacaacgaagctggcgcaaaagacattgctgacaaattaatggcaagcttaggttcaatgctgctttattggtaccacttcagcaataacggtcgtcgtattgaagttgaaacggatgacgactcgattgcagcgcatttcttacatttgttgcatggcgaaaaaccatgtgaagagtggattcaagcgatgcatacatcacttattttgtatgctgagcatgagttcaacgcatctacatttacctcacgtgtggttgcaggtacaggttctgacatgtactcggcaattacaggcggtattggtgcacttcgcggacctaagcacggtggtgcaaacgaagttgcattcgtgattcaacaacgttacgacaatccagacgaagcagaagctgacatccgtaaacgtgttgaaaataaagaagtcgtgattggttttggtcaccctgtatatacagtttctgacccacgtaacgaagtgatcaagaaagtggcgcacgacttagcagaagcgcaagagaacaccaaaatgtacctcatcgctgagcgtttggaagcagtgatgaaagaagtgaaaaacatgttcccgaacctcgactggttcagtgcggtgagttatcacttaatgggtgttccaactgcaatgttcacaccgttattcgtaattgcacgtacagcaggttggtcagcacacgtgattgaacaacgccaagacggcaaaatcattcgtccaagcgcgaactacacaggccctgaaaacctcgaatttaaaccattggcggagcgtggt

SEQ ID NO: 9080 - DNA, 1344 bp, Acinetobacter baumannii
atgaataaaaatcaaaagcctccttttaaacaaaatgcaatagcattgagcttcacccttggagttcatgcaattgccattgttggcttgctttttttaggcttgagtaaaccacctgaacaaccaaaaaagctgaccactgttttagttaaaccagaagatttaccaccccctttggcaaaagaagttgagcaaccaaccgtagcagaaaatcaggctgaagaagttctaagcccgattgtggatgaaactcttcctcaaaatcttccagctgcccctcctcctccaacagcacaacaacttgctgctcaaaagcaaaaagctgagcaggcacaacaagcaaaattagctgaggaaaagcgtaaagctgaagaagctgctaaagcaaagcaagctgcagagcaacaacgtttagaggaagcacagaagcaacaggccgaagctaagcgtcaagcggaggctaaagcgagagctgaagctgaacaaaaacgaaaagccgaacaaaatgcaaaagctgaggcggatgcgaaagctagacaaaaagcaactgaggaagctaaacgtaaagcggagactgaagcaagactaaaacgtgaagctcaaaaggctgaaaacgctaaacttcaagcacaacaagaagctaaacgaaaagccgaagcagatgctaaagccaaacaacaaaaagctgccgaagacgccaaacgtaaggctgaagcagatgctaaggctaagcaacaagcagctgataacgctaaacgtaaagccgaggccgatgcgaaagctaaacagcaaaaagcagctgaagatgctaaacgtaaagctgaggctgatgcaaaagccaagcagcaaaaagcagctgaagatgctaagcgcaaagctgaggctgatgcgaaagctaaacagcaaaaagcggctgaagacgctaaacgcaaagctgaggctgatgcaaaagccaaacaacaaaaagcagcagaagatgctagacgtaaagccgaaattgaggccgaagaaaaagctgcatctgctaaaaaagctcaagaagaagctgcccagaaaaaaggtgaagctaaaaaaattgcatcttcggctaaacgtgattttgagcagaaaattcgtcgtgcttgggatgttcctacaggaagcagtggtaaaactgttagcgttagatttaccctgtctgactcaggtagtgttagctcgattgttattacacggtcaagtggagatgatgcattggatgcaagtatcaaagctgcaattcaggcgtctgctccctacccaatgccatcggatcctgatgcaagacgagaagcgcgaagcgttacctctactttcagagcacaa

SEQ ID NO: 9081 - DNA, 1023 bp, Acinetobacter baumannii
atgtatattggtccctatcaactgtcaaataatttaattgttgcccctatggccggtgtaactgaccgtccatttagaacgctgtgcaagtatttcggtgcgggtcatgcagtcagtgaaatgatgactgctgacaagactttacgtatgactaaaaaaagtctttatcgtgctaattttgatggagagttagctccaatttctgcacagattgctggttccgatccagaacagttggctgaagcggctcgttaccaagtcgcaaatggcgcgcaaattgttgatatcaatatgggatgtcctgcaaagaaagtatgtaataaattagcgggttcagcattattacaagatgaagatttggtagctcgaatattagatgcagtcgttgcagcagttgatgttccggtaactttaaaaacccgtttgggatttttaaatggccaagagaatattctacgggtggctaagcgtgccgaagaggctggcatcgctgcattagcactacacggccgtacgcgtgaagatatgtatttaaataccgcccgttatgaattgattaagcatgttaaagaattaatccatattcctgtgattgctaatggtgatattgatagtcctgagaaagcaaaatatgtactggactatactggggcggatgcaattatgattgggcgggctgcacaaggtcgaccgtggatttttcgtgaaattgcccattacttaaaaactggtgaacaccttgctgctccgaatattgaagaagttaaagaagtgcttttagggcatttgtctgagttatatcagttttatggtgaatactctggttgtcgtattgcccgtaagcatattgcttggtacaccaaaggtttacgctcaagtaatgagtttcgacaaaacatgtataaagttgaaacgactgctgaacaagctttagttgttgagagctattttaatcaattacttgctgaaggtaatttgatgagcgatgttcaggttgaacaggttaatttattagatactcac

SEQ ID NO: 9082 - DNA, 1317 bp, Acinetobacter baumannii
atgggcaaaaatgttgtggtacttggtacccaatggggcgacgaaggtaaaggtaaaatcgtcgacctgctcacagatcaggcggctgcggtagtacgttatcaaggcggacataacgcaggtcatactcttgtcgtaggtggtaaaaagactgtattacacctcattccatcaggcattttacgtgaaaacgtattgtgcttaattggcaatggcgtggtgctttcaccagcagcattaattgaagaaatgggaattttggaagctgaaggtgttccggttaaggagcgtctacgcatttctccaaactgtccacttattttgcctaaccacattgctcttgatcaggcacgtgagaagaaacgtggtaacgctaaaatcggtactacaggtcgtggtatcggccctgcgtacgaagataaagttgcgcgccgtgcagtgcgtgttgctgaccttgttcgtggtggtgcagcgttagaagaaaaactagccgaaatgctagagctacataacttccaattgactcagttctacggtgtagaagcggttaaatttgaagacgtattagctctttgcaaccaatggcgtgaagttcttgctccattagtgattgacgtaactaaagtattacatgactatcgcaaagaaggtaaggctgtaatgtttgaaggcgctcaaggttcacttctagacatcgaccacggtacttatccgtatgttaccagctcaaatacaactgctggtggtgtaagttctggttcaggtatgggtcctttacatcttgattatgtattaggtattacgaaagcttatacaacacgtgtaggtgctggtccgttcccaactgaattggtttacgatgctgcaagtgattctggtgacccaattggtaaacatttgggtactgtaggtcatgagttcggtgcttctactggtcgtcaacgtcgttgtggttggtttgatgctgaaatcttacgccgttctgtagatgtaaactcactttcaggtatttgcttaactaaacttgacgttttagatggtttagaagaagtgaaaatctgtgtgggttatgaaaatacagattcaggttgtgtaggttcttctgatgcggtttctttcgaatgcttgaaaccaatttatgaaactatgccaggttggagcgagtcaactgttggtttaacgagcattgaccaattacctgcaaatgctttggcttatgtaaaacgtattgaacaattaatcgaatgtccgattgatatcgtttcaactggtccagaccgtgcagaaacaatcattttacgtcatccattctctgcg

SEQ ID NO: 9083 - DNA, 2091 bp, Acinetobacter baumannii
atgtcaatgtttaacatcgttcgtaaagaattccaatttggtcagcatcaagtcgttttagaaacgggtcgcgttgcacgtcaagcaaatacagttttaatcacaatgggtggtgtaactgtattggtagcagtagttgctgctccaacagcaaaagctggtcaggatttcttccctttaacagttaactatcaagaaaaacaatatgcagcaggtcgtatccctggtggatatggtaagcgtgaaggtcgtgcttcagaagctgaaactttaatttcacgtcttattgaccgtccaattcgtccattgttcccagaaggttactacaacgaaattcaggtaactgcaactgtggtttcttctgacaaaacgatggaagctgatattgcagcaatgttaggtacttctgctgcgttagcaattgcaggtactccattccgtggtccaatcggtgcagcacgtgttggtttaatcaacggcgaatatgttttaaacccgaattttgagcaaatggctcagtctgaccttgaccttgtggttgctggtacagagtctgctgtattgatggttgaatctgaagcgaaagaactttcagaagaccaaatgttaggtgcggttctttttggtcacgacgaaatgcaaattgcaattcaagcgatcaatgaatttgcagctgctgctggtgcgaaaccatctgactgggttgctccagcacacaacgaagaattacgtgcaaaattaaaagaagcatttgaagcaaaaatttcagaagcttataccattgcagtaaaacaagatcgttatgcagcattagatgcacttcatgctgaagctgttgctcaattcgttcctgaagaagatgtagacggtattgctgacgaagtagactacttatttgaagatcttaaataccgtactgtacgtgacaacattttatctggtaaaccacgtattgatggccgtgacaccaaaactgttcgtgctttagatgtacaggtgggcgtacttgagcgtgcacatggttctgcattatttacacgtggtgaaactcaggcgttggtaacaacgactttaggtaatactcgtgatgctttaatggttgatacccttgctggtactaaaactgacaacttcatgttgcactacaacttccctgcttactcagtaggtgaaacaggccgtgaatctggccctaagcgtcgtgaaattggtcatggtcgtttagcacgtcgtggtgttcaagcagttcttcctgcagctgaccgcttcccgtacgttattcgtattgtatctgacattactgaatctaacggttcatcttcaatggcttctgtatgtggtgcgtcattatcacttatggatgcaggtgttccgcttaaagcaccagtagctggtatcgcaatgggcttagtgaaggaaggcgagcgtttcgcagtactttctgacattttaggtgacgaagaccaccttggtgacatggactttaaagtagcaggttctgcaaacggtattactgcacttcaaatggacatcaagattgaaggtattactgaagaaattatggaagttgcattaaaccaagcatttgctggtcgtatgcatatccttaatgaaatgaacaaagtaatttcacgtgctcgtcctgaaatttcaatgcacgctccaacattcgaagtgattacaattaatccggataaaatccgtgatgttattggtaaaggtggtgcaacaatccgtcaaatcactgaagaaactaaagctgctattgatattgaagataacggtacagttcgcgtatttggtgaaactaaagctgctgctaaagctgcaattgcgaaaattcaagcgattactgctgaagttgaaccaggtaagatctacgacggtaaagtaattcgtattgtagaattcggtgcgtttgtaaacatcatgccgggtactgatggtcttcttcatatttcgcaaatctctaatgagcgtattgcgaacgtaactgatgttcttaaagaaggtcaggaagtaaaagtacaggttcaagacgttgataaccgtggtcgtatcaaattgactatgaaagatattgagcaagca

SEQ ID NO: 9084 - DNA, 2154 bp, Acinetobacter baumannii
atgtcaaacgaatcaaaatgtcctttttcaggtcataactcaaaaccgcaagtaacagtcggtggtggcacggctaatttacactggtggccaaatcaattacgtgttgacttactcaatcaacattcagaacgctctaatccactcggtaaagattttaattaccgtcaagaatttaaaaaactcgactactacgcacttaaagccgacatcaaaaatgtattaaccgattcccaagactggtggccagccgactggggaaattatacgggcttatttatccgtttagcgtggcatgctgccggtacatatcgtatgggcgatggccgtggtggtgccggtcgtggtcaacaacgttttgctccattaaatagttggcctgacaatgcaagtttagataaagcacgccgtttactatggccagttaaacaaaaatacggtcaaaaaatatcttgggccgatttatttattcttgccgggaacatcgcacttgagtcttctggtttccgtacctttggttttggtgccggtcgtgaagatgtttgggaaccagacaacgatgtaaactggggcgatgaaaaagaatggttagctcatcgtaactctgaagcattggcgggcagtaatcttgctgcaaccgaaatgggcctaatttatgtgaaccctgaaggaccacaagcgagtggtgacccacgctcagcagcaccgtttattcgtgccactttcggcaacatggcaatggatgatgaagaaattgttgccttgattgctggcggtcatactttaggtaaaactcacggcgctgcctctgctgaccatgtccaagcagacccagaaggtgcaccaattgaacaaatgggctttggttgggcaaacagctatggcacaggtgtcggtaaagatgcgatcacttcaggtttagaagttatttggtcacaaacgccaacacaatggagcaattacttctttgaaaacctcttcaaatacgaatgggtacaagaacgttcacctgctggcgcaattcaatgggtagcagcagatgctgaagccattattccagatcctttcgacccatcaattaaacgtaagccaacgatgcttactacagatttgaccctacgttttgaccctgagtttgaaaagatctctcgtcgtttccttaacgatccacaagcctttgccaatgcttttgctcgtgcttggtttaaattaactcaccgtgatatgggaccaaaagcacgttatttaggaccagaagttcctgccgaagatttaatttggcaagatccattacctgctgctagcgctacaccatcttctgcaagcattgctgatgcaaaagcaaaaatcgttgctctagggttatctactggtgagttggtttcccttgcatgggcatctgcatcaacattccgtggtggagataaacgtggtggtgcaaacggtgcacgtattgctttatcaccacaacgtgagtgggaagtaaacaaaaaagctgttgagactttaactaaaattgaagaactcaaggcatcaacccaattgtcattggcggatttaatcgtgttagctggtaatgttggtgtagagcaagctgctcaagcagcaggtttcaatattaccgttccgtttgcccctggtcgtgttgacgcattacaaagtcaaaccgatgttgaatcattccaattactgctcggtcttgctgacggtttcagaaattggaaaaaacagggagtcaacacaccagctgaagtcttattaattgataaagcacaacaactgactttgactgcaccagagttaactgcattgattggtggtttacgtgtactaggcactaactgggatggttctcaacatggtgtcttcactcagcaagttggggtgctcagcacagacttcttcacaaacttactcgacatgtcgaatgtatgggcacctgttgattcaacaagtgaagtatttgaaggaaaagaccgtaaatcaggcacagtgaaatttaccgcaacacgtaatgatttagtctttggttcgaattctatcttacgtgcattagccgaagtttatgctcaggcagatggtaaagaaaaatttgttcaagactttgttgctgcatggactaaagtcatgaatcttgaccgttttgacttagct

SEQ ID NO: 9085 - DNA, 3279 bp, Acinetobacter baumannii
atgctttttaatatatttagtgtcttggaaaaaatagggctaaatgctcagaaacgtgctattcacgtacaattttctaatgaactactcaatcatcaagtattcttacaacgtatagaaggccaacatcagctaaatggtggcctaatggcagagttgatctgcctttcaacaaatgcccaaattgcattgaagcaatttattggtgttcaagtcgctgttgatcaggtcactgattcgggtcaattgttccgaactacaggcattgtgactgaggccagttatggacaaagtgatggcgctttaacgctttataagctgactatagaagatgcgacaaatttatggcacaaacgccgtaatagtcgtgtttttatgaataaaagtatcgtagaaattaccgaagttctatttaaagaatggcaagaaaaaagtccactgtttgctgcgagtttaagtcttgatttgggtgggttaagtcaaaactatgatattcgtccgttcactatgcagcataatgagtcagactatgactttctcacacgtttgtggcgaagtgagggggttagttggctcattgatgaatcagagctttttgtccctcattttactgcaccaatacaagctcaaaaactaaaattaattgatgataataaccaataccaagctttagcgcgtcgtagtattcgctatcacagaagtagcgcaaccgaatatcaagatagtattacaggctttgttgcagtgcgaagtctgcaaccgactgccgtacatgtacagcgttggcagcccgatgcgttagcgcaagaagagggtaatggttcagttgttactacccatacacactcagataattttgattcggccactttaagtcttgagcaagcatggcacgtaagtcccgcctggatgcaagatttaaaaggggaagatcaggcaaccgcttcaagcagtagccaattagaaaaattaaatcagcacttcaccgacatgcatgcgagtcgggccaaatactttaaagcctacagtagtgtgcgcgatacccaagtcggctattggtttaatttaagagagcaccctgaaattgatcagcatgaaggagcagatcaagagttcctaatcattgctaaaaatttctataaccaaaataatttacctaaagatttacatcagcaagttagccagttattaacccaaagtcgttgggatcaacatgggtatgatgagattgagcgccagggtaatgagctgacattaatacgtcgtcaaattaaaactgcccctgaatataatccagaacagcatcggccaatagcctacccacaaagagcgaaagtcgtgggacctgagggagaaactattcatgtcgatgaatggggacgcattaaagtacgttttctatttactcgtagtgatgatcatggccatgatggtggcgcaggtagtaatgacaatgataccgactcggcttgggtggatgtactgactccttgggcaggagaaggttatggtgcacgtttcttaccacgtattggtgaagtggtggtcattgacttctttgatggcaatatcgaccgtccatttgtgacgggtcgaatccatgaagcacagcgttcgccaactaaattcgatgtaaaagggcagcttcctgatactaaaaagctaagtggcatacgcagtcaggaggttaatggcagcgggtttaatcaattacgctttgatgacacaactgggcaaattagtacccaactacaaagtagtcatgcagcaacacagctgaatttaggtaatttaagccatcctaaagaacaagcgacaagccaaggccgtggtgaaggctttgagcttagaacagacgcttggggagctgtgcgggcgggtaaaggcatgctcattagtacctatgcacaagagcaagcgattgcagaccatttagaggccgcacaagcacaatccttactttcacaaggctatgaaagcatgaaaatgctcagtgaagttgcagccaagcaacaaactgatgctttgaatgtaattaatcgcttacccaaattcatccagtcgcttgagttaaaaaccacagggcaggcattaaatagtacggtaaacctattcaaagaaggaattaataacgatcctatccatgccctaaaagactgtggtggctttattcaagacattggtgcactaggaggaaacgcaaaaggcgttgtagatgaattcaattctttctttagcgatgccaaagatgcggtagaaaatttaaaagcattcatcgaaaacgttgaagaacatggccctgatattgttaaaggaaaactcgcaagtattaaagaccgaattcataaaaatccatttgaaagtattcaagaggtcgggaaagtcttagcaaatgtcgagactaaagattttgatttgatgagtacgtgtggaacttttagtaaaggcagtaaattggaagtatcaccttctaaagcattgagttctttacaaggctttatggaaggttatacccaaggtttagaaagcagttccgatactaaacaacaagagcaaggcaagatcttcagacaagcccttatgttgttagcatcgccaaatggtattgctttgacgacgcctgaaaatattattttgcaagcttcgcaagatattgccgaaagtgccagcggttctattaatttaagcgcgcaaaaaaatattattgggcacgcacaagacaaaatcagtttgtttgctgcgcaaaagggtttgcgtgcttatgcagcgaaaggaaagctcgaactacaagcacaagatgacgctattgaagcaattgcgaagaaggtgattaagcttatttctactgaagataaaatcgagcttacgagtccaaaagaaattgtattaacggcaggtggttcacagctcaaaattaatgccaatggggtattttcaacaacaggtggtaaatttgaaagtaaagctgggcagcatttgtttacgggtggggcaaaggtttcaatgaaactgcctcatttacctgttatacaagaaggtggttttagccaattatttgacttaaaggatttatctaaagataatccaaatttaataggggcaccttataaaatattacttaagaaaacaggtgatatattaatggtgggaacaataaatgatgacttacagacagaacgagtttttactaaggaagaagaagaaatagagttaattttatttgaaactaattatacagactttaatattgaaaatttagattatctttttggagaagaa

SEQ ID NO: 9086 - DNA, 438 bp, Acinetobacter baumannii
atgaaagaactgtctgtctaccctgtaatatacgaccagaaagtagcatggggagatatggatgcttttggtcatgtcaataatgtgcaatattatagatatattgaaagctcacgtattttatatatggaaaatgtaaatatattgactccaaatatatatactgttgttgcttcaagtcagtgcaaatatttaaaacctgtgttttatccagatgtattgaaagtaggggttcgtgtagaagagctacgtaagagcgcgttccgtatggcttatatattatggagtgaatctcagcagcaaatcgttgctacaggtgaagcagttatggtttgtgtgaataaaatgacaggattaaaatgtgaaataccaagtgaagtaaaaagtaaaattattgaattagaaaaatcagttgggcatgatttaatacatttagct

SEQ ID NO: 9087 - DNA, 873 bp, Acinetobacter baumannii
atgactgcaattactgcaagcatggtaaaagaattacgtgaccgtactggtcttgcaatgatggaatgcaaaaaagcattaacagaagcgaacggtgacatcgaacttgctattgataaccttcgtaaatctggtcaagctaaagctgctaaaaaagctggcaacattgctgctgacggtgcaatcactatcgttcaagacggtaataaagcgatcttagttgaagtaaactgtcaaactgacttcgttgctaaagacgaaaacttctctaactttgcacacacagttgctgctgctgcattagctgctggcgaaactgatgctgctaaaattgctgaattaaaattagctgatggccaatcagttgaagaagctcgtatcgcgcttgttcaaaaaatcggtgaaaacatccaagttcgtcgtgcgaaaatcgttgaaggcgaacaattggctatctataaacacggtttaaaaatcggtgttgtagtttcttatactggtgatgctgacactggtaaaggtattgcaatgcacgttgctgcattcaacccagtagcagtaaatgctgaagctgttccagctgaccttatcgctaaagagaaagaaattgctgaagcgaaagcgttagaatctggtaaaccagcgaacatcgttgagaaaatggtaactggttctgttgagaaatacttaaacgaagttgctcttgaccgtcaaatgtacgttatcgacaacgagaaaaaagttgctgacgtattaaaagcgactggtacaaatgttgctaacttcgtacgtttcgaagttggtgaaggtatcgagaaaaaagctgaacttagctttgctgaagaagttgctgctgctcaagctgctgcgaag

SEQ ID NO: 9088 - DNA, 357 bp, Acinetobacter baumannii
atggcacttgtttacgggctggtgatggttacaccagtttactggattgaccacagcccgccagaccaacttattttcaaggagtgcaagagtggcaaactctgcgtcaagcctaaaaaacgtgcgcgccaaaacgttaaagcgcgtaaacacaacgcaagcttgcgttctatggttcgtacttacatcaaacgtactttaagtgcaatcgctggtggtgattatgctgttgctacagaagcttacaaaaaagctgttcctgtaatcgaccgcatggctgataaaggcatcatccacaaaaataaagctgctcgtcataagagccgtttaaatgctcaagttaaagctttagctaac

SEQ ID NO: 9089 - DNA, 235 bp, Acinetobacter baumannii
atgctttcagcggttatcccttccgaacatagctacccggcgatgcgactggcgtcacaaccggtacaccagaggttcgtccactctggtcctctcgtactaggagcagatcctctcaaatttccagcgcccacggtagatagggacccgaactgtctcacgacgttctaaacccagctcgcgtacctctttaaatggcggaacagcataaccttgggacttgctccagccagga

SEQ ID NO: 9090 - DNA, 690 bp, Acinetobacter baumannii
atgtataaaacattgaccacttgcctactaataacttgtcttggcttaagtggatgtgcaacttctatattatcgactgccctgccgaatgagacgactgaggtccaaacaactattttaaaaacagatcaaattattgcacttgggcaagccgttaaaaaccagcaagaacaaggcgtcgtatttataggtcaagactttaattatttaatgaccgaaggaagttcagaatttttaaatatcattaaaaatattcctgtaaatcaaagaactttaatcattccatctcctctgctacttgaaatggatgatcctacgcattttcatggtgaactcaagtttcaatacaatattcccgcttcaaaactctctgatcaacagaaagaaaatttaaaaaatttagggtttaaaaatcattttatggttatggagaaccaaacacagcttttatatccctacgctattattcgttttaaaggccaaatttatcaaaccagtcctactttaaaagtccaacaaacgattccaactccatatccaatcgccttacaacaaaaagatgaaataaccaagaaacatccgtttaaacgtgtaacgcgtatggcgctttatcctttagcgatggcatttgatatagtgacggtagctccttctctcatcttgtcagatttacgaggtgactttactaaa

SEQ ID NO: 9091 - DNA, 1407 bp, Bacillus anthracis
gtggaaggaaatggtggtaaatccaaaataaaaagtccattaaattctaatttcaagatattgtcagatctagttggccctacttttcctccagttccaactggaatgacagggataacgggaagtacgggagcaacgggaaacacgggtccaacgggagaaacgggagcaacgggaagcgccgggataacaggaagtacgggtccaacgggaaacacgggaggaacaggaagcacaggttcaacgggaaacacgggagcaacaggaagtactggggtaacaggaagcaccggggtaacaggaagtacgggagtaacaggaagtactggggtaacaggaagtacgggtccaacaggagaaacgggaggaacaggaagtactggggtaacaggaagtacaggggcaacaggaagcaccggggtaacaggaagtacgggagtaacaggagaaacaggtccaacgggaagtacgggagcaacgggaaacacgggtccaacaggagaaacgggaggaacaggaagtacaggggcaacaggaagcactggggtaacaggaaatacgggtccaacaggaagcaccggggtaaccggaaatacgggagcaacaggagaaacaggtccaacaggaaatacgggagcgacgggaaataccggtccaacaggagaaacgggagtgacaggaagtacgggtccaacaggagaaacgggagtgacaggaagtacgggtccaacaggaaacacgggagcaacaggagaaacgggagcaacaggaagtactggggtaacaggaaacacgggttcaacaggagaaacaggtccaacgggaagtacgggtccaacaggaagcaccggagcaacgggagtgacgggaaacacaggtccaaccggaagcaccggagcaacgggagcaacaggaagcacaggtccgaccggcagcaccggaacaacaggaaatacgggagtaacaggagataccggtccaacaggagcgaccggggttagtacaactgcaacgtacgcgtttgcgaataatacatcaggaagtgttatttctgttttgttaggtggcacgaatattccgttaccaaacaatcaaaatattggaccgggaataactgttagtggtgggaatactgtatttacagttgcgaatgcagggaattattatatagcctatacaattaatttaacagcaggcttacttgtaagttcccgtataactgtaaatggcagtccgcttgcgggaacgataaactccccgacagtggctactggttcatttagtgcaacaataattgctagcttgcctgctggagctgccgttagcttacaactatttggagtagttgcgttggctacattatctacggcaacgccaggagctactttaacgattattagattgagt

SEQ ID NO: 9092 - DNA, 2358 bp, Bacillus anthracis
atgttagaaagaacgttgcgtgtattagaatataataaagtaaaagaacaattacttgaacatacagcatcttcacttggtcgtgacaaagtgaagcatttagtgccgagcactgattttgaagaaattgtagaaatgcaagatacaacggatgaagcagcgaaagttattcgtctaaagggtagtgcaccattaggtggtattacggatattcgctctaatgtgaagcgtgcaaagattggaagtatgttaagtccaaatgaactacttgatattgccaatacgatgtatggtagtcgcaatatgaaacgtttcattgaagatatggttgataatggtgttgagcttcccattttagaaactcatgtcgctcaaattgtatctttatatgatttagaaaagaaaattacaaattgtattggtgatggtggggaagtagtcgatagcgcaagtgataaactgcgcggtattcgtactcaaattcgtactgcagaaagccgtattcgtgaaaagttagaaaacatgacgcgttcttcaaacgcgcaaaagatgctgtctgactcgattgtaacgattcgtaatgaacgttacgtaatcccagtaaaacaagaataccgcggcgtatatggcggtattgttcatgatcaatcagcttctggacaaacgttatttattgaaccgcaagtcattgtagaattaaataacgcactccaagaagcacgtgtgaaagaaaaacaagaaatcgaacgcatcttattaatgttaacagaagaagtggcagtagaagcggatatcgttttatcaaacgtagaagtagttgcaaatcttgacttcatatttgcgaaagctttttatgcgaagcgtattaaagcaacgaagccaatcgtaaataacgagcgttatatggatttaagacaggcacgtcatccgcttattgatccagaagttatcgtgccaaataacattatgctaggtaaagatttcacgacaattgttattacaggaccgaatacaggtggtaaaacagttacgctgaaaacagttggtatttgtgtgttaatggcgcaatctggccttcatattccagtaatggatgagtcagagatttgtgtatttaaaaatatatttgctgatatcggtgatgagcaatcgattgaacaaagtttaagtacgttctcctcacatatggtgaacattgttgatattttagaaaaagctgattttgaaagcttagttttattcgatgaattaggtgctggaacagatccacaagaaggggctgcacttgccatttcgattttagatgaagtatgtaatcgcggtgctcgcgttgttgctacgacgcattacccagaattaaaagcatacggatataaccgtgagcaagttattaatgcgagtgttgagttcgatgtaaatacattaagcccaacgcataaattattaatcggtgtaccaggacgtagtaatgcctttgaaatttcgaaacgtcttggattatctaatcgcgtcattgatcaagctcgtaaccacattagtaccgatacaaataaaattgaaaatatgattgcgaagttagaagaaagtcaaaagaacgcagagcgtgactggaacgaagcagaagcacttcgcaagcaatctgaaaaactgcatcgcgaattacaacgtcaaattattgaatttaacgaagagcgtgatgaacgattattaaaagcgcaaaaagaaggggaagaaaaagtcgaagctgcaaagaaagaagcagaaggcattattcaagaacttcgtcaattgcgtaaagcacagcttgcaaacgtgaaagatcacgagctaattgaagcgaagagccgtctagaaggcgcagcaccagagcttgtgaagaaacaaaaagtaaacgtgaaaaatactgcgccgaaacaacagttacgtgcaggtgatgaagtaaaagtattaacgttcggtcaaaaaggtcaattgcttgaaaaagtaagcgatacagagtggagcgtacaaattggtattctgaagatgaaagtaaaagaatctaatatggaatacattaatacaccgaaacaaacagagaaaaaagcagttgcaacagtaaaaggtagagactatcatgtttcgctagagcttgatcttcgtggtgaacgatttgaaaatgcaatggcgcgcgttgagaaatacttagacgatgcccagcttgcaagctatcctcgtgtatcaatcattcacggtaaaggaacaggagcacttcgccaaggtgttcaagattacttgaagaagcaccgcggtgtaaaaacattccgttacggtgacatgggcgagggaggcctaggcgtaacagttgtcgaattaaaa

SEQ ID NO: 9093 - DNA, 1433 bp, Bacillus anthracis
aaattacatcgtacgatgaagagtagacatttatttatgatcgcactaggtggtgtaatcggaaccaggttttttcttagtttcgggttacacccattaatcaggctggaccagggggagcccatcctttcatatttagtaggcggattcattatgtatttaacaatgctatgccttggagagttaacggtagcaatgccagtttcaggatctttccaaaaagtatgcgacgaagtttatggacccaggaacggggcttatgattgggctggctatattggcttgggctgggcagtaacagtaggactagaattaacgtcaattggtttaatgatgaagagatggtttccgaatgttgatgtttgggtatggtgtctcgtcttcggcgttattttatatgcgtcaaacgcaatttcagcgaaaagttatgctgaattagaattttggttctctagtattaaagtaattacaattcttgcatttgttgttcttggtggtagtgcattattaaggtttatatcatatgacggaaaagaagcagcacctcttttctctaacttttgtagcgaaagcgggttattcccgaatggataagctgccgtattacttacaatgatttacagtaacttcctcgttccaaggaacagagttaatcggaattgcagcgggtacaaagtgaaaatccagaaaaaacaattccatcgtgccatccgtaatacagtatggcgcattatgttattcttcattttaacaatgacgattttagtaggattaatttcttggaaagaagcaggcgtaattgaaagtccattcgtagtcgtatttgataaaataaagtattccatacgcccagctgatattatgaacttcgttattattactgcgttattatctgtagcgaactctggattatatgcagcgacgcgtatactatggtcacttgcaaatgaaggaatggcaccaacatctttccaaaaagtaaataagcgtggggatccaatttaccgcattagttgtaacgattgctgtagctggcctttctttattcacaagtttccttgcagaagatacagtatacatgtacttattatctatagctggtttatcagctgtttcaagttggatcattattgctttatcgcaactacgctttagaagtcagtatataaaaggcggaggaaagttaagaggatttaaaatatagaacaccgctatatccaattgttcctattttagctttaattacaaatagtatcgttgttattagtttagcgtttattccagaacaacgaatggcgttatattgtggtattccatttatcattttctgctatatatattattatataaataagaaacggcagaaaccgatgaaagtggagatggaaaaagcaaatgaaactaacaatcaaacacgatgacattgaggcaga

SEQ ID NO: 9094 - DNA, 432 bp, Bacillus anthracis
atgcaagtaaaaacggttgatattctaggtgttcctttttctacaatgacaatggatgaaacaatccaatatttgaagggacaactagaagtggagcgaacgcatacttttcaggtagtaacagcaaatcctgaaattgttatgtgtgcaaaaaaagatgaagcattctataaaacattattaaatacagatttaattacgcctgacggaattggggttgtaaaagcaagtggtatgctgggcacacctttaaaggaacgtgtagcaggttttgatttaatgtgtaatttatttgcgaagctatcagaagagaataaaccagtatctgttttcttacttggtgcaaaaccacatgttgtacaagctgcagcagatcatttaacgaagacgtattcagctgtatctattgggggtatacaagatggatacttt

SEQ ID NO: 9095 - DNA, 645 bp, Bacillus anthracis
atgaaattctttattgatacagcaaatattaacgaaattaaagaggcaaatgcattaggcgtattagctggagtaacgacaaatccatcacttgtagcaaaagaaggcgtagatttccacgagcgtattcgtgaaatttgcaacgttgtagaaggacctgtaagtgcagaagtaattagcttagaagcagataaaatgatcgaagaaggaaaagagttagcgaaaattgctccaaacgttgttgtaaaggttccgatgacaacagaaggtttaaaagcagtaaaagcgttctctgacttaggaattcgtacaaacgttacattagtgttctcagcagttcaagcattacttgcagctcgtgctggtgcaacatacgtttcaccattcttaggtcgcttagatgatatcggtcataacggtatggacttaattcgccaaatcgcagaaatctttgcaattcatggcatcgaaacagaaattatcgcagcatctgtacgtcacagtgttcacgtaactgacgcagcgttaaatggtgcacatattgcaacaatcccagcaaacgtaattgcttcattagtgaagcatccattaacagatcaaggaattgagaaattcttagctgattgggaaaaaacacaagagaaa

SEQ ID NO: 9096 - DNA, 1487 bp, Bacillus anthracis
ttaacaggacatacattgacaattgaagaaatgaagaggttgttacttgaaggggaaggtgtaaccgcttgtccaactagtatgcaaaaggtggcggagtgccgcgaagtagttgagaaaattgtagagaacggaaaagtcgtttacggtattacaactggatttggaaagttcagtgacgtgctaattcaaaaagatgatgtaaaggcacttcagcacaatttaattcagtcacatgcatgtgggataggcgatccatttcctgaagaagtatcacgcggtatgttaattttacgagcgaacacgatgcttaaaggagtatctgggggttagacccgctcgttgaaaatatgcttccttgaacctgaaaatcgtaaaatttccccaggatgttcccgcaacaagggtctccttggctgacagtggggatttacccggcctttatctcatcttgcgctcatattattaggcgaaggtgaagtgttctataaagggaaacgtgttcatgcgatggttgctcttacagaagaaggtcttgagccaattgaacttgaagcaaaagaaggtctggcgttaattaatggtacgcaggcgatgacagcgcaaggagttctttcttatatagaagcagaagcaacggcttatcaagctgaattaattgcatctatgacaattgaagggttacaaggcattattgatgcatttgatgaaaatgttcataaagcacgtggttataaagagcaagtggaagtagcgagcagaattcgtgacatccttcatgatagtaaattaacaacaaaacaaggagaactgcgtgtacaggatgcgtattcacttcgctgtattccgcaagtacacggtggcttcttggcaagttttaaattatgtaaaagaaaaattagaaatttgaatgaatgccgcgacagataatccacttatttttgatggcggggaaaaggtaatttcaggtggtaatttccacggtcaaccgattgcatttgcgatggacttcttaaaagtagggatggcagaactttgcaatatttcagagcgtcgtattgaggcgttagtaaatccgcagttaaatgatttaccaccatttttaagtccagaaccaggacttcagtctggtgcaatgattatgcaatatgctgcagcgtcactagtttctgaaaataaaacgttagcgcatccggcgagtggtgattccatcccggcatcagctaaccaagaagaacacgtaagtatgggaaccattggttccccccctggcccttcaattattccaaatggaaaaagccgtccttccattgaaaagaattggggcaaggcaaccaccaaattatcccggatttgaaaccttaagtacggggacaaaaagctcctaccttcaaggccgtcaccaagaacctcctattacaattgatcgtatatccttcacagatattgaaattattagcctttggttaaaacgaattaattcgata

SEQ ID NO: 9097 - DNA, 1031 bp, Bacillus anthracis
gaaaagcgccatgaagagcttggcttaagtgatgagcaagtgttagaaatgttccgtacgatgttacttgcacgtaaaatcgacgaacgtatgtggttattaaaccgtgctggtaaaattccattcgtaatttcttgtcaaggacaagaggcagcacaagtttggagcaacatttgctcttgatagagagaaagattatgcattaccatactaccgtgatatgggtgttgtactagcgtttggtatgacagcgaaagaactgatgctatctggtttcgcgaaagctggagatccaaactctggtggtcgtcaaatgcctggtcacttcggtcaaaagaaaaatcgtattgtgacagtttcatcttccagtaacaacgcaagtaccacatgcagttggtattgcattagctggaaaaatggaaaagaaagatttagtaacgtttgttacatttcggtgaagggtctttctacccaaggtgatttccatgaagggtgcaaacctttgctgggcgtacacaagttacctggttattttcatgtgtgaaaaatattaaatacgcaatctctattcccagttgaaaacaaattaagcatgtaaaaatgtttccgcccgtgcaaattggatacggtatgcctggatatacagtagacggaaacgatccgcttgcggtatataaagctgtaaaagaagcagcagaccgtggccccccgtggtgaaggaccaactttaattgaaacagtatcatatcgtttaacagcacattcaagtgacgatgatgatcgtgtttatcgtgataaagaagaagtagaagaagcgaagaaaaatgattcaattgtaacatttgctgcttatttaaaagaggttggcgtgttaactgaggatgttggaaaacaattgttaggcggaatttatgcatatcgtaaacgaagcaacagaatatgcagaaaatgctccgtatgcagcacctgaagatgcattgaagcacgtatacgcagaataggggggaacgttttcatggcctggaaatgtc

SEQ ID NO: 9098 - DNA, 788 bp, Bacillus anthracis
aagaaataacattacaacctagccaaaaaatatgtgttaattcgttttgttattgaaaaatacaacctcaaaaacgtggtgaggtatctatgtaaaattgctggagtttcacgttcagaatactataattatttttccgtttcctcacaaaatcagcggaagaacaaaatggatcagggtgaaatatcgaaagagttcatattaaaggcatttcgttttaaaaactgaagaaaaagggttcgtaaaatcaaaatgacattggcgggtcaatttcaagttgtctataacttgaaacgtattcgtagaattatgaagaaatgtgaagaaatatgggattatctgtcccactcgtaaagcgaatccttacaaaagaatgactagagcgacgaaagaacatttcgtggtaccgaattaattgaagcaagaattgaggaaaggtgtacatggaaaggtgcttcttgcagatatcacatacctgttttatggtaggaatcggaaagtatatttatctactattctagacaggtccacgaatgaaattttagcctatcatgtttcagggcagctcacataagatatcgcaacaatgacatttgacaacctaaagaagaataagaaaattcgattgactaaagatgcctatattcattccgatcaaggaactcattacataagtcccatctatcaaaaattaatccaaaaaattaaaacttggaccatccatattcagaacaagaaactggtgggaaaatggccctccagaatcctttttccggaatatttaatat

SEQ ID NO: 9099 - DNA, 957 bp, Bacillus anthracis
atgaaacgtattggtgtattaacaagtggtggagattcacctggtatgaatgctgccattcgtgcagttgttcgtaaagcgattttccatgatattgaagtatatggtatttaccatggatacgctggattaatttctggtcacattgaaaaattagaactaggttctgttggcgatattatccaccgcggtggtacgaaattatatacagcaagatgtcctgagtttaaagacccagaagtacgactaaaaggtatcgagcaattaaagaaacacggtatcgaaggacttgttgttattggtggagatggttcttaccaaggcgctaaaaaattaactgaacaaggattcccttgtgttggtgtaccaggtacaattgacaatgatatccctggaacagacttcacaattggtttcgatacagctttaaacactgttattgatgcaattgataaaattcgtgacacagctacatctcatgaacgtacatatgttatcgaagtaatgggacgtcacgctggtgatatcgcattatgggctggtttagctgatggtgcagaaacaatcttaattccagaagaagagtatgacatggaagatgttatcgctcgtctgaagcgcggtagtgaacgtggtaaaaaacacagtattatcgttgtagctgaaggtgttggaagtgcaattgacatcggtaagcacattgaagaagcaacaaactttgatactcgcgtaactgtattaggtcacgtacaacgtggtggatcaccaagtgcacaagaccgtgtattagcaagccgtcttggcgcaagagcagttgaattattaattgctggtaaaggtggacgttgtgtaggtattcaagataacaaacttgttgatcatgacattatcgaagcgttagctcaaaagcatacaatcgataaagatatgtatcaattatctaaagaattatccatc

SEQ ID NO: 9100 - DNA, 1242 bp, Bacillus anthracis
atgaatgaagtgttagcaaagggaaagaaggcgaaagagatcgctagagagctagtgcttaaatctacagagcaaaaaaacgaagcactttccgcaatagctgatcagttaatattagaaacagcttatattttagaagaaaataagaaggatattgaagaaggtaaggcaaaagggttttctgattctctccttgatcgccttatgctgaatgaacagcgtattgttgatatgacagaagggattaagcagctaattgaattacgtgatcctgtaggagaatgtgtaagtgcatgggaaaggccaaatggactatctattcaggaaatgcgcgtaccacttggtgttgttgggatgatttacgaggcaagaccgaatgtaacagtggatgctgctacaatttgtttgaagacaggaaacgcagtcatattacgtggtagttcttctgctattcattctaataaagccatcgttgccgttattcacagagcgctcaaacaaacaagcttacctcaagaaagtgtacagcttatagaagatacaacgcgagatagcgcaaagcagttgtttacaatgaatgattatctagacgttcttattccaagaggtggcaagcaattaatcgatactgttgtgagggaagcgtctgtcccagtacttgaaacaggtgcgggaaattgtcatgttttcattgatgaaacagcggataaacaaatggcatttgatattataaatgcaaaaacgcagcgtccatctgtatgtaatgcaattgaaacgattgtacttcatgagaagtgggcagagcaatatggtagcgagttgttttcttctttgaagaaaagaggcgtggagctacgtggtgatcaaaaagcattggcaatggattcaacaattgtacttgcttcagaagaagactgggggacagaatttttatctctcacgccagcagttaaattagtttcttctatagaagaagcgattcatcacataaatacgtatggatctatgcattctgaagcgattatttcagaaaacgaggaaaaagtcagcaaatttttcgtatctgttgatgcggctgcactgtatcataatgcatcaactcgttttactgatggatctgaattcggatctggagcagaaattggtatcagtacacaaaagctacacgtaagaggaccaatggggcttcctgcattaacttctacaaaatacgtcattcgtggaaatggacaaattcgaaaa

SEQ ID NO: 9101 - DNA, 984 bp, Bacillus anthracis
atgaaattgagcaagtaccgcaaaataatttcttctatgtttgactttaaaagaaatattgaggtgttagtagtgacagaattaggacaaaagctgaaagaagcaagaggaacgaaaggcttgtctattgatcagctgcatgagattacaaaaattcaaaaacgccatttagtagcgattgaagaaggcaattatgatgtattgccaggagctttttatgcgcgtgcattcattaaacaatacgcagatgcggttggattaaatggagaggaactacttgtagaatatcagagtacgataccacaatctgaaaaacgtgacgttccacaagtatcaacaggacaaaaaacgcaagaaacaatgcaaaaatcttcatcatggccaattgcagatcacatgccgaaaattttagttgcgctgttagtaatcgcagttggagtggtaatttggtttgtttttcaagcgttaactggaaaagatgatgagaaagttccgaatactcaaagtgagaaaattgaagttaaaaaagcggaaaactctccgttagatacgaagaaagatgaagtgaaagcggaagagccgaaaaaagaggaaccaaagaaagaagaaccgaagaaagaggaacaaccagcacagccaactggacaacaagaagtgaaagtatcttgggacaactgggtaaagtatctacttttggaaattcataataataaaacattagaactggaaatatcgggtaagggtgcgagttatgtagatgttaaagatgatgcgggtaacgaagttttaaacactacaatacaagatggtcaaacagaaaaacgagatttatcaacagcaaaagaagtgcgacttaatattggaaatgcaacgaatgttgaagttaaactgaatggccaagtggtcgcttatccattggatccagaaaaagaacttcaccaaagattggtgataaaaaaccaagggatagagcaacctgcacaa

SEQ ID NO: 9102 - DNA, 1277 bp, Bacillus anthracis
gaaaataccgcactaaacaatgagcaatatgcagatccgaaaaagtggcataagcaggatactacatgggcactcagtctatttggaactgcaattggagcaggggtgctctttttaccgattaatgcaggttcaggtggtttattatctttactactaattacattgcttgcatatccagttatgtactactcacatagggcgcttgctaaaatgatatacgcttctaattctgctgatgaagggatcacaggtacaattatgagagtatttcggaaataaagcgagtatcatttttaacatcgtatatttcggtttcaattatacaatcgtactaatgtattcgggtgcgcctacaaacactgcaaagtagtttatcgtgcatcaattgcacatgccagaacctccaagagcaattttatcacttgtattagttcttggtcttatcgctatactaaattttggtcaagatattactgtaaaggtaatgagtatgttagtgtatcctttcatcgtttctctactgtttatcgcaatatctttaattccacagtggaatacgtcaatgctgagtttttcagctgtttcaactgcttcaacaggaacagggctatttgggacgatagtgatgattttaccaatcatcgtattctcatttaatcattcaccctatgattcatcatttgttgtgaaacagagagctacgtatggaatcgaagccactgatgcgaaatgtgcgcaaatacaaaaaggtttgttatattatgacattcgctgttgttatgttcttcgtttggagtagcgcattgagcttgactccagatgatataaaaatggcaaaagaacaaaacctataaatcctttcatttctggggaatgagcttaattcaccctgtaattacgattgcagctccaaatcatgcttttgggggtaattacaaatgtctttccttgggccattatatcggagcatttgaagttaatgcgtgacatgattattaaggtttggtaaatcacgtggaaaagatattgagaaaaaaccaattaagccaataatcccttacttttgtggtattatcatgctgggttgtgctaaatacaaataccaagtattcttggacttattgattctctaagcggtccattagttgctgctatcttatgtctattaccgatgtatgcgattcaaaaagtacccggtattagctaagtacaaggggaaaatgagtaccgtatttgtatttatgtaggggtgtacttactgttttagcaagtat

SEQ ID NO: 9103 - DNA, 222 bp, Bacillus anthracis
atgaaagtgagtcgaggaactatgcttaaaagactacggcaagtatggggacaaaggaaacactttattagtttacttgttggggtaccaagctatgaaacatatgtagagcatatgaaaaagcatcatccagaagaagaagttgtatgtcaaaaacaattttttgcagaagcgcaagaagctagatttaatgcaaagggtggaaaaatatcacgctgttgt

SEQ ID NO: 9104 - DNA, 825 bp, Bacillus anthracis
gtgttaggaacgaaacatattatcgagggaagtcaaaagtacggtataaaacgccttatccacgtatcaacaccaagcatttatttctattatgatgagcgacaaaatgtagtagaaaatgcgaaacttcctgatacgtttgtaaatcactatgcaacaacgaagtacatggctgaacaagctattgatcaagctttcgcgcatggtttaccagttatcacaatacgcccgcgcgctttatttggaccaggagataacgcgattcttccgcgtcttattaaagtatgtgaaaaaggggctttgccgagaattggtacagaaaatgttcttgtggatattacgtatgttgagaatgttgtagatgctttacttctttgtatgcattccccaaaacatacattagggcaaaagtacaatataacaaatgacgaacgtatcaatttatatgaggtcatagaaaatgtaatgaagcgccttgataaggaagtacgatataaaaaaatttcctacaaaactgcttttacactagcggctatattagaaggaatctcaaaaactattttattcggaaaagaacctattcttacaaagtatactgttagtgtcctttcaaaaagccagacgttaagtattgataaagctaaagaagaactaggatatgctccaaaggtcagtatagaaagaaggatttacaaaatttgtagactggtggaaaacacaatgaagatcaaatctttaaagctatatgatacaggatattgtacacatccagaaaaaattgcatactccaagggcagtggaaacaaatctgttttccagccacag

SEQ ID NO: 9105 - DNA, 2215 bp, Bacillus anthracis
atggcaaatgagcaggtactaacagctgaacaggtactcgagaaagcaagtcaatatttagtggatgaagatattgagctagtagcacgtgcctatgaatatgcacgcgatgcacatacgcgaacaatacagaaaatcgggtgaaccgtacattattcatccaattcaagttgcaggtgttttagttgatttacacatggatccagctacagtatcagcaggtttcttacatgatgtagtagaagatacagagattacattagaagatattgaacgggaatttaataaagaaattgctatgcttgtcgatggtgtgacaaagctcggaaagattaaatataaatctcatgagcaacaacaagcagaaaaccatcgcaaaatgtttattgcaatggctcaagatattcgagttattttaattaaactagctgatcgtcttcataacatgcgtacattgaaacatttgcctcaagagaagcagcgtcgcattgcgaatgaaacgttagaaatctttgcacctttggcacatagactcggaattagtactattaaatgggagctagaggatacgtcacttcgctatttaaatccacagcaatattatcgtattgtaaatttaatgaagcgtaaacgtgcagaacgtgaagagtatttagacgaagtaatgactggtattcgtgagaaattagacgaagttgcaattcaaccagagatttctgggagaccaaaacatatttacagtatttatcgtaaaatggcactgcaaaataaacagttcaatgaaatttacgatttattagctgtacgtgtcgttgtaaatagtattaaagattgttatgcaggacttggaattattcatacgtgctgggagccgatgccacgtcgtttttaggattatattgccatgccgaaagcaaatctatatcaatctcttcatacgactgtaattggaccgaaaggtgatccgcttgaagtgcaaattcgtacgaaagaaatgcatgagattgcagaattcgggatcgcggcacactgggcgtataaagaaggaaaaacagcagaaacaacaggtacattatcagaagaaacttacatggttccgtcaaatattagaatggcaaaatgaagcttctaatgcagaagagtttatggagtcgttaaaaattgatttattctctgacatggtattcgtctttacaccgaaaggcgatgtaatggaattgcccactggattctgttccaatgacttttgcatatcgtgtgtatttcagagattgggaaaataaacaaaatggtgcaaaagtaaacggggaaaatgggtgacactttgactataaattaaaaaccaggtgacatcatttgaatttttacatcgaaacattcgtatgggaccaagaccaagtatgcgtgaaactagctcaaacatctcatgcaaataacaaaatacgtcaattctttattaagcaacgtagagatgaaaatattgaaaaaagggcgtggaacttggttgaaaaaaaaaatgcgggagcctccaattttgagaatgaaaaaagggttaaccccctgacaatttaaaaacgggtggctgaaaaaattcaactttgcaaatgaagaagatatgtttgcagcagttggatataatggcatcactgcatcacaaattgttacgcgactaacggacaagttccgtaagcaacgtgaagaagaagagattgttgaagttaaagaagttcgtaaaccgatgaaaattcgaaaatgggattctggcgttaaagtgagcggtgcggataatttattaattcgtttatcaaaatgctgtaacccagtacctggtgatgatatcgttggatatattacgaaaggccgaggcgtatcaattcaccgccgtgattgtgtaaatgttcatacagaagaagcgatagaacgtttattagaagtagagtgggaaggtagtcctgaaaaagaaattgagtataacgttgatattgaaatttcaggttacgatcgccgtggtttattaaacgaagtattacaagctgttacagagacgaaaacgtacatttcagcagtttctggtagaagtgaccgtaataagatggcgacaattaatatgtcaatctctattcgtaacttacagcacttgaaaaaagtagtagaacgcattaaacgtgttccagaaatttatgcagtacgacgcatgatgcattaataggaagtg

SEQ ID NO: 9106 - DNA, 1397 bp, Bacillus anthracis
agatccacgcatgaaaaagtacaggaccatttatttgcagtgcaacaacgtatgacgccaatgagtgtgtggaaagcaaatgcgaacgcaaaatcgttataacgaaaattaggaattacggatttcacagcaactgttggaaatttatctggtgggcagaaaaaacgtattgcgatggcgcagtgttttattgaaacaccggatctattaattttagatgagcctacgaaccatcttgaccatgagacagttgagtggttagaggaatatttagcaaggtacacaggtgggtatttatctggaacccaagattcgtatttcctaggatcgtggacgaattggtattttggaataagataatgaaaaatgtatagtttaggaagggaattccagtccgtttttagaagcgaaagcactttcgtgaagaacaagaacttgcacaagaatcaaaacgtcaaaacttatatcgccgtgaactagcgtggattcgccgtggtgcaaaagctcgttcgacaaagcaaaaggcacgtattcaacgatttgaagagttaaaaggtcaagagggtccagctgcaaaacagtcagtgattatgcgctttagcggtagtcgccctgggaaaaaaagtacttgagttaaaagatgtaacgaaaaaatttggcgataaaacagtattaaacaacttcaatcatatcgtgaaaccaggcgatcgtatcggaattattggagcgaatggaagcgggaaatcttcgctattaaatatgcttgcaggtaaaatatctcctgatagtggtgaaattgaagttgggcaaacagtaaaaatcgcttactatacgcaagaaaatgaagaaatgaatttaaatcaacgtatgattgaatacattaaagaaattgcggaagttattcatacgacagatggaaaagtaattggtgcgtctcaaatgttagaacgtttcttattcccaccgcattcacatggtacacctcttggtaaattatctggcggtgaaagaagacgtttatatttattacgtatattaatgggagaaccgaacgtactattactggatgagcctacgaatgatctagatccacaaacattaactgtattagaagattatttagaagatttttcaggtgtcgttttaactgtatcgcatgaccgttacttcttagataaagtagtagatgaattgttcatctttactggagaaggagaagtgcgcgaatttctaggtagttatacggattatttagaaatggaaaaaacgagagaacttattgagaaagcggaagtacagaaagagaaaaaagtagtagaagaagctccgaaacaacaacgtaagcgtaaactttcatataacgagcaacgcgaatgggaaactatgaagacttccag

SEQ ID NO: 9107 - DNA, 294 bp, Bacillus anthracis
atgaaaattaagcaattcaagccggacttactgctagtaggactaggctcacccaaacaagaagaattcatttatgaaaatctacaaacattaaacattccgctatctataggtatcggaggtatgatcgatataatttctggtactgtaaaaagagcaccgaaaattatgagggatacaggaactgaatggttatatagattactctcacagccgaaaagaataaagagacaactcgtacttccgaaatttttaatttcagttatggtagagaggatgaaaggaacatcaagt

SEQ ID NO: 9108 - DNA, 1389 bp, Bacillus anthracis
atgcaacactcaaacaaatctggaactttaaaccgcggtttaaaagaacgacatattactttaatgtcactcggttcagctattggcgttggactatttttaggatctgcttctgctattaaactagctgggccctctattttactaggatatatgattgctggactcgttatttttttcattatgcgagcgctcggagaaatggcaattgaacaacctgttgccggctcttttagtaaatatgcatatgattatctcggaccgctagctggttatattacaggttggaactactggttcttatgggttgttacttgcatggctgaaattacagcagctggcatttacatgcagtactggttcccagatattccgcgttggacttgggcgctactcgctttattattaatgagcgctttcaacttcttatccgtaaaagtatttggagaacttgaattttggtttgctcttattaaaattgtcacaattatctgtatgatagtagttggagctggtattattttattcggattcggaaatggcggaatagccaccggtatttcaaacctttggtcacatggtggctggtttccaaatggattttctgggttactactctccatgcaaatggtattattcgcttatttaggcgttgaattaatcggtgttacagctggtgaagctcaaaacccgaagaaaacactcgcaaaagcaatcgataacgtattttggagaatattactgttctacgttggagctctattcgttatgatggcaatttatccatggaacgaactgggtgagaaaggaagtccatttgtattaacatttcaacaaatcggtattgcaaaagcagcagggattattaactttgtcgtattaacagcagctctttcatcttgtaatggtggtttatttagtacaggccgtatgctatatacattagctcagcaaaagaaagcacctgaaagattcggtcgtttaaataaaaatggcattccaagtcaaggaattgtagcaactgcgatcgttttactcattggcgttatattaaactatctcgtacctgcaaaggtatttacatggctcactagtatttccactttcggcgcgatttggacttggggaatcatattagtcgctcaaattaaattccgtaaaagtttgccaacgcaaaacagacaaaagttatcgtataaaatgcccttatacccattaagttcatatttctcacttgctttccttgtactagtattaggtataatggcgtattcagaagatacacgaatcgcattaatcgtcggtcctatttggcttatcggcttagctatcgtgtactacatgaaagggtttcataagattgatgaaacacctaattcaaaaattagt

SEQ ID NO: 9109 - DNA, 828 bp, Bacillus anthracis
atgtctgtatgtcataaacattcagtaataggtgtgctagattcgggagttgggggattaacagttgcgagcgaaattataagacaattgcctaaagagagcatttgttatattggtgataatgagcgttgtccgtatgggccaagaagtgtagaagaggtacaatctttcgtatttgaaatggttgagtttctcaaacagtttccgttaaaggctctagttgtagcatgtaatactgctgcagctgctacattggctgcgttgcaagaagcactttctattccggttattggcgttatacatccgggagcaagagcggctattaaagtgacaaagaaagggaaaatcggagtaattggaactgtaggtacgatacagtctaatatgtacgaaaaagcattgcatgagcttgatacatatttgaaagtgcatagtcatgcgtgcccgactttagctacagttgtagaaaatcgattagaagataccgcatatgtcacgcagcaagtgaaacaagctttacttccattaacgaaagaagatatagatacgttaattcttgggtgtacgcattatccacttttagagtcctatattaaaaaggaactaggagaggatgtaacgattattagttctgcagaagaaacagcgatagagttaagcacaattttacagcacaaaggaattctggctgacaatctgaatccgaagcatcgattttttacaacaggctctgtttcttcatttgaacatatcgctgagcgttggctagggtatcaaatttctgtagattgtgtggatttacctgtaaagaatgctcgcatctgtaat

SEQ ID NO: 9110 - DNA, 1656 bp, Bacillus anthracis
atgaaaaagtttcaaatcgaactaaataaactgccgacagaaaataccggagaaatagtaattagtatagatgagagtattgtgttgcaagaaaaaacagacataatcgccccgatttgtcagttgtttgacgcatggggtgaatgttttaaagatgatggtgctgtgatttttttagatggatatgaaaaaaaggtagagtttaagaagaaagatggggagtttctcattattaatcagagaggcaagaagttagctagtgttaatagcgagcaatttttacgagtactcttttcgtttcttaaaaaggagatagggcagatttacatgagtggagttgattctttccgaataaaagatgcgtatcatagaattttagaaattgagccatttctttctgaacttataaatggaaataacgcaattatgtaccgaacatatcattctacaagtggtaagtatgaattaaactggaattatttaaaggggatagaggttgaaccgatatttactccggtactatctcatgatgagaagagtatcttttatgtagaggaaaataaccacaaaattcgtaaactcgatagtgaaacgaaagaagagatttggcagtgtcatattccactagtagaagattgtaattgcataactgtgaatggtgtcacagttatttggcatgcgaatagatttggagaaaatattgcgaaattgtacgctatttcatcaagttctggggagtttctatggaatttagaaatagaaggacatattatacaagatgtaaaaactacgagggaagaattaccacgtttattagttattacacaggaaggctacaatgttttattagatcttgaaagtggagtaaaagtatgggaaaagaatgttcgagtcggaggggaaaaattgcagtgccatcttggcccagattactatgtattagcagggaatccttctgatgaagatggggaaatggatgtatatagtaacgctacaattgccattcaattattagacgcttctacacgatggaaacaaacaattgaagaatgtaatccaaatgaacaagttgctttaactaatgaacattttatatgtgtagcaatggaggtattacaaaagtgggaatacggaaaagaggggtgtaactcaatttttgaaaaagctcttgatgaggcctggtattctcacattgcatcagatgaatcaaaaatactattaacaagaacagagtatggatatgaagatataagtaggcaaatacaatgttatgatcataagaatagtcaaaaattatatgaagtaaatatgccgtctgaaattgaattgcctccatttcttatcggagagatgatggtattgtccttaggagaaggcagaatttgtggtattaatattcaaacaggtaaagtgctttggaacaataatactctacatgatattacagaggttttgttatataaaggtggagaaatttacattgcaacttcaaatttagaattgataatacttgatgctacatgtggggaggtaaaagatataattaaactgcctaaaaatgttgttgcaatagattttattgtatcaattgaggaagttaatgatgcattattcattagttgcgtaagtggaaatatgtttgaaatagtagaaagc

SEQ ID NO: 9111 - DNA, 1112 bp, Bacillus anthracis
caagtgatttatgccattttggcatctttcatcactgtactcgtagttttgacctttagttattaagttagctttaaaattaggagcaacagataagccaaacgcacgtaaagtccaccaaaaagattatgctcgttcttggcgggttagcgatatttatgggtgtggctgttgaatttgttgtcggtggcttatacgaacaaagaatgttatcgataacgctaggtgcgattatcattgtaatcatcggtaattttagatgatatgtacgagttaatctgcgaaggtaaattttcgtggacaactatttagttgccattatgatttgtaaaaaagtggattattagtgcaagtattatatattccaatcctcgggggatactgaacttggatggcttgcttacccaattacagtattttggattgtaggtattacaaatgcaatcaacttaattgcatggcttagatggattatctgctggtatttcatctatcgtacttgcaacgctagcgtatatggccttcactagcccatggggcactggaacagctatcattttacctctagcactaattgcacttgcaagtacacttggatttttattctacaacttccatccggcaaaaattttcatgggagatacaggagcactatttttaggatactgtatttctgttatatcgttacttgggattatacaaaagtggtacggttattcagcttttatcgttcccgtttatcattttaagcgtacctgtatttgataccaacatttgcaattattccctcctatcctaaataaaaaaccttttttcccacccgataaaattgccttttcattcacccctttactttgcaatgggggttctccctctccaaaaaccgggactaattatatacgcattcggtattttctttagtgtaaatgcaatcattttctctagtgcgacattatggttatccattattcttcttttcattttaatcttctttacagagattattgctgaagtaattcggttttgtacatgaacgttacaaaccacttatttccttttataaaaaagtgaaaaaacgcgcgaaggcttatttgggagtaagcctttatctt

SEQ ID NO: 9112 - DNA, 2019 bp, Bacillus anthracis
atgaaattgaagaacactcacttaaaaaaaatgcaggagtggttcaacaagagaaagaagcttcgtaatttattaattatattaggaagtttactcgctactctatttattgctataaatataataatttccattcaagacatatctgaattaaagcaagctgttccgcaaccgactttaatttatgatgcaaataatgaagttgcgactaaattagcttcttctaaaacagaaggtgtgaaaagaaaagatattcctgatattatggttcaagcaattgttgcagtagaagataaggaattttttaaccatcacggtatttattatagtggaattataagtgcgatttttaaaaatattacagcaggagaagttgtagcagggggaagtacaattacacaacaacttgcgaaaaatgtatttctgacacaagaccgcacatactctcgaaaaataaaggaatattttttaacaaaaaaaatagagcgtacgtatacgaaagatgaaatcattgaaatgtatatgaaccaaatttattttggtgaaggtgcttggggtataaaaagggcagctaaatcttattttgataaagatgtaaaagatttaacaatttcagaagctgcaacgattgcaggcttgattaaagcaccatctgcgtattcaccttataaaaactttaacaagtcaattgaaagacgtaatgtcgtattaagtttaatgaaagagcaagggtatatttctgacgaacagtataataaagaaaaagagagcgggcttgtgttaaaacgtggcgttgatgataaatacaagggaaaatactctcaatatgtagactatattgttagagaagcgatggacaagtacgaattaacacaaaatgaaattttagcaggtggttatcgtatttatacagagcttgatccgaaaaaacaacaggctgtagaagacgttgtgaataatgatagttatttcaaagatagtggctcagaccaacttatgcaaacgggtgtagttcttatgaatccaacaacaggtggtgtaccagctctagtaggaggcagagggccttatcagtttttacagtttaaccatgcaacacaattaaaaagacaacctggttcaacgctaaagcctttggctgtatatgtaccagcgttagaacaaggatatgaagtatacgatatattaaaagatgaaccatttaacattaaagaatataaaccacaaaatagcgatcatacttttcacggtgatgtgacaatgtatgaagctgtggcaaaatcgtataatgtttcggctgtgtggctattagaacaaattggattagataaaggattgaaatctttagagcgatttggtattccattagtaccagaagatcgtacgtatccgattgctttaggcggtatgcatgtggggacatctccatttgtaatggctcaagcatacagtacatttgcaaatgacggtgtccaagtggaagctcatgcaattagagagatacaaaatgctgaaggtgaaacgattggaaagtggtataagaaagagacacgagtgacgagcgagaaaatttctcaaaagatgacatatttattaaagggtgttgtcgaaaagggaacaggcgaaaaggcgaaagttactaatgttgatacagcaggtaagacaggaactactcaaattgtaaatggcccgagcaccggtgcaaaggattcatggtttgttggatacacaccagatttggtaggtgcgatttgggtaggatatgataaaacagatagcgatcattatgttccaggtggtagtcaaattacgacgacaatgttccgggatattatgaaaaaagcgaacgcaaatccagctcaaaaagcattccagttatcactcatatctgaggctgattataaaaaacaattgactacaatagaagaggaaaaacgaagaaaagaagaagaacaacaacgaaaacaagagcagcaagagtggcttgataaagtgaaagaatggattccttcattttgg

SEQ ID NO: 9113 - DNA, 2468 bp, Bacillus anthracis
catgcaatggatttgtttgaggaagaaaaaaagtttataaaagcgcaagtttttcataccattttcctcatggaagacatcctttattccgttgtcagtatgaaagtcattgaatagaatgaagcgtgcgatgaaaaagaagtgatgataaacggtcatttttgcccgcatgcatgaagatgaagtgtttacgttgacaggacattttaaagaccatccgaagtatgggaaacaatatttagtttgaacgttttaagaaagaattgccgcaaacaaaagcaggtatggcgcaatatttagcgagtgatctatttaaagggataggaaaacgcacagctgaaaaaattgtggcccatctaggggaacatgctatttctaaaatcatggatgatcctgaggctttaaacggtgttgttaacaaacaaaaagcgcaagaaatatatgagacaattgttgaacatcaaggattagagaaagtaatgagttttttaaatggttacggttttggaacgaagctttctattaagatttatcagcaatataaagagatgacattagaagtaattcgtaataacccatatcagcttattgaagaagtggatgggattggatttgaaagagcgatagatttcgggcgtcgcgtagggatatcgggtaaatcatgatgatcgtgtacgtgcgggatgtttttatacgttagagaatgtgtcattacaacttggtcacgtttatatgagaaaagatcaacttgtaagagaaacgatgtcacttttaaataatcaagaaggaagagtgacagaggaagacattataagctgtattgaaatgatgcaaagtgaagggaaagtcatcatcgaaagaagagcgagtatatttggcatcgttattctattctgaaaaaagtgttgtgaagtctattcgcaggctcatgaatcaggaagaaaccacttcattccctggagcaaaaatgttaaagacgttaggtgaaaattgaagaacaattgaacgtacagtatgcttactcttcagcaagaagcatttccaacggcacttcataaaccgatgatgttaattgacagggtggaccaggatacagggaaaaacaacagttattaaaggaattggtgaaatgtatgcgtcccttcaggggttatcgtaaaatcagaaatgaatatagtgatgatgatccatttcctgatactattagcagctccagcagggatgagctgcgaaatcgaatgagtgaaatccacatgggctgcgcgcttgcacaattcaccgtttacttgggatggacgccagaagtgttcttcccagcgtaatgaaacagatccggtacagaggggaaatacctcattattgatgaatttttcaatggttgatatttggcttgcaaaatcagctgtttaagtcattgccgactaacattcaagttatcgtttgtaggcgatgaagatcaattaccatctgtaggacctgggcaagtattgaaagatttattaaatgaaaggtgcagttccaaccagtaaagcttactggaatttatcgtcaagcggaaggtttcatcagtgattcaacttgccccatgcgataaaaaatgaaaaccctcccaccagatttagcgcaaaatcaaaaacgcctcttttatttattccgctgcacaggacctcaatttgttgaaatttgttaaaaaaggttgcgaaaacgctaagacaaaagggtttagcgcaagagatgtacaagtattggccccgatgtatcgtggaccggctggtattaatgtactaaatgaagccgttgcaagaagtgtttaatccgaaaagagaaaagagtaaagaaattgcttacggtgatgttgtataccgaagaggcgataaagttttgcaactcgttaatcagcccagagagccaagtatttaatggtgatatcggcgaaattgtttcggtgttttatgcgaaagaaaacgtgagcccaacaagatatgattatcgtttcattggagggaattggaggaaacatatccaaaacccggttttaaatcaaattacccatgctttattgctgttccatttcataatcgcaagggtagtgagttttccctttgggattttgccgatagtggaaaggtataatcccatggtacgccggaattttaattttacctggaattacaagaagaaaaaaattcccttattatttgcgggggaggaagctgcttttcagtctggtgtaaatcgccttgatgatgcaatgcgtcaaacgactttagctagccgcttgcaagaatcacaaggagaagtacagatggtaacggttaatggcgaaggagatggacgtggaaaacatttcaccgtatgatttcatgtaacaaggtgaaattatatagtgaaactttcaaacgtataacgttgaaaggctccagcaatgtataaatgaatgcagtttggacataatggcgaatagaatt

SEQ ID NO: 9114 - DNA, 1224 bp, Bacillus anthracis
gctggaaataatgtatggatagccaatgcaggctttttagttactggagttgtttctccattgttagcaataacagcatttgttttttcaagtgaaagtggtttgcaatctttagctagacgggtacatccggggtttggcattgtatttgcgatcgttctctatctagcgattggtccccttttatgccatccctagatctggaactgtatcatttgaaattggaattaaaccgtttttatcaaatgatgcaggtcctgctgcattaaccgtatttacaatcttatttttcatagttacatgcttattatcccttaatcctacaaaaacttgttgatatagttgggaaaattttgactcctatcaaattgactgttattgggatgctcgtagttgttgcttttattcacccaattggaagaattcaggcacctagtgaagtgtatgcatcagatgcattttttaaaggttttcaagaagggtatttaacattagatgctcttggagcttttgttttcggaattattattgtgaatgcaattagagaaaaaggggctactactaaaaagcagcttatggttgtttgtgtaaaagcaacgactattgctgctacactcttagctcttatctatactgccctttcctatatgggcgcttctagtgtagaaaaactaggtcatttaaataatggggctgaagttttagcaaaagtttcggactattactttggttcgtatggtgcaattttcttaggtgtaatgattatagtagcatgtttaatcacaagcgtaggacttatcactgcttgttcttctttttttcataaattatttccaaagatttcttacaaaaaacttgctattattttgtctgttttcagtacactagttgcgaatatagggttaacacaattaattaagaatttcatccctgtattaataactatgtatcccaattgctattaccttaatatttctaacatttttacactctgtattcaatggtagatttgaagtatatcaagggagtttgatattgacatttatttttagttcgttagatggattaaaagctgctggaatagaaagcgaaataatccataatttttttgagcactttcttcctttatatagtgtaggtttagggtggggatttccggctattataggcggtgtatgtgggtatgttgttagtgtattacggaagaaaaataccttaagttct

SEQ ID NO: 9115 - DNA, 288 bp, Bacillus anthracis
atgcaaaatcaagcattctcttatgacgctgctcctgacttattaattattacttgtatagatgataacaaactaggacaatttattttccctaaagatattcttcttaaagaaaaaatcttgagaacacaaaatcaaaaaggcaagatggctatgaggatttatccgatctgggatacccctgttagcaaccaagctaaaaagagccaaatgtggcagcttcagtattttgttgatttaagcgatcataataatttacctatagacaaactattacatttgtattcg

SEQ ID NO: 9116 - DNA, 492 bp, Bacillus anthracis
atgtttaaaattcaagaagttcgtgaattaattaaattaattgatagctctaatattgatgaatttgaatacaaaaaagatggtacgacaatcaaaatgaaaaagcgtggtaatgaagttgttgcggtgcaagcacctgtagcgaaacaagccgtgcaaccagtagcacctgttgaagttgaaacgacagtagcggcagcgcaagtggaagtaccaaaacaagaagagaaaaaagctgttcagaatgaaaacctacataaaattacatcaccaatggtaggtacattctattcttcttcttcttcttctcctgatacacctccatatgtaagtgtaggagatagagtatcgaaagattctatcgtatgtattgtcgaggctatgaagttatttaacgaaatcgatgcagatgtagatggcgaaattgttgagattcttgttaataacggacaacttgtagagtatggacaaccgctatttcttgtaaaagcg

SEQ ID NO: 9117 - DNA, 711 bp, Bacillus anthracis
atgttgaaattaattcaaaatgaatttttaaagttgcatgcgaaaaaaggtatgtatattttaattggtgttattgcagtattggagattttgggagttttagcgatgatgaaatggggagacggaactgaatttaaaggatcctatttagattttgcaagttcagagattggtttaattactttgtttgcaacgatatttggaattacgattgcttctcgtatgattacggatgagttccaaaaaggtacaattaagcagttattaatccgtccaagaaaacgaatgacagttttattctctaaatatattacagtgttacttactataatatttatcatatttgctagcacgttaattgcaatgattattggtggaattgtaatggacggtagtaaaacagaattaacgataggaatcgtaatgaaatctactttatatcaagtactttcaccgctcttctttgcgacgcttgcatttttcttagcaaacgtatttagaacatctgtattaccattaattattacgatgttcctgttcttcttaccaggagcaattaatatggtattaatgatggttgcaaaaggcgtagcgaagtttatagtattcttccatttggatttacgagcttacgatgggcataaattaattagtgggcggagtagaacctacattcacagaatttacgtttacaacttcgttattacctgg

SEQ ID NO: 9118 - DNA, 2382 bp, Bacillus anthracis
atggctgagtttggggccggtgtagataaatctatgcaagaggttttagataaaacaaagatttcggcagatcagtttgaaaaatggggtcaggcaattgctggtggcggtgaaaatggacaaaaagctatgcttgaagcaacaaaggccttagctggtgttgaaaatgcaacagacagaaatgcacttggcacgaagatgttcggtactctttgggaagaccaaggaaagaaaattatagacaccatcttgaaagcagaaggtaaacaagttgatttgaaaaaaggagtagaggacttacatggtgctacttctaaaatagatgcaagtccagcagtgaaattccaaaaggcaatgcaagatttacaaatggctctccaaccggtacttggagtaatagcagatgttgttgctaaaatagctgattggatttctaataatcctaaattggcagctacattggcagccattgcagtagcggcaggagtaatagcaggagcatttatggctttagcaccaatagttgttgtcatatcgggtgtaggggcagcaatgatggggtgggtagcgttaattgctatagttgtagccgcagttgtggctttaggtattgcaatttatcaaaattgggattccataaaacaatggaccattgatgcctggaatgcaattggagaattcttagtaggaatatgggatgggattgtgcaatgggcaagtgaagcgtggaatagcattagtgaatctacatcagcagtttggaactcaattaaggagtttttaatagggatatggaatggcattgtagagtttgttgtaacctggggaaccgctattctagaagcatacgttggtatttggacatctatttttaatttctgtatggaaatctggaatgggatagttgaatatttaacttcagttttgcaggggatagccacgttctttacagaaatatggacttctatttctacattctttcaagagacttggaatggattagtggcttttataactcctattttacaagggattgctgatttcttctctatgatttggaatggtatttctacagtgatccaaactgtatggaatttcattactcaatacttacaagcgatttggacggctattttatactttgctactccattatttgaaagtatcaagaatttcatttctgaatgttggaatacaattagttctactacaagttttgtatgggaaacgattaagaatttcttagtttcctgttggaatggacttgtagcatttgttatgccgatttttgaacaaatcaagtcttggatcattagtgtatgggatacaatcagttcagcgacaatgacagtatggaatgctgttaagaatttcttacagtcatgctggaacgggttagtagcttttgtaacgccaatattcaattcaataaaagattggattataaatacttggaacacgattagttccacaacaagtgctgtatggaatacgattaaaagcttcctttctggcttatggaactcaattgtttccacagcaagttccgtattcaataacatcaaagaagctatttcaactgtatggaatatgattagtagcacaagcagtagtatatggaatggtattaaatctactctttcaaatatttgggaaggtattaaatcaaccgcatcttctgtatggaatggattaaaagatgccattatgactcctgttagatgggtaacaaatgctgtgagtggagcattcgagggaatgaagtcagcagtattaggcgtgtgggatggaattaagagtggtattcgtacagctatcaacggaatcattcgtattattaataagttcatagatggctttaatacaccagcagaattgttaaataatataccaggagtaagtgctccaactattccacatgtaccaatgcttgctaaaggtggaaaacctgtaggtgatggttcatttattacaggtgaagctggaccggaattatttacgaaaaagggtaattcaattacagttacacctttatcatcaaaagaaaaatcactcggtattactgggactatgaatcaattaatgggtgatatgagtcggatgatggctagttctatgagtcaattagctggattaaagtctgttatgagtggtgtatatggaagtatgtcaaatagtagacaagccatggctggtaatatcgcaaatcaagtattcaattattcatcagggcaaactggtggtaatgaattaattccagcacaaggtggcgatttggtaattgaagtaccagttattttagatggtagagacttagcacgcggtacttttcggtatacaaaagaataccaagaaagagaagagaaaagaaactcagacttt

SEQ ID NO: 9119 - DNA, 898 bp, Bacillus anthracis
gaaactatgccgcagcaaaacaactttgtaacaatgccagcgcaacatcaaaaacaacaggctggcattgaatcattaatgaatcctctaccgcaggttgaaggatcccaattataaaagaagccgaaagctaaaaggaaagaatgtatttattacaagtggagatagcggaatttggacgaactgtttccatcgccttttgcgaaagagggagcaaatattgcgattgcgtatttagatgaggagggagatgcaaatgagacgaaacaatatgttgagaaagaaggcgtaaagtgtgtattgttgccaggtgatttaagtgatgaacagcattgtaaagatattgtacaagagactgtccggcagctaggtagtttaaatattttagtaaataatgtcgcgcagcaatatccgcagcaaggactagagtatattatttcagaacagttagaaaagacttttcgtattaatattttttcttattttcatgtacgaaaaagcagcactttctcattaaaagcaagggggatgtcattataaatacggcatctatcgttgcatatgaaggaaatgaaacgttaattgattattccgcaacgaaaggagctatcgatgctttcacaagatcactttctcaatggatagtgcaaaaaaggtatttgtgtaaatgggtgttgcgccaggaccaatttggacaccacttattccatcaagctttgatgagaaaaaagtatcacagtttgggagcaatgttccgatgcaaagacctggtcaaccatatgaattagcgccagcatatgtatatttagcgtctagtgattcatcctatgttaccgggcaaatgatacatgtaaatgggggcggttttggaaatgggtaagttctcattataaagagc

SEQ ID NO: 9120 - DNA, 984 bp, Bacillus anthracis
atgtgtactagtttgacattagagacaaaaaacggtcagcatctttttgcaagaacgatggacttcacattagatatgaatcaagaagtaataatcattcctcgacattaccagtggaataatataacgggtgaaatcattaatacgaaacatgctacggtcggaatgggtattaatcatcaaggaaggatcattatggcggacggagtaaatgaagcaggtatgacatgtgcaacactctattttccaggattcgctacttatagtcaaagcatagatgacaacacaacgaatttggctccatttgattttgtaacttggagtctgacacaattcaattctgtcaaagagttaaagaaatctgtagatagcattacctttttggatataccattaccggatttaggacttacgccaccactacattggattttagcggataaatggggagattgcattgtactggatccgacaagtgaaggattaaaattgtatgataacccactaggagtgatgacgaatagtccggagtttaattggcatttacaaaatttaagacaatatataggccttaaatcgcagccattcgcgccaacagagtggagtaatttaccattaagtgcttttggccaaggctcgggctcaatgggacttccaggggatttcaccccgccatcgaggtttgtgcgggcagcatatggcaaacaaaacattcaaggtatagatagcgaagaagagggagtatcagccctttttcatatcttatcaaattgtgaggttcctaaaggtggagtaataacagaagaaggtgcattagataataccatatatacaagcgtaatgtgtatggaatccggaacatattattatcatacttacgattgtagacaaattatagctgttcatttatttcatgaaaatttagatacagatgagattaaagcctatccgttccaacggaaacaaaaaatattttatgagaac

SEQ ID NO: 9121 - DNA, 609 bp, Bacillus anthracis
atgatgaaacatgtttttcaaaaaggaaaagatacgtcaaaaccagtgttgttattgcttcatggtacaggaggtaatgaattagatttattaccacttgcagaaataatggacccagaagcatctgtattaagtgttaggggaaatgtattagaaaatggcatgccacgttttttccgccgattggcagaaggcatttttgatgaagaagatttgattttccgtacgaaggaattaaatgaatttttagatggagctgcaaaaacatatgaatttgatagaaataacattgtagctatcggttattcaaatggagcaaacattgctgcaagtttattattccattacgataatgcattaaaaggcgctgtgcttcatcacccaatggtgcctagaagaggaacacaattgcctaatttagcaggaaaatccgtgtttatcgctgctgggacaaatgacccgatttgttcatcagcagagtcagaggaattgaaggtactattagaaaatgcaaacgctaatgtaacaatgcattgggaaaatagaggtcatcaattaacaatgggtgaagtagaaaaagcaaaagaatggtatgaaaatacagtacta

SEQ ID NO: 9122 - DNA, 1405 bp, Bacillus anthracis
cgtatgtttacgatggtacagaagctttggttgacagtagtatgtgcagtatttgtaacagtttcctttctttactttgtatctttatattcgtatgaaaaactatatgttgataatttaaaagattcattagtaatggaagggaagcgtcttgctgcgccatacgataagagcgaaaggatatcaactttttgtaaagaaagtaagagcgtttgatcaaatatctatgttccatgtacttttcgtgtctaatccacgtgatttaagtgcatgtttaccatttgatgtgcaccatcattctcttataagtgaaggggataggcaagctttattagatggaaaaactgtgacaaagatagggtatgaggaacattttgaacgtaatattatgggggttgtcattcctgttttagaaaataaaaaattagttggcattgtatattcttatattcctttaaaaagtataaaagactttatatatgatatgggccttattttagcaccgctagcacttgctattactttactgacaatatggatttgggtagaaaattattatttgctattacgagacccactttcgcaaatggaacgagttgccaatcatttggctacgggagatttctcagaacgaattacaatttcttctgaagatgaaattggacgattaggaaaagcatttaataaaatggcaaattctttagagacagaagacgtaaagcgtaacgagtttttagctaacgtttcgcatgaactaagaacaccactttagttatataaaagggtattgcgaggctattttaaatggtgtaaccgaaggaaccgcacaagaaaaaatgaaacacgctctttcctaaagaaaccaattcgtatgcaacgtctcgttcatgatttattagaattagcacaatttagaaggggaacattttccgttacagaaacaacctattgttttttcacaactaattgaagatgtgctagatacgtatgagattaagtttatagaaaagaaaattcgtatttcaacaaatttaaatccagaaatcattgtaatgattgatgaggatcgtatgcaacaagtgcttcataacgtgttagataatgcgatacggtatacaaatcaaaagcggggatattatgataacgctcaggcagatagatgattactgtgaattgagcataaaagatacaggaatcggtattgatacggagcatttagaaaaccttggcgaacgtttttacagagtcgataaagcgagaagtcgtcaacatggtggaacagggttaggcctggcaattgtaagacaaattggtcatatacatgatggacagtgggcaaattgaaagcgaaaaagggaatggaacgacggttagtattaaattgaaagtacagaatgaggagagc

SEQ ID NO: 9123 - DNA, 900 bp, Bacillus anthracis
atggccctttttttaaaatataaaaataggcttacttggcgaaggaaagggtgccttgtattgaaaaaagagaaacttcggacagaaaatatatcatttcaatatcctggtgcagccacttatgcattaaaagatgtttcattctccttatttgaaggagaatgggtatctgttattggacaaaacggttcagggaagtctacacttgcaaaattattgaatggtttgtttttgccggaagcagggacaattacagtaaatgatacaatgattttgtcagaggaaacggtatgggatgttcgaaaacaaattgggatggtatttcaaaatccagataatcaatttgttggaacgacagtgcaagatgacgttgtctttgggttagagaatattggaatgccaagagaacaaatggtagaaagattaaatcaggctttacgactagtccgtatggaagattttcttaatgatgagcctcattcgttatctggtggacaaaagcagcgagtagcaatagcaggcgttttagcacttcagccatctattttgatattagatgaagcaacgtcaatgctagaccctcaagggagacgtgaagtagtagaaacggttagacaacttgttaatgaaaaaggtattactgtgttatcaattacgcacgatttagaagaagcggcacaatcagaccgtgtcattattttaaataagggagagatattagaggaagggactccagaacaaattttcaagtcctctcatatgctccaagaaattggattagatgtaccattttcagtgaaaatagcagaattattaaaaagaaatgaaattctcttgcaaaatacgcatcttacaatggaaagcttggtgaacgaactttggagattacattccaaaaag

SEQ ID NO: 9124 - DNA, 1157 bp, Bacillus anthracis
attgctacaggaattcttgctggaagtttactatcatattctactagtattgttgcagatactcacagattcccagatgttcctgcatgggctgacaaatccgttacttatttagttgataaacaagtattgagtggttatccagatgggacttttggttcaagtgatacactagatagagcttctgcagcaacaattatgactaacggctcttggtatacacattgatttaaatgcaaaaccatcttttaaagattcacaaaaccactggggaaccccttatatgcccgcagctgaaaaggcaggatccattaaagttgaagggaaatggaatatttaatccttctggaaaagttactcgtgctgctatggctactatgctagtgaatgcatataaactacaaaataaaaacactagcaatggacaaagtaaatttgaagaatttaaggggcactgggggggaaagatccccaatactttaattggttttgaaaatttcagttggtacagataatggctggcaaccaaataaattcataacacgcgctgaagctgcacaactaactgcaaaaacagatatgcttcaatatagtcatagtaatcctttagaaaataaaaccataattattgatcccggacatggtggcgaagatcctggaaaagacacaaagggattaccctgaaagtaagattgtactagacacttctttacgtctacaaaaattgcttgaaaaacatacaccatttacagttttactaaactcgtaatctgatactagaacaggacatggatcaaaaagctctttacaagaacgtgggaaatttgctaaaacaaaacaaggggatatccttataatgggtcatgcaaatgcctttaatggaaatggcaaaaggaccgaaacatactactattaatcttccaaatctgaaaaaacaaatcctcatgtggaaaaaaagccgggtttttcctggaaaaattcaaactcgattagtagacgctcttcaaacacgtgatagaggcgttaaacatggagatcttcatgttataagagaaaatgacatgccagctgtgttaacggaacttgcttttatagataatggtatcgattagcggacgttatctacagaaaacccccgtagatatagcagaagccat

SEQ ID NO: 9125 - DNA, 624 bp, Bacillus anthracis
atgaagggattatttgtaacaattgaaggtccagaaggttcgggtaaaacaacattaattcaaagtttattgccatactttgaacaaaaggaacaaaaggtaatggcgacgagagaaccgggtggtattgcaatttctgaggatattagaacgattttacataaacaagaatatacgatgatggaagcacgtacagaggcactattatatgctgctgcacgtagacagcatttagtagaaaaagttatgccggcgcttaatgaggattaccttgtattatgtgatcgttttatagatagctctttagcgtatcaaggatatgcaagaggattaggtatggataaagtatttgaaataaatcgtttcgcaacagaggactgtatgcctagtttaacaatttacttagatattgagccagaggttggcttagcgcgaattgcaaaagatgcaggacgtgaagtgaatcggttagatatggaagatatctctttccataaacgtgtgcgtgaagggtatttacaagttgtagaacgtttttcggatcgtattgtattagtaaatgctgatcaaccaatggaaaaacttatagaagaagttattcaggttatagaagataaattgtta

SEQ ID NO: 9126 - DNA, 183 bp, Bacillus anthracis
gtggctaaaaaatctatgatagcgaaacaaaagcgtactcctaagtttaaagtacaagagtatacacgttgcgaacgctgcggtcgtccgcattctgtataccgcaaatttaaactttgccgtatttgtttccgtgaacttgcatataaaggtcaaattcctggtgttaaaaaagctagttgg

SEQ ID NO: 9127 - DNA, 1419 bp, Bacillus anthracis
atggcaaaagaatatgatttagtcatcgttggcggcggtactggcggatatgttgctgcaattcgtgcatcacaactaggtttaaaaactgcacttgttgaaaaagaaaatcttggtggtacttgtttacacaaaggatgtattcctagtaaagcccttttacgtagtgcggaagtatacgcaactgctaaaaaaagcgaagagttcggggttattgcaagtaatgtagaactaaactttgcgaaagtacaagagcgtaaagagaagattgtaacgcaacttcataaaggtgttcagcacttaatgaaacaaggtaaaattgatgtgtttgaaggtattggccgtattcttggcccatctattttctctccgatgccagggacaatttcagttgaacttgcaagtggagaagagaatgaaatgttaattccaaaaaatgtacttattgcaacaggttctcgtccgaattcattaccaggtttagaattagacggagagtatgtaatgtcttccgatcatgccctaaaaatggaaacgcttcccagctcgattattatcgttggtggcggtgtaattggtatcgagtgggcatctatgcttgctgacttcggtgtagaagttacagtattagagtatgcgaaaacgatactaccattagaagatcaagacgtttcaaaagaaatgcaacgtctattcaagaaaaaaggtattaaagtggtaactggtgcaaaagtattaccagaaacattggtaaaagataatggagtaacaattcaagctgaacataacggtgagaataaagaatttaaagcagaaaaaatgcttgtatctgtaggacgacaagccaatacgcaaaatattggtttagagaatacggatatcgttgtggaaaaaggatacattcaaacaaatgagttttatcaaacgaaagaatctcatatttacgcaatcggtgatgtaatcggtggcttacagcttgctcacgttgcttctcatgaaggaattgttgcagtagaacatattgctggtaaagaagttacaccaattgattattctatggtatcaaaatgcgtatatagcagtccggaagttgcttctgtcggtttaacagaacaagaagcgaaagaaaaaggctataagttaaaagtaggtaagttctcattccgtgcaatcgggaaagcacttgtatacggcgaatcagatggtttcgtaaaacttgtagttgatgaagaaacaaatgacattctcggtgttcatatgattggaccacatgtaacagatatgatttctgaagcaggtcttgcaagagtacttgatgcaacaccttgggaagtagcacatacaattcatccgcatccatcattatctgaggcgattggtgaagcagcattagctgtagatggaaaagcgttacacgca

SEQ ID NO: 9128 - DNA, 1971 bp, Bacillus anthracis
gtgctgattggaaaacgcttaaatgaccgttataagctgctgaaaatgattggtggcggtggaatggccaatgtgtatttagctcatgatgatatactgggccgggatgtagcggtgaaaatattaagactcgactattcaaataacgaagagtttattaaacgtttccatcgagaagcgcagtctgttacaacgttgtcgcatccaaatattgtgaatatgtatgatgtcggagaagaggatggtatatattatcttgtaatggagtatgtaccaggacaaacattgaagcaatacataattgagcgagggatgttacctattggagaagctcttgacataatggagcagttaacatccgccatggcacatgcccatcattttgaaattgtgcaccgtgatattaaaccgcacaatattttaattcgagctgatggagtaataaaagtaacagattttggaattgcgacagctacaagtgcaacaacaattacacatacaaattcagtactcggttcggtgcattatttatcaccagaacaagcacgcggtgggatagcaaataaacaatcagatatttattccctagggatcgttatgtttgagttgttaacaggaagacaaccgttttctggcgaatctgctgttgctatagctttaaaacatttacaaagtgaaattccatctccaaaaagatggaatgaaaatattcctcaaagtgtcgaaaatattatattaaaggcaactgcgaaagatccatttcatcgatatcaatctgccaatgcgatgaaacgagatattgaaactgcgctatatccagagaggataaatgagcagccattttacataccggaagatatggaagcgacaaaagcgattccgattattcaacaagaacaattattcgaaaatgttactgatgaaacaattgttttaaaaggaagtaaagtggatgaacagataagaaaagaagaaacggatttaagtaagaagaaaaaacgaagtaataaatggctcaaaattttaattacaacatttttactgttagcgattggaataacgttagcgcttactgttattccaggattctttattccaaaagatgtaaaagtacctgatgtggctggtatgaaatatacgacagcagtaaatacattagttgaaaagggttttgaagttacggaacctaatattgtatatacagatgatgttgaaaccggtgacgttataaaaacagatcctgtagcaggtagagtcgtgaaagaaaactctaaaattactatctatcaatcaggtgggaaaaagaaaagtaagatgattgatttcacaggaaaagatttagagagtataagaacagagttagaagagaaatataaacaagttacagtatattatattgaagatgataggccgaaaggtgcaattgtagagcaaattccgacgtctgaccaaatggtggtagaggccgagcaagaactgaaaatctgggtaagtaaaggcccttatcaaattagaccgggtgatttttcaaggtggactgaaaatagtgtaactggttatttgaatgagagaaaactaactccagatataaaacgagagtattccgatactgttgataaaggacttgtaatttcgcaatctccaaaaccgggaacgccgttaaaagaaggggataaagtgacgattatcatctcagagggccctaagccgaaagtaacgaaaaccgtgaaagtggataatatttctattccgtatgagtcttctataataggtgagaaaaaaccgcaaacaatagaaatttataaagaagatatgcaacaaaaaatggatagaccaattgaaactagaacaatttcagagtcggcaactatttcattagaatttgtaattcaagaagatacaaaaggacgctataaaattgtaagagatggtgtaacgattattgacaaagaagtaccatatccaacacaa

SEQ ID NO: 9129 - DNA, 1926 bp, Bacillus anthracis
tataatgaagatgcgattcaagtgttagaaggacttgaagccgttcgaaaacgcccgggtatgtatatcgggagcacggacagccgtggattgcatcatttagtatacgaaatagtagataactccgttgatgaagcgttagcgggatttggcgacgaaatttctgtcgtaatacataaagataatagtattagcgttatagataaagggcgaggaatgcctacgggaatgcataagcttggaaaacctacaccagaagttattttaactgtacttcatgccggtggtaagtttggtcaaggtggttacaaaacgagtggtggtttacacggtgttggggcatcagttgtaaacgccttatctgaatggttagtcgtaacgattaagcgtgacggaaatatttatgaacacgctttgttacttggcggtgttcctgtaacgacgtcttgtagaaaatcggaaagacgaaagaatctggtacaacaatgcatttcaaaccagatacaacgattttcagtacaacaaattacaattatgaaacattatgtgagagattacgcgaatctgcattcttattaaaagggatgaaaatctcaataaaagatgaaagaaatgatttagaagatgtctttcattatgaaacaggaattgaagctttcgtttcctatttaaacgaagaaaaagattcaattcacccagttgtatacttcactggtgaacaaaatgggattgaagcagaattagcatttcaatttaacgatggctactcagaaaatattctttcgtttgtaaataatgtacgtaccaaagatggtggaacacatgaagctggattttaaacggcgatgacacgtgtggttaatgagtatgctcgcaaagtagcactatttaaagaaaaaggataaaacctagaaggtaccgatattcgtgaaggggaagccactatcgtttcgggacgtggtaccaaaagaggaacttccttttgaaaggcaaccaaaggggaaactaggtacaagtgaagctcgttcttcaattgatgccattgtatcagagcatttagcttactttttagaagaaaacccggacgtagctacacttcttgtgagaaaagcaattaaagcagcgcaagcacgtgaagccgctcgtaaagcgagagaggaagcgcgtactggtaaaaagaaaaagaaatcagaaggtacattaagtggtaagttaacacccgcacaatcacgtaacccgcagaaaaatgaactgtacctagtagagggtgactctgccggtggttctgcgaaacaagggcgagatcgacgtttccaagcggtattaccgttacgtggtaaagtaattaatacagaaaaagcaaagcttgctgatattttcaaaaatgaagagattaatacaatcatttatgcaattggcggcggcgtaggcaatgaatttgatgtggaagacattaactacgataaagttgtaatcatgaccgatgccgatacagacggagcgcatattcaagtattgttattaacattcttctacagaatatatgaaaccacttatcgaagctggtaaagtgtttatcgcacttccacctttatacaaagtaagtaaaggaaaagggaaaagtgaagtaattgaatatgcatggtcagatgtacagttagatagtgtaacgaaaaaagttgtgaaaaggttacatgttacagcgttacaaaggacttggcgaaatgaatgcggatcaattatgggaaacaacgatgaatcctgaaacacgtacattaattcgcgtgaaaatggatgagccaccaagaccagacccccgcgtacaaccattaaggggcgataaagtagacccccccccgtaaatggattgagcgtaatgtacatttcggtatgcaagaagagggaaattttttggaaaaatgaaat

SEQ ID NO: 9130 - DNA, 830 bp, Bacillus anthracis
ttaaaaactcccatttgaaaggacgcgcactttaatgatgtagacgtgtcgtttccaaggtgggggctataatgccatttatcgtgtcatacgggttcaggtaagttcggacgatgattcaacatttaaaatggtttattgcagccgacaaatggcaacagttaaaattggtggaacatttcatttcggcaggaaagaaaagaaaaaaggctaaaagcccactacgtaaaaaggtaggggttgtctttcattttcccagaccatcagttatttgaagagactgtgagaaaagatatttgtttcggccctactaattttggggtatcgggagaaagcagcgaagcaaaaagccaagagaagcaattgaacttgtaggggttagaaccagaactgttagcgcgttcaccatttgagttaagtggtgggcaaatgaggcgtgttgcgatagcaggcgtattagcgatggaacccgaagtgcttgtattagatgaacctacagcaggactagatccaaaagggcaaaatgaacttatggagatgttttataagctacataaggagaaaggccttacagttatccttgtaacgcataatatggaggatgctgctaaatatgccgagcagattgtagtcatgcataaaggaacggtctttttgcaaggaagtgcagaggaagtattttcacatgctgatgaactagagaaaattggcgtggatcttccctatgtctttaaaagtataaacgtgcaattgaagagaagtttggcatttcaatcccaaaggctaccttatctttagaggatcttactcatgaagttgtgcaggtgtta

SEQ ID NO: 9131 - DNA, 366 bp, Bacillus anthracis
atgctttcagcacttatcccttccgcacatagctacccagctatgcccttggcagaacaactggtacaccagcggtgcgtccatcccggtcctctcgtactaaggacagctcctctcaaatttcctacgcccacgacggatagggaccgaactgtctcacgacgttctgaacccagctcgcgtaccgctttaatgggcgaacagcccaacccttgggaccgactacagccccaggatgcgatgagccgacatcgaggtgccaaacctccccgtcgatgtggactcttgggggagataagcctgttatccccggggtagcttttatccgttgagcgatggcccttccatgcggaaccaccggatcac

SEQ ID NO: 9132 - DNA, 489 bp, Bacillus anthracis
atggaaattatgtctggcgctgaagctgacattaaaatcggtaacgcattaccattaatcaacattccagtaggtactgttgttcataacatcgagcttaaaccaggtcgtggtggacaattagttcgttctgctggtacatctgcacaagtacttggtaaagaaggtaaatacgttcttgtacgtttaacttctggtgaagtgcgtcttgtattatctgcttgccgtgcaactgtaggtcaagttggtaacgagtcacacgaacttatcaagatcggtaaagctggtcgctctcgctggttaggtaagcgcccaactgttcgtggttctgtaatgaacccagttgatcacccacacggtggtggtgaaggacgttcaccaatcggacgtaagtctccaatgtctccatggggtaaaccaactcttggattcaaaactcgtaagaaaaacaaagcgtctgacaaattcatcgttcgtcgtcgtaaaaaa

SEQ ID NO: 9133 - DNA, 1368 bp, Bacillus anthracis
gggaaaaggttgctagataagctttgggaaagacacgtagttacgaccaacgaaaatggattggatttattatatatcgatctgcatcttgttcatgaagtaacgtcaccgcaagcctttgaaggcttgcggcttacaaatcgaacggtacgcagaccagatttaacattcgcaacgatggatcataatattccaacgaaagatgtttggaatattaccgatcgcattgcgaggcagcatctagatacgcctcgggaaaaattgtaaacaatttcaggtgccgttagcggatatcggggatgaagagcaagggatcgttcatgttatcggaccagaacttgggctcacgcagccaggaaaaccaatggttggtggtgatagtcatacagcaacgcacggtgcgtttgccgcgctagcatttggcattgttacgagtgaagtggaacatgtattggcaacgcaaacgttgtgccaaagaaacccgaaagcgatgggaatttgagttaaaaggaaaattacagaaaggcgtttacgcaaaagatattattttgcatctcctttcaaagtacggtgtagcagttggaactggatacgtaatggaattttacggagagacgattgggaccatggagatggaagagagaatgacgctttgtaatatggcgattgaaggaggagcaaaagcgggtattatcgcaccagatgaaaaaacatttgcttatgtaaaaggacgtaaatatgcaccgagagactatgaaactttcgagaagaaatggtttgaactgtatacagatgcagatgcaatttatgatttacatatttcgatagatgttacggatttagcgccgtatgttacgtggggaacgaacccgagtatgggagttcgtattgatgagaaattgccagaaaagcatgatgtaaatgacgaaagagcattctcttatatgggattaatccttggacaaagtacgtatgacattccagttcagcatgtcttcattggatcttgtacaaatttctagattatctgatttagaaattgctgcatctgttgtgaaagggagaaaggtaaaagaaggtgtgcgagcactcgttgtacctggatcgaaaagagtaagggatgcggcgatgcaaaaaggactacatcacatatttgaagaagctggatttgaatggagagaacctggatgttccatgtgtcttggaatgaatccagatcaagtacctgaaggagagcattgtgcttcaacttcaaatcgtaattttgaaggaagacaaggaaaaggagcacgaacgcatttagttagcccagcaatggcggcagcagctgcgttatatggtcattttgttgatattagaaaggagagt

SEQ ID NO: 9134 - DNA, 912 bp, Bacillus anthracis
tttggcgagatgcgaattttcttagcggtgttacttgggtttatcgtactattaagtattatttttattgcgattgccagcaggttacatcgttcgtcccattcgtaagtttacgaacgcgacgcaaaaaattgcgagtggggaatatgaaattgaattagacgtaaaacgaaaagatgaaatagggacgctatctacaagcttccaaaagatgacgaaaagtattaaagaattagatgaaatgagacaagagtttgtttcaaacgtttcacatgaatttcagtcgccgctttcttccatacaagggttttcaaagacattgcaaacagaaaagatgagtgtggaagaaagaaaccattacttacaaattattgagggcgaaagtaagcgaatgtctagtttatgtaaacagttacttacgctcgcttcattagataaagaagagaaagttttacaaataaaagaattcaatttgcagaagcaaattaaagacgtcatttttatgctcgagtggaaatggcgtgagaaaaatattgccattgaatttgatgtgccggatatcactataaaaggtgatgagaacttacttcatcaagtatggagtaacattttcacgaatagcatcaagttttcaaatgagggtgggacccattgagtttttcgtcgaagagttagagtctagcgttatcatctctatatccgataatggaatcggaatggaaaaagaagaaatggatcgtatttttgatcgcttctacaaagtagatacagcaagagcaagaaatgtagaaggcagcggttttagggttatcgattgtgcagaagattgttgaactgcataacggaaacgtttcggtttatagcacgttcggggaagggactactgttcgggtggtgcctccaaaatagagg

SEQ ID NO: 9135 - DNA, 1287 bp, Bacillus anthracis
atgttagcaaaacgtataccaattccagtggcggaagcagttgcacgagtaatgaaatatgcttatcaaggtgaaacagaagaagtttctcttatagaaaagtacggaagacgcttgggagaagatgtattgcagatcatgatgtcccgcattttgatcgctctccgtacgacggatttgcgattcgagcggaagatacaaagaagcagtagcagtagcccattcagttgaagtgatgtgaaaatgagccaggggtgtttttacagagaaagtgaaagcatttcaagctgtccgtattatgacagagcccgcaattcgagaggggtgtaatgcggttgttatgttagactaacgggaaggatttgaaaaaaagtgaaaagacttatatgacattaaaacgctgtttcgcagccggtgataacatttcttttaaaggtgaagatgtaaaacaaaatactatccttgtgaaagaagggactgttattaacccgggagttgcaggcatttcttgcttacgtttgggtaatagttcccgtaccacgttgtaaaaacggccggattattggccattgtaacgacgggtaggtgaacttcttgaggtacatgacccaattaaacccgggaaagtttggaaatagtaattcctatatgattgctgctcaaattgaacgagcgggcggagttgtacagtattatgggaaattcgctgacgattttgagacttgttttaacactgtaaaaaaagcaataaaagaagtcgatattttaattacaactggtggtgtttcgataggagactatgactatttacctgctatttatgagagattacaagcaaatgtacttttcaataaaattgcgatgcgaccaggaagtgtgacaactgtagctgagatagagggaaaactattatttggtctatctggtaatccttctgcttgttatgtcggatgtgagttatatgttcgaccagtcattggggaacatatttgcatagggaaagatccacatatttatcgtgccagaagcaattttacagaaagacttttccgaaagcaaatccgtttactcgttttgtaagagggagagtggaatttgcagatggtcaattacaagttacaccagttggtttagataaatctagcgcaatttcttcacttgcagaagcgaatgcatttattgttttgccaagggggaacgagaggatttaaagctggaattactgtttcggtactgttactagaatcaaccagcggaagtgaatggccatggaaagaatcgcttcgt

SEQ ID NO: 9136 - DNA, 783 bp, Bacillus anthracis
atgattgaatggtattttgaatatgaaatacataaaaaccgacctggcttgcttggtgacgtttcttcgttaatcggtatgctcggcattaatattgtcacaattaatggtgtagataatgcacgacgtggattactccttatgtgtgataatcaagagcaaatctctagacttgaatcaattttaaatacgatggataatataacggtaacgaaatatcgtccgccaaagctaagagataagctagcggttagacatggtaggtacatacaacgagatgcagatgataagaagacatttcgttttgtgcgtgatgaattaggattacttgtagactttatggctgaaataatgaaaaaagaaggtcataaactaatcgggatacgagggatgcctcgtgttggaaaaacagaatccattgttgctgcaagtgtttgcgcaaataaaagatggttatttgtatcatctactcttattaagcaaactgttcgtagtcaattgattgaagacgagtatagcgacgacaatattttcatcttagatggaatcgtgtcaacaaagcgtgctaacgaaaggcattggcagcttgttcgtgaaattatgaggttgcctgcaacgaaagttgtggaacatcctgacgtatttgtgagtcagtcagaatacacattggatgattttgattatattatcgagttgcgtaacgattatgatgaagaaattcaatataatttagtagatgaaattgagcaaggtacgcaaaataatttctctatgtttgacttt

SEQ ID NO: 9137 - DNA, 288 bp, Bacillus anthracis
gtccttcccggtcctctcgtactaaggacagctcctctcaaatttcctacgcccacgacggatagggaccgaactgtctcacgacgttctgaacccagctcgcgtaccgctttaatgggcgaacagcccaacccttgggaccgactacagccccaggatgcgatgagccgacatggaggaaacgccctgccccgtcgatgtggaactctggggggagatagcctggtatcccccgggtagcttttatccgttgagcgatggccccttcatgcggaaaccacggatcac

SEQ ID NO: 9138 - DNA, 1455 bp, Bacillus anthracis
atgtcattatttgatcattcagtatcagagttacataagaagttaaacaacaaagaaatttccgttacggatttagtagaagaatcttacaaacgtattgcggatgttgaagataacgtaaaagcttttcttacattagatgaagaaaacgcacgcgcgaaagcgaaagaattagacgcaaaaattggcgctgaagataatggtttattatttggtatgccaatcggtgttaaagataacattgtaactaacgggcttcgtacaacttgtgcgagcaaaatattagcaaacttcgatccaatttatgatgcgacagttgtgcaaaagctaaaagctgctgacacaattacaatcggtaaattaaatatggatgagttcgcaatgggttcttcaaatgaaaactcaggtttctacgctacgaaaaatccatggaacttagattacgttccaggcggatctagtggtggttctgcagcagctgtagcagcaggagaagtattattctctctaggttctgatacgggtggttctatccgtcagccagctgcatattgcggcgttgtaggtttaaaaccaacttacggacgcgtatctcgttacggattagtagcattcgcatcttcacttgaccaaatcggaccgattacacgtacagtagaagacaatgcatacttattacaagctatttcaggccttgaccgtatggatgcaacttctgcaaacgttgaagtaggaaactacttagctggtttaacaggcgacgttaaaggtttacgcattgctgtaccgaaagaatacttaggtgaaggtgttggcgaggaagcccgtgagtcagtgctagctgctttaaaagtattagaaggtatgggcgcaacttgggaggaagtatctcttccacactctaaatacgctctagcaacgtattacttactatcttcttctgaagcatctgctaacctttcacgcttcgacggcgtacgttacggcgttcgttctgacaatgtgaataacttaatggatctttacaaaaacacacgtagcgaaggcttcggtgatgaagttaaacgtcgtattatgcttggtacatttgcacttagctctggttactatgatgcatattacaaaaaggcacaacaagtacgtacattaattaaaaacgactttgaaaatgtatttgctaactacgatgttattattggaccaactacgccaactccggcatttaaagtgggcgaaaaagttgatgatccaatgacaatgtatgcaaatgacattttaacaatcccagtaaacttagcgggtgttccagcgatttctgttccatgtggattcggtgctaacaacatgccacttggtctacaaatcattggtaaacacttcgatgaagcgacaatttaccgcgttgcacatgcgtttgagcaagcaacagaccatcatacaaaaaaagcaagtctg

SEQ ID NO: 9139 - DNA, 1742 bp, Bacillus anthracis
atgaaacaaagtatggtattcagtcttacattacgtgaagttccagctgatgcggagattaagagtcatcagttattacttcgtgcaggttttatgcgtcaaaatgcttctggtatttatagttttctaccatttggattaaaagtactacacaaagtagaacgtatcgttcgagaagagatggagcgcgcaggtgccgtagaattattaatgccagcgatgcaagctgcagaattatggcaagagtcaggtcgttggtattcttacggatctgaattaatgcgtatgaaagatcgtaacgctcgtgaatttgcattaggagcgacacatgaagaagtaattacagatcttgtacgtgatgaagtgaaatcgtataaaaaattaccgttaacattatatcaaattcaaacaaaattccgtgatgaacaaagacctcgtttcggtttattacgtggaagagagtttctaatgaaagatgcatactctttccatgctacgcaagagagcttagatgaagtgtacgatcgcttatacaaagcatactctaacatctttgctcgttgtggcttgaatttccgtgcggttattgctgattctggagcaaatgggtgggaaaagatacacatgaatttatggtattatctgatgttggtgaagatacaattgcatactctgatacatctgattacgcagcgaacatcgaaatgggctcttgttgtagctacgtatacgaagagtgacgaagcagaaaaagagctttgaaaagttagcacccccaggcccaaaaagcaatggaggaggtatctgcattcttaaccatcgaagctgacaagtgcattaagtctatgttatttaaggtagatgagaaattagtagtggtactgtttcggggtgatcatgaagtaaacgatgtaaaagtgaaaaatgtatacgggggcttcaggttgttgagcttgcctctcctgaagaagtaaaagaattattaaattggggaagtgggttcattagggccggattgggtgtaaatggtgatatcgaaaatattcgctgatcacgctgtagcatcattgttcaacggatgttcaggagcgaacgagaaaggattcccattatgtaaaggtgaatcccgaacggggactttaaagtaagtcaatatacggatttacgcttcattcaagaagggagaccaatctcccagacggaaacgggacatttcttttcgcacgcggaattgaaagtggttcatgtattcaaattaggaactcgttatagtgaagcaatgaacgcaacattcctagatgaaaacggaaaaacacaaccacttattatgggttgttacggcattggttgggtctcgtacagtggcagcaattgcagagcagtttaatgatgagaacggtttagtttggccaaaagctgtagcaccgttccatgtgcatgtaattccagtgaatatgaaatctgatgcacaacgtgaaatgggtgaaaacatctacaactcattacaagagcaaggttatgaagtattactagatgatcgtgcagaacgtgcaggtgttaaatttgctgatgctgatttattcggccttccagttcgcgtgacagttggtaaaaaagcagacgaaggtattgtagaagtgaaagtacgtgctacaggtgagtctgaagaagtaaaagtagaagaacttcaaacatatattgctaatatttttaaataagaagaaggacctccgtaatgaggt

SEQ ID NO: 9140 - DNA, 831 bp, Bacillus anthracis
atcatgcagcagttgattattggaaggtatattccagggaattctcttattcatcaacttgatccacgtacgaagctgctgattgtctttttatatgtatttgttgttttcttagcaaataatgcgatttcatatggatttttatttttatatgcactcattgctttattttttgcaaaagtgccgattcgttatgtactttcgggcttaaaaccaattctatggatttttctttttacatttttcctgcatattttcacaaataaagaaggggaagtattattccagcttggttggttttcgatacatgaaaaaggattagagcaagggatatacatttctatacgattcttcgttattattttaatgacgacattattaacgttaacgacgacacccattgagaattacaagaatgggttggaaggaggtatataaaagcccgttgaaagccgaataaaagattccttgttcatgaaaatcgcattaaatgatgtcaatttctctttcgtttatttccgccattaatggatggaggggagtaaaataatgaaggcacaatcgtcacggggtattgatttcgcaggggggcccgataaaagatagaatgaaagctatcatttcactactcgttcctctatttatcagtgcttttaagcgtgcagaggacttagcaatcgctatggaagctcgtggatatcaaagtggcgaagggcgtactaaatttaggcaactacgctggaaaacaagcgatacagtaacgattataagcttactttgtttagcttgtattttggcatgggtgcgatcgtaatggagaatagagaaatg

SEQ ID NO: 9141 - DNA, 1392 bp, Bacillus anthracis
atggggaaaaggttgctagataagctttgggaaagacacgtagttacgaccaacgaaaatggattggatttattatatatcgatctgcatcttgttcatgaagtaacgtcaccgcaagcctttgaaggcttgcggcttacaaatcgaacggtacgcagaccagatttaacattcgcaacgatggatcataatattccaacgaaagatgtttggaatattaccgatcgcattgcgaagcagcaactagatacgcttcgggaaaattgtaaacaatttcaggtgccgttagcggatatcggggatgaagagcaagggatcgttcatgttatcggaccagaacttgggctcacgcagccaggaaaaacaattgtttgtggtgatagtcatacagcaacgcacggtgcgtttggcgcgctagcatttggcattggtacgagtgaagtggaacatgtattggcaacgcaaacgttgtggcaaagaaaaccgaaagcgatgggaattgagttaaaaggaaaattacagaaaggcgtttacgcaaaagatattattttgcatctcctttcaaagtacggtgtagcagttggaactggatacgtaatggaattttacggagagacgattgggaccatggagatggaagagagaatgacgctttgtaatatggcgattgaaggaggagcaaaagcgggtattatcgcaccagatgaaaaaacatttgcttatgtaaaaggacgtaaatatgcaccgagagactatgaaactttcgagaagaaatggtttgaactgtatacagatgcagatgcaatttatgatttacatatttcgatagatgttacggatttagcgccgtatgttacgtggggaacgaacccgagtatgggagttcgtattgatgagaaattgccagaaaagcatgatgtaaatgacgaaagagcattctcttatatgggattaatccctggacaaagtacgtatgacattccagttcagcatgtcttcattggatcttgtacaaattctagattatctgatttagaaattgctgcatctgttgtgaaagggagaaaggtaaaagaaggtgtgcgagcactcgttgtacctggatcgaaaagagtaagggatgcggcgatgcaaaaaggactacatcacatatttgaagaagctggatttgaatggagagaacctggatgttccatgtgtcttggaatgaatccagatcaagtacctgaaggagagcattgtgcttcaacttcaaatcgtaattttgaaggaagacaaggaaaaggagcacgaacgcatttagttagcccagcaatggcggcagcagctgcgttatatggtcattttgttgatattagaaaggagagttatgatggagccatttcgtattca

SEQ ID NO: 9142 - DNA, 1386 bp, Bacillus anthracis
gtgacttttagtaagagtacgactgacaaaccatcttatacatatgaagagttatcggtaaaaaataaagcctatgtatggcacccatttacacaaatgaaggattatttagaagaagatcctgtcattattgaacgtggagagggaagaaagctatatgatgtaaatggaaatgaatattgggacggtgtttcgtctatttggttaaatgttcatgggcaccaagtgccagaattagatgaggcaattcgtgagcaattaaataaaattgcccattctactatgttagggcttgctaacgttccgtctattttattagcagaaaaaataattgaagttgtaccagaaggcttgaaaaaagtattctattcggactccggttctagcgctgttgaaattgcaattaagatggcctttcaatattggcagcataaaggaaaaccgaaaaaacaaagatttgttacattaaaagaagcgtatcacggtgatacaattggagctgtttcagtaggagcaatagacttgttttaccaagtgtatagttcacttttatttgaggcaattaaaatgccttatccatatacatatcgttcaccttatggaaatgataaggcggaaattgtaaaaaaacatttagaagaaatggaagagctactgaaagataaacatgaagaaattgcggcgattattgtagaacctttaatgcaaggtgctggcggtatgattacaatgccaaaaggatacttaagagggctacgtaatttatgtacaaaatataacgttttatttattacagatgaggtagcgactgggtttgggcgtactgggaaaatgtttgcatgtgaacatgaaaatgtaacgccggatattttgacagccggaaaaggtttaacgggcggatatttaccagttgcaatcactgtaacgacagatgaaatttataatgcctttttagggagctatgaagaacaaaaaacgtttttccacggtcatagttatacagggaatccgttaggttgtgcggtagcaattgcgaatctagaactatacgagaaaacaaatttaatagaagaagtggcacgtaaaacagaatatgtggcgacacaattagaagagctctttgcatgtaaacatgtaggggatattcgtcagtgtgggttaatggttggaattgaacttgtgaagaataaagaaacgaaagaagcgtttgaatggacagagagagtcggtgttcaagtatgtaaacgctcaagagagctgggtatgattttgcgcccgctcggtaacacgattgtatttatgcctccccttgcttctacaattgatgagattgatgagatgttacgtattttatataaagcaatctcggatattacggagggagaa

SEQ ID NO: 9143 - DNA, 654 bp, Bacillus anthracis
atgattaaaaatggtacgttaaaacctggtgacaaactacttcctgtacatcaattagctgagcagtttcaagttggcagatctgctgttcgtgaagcgctaagtgcgctaagagcgatgggcttaattgagatgaaacaaggagaaggtacatatgtgaagaatttcgattcttcttcattaacaaaatcattaaacaatagattattaatgaagaaagaagatattttgaatttattagaagtacgaaaggtgcttgaagtgggggcagttcgagcagctgcggcaaaacgtacggaagctaatttgcaaaatatgaagcattggttagatgaaatggcaaagagcattggagatgaaaaagctggtgaaaaagcagattttcagttccatatgggaattgcagagtcttcgcataataacattttacttgaactcatgaatcatgtttcagagatgattgctgaaacgattggtgaatcaagacgcattattttatatggtgaacaaacaacatcagaacgacttatagaagagcatcaagttatatatgatgcagtgttaaagcaagatgtagaattagcgcagcaagcaatgctagatcatttaacaaatgtagaacatattgtcacaggtagaaacgatataaattcg

SEQ ID NO: 9144 - DNA, 445 bp, Bacillus anthracis
atgaaacttcatgaattaaaacctgcagaaggttctcgtaaagtacgtaaccgtgtcggtcgtggtatcggttctggtaacggtaaatctgctggaagggttcaaaaaggaccaaaccgccctgttggggcggcgggtttcgtcttgttttagaaggtgtccaaacttcaattatccggtggttaccaaaagcgcggtttcacaaacattacctgtaaagagtttgctattgtatacttatcaacgttaaatcgttttgaagatggtacagaagtaccacctgaattattgctggaaactggcgttatcagcaaattaaacgacggtgttaaaattcttgcaagcggcgcagtagagaaaaaacttaactgttaaaagcgcacaagttctcttcaagtgttaaagaggcaattgaagcagctggcggatcagttgaggtgatcta

SEQ ID NO: 9145 - DNA, 549 bp, Bacillus anthracis
gggtctttccgtcctgtcgcgggtaacctgcatcttcacaggtactataatttcaccgagtctctggttgagacagtgcccaaatcgttacacctttcgtgcgggtcggaacttacccgacaaggaatttcgctaccttaggaccgttatagttacggccgccgtttactggggcttcagttcagagcttcgcttacgctaacccctctccttaaccttccagcaccgggcaggtgtcaccccctatacttcgccttacggcttcgcagagagctgtgtttttgctaaacagtcgcttgggcctattcactgcggctttccgttaagaaagcaccccttctcccgaagttacggggtcattttgccgagttccttaaccagagttctctcgcacaccttaggattctctcctcgcctacctgtgtcggtttgcggtacaggcaccttttatctcgctagaagcttttcttggcagcggggaatcaaagacttcgctccataaggagcttccccatcacagctcagccttcacgataagcggatttgcct

SEQ ID NO: 9146 - DNA, 1423 bp, Bacillus anthracis
aaagatggatttacttattctttatacgttaccatcgtccttattatgatagacgggcaaatttcagaaagctatattatgatgaaagatattctgccactaaaaaaccagcaagaagaaataaaatatttagcattccatgatactgtaacgaaaattgggaaccgtgcctttttccataagaaattaaaaaaaattataaaaaatgctaaaacgacagaaagcgagtttgcattattatatttcggacttagatcgctttaaagcaattaacgatacacttggacattcggcaggagactacatattagaagaagtagcgaagcgattccaatcatgtcttccatcacatactcatctatcaagaatcggtggcgatgaatttacaatcttaattgaaaactatactgacgaagattcccttattcgagttatgcaaccagttatttgaatgcatggaaaaatcgtttgtcatatatgaacatacattaactttatcactaggtatcggcatcgctaattattcccattctgggaatcgataccgctacactttctgaaaacgcttaatgttgcaatgtatgatgcgaaagcataacaacttaattctgtctctatttatgatgatgtaattgcaaaaaaaattgaaagacgattacgattagaaaaagatttaccaaatgcaattcaaaatgaagaattgttccttttatatcaacctcaagttgatagcaaatctaacaaaattatcggtgctgaagctttaattaggtggaatcatcctgaattaggtgttatttctccatacgagtttattccgattgcagaagaaacgctacaaatcattccaataggaaagtggacactacaacaagcttgtgagcaaatgaaacgttggcacacaagcggatattcacatttgaaaataggtgtgaatttatctgctaaagaatttgaacaagaagattttgtaaagtctatttctgctactttaacaaatacaggtttaccagcaagttctcttgatcttgaattaacagaacgaattgcaatgatggatgagcgagaaacattaataaaactgcgtacactaaagagtttaggcgttcacatttcaattgacgactttggtactggttattcttcgctagcctatttacctttatatccaatcgatacgttaaaaatcccgagagaatttattacaatgtctgaaacatgtgacgatggaatggaaattattaaaacgatcatcacattagcaaatacattaggaatgtcagttatcgctgaaggtgtagaaacgaaagaacacgtgagtttccttcaaaaaaataattgtaaatttattcaaggctactactacagcaagcctattcatgctgattcattttctactcttctcaaaaaaggtgttcgttat

SEQ ID NO: 9147 - DNA, 1269 bp, Bacillus anthracis
atgcattatgatgttattgtcatcggcggcgggccttctgggctaatggctgcaatcggtgctgcagaagaaggcgcaagcgtcttacttcttgataaaggaaataaactagggcgtaaacttgctatttcaggtggtggccgttgtaacgtaacgaaccgtctaccacttgatgaaatcgttaaacatataccaggaaatggccgcttcttatacagcgctttttctatttttaataatgaagatattattacattcttcgaaaatcttggtgtaaaactgaaagaagaggatcatggccgcatgttccctgtttcaaataaagcgcaatcggtagtagacgcacttttaacacgattaaaagatttaggtgtaaagatccgcacgaatacacctgttgaaacgattgaatatgaaaatggtcaaacgaaagcagtcgtactaaagactggcgaagtgctagaaacaaatcacgtcgttatcgctgttggcggaaaatctgttcctcaaactggttctactggcgacggatatgcctgggctaaaaaagctggacatacaattacagaattattcccaacagaagtaccaatcctttcaaacgaaccatttattcaagatcgttcattacaaggacttgctttacgagacgtaaacttaagtgtattaaacccgaaaggaaaggctatcatttctcacaaaatggacatgctcttcactcacttcggtttatctggtcctgctgcccttcgctgtagtcaattcgttgtaaaagcactgaagaagttcaaaacgaatacagtgcaaatgagcatcgatgcattgccagaagaaaatagtgaacaactattccagcgcatgctgaaacaaatgaaagaagatccgaaaaaaggaattaaaaacgtgttaaaaggttatgtacctgaacgttacttcctattcttattagaaagaaatgaaattgacggtagcgaacaagctggacaagtttctcacgaaaaaattcgtgcacttgtgaaagactttaaagaatttactgtaaacgtaaatggtacgcagtcaattgaaaaagcattcgttactggcggcggtgtatctgttaaagaaattaacccaaaagaaatgtcttctaaattcacgaacggcttatatttctgcggggaagttcttgatattcacggttatactggtggctataacattacatctgctctcgttactggtagaattgccggaacaacagctggagaaaatgcaaaaatgcaatat

SEQ ID NO: 9148 - DNA, 744 bp, Bacillus anthracis
agaataaaatgtacggttgcatatgatggcatgcatttttgtggttatcaaattcaaccgcagcatcgtactgttcaacaagagatagagaaggctttacagaaattgcataaaggagaacttgttcgtgttcaggcatcaggcagaacggattctaccgttcacgctaaaggaccaagtgataccctttgatacaccgttttcttcttgaagagtgggcaatggagtaatgcattaaccacaatgctaccagatgatattgttatcacacaggtagagaaaaaaacagaagaatttcatgctcgatacggtgttgagagaaaagaatatcgttatcgtgtcctagtatcaaagactgcggatgtattccgtagaaattatgtatatcaatatccatatccactcgaagtaaactctataagaaaagcgatcccttattttattggaacgcatgatttcacttctttttgttcggcaaaaactgacaaaaaagataaagtgagaacaatttatgaaatcgagctaattgagcaagacgatgaattaatttttcgttttgtagggaatggatttttatataatatggtcaggattattgttggtacgttacttaacgtaggccaaggaaagcttgatccggatagcattccagagattttagcgaaacaaaatcgtcagtttgctggaaagatggctcctggtcatgggctttatttatggcaggtaaactataacaactaatcc

SEQ ID NO: 9149 - DNA, 293 bp, Bacillus anthracis
atgtttaaatttaatgatgaaaaagggcaattaaaatgttctttctgtggtaaaacacaaacacaagtccgaaagttagttgcaggtccaggtgtttacatttgtgacgagtgtatcgaactttgtactgaaattgtacaagaggagcttgcgaaagacgaagaagtagaattcaaagatgtaccgaaaccggtagaaattcgtgaaattttagatgagtatgtcatcggacaagataacgcgaaaaaagcactagcggtagcggtatataaccattacaaacgcattaattc

SEQ ID NO: 9150 - DNA, 1501 bp, Bacillus anthracis
cttttgtttatgcttggagcgacagggggacttagcgaaacgcaaaatttaccccgcactatataacttatatagagatcaaaagcttccaaagcaaatatccgttatcgggcttgggagacgtgaagtatctcatgtagattttcaaaaaaggattaaaggattcatagagacgtttttctcgtcatagagaagaaggtactccagaactcgaaggttttttagataattttcgctattgtccattagatgtgagtaagccggaagactatgagagattattaccagtcgttcgtgaaagggaagaagagctacatataaaagggaatagaatgttctatctttttgggtgctccctgaattttttgagacaatcgctttaaatattaagggaaagcggacttgataaaaacgatgggatggaaacgcctaatgattgagaaaccgttcgggcacgaccttacatctgctcgtgagctgaatgataagcttagtcgcacgtttgaagaagacgagatataccgtattgatcattatttaggtaagccgatgattcaaaaccttgaagcactagagtttgcaaatcctgttttaccatcgatttggaataaagaacatatagcgaatgtacaattcacagcgagtgaaacagttgggtgttgaagaaagggcagggatatatgatcaggcaggagccatttcgagatatggttcaaaatcaatatgttacaaataattaatgaggactgcgtttaaattggccgggaaaagtttaatgcatgtgaaattcgagaggaaaagcgaaaggtaatggaggcgcttcgtaaagtgaaaaaagaagacgttcaaaaccatatcattcgcggacaatatggtgcaggtgagataaatgcggggcaagttgtagcatataaagaggagccagggagtaaatcccttctcttaatatagacacatttattgctgctcgcttgtggatcgataatccattttggactggcgttcccttttatatacgaccaggcaaacgaatgaaagaaaagtctactcgtatgtaaatcgaaattaaaaaatacgttaaaacagcaatatcaagatagtaatccaaatgcagcacctaacttgttaataattgaaattagcccaggtgagaacgtttcattacagttaaatagtaaaaatccattgaaaaatggagaaattgaaccgatccgtattaactttacttgtgagcaagcggatgtgggagtacctgaagcgtatgaaagactcattcatgatgctgtgagtggagacgctacattctttgcacattggagagaagttgaattgtcatgggaatgggtacaaccgaattcttgaagcattcgaggaaaacttattacctctccatgaatatgagtctggttcatatggtccagaggcatctaatgaattattgcaagaaagtggatttaaatggtggttagatcaagaaacgaaaaaataagtactttctttc

SEQ ID NO: 9151 - DNA, 706 bp, Bacillus anthracis
atgtttcgtacgatttcaaatttcatgagagtagctgagataagaaggaaaatcctttttacattagcgatgttaatcgtttttcgaattggcacgtttattccagttcctcatactaacgcagaggtattaaaaatacaagatcaagctaacgttttaggtatgctaaacgtatttggcggaggagcattgcaacacttctcaatctttgctgtaggtattacaccatatattacagcttccatcatagtacaattactacaaatggacgttataccaaaattttcggaatgggcaaagcaaggagaaatgggtcgtaagaaatcagctcaatttactcgatactttacaatcattctcgcattcatacaagccatttgagatgtcttatggctttaataatatagcaggtggacaattaataacagatcaaagctggactacatacttatttattgcaaacagttttaactgcaggtactgcatttttactttggttaagtgaacaaattaccgctaatggagtaggtaatggtatttcgatgcttatcttcgcaggacttgtagcagcgattccaaatgttgcgaatccaatttatttacaacaatttcaaaatgcaggcgaatcattattcatgcacatcataaaaatggctcttattggtctcgtaattttaacgatcggtgtgtggggttatttacattc

SEQ ID NO: 9152 - DNA, 1350 bp, Bacillus anthracis
ttgaaaactgtaactgaatttcaaaataaaaatattcttgtattaggcattgcaaaaagtggttatgcagcagctacattgctacaaaagttaggggcaaatgttattgtaaatgacggaaagccgttagcagaaaatgtactcgctgcagaattacaagcaaaaggaatggacgttgtatgcggtggtcatcctttagaattattagagagaaatatttctcttgtagtaaaaaatccaggaatcccgtattctaatccaatattagttgctgcgaaagaaaagcaaattccaattgttacagaagttgaattagcatatcgtatttcagaagcaccatttgttgggattacgggatctaacggtaaaacgacgacgacaatgcttacatttgaaatgctaaaagaaggacagaagcatccggtaattgcagggaacattggaactgtagcgtgtgaagttgcacaggatgcaaaagaaaatgaagttgtagttacagaactttcatcgttccaattgatgggagtagaattgttccaacctaaaattgctgcgtttttaaatttatttgaggcccacttagattatcatgggacgaagaaagaatatggtttagcaaaagcaaatatttttaaaaaccaaacagaaaatgattatagtgtaataaatgcagatgatgcagatgtgatggctttatctgcttatagtaaaggtcaaaaagtactattctcaacaacgaaagaaattgaagatggtgcgtgtataaaagataatgctctttattttaaagctgaaaaagttgttgaagtagacgatatcgttttacctggacaacataatttagaaaatattttagcagcgatgagtatcgcaaaattattgggtgtttctaacgaagcgattacggcggtgttaaaacgttttacaggtgtaaaacatcgtttagaatatgtaacaactataaacaaccgtaagttttataatgactcaaaagcaacgaatatgttagcgacagagaaagctttatctgcgtttacacaaccgactgtgttattagcaggtggacttgatcgtgggaatgagttcgatgatttaattccgtatttcaaaaatgttaaagcgattgtaacatttggacaaaccgctccaaaattagtaagagccgcagaaaaagcgggactagatacaattgaaagtgtcgatactttagatgaagcggtagtgaaagcttatgctcattctacagatggcgatgtaattcttctttctccagcatgtgcaagctgggatcaatttaaaacatttgaagaaagaggagacatttttatacaagctgtgcataaacttata

SEQ ID NO: 9153 - DNA, 951 bp, Bacillus anthracis
atgaagcgcatgctaaaaatacacgaaatgtctatcataacgttactactaatttatatagctattgtcggaatgataaaccctagttttattcaatttaactcgttatctttaatggtgaaatcaagcgttattttagtcgtgctagcaatcggccaatcgttcgtcttatttacgaaaaatatagatgtatcagttggttcaagcatggggttaagtgcagcagtttgcggaatgttgctaacgaatgaatatagtgcatccttgtcgatatttgctgctattacacttggcgctattatcggtttcgtaaacgggatgggcgttgcgaagtttcgagtaccagccattattatgacattaggcatgttaggaattattagaggtgcgatgttgattttcacaggcgggaagtggattgaagatattccaaacgattttaagcagctgtcatctatcgtcattcttggtttacctataactgtatggttcgttcttattattttactactactatacttctttttaaggaaagtgccatttggaagatacttttatgcggtaggtgataatgaagatggcgcgagacttattggtatacctgttaataaagtgaagatatgtgcgtttataatttcaggcataagtgctgcactcgctggttgcatatttgttatgaatatcgggttcattccaaatcaaactggtacaggattagaattacaagtaatcgcagccgctgtactaggaggcattcatttaaaaggaggaacaggatctttatttggagctgcattaggagcattatttttagaaacaataagcagttcactcgtctttttaaaaataccagcattttggaataatgctatttcaggttttttattattacttatcatcatactggatagtgttatgaaaaagtggaaggcagaaaggaggatgaatcta

SEQ ID NO: 9154 - DNA, 717 bp, Bacillus anthracis
atgaaagttactttatttgttacttgtttagtcgatatgtttgaaacaaacgtcggcaaagcaacagttgaggtgttggagcgtttaggttgtgaaattgaatttccagaagcgcaagtttgttgcgggcaacctgcttataatagtggccatgtagaagcagcaaaagaagcgatgaaacatatgattgaaactttcgaagatgcagaatatatcgttacgccatctggttcttgtgcgacaatgtttcatgagtatccgcatgtttttaaagatgatccgaaatgggctaaacgtgcacaaaaagttgctgataaaacatatgaatttacacaatttattgtagatgttttaaaggttacggatgttggtgcaagtttaccaggaattgctactattcataaatcttgtcatatgacacgtatgcttggagtaacagaggcaccagggattttattgtcaaatgtaaaaggtttaactgtgagagagttaccaaatgtgcaaaattgttgcgggtttgggggaacgttttcagtgaagatgactccaatttctgagcaaatggtagatgaaaaggtagatagtgcaatggaaacaggtgctgattatttaatcggtgcagattgtgggtgtttgttaaacattggcggacgtattgagcgtttaggaaaagaaataaaagtaatgcatattgctgaggtactgaatagtcgctca

SEQ ID NO: 9155 - DNA, 342 bp, Bacillus anthracis
atgattaaaattacgataagtcgcacgaaattaggaagtatccaatcatttaaaatgactggacatgccgattatgcgccgcatggacaagatcttgtctgtgctggaactacagcggttgtgtttggttctataaatgcagtggaagaactttgtaatgtgcaggcaactattgaactcggaagtgatggcggattcttaacgtatgaattgcctaatgatttagacgttcatgcagcagaaaaagcacaaacgcttttagaaggattggttgtttcgcttaagacgatcgaacttgattacggaaagtatatccgtttaatagaaaaagtgcaggaggtg

SEQ ID NO: 9156 - DNA, 833 bp, Bacillus anthracis
atgaaacaattatatggtgtaatcggaaatccaattggacattcattatcacccgttatgcataacgatgcatttgaacacttgaagatggatgcccattaccatgcctttcttgttaaagaggaagtgttaggggaagcagtaagaggtttaaaagcgttaggtatttcaggatttaatgtaacaactccgcacaaggttgcgattatggattatttggatgagattgacccgctagcaaaacaaattggtgcagtaaatacggtggttcataaggatggaaaattgattggctacaatacagatggaattggttttgtccgagcactgcaatccattagtagtgaaccacttcaagagaaacgtattttattacttggcgcaggcggtgctagtcgagctatttatttttcacttgctgatgcaggggtgaaagagattgatgtagctaatcgtacagtagataaggcgaaagaacttattgctgcatgtacagctactgttcattctgttgctttatcattagaaaaagcaacaaaagaacaagggaattatgatattatcattcagacgacaacgataggtatgcatccacgcgtcgaacatacgccgttacaaatttcttcgttgaaaaagggaacaattgtatcagatataatttataatccatttgaaacgaaaattttatgtgaggcgaaagagcaaggtgcaatcattcaaaatggtattgatatgtttgtttatcaaggagcgcttgcatttgaaatgtggacaggttgcgtaccgaatatcgaacgaatgaaacaattagttataagaaacttggaggctaa

SEQ ID NO: 9157 - DNA, 561 bp, Bacillus anthracis
gtgaaaaaagttgaggaagctttcaaagttatgcgtgacatcgctgctgaaggcggagacatcttattcgtaggtactaaaaaacaagcacaagaagctattaaagaagaagcaactcgtgctggtatgtacttcgttaaccaacgttggttaggtggaactttaactaacttccaaacaatccaaaagcgtatcaagcgtcttaaagacatcgaaagaatgcaagaagatggtactttcgaagtactacctaagaaagaagttgttcaacttaaaaaagagttagagcgtcttgagaaattcttaggcggtattaaagatatgaaaggtcttccaagtgcattattcgtagtagaccctcgtaaagagcgtattgcagttgctgaagcacgcaaattacacattccaatcatcggtatcgttgatacaaactgtgatccagacgaaatcgatcacgttatcccagcaaacgatgatgcaattcgtgctgtaaaacttcttacatctaaaatggcagacgcgatccttgaagcaaaacaaggtgaagaaactgttactgcg

SEQ ID NO: 9158 - DNA, 1083 bp, Bacillus anthracis
gtggatattttaaaattactgatggtagccatccttattggattaacagcattttttgtagctgttgagtttgcaattattaaggtgcgtagcagtcgtattgatcaactcgttagtgaaaaacgacgaggagcattggcagcgaaaaaagtaacttcgaacttagatgagtatttatcagcatgtcagttaggtattacaattaccgctttagggcttgggtggttaggtgagccgactataaaacatttacttgagccgttgtttttaaaactaaacttatctcctgcaattgcaagtaccgtttcatttattattgcttttgcagttattacgtttttacatgttgttattggtgaacttgctcccaaaacgttcgccatacaaagagcagagcaagttagcttattattatcgaagccacttatttacttttaccgaataatgtatccgtttatttgggctttaaatggttcggcaaggcttgtaacagggttatttggtttacatccagcttctgaacatgaagtagctcattcagaagaagaattacgattgatcttatctgagagttatgagagcggagagattaatcaaagggaatttaaatatgtaaataacatttttgaatttgataatagagtagcaaaggaaattatggtgcctcgtacggaagttataggtttatatgaggacgaaccatttgaaacacatattaaaataatcgcacaagaaaaatatacgaggtatcctgtatttggtgaagataaagatgaaatcattgggatggttaatgtaaaggatttatttattcgttatatggatggtaatcgggacgaggaatgctccattacgccatatacaagaccagttattgaagtgttagaaaatattcctatacatgatttactattacaaatgcaaagaaaacatattccattagctgtgttgtatgatgaatacggaggtacagcaggaattgttacattagaagatattttagaagaaattgttggagaaatccgagatgaatacgatgaagatgaacacccgcctatagagcatataagtgaaggtggacac

SEQ ID NO: 9159 - DNA, 2136 bp, Bacillus anthracis
atgagtcaagaaaagcaagtcttctcgatagatttagctggtcgccagctaacagttgaaacaggtcagcttgcaaagcaagcgaacggagcagtattagtaagatatggcgatacagcggttctatctacagcaactgcatcaaaagaagcaaaaaatgtagatttcttcccacttacagtaaactatgaagagcgtttatatgcagtcggaaaaattcctggcggtttcattaaacgtgaaggtcgtccaagtgaaaaagcaattttggcaagtcgtttaatcgaccgtccaattcgtccgcttttcgctgatggtttccgtaacgaagtacaagttgtcaacatcgtaatgagtgttgatcaagattgttcttctgaaatggcagctatgcttggttcttcattagcgttatcgatttcagatattccatttgaaggtccaattgcgggtgcaacagttggtcgtattaacggcgaattcgttatcaacccaacagtagaacagcaagaacaaagtgatattcaccttgttgtagctggtacgaaagatgcaattaacatggttgaagcaggagcagatcaagtgcctgaggaaacaatgttagaagcaattatgtttggtcatgacgaaattaaacgtctaattgcattccaagaagagattgtacaagctgtaggtaaagagaaatcagaagtaaaactttatgaagttgacgctgatcttaaccaagctgtacgtgaaatggctgagaaggatatgcattctgcaattcaagtacatgagaaacatgcacgtgaagatgcgattaacgaagtgaaaaagcgtgtaattgagcattacgaagcgcaggaagctgacgctgatactttaggacaagtaaatgagattttatataaaattgtaaaagaagaagtacgtcgtcttattacagttgaaaaaatccgcccagatggccgtaaaggtgacgaaatccgtccattagcatcagaggttggcattttatctcgtacacacggttctggtttgttcactcgtggacaaacacaagcattaagtatttgtacattaggtgcattaggcgatgtgcaaattttagacggtcttggtgtagaagaatcaaaacgctttatgcaccattacaatttcccatcatttagtgttggtgaaacaagaccgatgcgtggaccaggtcgtcgtgaaatcggtcacggtgcactaggagaacgtgctcttgaacctgtaattccatctgaaaaagacttcccatacacagtacgtcttgtgtctgaagtattagaatcaaatggttctacgtcacaagcaagtatttgtggtagtactttagcgatgatggatgctggtgttccacttaaagctccagttgcaggtattgcaatggggctagttaaaactggtgagcattacacaattttatctgatattcaaggtatggaagatcatttaggtgatatggactttaaagtagcaggtacagcacatggtgtaactgcattacaaatggacattaaaatcgatggtctatctcgtgaaattttagaagaggcattacaacaagcgaaagttggtcgtgtgcacattctaaatcatatgttatctgttattgcagagccacgcactgaattatcagcgtacgctccaaagattattacaatgacaattaacccagataaaatccgtgacgttatcggaccaagcggtaaacaaatcaataaaattattgaagaaactggcgttaaaattgacatcgagcaagatggtacagtattcatttcttcaataaatcaagaaatgaacgacaaagctaagaaaattattgaagatatcgttcgcgaagtacaagtaggtgaaatctacgaaggaaaagtgaaacgtgttgagaaattcggtgctttcgttgaattattcagcggtaaagatggattagtgcacatttctgaacttgcacttgagcgtgtaggtaaagtagaagacgttgtgaaaatcggtgatgtaattacagttaaagttatcgagattgacaagcaaggtcgcgtgaatctatctagaaaagtattgctaaaagaagagcaagaaaaagaagctgctaaagaagaaaacaaacaagagcagcaa

SEQ ID NO: 9160 - DNA, 1119 bp, Bacillus anthracis
atggctgacaaaccagctcgttctaaacaaattgaaactgaaatgacccttgagcaagtgaaagaacaactcactgagctcggaaaaaaacgtggcgttcttacatatgaagagattgcagaacgcatgaatggatttgaaattgaatccgatcaaatggatgaatactatgaatatttaggtgaacaagggattgacttagttggcgacaacgatgaaggccctaataatcaccaaattacgaaaacagaagaagagtttgacctaaatgacttaagtgtaccaccaggggttaaaatcaacgatcctgttcgtatgtatttaaaagaaattggtcgtgtagatttactatctgcagaagaagaaattcgacttgcaacgcgtattgaagaaggcgatgaagaagcaaaacgtcgtcttgcagaagcaaacttacgtcttgtagtaagtattgcaaagcgctacgtaggtcgcggtatgcttttcttagacttaatccaagaagggaatatgggtctaattaaagcggttgaaaagttcgattatcgtaaaggtttcaaatttagtacgtatgcaacttggtggattcgccaagcaattacacgtgcgattgcagaccaagcaagaacaattcgtatcccagttcatatggttgaaacgattaataagttaattcgtgtacaacgtcaattattacaagatttaggacgtgaaccatctcctgaagagattggtgaagaaatggatcttgctccagaaaaagtgcgcgaaatcttaaaaattgctcaggagccagtctctcttgaaacaccgattggtgaagaagatgactcccatttaggtgattttattgaagaccaagaagcaacatcgcctgcggaccatgcagcgtatgaattgctaaaagaacaattagaagatgtgttagatacactaacagatcgtgaagaaaatgttctacgtcttcgttttggtttagatgatggacgaactcgtacgcttgaagaagttgggaaagtattcggcgtaacgagagaacgtattcgtcaaattgaagcaaaagcacttcgtaaattgagacatcctagccgtagtaagcgtcttaaggatttcttagaa

SEQ ID NO: 9161 - DNA, 1069 bp, Bacillus anthracis
atggcaaatcatgaattagatcaattacgtaaacaggtagatgaaattaacttacaactattacaccttttaaacaaacgcggtgaaatcgttcaaaaaattggggaacaaaagcaagtacaaggtacaaaacgttttgatccagtacgtgagcgtgaagtgcttgatatgattgcagagaataacgaaggaccattcgaaacatcaacagttcaacatattttcaaaacaatcttcaaagctagcttagaattacaagaagatgataaccgtaaagcattactagtatcacgtaaaaagaaacaagaaaacacaatcgttgatgtaaaaaggtgaattgattgtaaacggcccacaaaactttcatcatgggaccttgcgcggtagaaaggttagagcaagtcgggcaagtaggccaagcgatgaaagaccaagggcttaaaattaatgcgcggtggtgcttcaaaaccgagaacatctccatacgatttccaaaggtttaggagtagaagggctacaaattttacgtcaagtagcagatgagttcgacttatcgatcattagtgagattttaaatccaaacgatgttgaaatggcattagactacgttgatgtaattcaagttggtgcacgtaacatgcaaaacttcgatttactacgagctgtaggtaaagttaacaagccagtattattaaaacgtggattagcagcaacaattgatgagttcattaatgcagcggaatacatcattgcacaaggtaatgaccaaattattctatgtgagcgcggtattcgcacatacgaaagagcaacacgtaacacattagacatttcagcagtaccgatcttaaagaaagaaacacatttaccagttgttgttgacgtaacgcattcaactggacgtagagatttattattaccaacagcgaaagcggctcttgcaattggtgcagatgcagtaatggctgaagtacatccagacccagcagttgcattatcagattctgcacaacaaatggatattccggaattccatagattcatggaagagttaaaaggtttcaaaaat

SEQ ID NO: 9162 - DNA, 728 bp, Bacillus anthracis
cgtatcgatatgtctgagtatatggaggaaacagctggtttcacgcttaattggtgcccatcctggatatgttgaatatgaagagggcggtcaattaacagaagcagtaagacgtaaaccgtattccgttatgttattagacgaaatcgaaaaagcgcctcccagaagtattcaatatttttattacaaatgttagatgacggacgcattacagattcgcaaggtcgtacaggggactttaaaaaatacaggttattattatgacttcaaataattggatcctgctcctttattagatggattagaagaagatggctccattaaagaagaatcaagagaacttgtaatgggacaattgagaggacatttccgaccagagttcttgagacgcgtcgacgaaattattttatccaaccttcttccaccgaatgaaattaaaggtatggtggataaaattgtaaaagaattccaaggtcgtttagctgcccgtcatattccggtaaaattaccagaagcagcgaaagaatttgttgtagaagctggctttgatcgcgatgtacggagctcgtccattaaaacgatatgtacagcgtcaagttgaaacgaaattagcgagagaattaattgcaggtacgattactgacaatagtcatgtagtggttgatgtagaaaataacgaattagtcgttcatgtgaaataaaaaaagagttcggataaaatccggact

SEQ ID NO: 9163 - DNA, 751 bp, Bacillus anthracis
ttagtttttgatacgaaaaacttaaatctatggtacggagaagatcatggcttaaaagatattaacttaagcattcatgagaatgaagttacggcaattatcgggcgcaagtggttgtggtaaatcaacttacttaaaaacattaaatcgtatggtagagttagtaccaatcgtgcgaactacaggcgtaattgaatatagagagcgcaatatatttgataaatcatacccagttgaagaattacgaacacatgtaggaatggtgttccaaaaaccaaatccatttccaaaatctatttatgaaaatgtagcatacggtccaaaaattcatggtattagcgataaaaaaacattagatgaaattgttgaaaaaagtttacgtggagcagcaatttgggatgagttaaaagatcgtttgcatgataatgcatatggtttatctggtggacagcaacagcgtctatgtatcgcacgttgtttagcgattgaaccagacgttattttaatggatgagccaacatcggcactagatccaatttcaacattaaaagtagaagaattaattcaagaattaaagaaagactttagcatcgttattgtaacacataacatgcaacaggcagcacgtatttcagataaaactgctttcttcttaagtggagaagttgtggagtatacagatacaaataaattatttacgacaccttaagataagcgtacagaagattatattacaggccgattcggttga

SEQ ID NO: 9164 - DNA, 510 bp, Bacillus anthracis
atggagagaactacaattaaagaatatataattcgaactgctacggaagaggaaagcgatagtattatcacactattaaaagaagtagcacaatggctacaacataaagaagtggaccagtggcagtaccttttaggaggagaggctacggatgaaatactagaaggtataagagagaaatatacatatgtgattacgaaagaagatgaaattatcggtacagttacagtatctcctaaacaaaatgaatgggatgaacatatttttggtaaagaggaagtttctaattcattatatattcatagatttgcggtaaaacggaagtataaaggtaacggaataggagaatggattttacagtggatagaagagaatgtacaacatgacaaagagtttttgaagttggattgcgttggacataatcgtacgttgaatgatttttataagaaaaatggttttgattatgttggcagtacagatggacttagtaagtttcaaaagaaaagggga

SEQ ID NO: 9165 - DNA, 1016 bp, Bacillus anthracis
atgtcagttatcttttctggtattcagccgagtggaacgattacacttggaaactatttaggagctatgaagcaatttacagagctacagaacgaacacgactgttatttctgtattgtaaaccaacatgcaattacagtacctcaagatccccgtacaacttcgtaaaaacatcggcagtcttgctgcactttatgtagcatgcggtatcgatcctgaaaaagctacttattttgtacagtcagaagtaccagcacacgctcaactaggatggattatgcaatccgttgcttacgttggagaattagagcgtatgacgcaatataaagataaagcatcaggtagagattcagttccagctggattactaacttacccaccattaatggctgctgatattttactttacaacactgagatcgtgcctgttggtgatgaccaaaagcaacttatcggaattaacaccgtgacctagcagagcggtttcaccaaacgcttccgtgaagtattcacaattccctgaaatccgcattccaaaagtaggagctcgcgttatgtcactaacagagcctacgaaaaaaatgagtaaatctgatccgaatccaaaatcaatgatcagcatgcttgacgaaccaaaaacaattgaaaagaaaattaagagtgctgtaactgattctgaaggtatcgtgaaatttgataaagaaaacaaacctggcatctctaacttattaacaatctactcttcattctctggaaaaacagttgaagaaattgaagcaatgtacgaaggaaaaggatacggcgactttaaaggcgatctggcacaagtagtcgtagaagcgatccgcccaatccaagacaaatataacgaactaatcaactcaccagaactagacgaaattctagacacaaggtgctttgagaagcaaaccgcgttgccattcaacaactacgcaaagtagaaaacggcaaggggggttagtagaaaacgtaggtaacatataaaagcggaagcg

SEQ ID NO: 9166 - DNA, 987 bp, Bacillus anthracis
atgaactctttacaatttaatcgtcatcgtcgcttaagacaaagcgggggcatgcgtgcgcttgtgcgtgaaacgtttttacatacggaagattttatttaccctatttttgtattagaaggtgaaaatgttcgtaatgaagtaccttctatgccaggcgtatatcaaatgtctttagatttattgcaagctgaaatgcaagaagttgttgatttaggtattcgttctgttattgtatttggtttacctgctgaaaaagatgaagttggatcatcagcatattgtgatcatggaattgtgcaacgcgcgattcagcaaattaaaggtgaattccccgatctagtagtagttgcggatacatgtttatgtcaatttacaagccatggtcattgcggtgtaattgaagatggtattattttaaatgacgagtctcttgcagttcttgcaaaaacagctgtaagccaagcgaaagcaggagcggacattattgcgccatcaaacatgatggacggattcgtaacagcaattcgccacgcattagatgaaaatggttttggacatgtaccagttatgtcgtacgctgtgaaatattcatcagcattttatggaccattccgtgatgcggcacacggtgcaccgcaatttggtgatcgtaaaacatatcaaatggacccagcgaaccgcatggaagcattccgtgaagcagaatcagatgtaatggaaggggcagatttcttaattgtaaaaccagctctttcttatttagatatcgttcgtgatgtgaaaaataactttaatttaccagtcgttgcttataacgtaagcggtgaatattcaatgattaaagcggcagcgcaaaatggttggattaatgaaaaagaagttgtacttgaaaaattaattagtatgaaacgtgcaggagcagatttaattattacgtatcatgcaaaagatgcagcaagatggttacaagaaggaggcgctaaa

SEQ ID NO: 9167 - DNA, 1326 bp, Bacillus anthracis
agaacacaaattggtttaacggtagcactttctatcgtagtaggaacgattattgggtctggtgtgtttatgaaacgcgagagagcgtattagattactcggggagttctaatatggcgattcttgcttgggtaattggtggttctgttaacgttagcaagtggtttaacagtaggtgaaattggagcgcaaattccgaaaaatggtgggttgtattcgtatttagaggagattttaggaagtttttggggaataattatcaggctggaatgcaaaacgattgtttatgggcccagctattatgggaacattaggggttatactttagttctttaatgattaattttttctatttagataaagtatggaatttaccaatcgcaattggaacagttgtgttccttggcgttgtaaatagtatgggggacaaaatacggagggtatcgtcaaaacgatcacgacattctgggaagatgattccaatcgtattaattgttgtgttaggtttttggaaagggaatagcgatatctttaacgtagtgtgccgattatcagaaaatcaaagtatcgggatgcgattcttagcaacgttattgctttatgacggctggattttacttgcttcgatgggcggagaaatgaagaatccaacaaagctattacccgaaagcaatgacagttggggattttaattgtaccagctgcttacgtcattaattaacttagcgttactgaatgtattaccagcaacgcaaattgtagaccttggagaaaatgcaccagcgacagctgcgggcatgctacttggggaatatggcgggaaaaattattagtatcggtattatcgtatctattatcggttgtttaaatggaaagatttgaacgttccctacgtatcccgatgtcgatggcagaacgtggacaacttccatttgctaagtttattgcaaaggaaagtccaagatttaaaacaccagcaaatgcgattactgttgaaatcattttaggaattattttaatgattattagtgatccaaataagctatctgagatttccgtattcattatttatattttctacgtaatgacgtttatcggtgtcttcattttaagaaaacgtaataagaataaagagcgtgcatacagtgtaccgttattcccaatcgtcccaatcgttgcgattttggggctcactcttgtaaatcggtagtgcgattattagcgatccactaagttgtttctatcaaatgggaattgtcttacggggactttccggtatattggtatttaaatgcagatgaacataaactgaaagctgtcataatt

SEQ ID NO: 9168 - DNA, 573 bp, Bacillus anthracis
atgcattatccagaaccaatatcaaaactaattgatagttttatgaaattgccaggaatcggaccgaaaacagcggttcgattggcatttttcgtattagatatgaaagaagatgatgtgttaggttttgcaaaagcacttgtaaatgcaaagcgagacttagcgtattgttccgtatgtgggcatattactgaccgtgacccttgttatatttgtaacgattcacatcgagatcaatcagtggtttgtgtcgtacaagaaccgaaagatgtaatctcgatggaaaagatgaaagagggtgggggtgtatatcatgtgttacctggtgctatctctccaatggggggaattggaccagaagacattaatatcccgcagcttttaaagcgactgcacgatgaaacggtacaagaagtaatattagcaacaaatcctaatattgaaggggaagctacagcgatgtatatatcccgcctcttaaagccgacaggtattaaagtaactcgtattgcacatggtctgccggttggtggagatttagaatatgcagatgaagtgacactgtcgaaagcg

SEQ ID NO: 9169 - DNA, 1110 bp, Bacillus anthracis
gtgaatgaaatgactcatcgtacaaaaacacgtccagttaaagtcggtaatttaacaattggcggtaataatgaattaattatacaaagtatgacaacaacaaaaacacatgatgttgaagcaacagttgctgaaattaaacgtttagaagaagctggctgtcaagtcgtgcgtgttgctgttccagacgaacgcgcagcaaatgccattgctgatattaaaaaacaaatcaacattccacttgttgctgatattcattttgattatcgccttgctttaaaagcaattgaaggtggcattgataaagtacgtatcaatccaggtaacattggtcgtcgccataaagtagaagctgttgtaaatgcagcaaaagaacgcggtattccaatccgtatcggtgtaaacgcaggttcattagaacgtcacattttagaaaagtacggatacccaactgcagatggtatggtggagagcgccttgcatcatattaaaattttagaggacttagatttccacgatattatcgtatctatgaaagcctctgatgttaacttagcaattgaagcatacgaaaaagctgcacgtgcttttgattacccattacatttaggtatcacagaatctggaacattatttgccggaactgtaaaaagtgctgctggtcttggagcaatcttaaataaaggtatcggaaatacactacgtatttcacttagtgctgacccagttgaagaagtaaaagttgcgcgtgaactattaaagtcattcggccttgcatctaatgcagcaacacttatttcttgtccaacttgtggtcgtattgaaattgatttaattagcatcgctaacgaggtggaagagtacatctctacactgcaagtaccaattaaagttgccgtacttggttgtgctgtaaatggtcctggtgaagctcgtgaagctgatatcggtattgccggtgcacgcggagaaggattattattccgtaaagggcaagttgttcgtaaagtaccagaagaaataatggtagaagaactaaaaaaagaaattgacgtaattgctgctgaaatggctgctgaacgagaaaaagaaaaagaaacacaagaacaa

SEQ ID NO: 9170 - DNA, 837 bp, Bacillus anthracis
tggattatgagctatcgaaaactgaaaagaaataaaatggcatttatcggaggtattatcgttcttttctatattgttatagctatatttgccccattgttagcaccctataatccatttgacattcagttagtcaacaaattacaaccaccatctatggaacattggatggggacagatgataaaggtagagatattttaagccgccttttacacgggacacgactttcattacttgttggattttcttctgtatttataggagcattgttcggcattattctcggtatcatttctggttattacggtggatggtttgacacgggttattatgcgaatcatcgatatcatgctagctttccctggtattttacttgctcttgctattgtaggcgcactaggaccaagttcttgtgaacgtaatattcgctatgggctttttctcaatcccctatgttcgctcgtatcgttagagcttctacattaccagtaaaaaaattagagtatatcgatgctataagagcactaggggcaaatgactttactattattatgaaacacatattccctaacatcttatcacctattattgtccaagccactttacgcttagctacagcaattttatctgcagctggattatcatttttaggacttggagcgcaaccaccttcacctgaatggggtgccatgttaagtaatggacgcgactttttatttaccgcaccacatattgcaatgtttcctggaattgcaatgtctacactcgtaatcggtttaaacatgtttggtgatggattacgtgatgcactagatccgagacttaaaaaatagaaa

SEQ ID NO: 9171 - DNA, 195 bp, Bacillus anthracis
atggagcaaaagcagtataacttgtacgatgttgtggaaatgaagaaagcccacccatgtggggagaatcgttggaagattattcgtatgggaatggatatccgcattaagtgcgagggatgtgaccattcagtaatgattcctcgaagagagtttgatcgtaaggtgaaaaaaatacttgtgaagcacgaagaa

SEQ ID NO: 9172 - DNA, 1060 bp, Bacillus anthracis
ttatatggtggaaaatcagctgagcatcaagtttcgttacaaacggctcttgctgctattaaagcattaaatcaagataaattcgagattcatccaatttatattacagaacaaggtcaatggatacgcggtgaacgtattgaaggtgaagtagcaaatgttgaagttctaaaaatgagcggtgcagaaaatgcgatttctccgttatctttaagcacagaaatcattccatctgcaaatgctgaggaaaatgctatcgacgttattttcccattactacatggaccaaatggtgaagatggaacggttcaaggtttattagaattaatgaacattccttatgtaggaaatggtgttctagcatctgctgctggtatggataaagttgttatgaaaaacattttcgcagaagctggattaaaaacaagcgaaatatgcatcattcattcgtagcggatgggaaaaagatcgtgaaacagcatatgaaaaagtagaagaagtattaggatacccttgcttcgtaaaaccagcaaaccttggttcaagtgttgggattaataagtgtaaaaatcgtgaagagcttgagaatgcatttgaagaggcattccaatttgaccgtaaaattattgtagaagagaatatcattggacgtgaagtagaagttggtgtactaggtaatgatgaaccgaaatgttcagttgtaggtgaaatcgtacctaaaaaagacttctatgattataagtcgaaatacatcgatggtgatacagcattaattatcccagctgaaatgacagaagaagagtctaatgttattaagcgagatgcgattgttgccttccaatcgttagatggtgctggcttaacgcgagctgatttcttcttaacgaaagatggagaagtatatattaacgaagtgaatacgatgccaggatttacgccgtttagtatgttccctctactgtggcaacatactggattaccgtatccggaattaattgaagagctaattcgtttagcaatggagcgtcacgaagaaaaacaaaaaattaaatatacaatc

SEQ ID NO: 9173 - DNA, 788 bp, Bacillus anthracis
atggataataaaatcgtatatgtcgtatctgactctgtaggagaaacggctgatttggttgttcgagcagcaatgggccaattcccatttgctcctgatattagacgtgtaccgtatgtagaagatacagggacattaaaagaagtgatttcgattgctaagagcaatcaagcacttatttgttttacgttagtaaagcctgacatgcgccaatatttagtgacagaggctgcaaaagaaggtgtagaggcatatgatattatcgggcctctaatcgatcaaattgaagaaattacagggcaagtgccgagatatgagcctggtgttgttcgtagattagatgaagaatactttaaaaagattgaagcgattgagtttgctgtgaagtatgatgatggtagagatgcacgtggtattttaaaagcagatatcgtgttaattgggatttcgcgcacatcaaaaacaccactttctcaaatattagctcataacaaccgtctgaaagttgctaacgtaccacttgtcccagaagtagatccgcttggagaatttatatcaagtggctaaagaaaaatgcttcggtttgaaaattacgccagaaaagttgaatcatatccgaaaagagcgattgaaatcacttggactaagtgacggagcaacatatgccaatattaatcgtattaagaaaagagatgactcaccttgagaatgtagttagtaaaataaattgtcaagtaattgatgtatcgaccaaagcgatgaaagaaccagctaccattattgtgaat

SEQ ID NO: 9174 - DNA, 648 bp, Bacillus anthracis
gtatcgaacttaaattatacagttagatcgataaaacggttcaaaaatagaacggtcattatttcaggcggaggtaactctgcaattgattgggcaaatgagttagaacccaattgcgaaaaaagtctattttacatatagaaaagaagaattatctggggcatgaggccccaggaaaacaacttatgaacagttcttgcagatgtttctttaatacctccattacaacattaattgctggccatccccatgaagcgattgaatatgtagaattaacaaatcccgaaacgggagaggtttctcagttagctatcgatgaagttattattaatcatggctatgaacgtgacattacattactagaaaatagtgagttagacgttgcgattatagataattattatattgcaggtaatgcaaatactgaatcttcagtagacggattatatgctgctggagatattttaacgcatgaaggaaaattacactcaattgcgggagcattccaggatgccgggaaaggtggtaaataaaggggaacaattttttcacccagatgcaagggagtatggaatgttttcttggcataatgaagtatttaagaagagaaatcgtgaattgattaagcagatgatgaaaataataagg

SEQ ID NO: 9175 - DNA, 909 bp, Bacillus anthracis
atgaaaaagaaaattttattttgggtactcggtatccttggggtactaatcataggtggaggaatttatgcttataatgtatattcttctgtatctaatacattaaaggaagttcatcaacctttaaaacgtgatcaaaacaacagtaatgttggagaaaaagtgagtaagagtgaaccagtgtcaattttattactaggagcagatgagcgcggtgaggataaagggcgttcagattctttaatggtgattacattaaatcctaaaaataactctatgaaaacagtaagtattcctcgtgatacgtatacagaaattgttggaaaaggtaaaagcgataaaatcaatcatgcttatgcattcggcggagttgatatgtctgtagcgacagtagaaaacttcttgaatgttcctattaattattatattgaagtgaacatggagggctttaaagatattgttgatgcagttggcggtgtagatgtaaagaatgatttagaatttacgcaggatggacatcattttgcgaaaggaaatattcatttaacaggtgaccaagctctagcattcacacgtatgcgtaaacaagacccacgtggtgactttggtcgtcagatgcgtcaacgtcaagtgatgcaaggtgttatcaaaaagggtgcaagcttctcttctttaacaggttatggagatgtattatcagcaattcaaaagaatgtgaagacaaacttaacgcaagatcaaatgtttgatatgcaaaagaactataaagattgcttgaaaaatagtgaggatattcaaatcccaggtgacggtcacaaggctgctgatggcatttggtattactatgttccagatgcagcaaaacaagatttaacgaataaattaagaacgcatcttgaagtgactaag

SEQ ID NO: 9176 - DNA, 1136 bp, Bacillus anthracis
actatcgaaacaaaactagcgcaaatcggaaaccggagtgaaactacaacaggaaactggtaatccgccctgttacctttcaactggcttatcgtcccgaaggaatgggaaaatctactgggatttgactattcccaaactgggaatccaactcgcggcctattagaacaggcaatcgcagacttagaataacggcaaccaggtttatgcttgtagttccggtatggcagctgtgctccttgtcctttccctattccgctcagagtaagaacttattggatcccaaaaattattccgggggccctaatcaataatttccggaccccaaaaaaaaggggatggtccaaggtaaatacgtaattacccaacctattaaacaaattgagcaagctatcccaactgaaacaaaagctattttcatagaaaaccgccgacaatccattaaatgcaagattactgatattgccgcctgtcgcaactggtagcaaaaagacacgggactacgttcttattgtagacaacacattttagcacgccttatatacagcagccatttacagaaaggtgctgacattgtacttcatagcgcaacaaaatatttaggaggacataacgatgtactaagcggacttgtcgttgcaaaaggaaaggaactttgtgaggaaatcgcccattatcataatgcatcagggtgcggggctaagtccatttgactcatggctattaatccgggggatgaaaacgttagcgccttcgcatgaaacacactgaaaaaaatgccaaaaccagttgttggcttatttaaatggagaaggacgggttggacaaaagtatttttatccctggaaaagggcgggagggaacccactttccgccttaaagatgaaacatggattaatccattcttacaatctttagcatataattacattcgccgaaagtcttggtggtgttgaaagtttaatgacatatccagcaacacaaaacacacgttgatattcctgaagaaatcagaacagcaaaacggtgtatgtaatcgtcttcttcgattttctgttggccatgaaaaatagtaacgatttaatcaaagacttacagcaagccattaaacttgtaaagaagggtgtaagaatatg

SEQ ID NO: 9177 - DNA, 2232 bp, Bacillus anthracis
acaacctttatagacggtagcgttttagtaaataacattccgcagcttaatgccaatccaagtaccggtatattggtaggaacgattgctcctaacatttctatcccagtcacattttctgttactgtcgtagcgcttccaactagcggccatgttcaaaatcaagcaacttctcgttatacaataaatggagaagaacaaatatcgactagtaacattactttcactgaagttatttctgctaatataatcgcagtaaaaacaacacctatccaatatgctgacctacaaaccattatcccttacacaatttccatcacaaacaatgggaatatacaagtggaaaacattatcgttacagatatcatcccagcaaatacaaactttatagagaatagtgttattgtgaatggaaacactcgtccaaatgacaatccacttagtgggataccaattgataacattctgcctaatacgacagcaactgttctattccaagtacgggttacttcgatacctcaaacaaatccaatctctaacacaagtacaattgaatatgaatacacggtaggagatcaaccacctattaccaaaactattatttcatcagctgctttaacagaaattaatcatgcgaatttgaatagtaataaagctgttgaccttgcatttgcaatggtcggtgatacgttaacgtatacgattacactcaatcaaactggtaatgttgcagcaaatgatgtaatcattcaagatatgattcctcaaggtactacatttatagaaaatagcgttattgtaaacggagaaactcttccgggagtaaatccagcaaatggcataccaattggtactataattgtagatggagacgctatcgcttcattccaagtaactgtgacttctattccaatacgaaacgaactcaccaaccaagcaatctctacttttaactatatagtcaatccaaataacgtacctgttacaaatacgacgacaacaaatacagtcacaacaaccgtccaaaatgataatgtcattgcgataaaagctgttgatttcacgagtgccttacctggtcaaactttaacgtataccattacgattactaataatggtaatatcactattgaagatcttcttctagtagacatggcacctgtagatacaacattcgttattggtagtgttacgattaacggaatcaatcagcctaatgcgaatcctgaaaatggtattacgttaggaactcttgctcctaatgactctgttattattacattccaagtgacaatatcttcttctactcttcaatctacaatcaataacgatgctactattttctatacgcctattgtcggtctaatcgaaccacctattacaattacaaggcaaatagatatcgtcacaaagcaaacaaatactgttacaacgacaatcattgatccaatggttcatattgaaaaaacggctgacaaatctattgtcgttttaggagatattcttactttcacgttagagatatttaatgattctccaatcccaacagtaagtactgccgttatagataccattccagctggtacaacatttatagaaaacagtgttacgcttaacggtactccggttccaaatgtccgtccagacacaagtatgaatatcggatctttacctgcagatgcagtagcaatactaacatttaaagtgctcgtaacttctattccttcaaacagtacaattattaattctgctaccgtcacagccaccttccaattgacaccccaggacccaattattacttttattgttaattcaaatatcgttcgtataccagttcaatttgtaactgcgacagtagtgaagaacgcttccgtcacctcagcttatttaaatcaatattttgattatacggtgcgtattacgaatacttccgagatttcactctcaaatatttctttacaggatactattccagtaggtttacaatttataaacggcactgtcttcattaacgaagaacgctctccactagcgaatccgaatatcggtttcctagtcgctactaatttggaaccaaacgaaacaattatcgtcttattcacagtacaagtaataagtccacctgttaataatgaatttaaaaatacggccaatatttcattacaacttcaagtctcgcctaccgacccaccaattacagaaactgttacaagtaacgaaaacatcgtcatc

SEQ ID NO: 9178 - DNA, 1587 bp, Bacillus anthracis
atgttgaaaaaaatcattccagttgctttagcattaagtacagttatttttactagtgtattcgctgtgccttcagcccaagcaagtacagaaccaaaccgctacatagatgtacaaatgctcggtattaacgattttcacgggcaactagacacagtaaaaaaaattaacaataaagatgcagggggaatcgagtacttaggggcttatttacgtgatcgtgaaaaacaaaatccgaatacattaaaagtacatgctggcgatgttgttggagcaagtactcctgtttcagcattattacaagacgaacctactattgaatttctaaatgatttgaaattcgatgttggaactataggaaatcatgaatttgatgaaggtgttgaagaaatgaaccgccttatttatggtggataccatgagaaaacagggaaatttaaaggtgcaaaattcccatatgttgccgcaaatttctataataaatctactggtcgtttatttttaccaccattcactataaaaaaggtacaaggagttcctgttggatttatcggagtcgtaacaacggatgtgcctaaccttgttatgcctactatgctaaagaatgtagaaattacagatgaagttgaagctattaacaaatccgtaaagcaattaaaaaaactaggtgttaaatctatcgttgttcttgcacataacggtgggacaacagatgggaacggcgtaacaaatggtgatatcgtccgattagcaaatgagactgatccagaagtcgatgttatttttggtgggcatagccacacttatgtaaatggaactgttaataataaacttgtcgtacaagcaaattcttacggtatggcttttgctgatgttgatgtaaagattgatcgtaaaacacaagatattgttgagaaaaaagcagaaattgttacaacttaccatgaaggcatggagcctgataaaaaaataaagaagaagatggagaaatatcaagcaaaaatcgcacctcttgttaatgaagttgtaggtaagtctattgctccgctagatcgcaaactaaatacggctggtgaatctactcttggaaatttagttgctgatgcccagcgtgcaacaatgcaatctcaaattgcacttatgaatcctggtggtattcgtaatgacttagatgctggtgatattacatggggagagatatatggtattcaaccattcggaaatcaattaataaaagtaaatttaacgggtcaagatattcgtgatattttaaatcaacaatggcaaaaagacataacaagaatgcttcaaatttcagggatccaatacacttgggatgcaaacaaacctaatggagaaaaagtaacaagtattcgcctaacaaatggagaagaaattattccttctaaaacttacagcgtcgttgcgaacgcatttctagcttcaggtggagatggatttgtatcctttaaaaacggtaaagatgctgaaacaggaccaactgattttgaagcattagtagattacataaaaaaatcaaaagaaccaattcagtctattattgatggaagaattcaaaaaataaat

SEQ ID NO: 9179 - DNA, 948 bp, Bacillus anthracis
atgattccagtaacaatattaactggttttcttggatctgggaaaacaacattattaaatcgtattttaacagagaatcacggtcagaaattagcggtgatcgtaaatgaaatagggaaaattggtatcgataatcagttgattatgaatgttgaagaagaaattatggaaatgacaaacggttgtttatgctgtactgtgcgggaagatttactcgttgcgttaaaacaattactggatgtaaaagcagaaggtaaaatggactttgatggattagtaattgaaacaactggtcttgcaaatccaggtcctattattcaaacattctttttagatcctgttattcaatctgcataccaaattaatggtgttgtaacagtagtagatagttatcatatacataaacattttgaaaaaggactagaagcaaaagaacaaattgcatttgccgatgttatattagtgaataagttagatttaattgaagagagcgaaaaagaaaacctcttacatgaactgcaaggaataaacccgactgcaaagttaattcagtcgactaactgtgatgtggatattccatcgttactaaaaattcaaacgtttaaaacgaaagatacgttacaaatttatcctcataaagagcataatcatctagaaggtgtaaaatcgtttgtactacgcgaagagcgtccgctagatttacaaaaactgaatgaatggatgtcagctgtcgttcaagaactaggtgaatatttatatcgctacaaaggaattttatcaattgatggagtagataaacgcatcgttttccaaggtgtgcatacactgtttgctgcatcatatgatagagagtggcaagagggcgaagaacgagtaagtgaagttgttttcatcggaaaagatattaataaagaatggttccaagaacattttgaggagtgtgtgaaa

SEQ ID NO: 9180 - DNA, 265 bp, Bacillus anthracis
ggaaatgcgagaagttgttcaatggaagcaattgattgcgcgaagcgtggggagtttacagaagcagaagcgaaattacaagaagcgttagaggaattaaaagaggcgcaccgtgtacaaacggatctcatacagaaagaagctggtggtgaaaaaactgaagtaactcttctgatggtgcatgcgcaagatcatttaatgaatgcgattacggtgaagggaattagcgagtgaatttgtagaattatatacgaagatgtccgtg

SEQ ID NO: 9181 - DNA, 1083 bp, Bacillus anthracis
atgaaggagcttcatacgtttgggtggtatgcagcacgtgtatcaccacatttgccgaaaaaagcatttaaaccagttcctactcgtttatttggcggactggcttatttgcttgtggcattggcgggattaatatcgattggtgtatttgaattgaatgtgtgggctaatctaggaattgcgattgttcttggattatgttttgcttcacttgggtttttagggcatgaaattctacatggaactgttgtgagaaaggcatggcttcgtgatttcttaggcgcgattgcatttatgccgctatcaacaggtcctaaactttggagaaagtggcataatgcaacgcatcacgttcatacacaacatgaagagaatgatccagatgcatggccgacacttgagaagcttaaaaagagtaaatttttgagttgggtatatcgcatgcctcttcatgtacgttcattctttagttttctgtcattaacaattcaatttacattgcattcgactcgaatgttctttcattttataaaagagtttaagtcatccaatcaaaaatctgtatggcttcaacttcttttgccttggactgtttggattagtttattgtttattatgggacctgggaaatggttatttgcatatgtgattccattgttaattgctaactttattgtaatggcatatatcgcaacaaatcaccgcttaaatccaattgttccagtgaatgatccgttagcaaactgtttatcagtaacagtgccgcgttgggtagacgttttacatttcaatttctcatatcatacagaacatcatttgttccctgctatgagctctaaatactatccattagtaaaagagaaaattaaagaaatgtggccggaacgctatcatgagatgccgatgacaaaagctttggcagcgctatggaatacaccacgtgtgtattatcaaggaagtgaattagtggatccgcatagagagcatttctatggttctttaggaaatggactagatcctcataatatttcatatcgtgaggaacatatagaggaagaagagagtattaaaaaagtaaatcag

SEQ ID NO: 9182 - DNA, 159 bp, Bacillus anthracis
atggataagttactcacgaatgttgattggaatcaaatgttagaagcaactggtgaaacgttatatatgacggcaatcgcagctcttgccacatttattttaggacttattttaggattgttgctctttatgacagcgaaagataatttatgggaaaac

SEQ ID NO: 9183 - DNA, 1110 bp, Bacillus anthracis
atgtcaactatcgaaacaaaactagcgcaaatcggaaaccggagtgaaactacaacaggaactgttaatccgcctgtttacttttcaactgcttatcgtcacgaaggaattggtaaatctactggatttgactattcacgaactggaaatccaactcgcggcctattagaacaggcaatcgcagacttagaatacggcgaacaaggttatgcctgtagttccggtatggcagctgtgctccttgtcctttccctattccgctctggagacgaacttattgtatccgaagatttatacgggggcacttatcgattattttctgagcacgaaaaaaagtggaatgttcgatgtagatacgtaaatacacaatctattaaacaaattgagcaagctatcacaactgaaacgaaagctattttcatagaaaccccgacaaatccattaatgcaagttactgatattgccgctgtcgcaactgtagcaaaaagacacggactacttcttattgtagacaacacattctacacgccttatatacagcagccattaacagaaggtgctgacattgtacttcatagcgcaacaaaatatttaggaggacataacgatgtactaagcggacttgtcgttgcaaaaggaaaggaactttgtgaggaaatcgcccattatcataatgcatcaggtgcggtcttaagtccatttgactcatggctattaatccgtggtatgaaaacgttagcgcttcgcatgagacaacatgaaaaaaatgcaaaagcagttgttgcttatttaaatgatgaggacggggtgacagatgtattttatcctggaagaggcggcatgatctcatttcgtcttaaagatgaaacatggattaatccattcttacaatctttatccttaattacattcgccgaaagtcttggtggtgttgaaagtttaatgacatatccagcaacacaaacacacgctgatattcctgaagaaatcagaacagcaaacggtgtatgtaatcgtcttcttcgattttctgttggcattgaaaatagtaacgatttaattcaagacttacagcaagccattaaacttgtaaaagaaggtgtaagaata

SEQ ID NO: 9184 - DNA, 420 bp, Bacillus anthracis
atgcctactattaaccaattagtgagaaatggtcgtactgataaagtatggaaatctaaatcacctgcgttaaacaaaggttttaactctttaaagaaaaaatcaactgatatctctgcacctcaaaaacgtggtgtatgtactcgtgttggtacaatgactccaaagaaacctaactcagcgttacgtaaatatgctcgtgttcgtttaacaaatggtattgaggtaacagcatacatcccaggtatcggtcacaacttacaagagcacagcgtagtattaattcgcggtggtcgtgtaaaagacttaccaggggtacgttaccacatcgttcgtggtgcgcttgatacagctggtgttgacaagcgtatgcaaggccgttctaaatacggtactaaaaagcctaaaagcgctaagaaa

SEQ ID NO: 9185 - DNA, 1266 bp, Bacillus anthracis
aagaaggaacttattgaaaagttttccgagattattaaaggttgattccgcaatccaagggaggattgtcattccgggcccaccaacccccagggcaaaatggagtttggtaaagttattaagtgaaagagttgaaagaagttgggttaaccggaagtaccgatgaatgataatggaatatgtaatggcaactctcccagttaatacggatagggatgtttcctgtaatcggctttttagcacatttagatacagcaacagactttacggggaaaaatgtaaaaccacaaattcatgaaaactttgacgggaacgcaattacgttaaatgaagagcttaatattgtattaacgccagaacagttcccagaattaccgtcttataaaggacatacgattattacaacggacggtacaacactgttaggagcagatgataaagctggtcttacagaaattatggttgcaatgaattatttaatacataatccgcaaattaaacatgggaaaattagagttgcgtttacgccggatgaagaaattggccgtggcccagcacattttgatgtagaagcgtttggtgcatcattcgcttatatgatggatggaggtccattaggtggtttagaatatgaaagctttaatgctgcaggtgcaaagttaacgtttaacggaacgaatacacatcctgggacagcgaaaaataaaatgcgtaacgcgacgaaactagctatggagtttaatgggcatttaccagtagaagaagcaccagagtatacggaaggatacgagggattctaccatttactttctttaaatggtgatgttgaacaaagtaaagcatattatattattcgagattttgatcgtaaaaactttgaagcgcgtaaaaataccattgaaaatattgtgaaacaaatgcaagagaaatatggacaagatgcagtcgttttagaaatgaatgatcaatactataacatgcttgaaaagattgacccagtaagagaaattggtgaatattgcatatgaggcaatgaaaagtttaaattttcgaacccaatctttccttcggattggcggggaaacagatggatcacaattatcggtatatgggattaccaacgccggaccattttcacaggtggtgaaaaactatcacggtaaatttgagtatgttttcggtagatgttatgggaaaaaagctgttcaagttattatagagattgcaagacgatttgaagagcaagcttaaaaaagaaccaagtag

SEQ ID NO: 9186 - DNA, 875 bp, Bacillus anthracis
atgaacagaataaatcgtatgtatgtaatgatgttatttgttcctttgttttggggtgggtcttttgcaacagcagagcatgtccttactgaaattccaccgattactgcggcaacaattcgttttggtttagcaggttgtattttaataggcatagtttttatgaaatctgaatggaatacaagtttgttattaaagaattggaaagggctgttatttgtatcattaacaggtatttttggctataatgtttttttctttatgggacttaactatacttctactctgaatggctcgcttattattgctacaatgcccgtttttgtaacattgggagcaatattattttttaaagagtcttggagtacaaaagtcggaatgagtttaattttgtcccttatcggtgtaatagttgtgattacgagtggttcaatggatacacttatgtctttgtcatttaataagggagatcttttatttatagctgctttaatctgtggggtgttatatagcttaacaggcaaaaaagttatgagaggtgtctcccctttgttaactacaatgagtatgacggtattgggtactgtgtttttagcaggcctttctctatatgaagatggatggggaaaggttggggcgttttctctacaggatggatagaaatgttgtatatggtcatatgcgggacgttaattggatatatcgtgtttaataaaggagtagaagagctaggtgcaagcaaagcgagtatgtatttaaatctaacgcctattgtagctacttgcatatcagttgtcttatatggagcagctgttacgtggaaacaaatagctggaatgataattgtgttaatcggtgtttatatagcaacggta

SEQ ID NO: 9187 - DNA, 888 bp, Bacillus anthracis
ttggaagatcaattaaaagattttattcattatatggttgtggaaaaagggctagcgaaaaatacagtagtatcttatgaacgtgatttgaaaagttatgtaaagtatttgcaaaaggtagaacaagcgaaaagctttcacgaagtgacacgcttgcacattgttaattttctgcagcacttaaaagaaaacggaaaatcttcgaaaacattagcacgtcatattgcatcgattcgttcgtttcatcaatttttacttcgtgaacgagcagtagagcacgatccatccgtacatattgaaacgccgcaaggagaacggaaattaccgaaagtattgtcagttgatgaagtagaggcgttacttcagacaccaaaaatgacgagtgcttttggggttcgtgataaagcgatgctagagttactgtatgcaacaggacttcgtgtttcagaattaattgccttaaatttagaagatgtacatttaacgatgggatttgttcgttgcgtagggaaagggaataaagaaagaattattccactaggaagcttagcgacggaagcgattcaaaagtatattgaaaagggaagaagagaattgatgggaaaaaaagtagtagatgcactctttttaaaccatcatggaaatcgattatcaagacaaggattttggaagattttaaaacgattagcgaaagaagcaaatattgaaaaagagcttacacctcatacgttgcgccattcttttgcaacgcatttattagaaaatggagcagacttgcgtgctgtgcaagaaatgcttgggcatgcagatatttcaacgacacaaatttatacgcatgtttcaaaaactagattaaaagatgtatataaacagtttcatccgagagca

SEQ ID NO: 9188 - DNA, 870 bp, Bacillus anthracis
atgttagagctaaaaaacgtttgtaaaagttatgaagattttgcagtgaaaaatataagttttacgttaccacgcggatatattatgggatttgtcggaccgaatggggccgggaaaagtacgacaatcaaaatgattatgaatttaattaaaaaagatagcggcgaaataaaaatttttggcaaggacaataagaaagccgaaaaggaaataaaacaaaatatcggctttgtatacgatgaaaatcattattacgaagatttaacgtgcgaacaaatgaaacgtattattgcaccgttatataaaaagtgggatgaagagcagtatcaatcgtatatgcatagattgcaagttccaaagtataaaaaaattaaagaactatcaaaagggatgaaaatgaaatttgcgattgccatcgcgctctcgcaccacgcagagtttatcatcatggatgaaccaacagcaggattagatccagttgttcgaagtgaattgcttgatatgttgcaagagattgtaatggaagatgaagtatctgtattattctcaactcatattacaacagacttagagcgcatcgcagattatattacgttcatcaatgatggagaaattatatttactggtgaaaaagacgacttaatggagaactacgtaatcgtaaaaggaagtaatgatttattagaccgagaaggaaaagaactatttgttggattacgaaaaaataaatttggttttgaaggtttagcgaaggataaacaaacaattatcgactggtttggaaatgaggttgtactagaaaagcctacattggacgagatcatcgtttacaccgcgaaaggaagaggtgcctatgcgtcagctcgtata

SEQ ID NO: 9189 - DNA, 863 bp, Bacillus anthracis
atggtaattcaatggttcccgggacatatggcaaaggctagacgccaagtaacagaaaaattaaagttaattgatgttgtaattgagcttgtagatgctcgattacctttatcttctcgaaatccgatgatcgatgagattattacacataaaccgaggcttgttgttttaaataaagccgatatggcagatgatcgtttaacaaaacaatggatcgcatattttaaagaaaaaggccatatgggcactttcaattaacgccacagcctggaccaggtatgaaaggaaattgcaccgggctttgtaaagtgttcattgaaagaggaaatcttgataaaatggttcgcgcaaaggtattagaccgagagtgattcgtgcattaattgtaggtataccgaatgttggtaaatctacgttgattaataagttagcgaagaaaaatattgctaaaacaggagatcgtcctggtgtgacaacagctcagcaatggattaaagttgggaaggaaatggaattacttgatacaccaggtatactatggcctaaatttgaagacgaattagttggattgcgtctagctacgactggtgcaattaaagattctattttaaatctacaagatgtagctgtttatgcactacgttttatggagaaacattacccagagcgattaaaagagcgttataattctcaatgacattccagaagatatcgtagagttatttgatgcgattggaaaaaatagaggctgtttaatgggcggcggaatgattgattatgataaaacatctgaacttgtacttcgtgagcttcgtggtggcaaacttggaaaaatgacatttgaaacaccagaagagtttgca

SEQ ID NO: 9190 - DNA, 2883 bp, Bacillus anthracis
gtgaaaagagtgagtaagagcaaggattttatcgttgtaaaaggtgctagagcacataacttaaaaaatattgatgtaaccattccgagaaatcaacttgtcgttgtaacaggattgtctggttcagggaaatcctcattagcatttgatacgatttatgcagaagggcagcgcagatacgtagaatcgttatctgcgtatgcacgccagtttttagggcaaatggataagccggatgtagatacgattgaaggcttatctccagcgatttcaatcgatcaaaaaacgacgagtcgtaatccgcgttcaactgttggaacggtaacggagatttatgattacttacgtttattatttgcgcgaattggtacgccaatttgtccgaatcatggcattgaaattacatcgcaaacagtagagcaaatggtagaccgtgtacttgagtaccctgaacgtacgaaattacaagtgttagctcctatcgtttctgggcgtaaaggtgcacatgtaaaagtacttgaagatattaagaagcaaggttatgttcgtgtacgtgttgatggtgaaatgctcgatgtgtctgaagatattgcgttagataaaaataagaagcattctattgaagttgtaattgaccgtattgttgtaaaagaaggaatcgcaagccgtcttgctgattctcttgaaagtgcattaaagcttggcgggggacgagtgttaatcgatgttatgggagaagaggagcttctatttagtgaacatcatgcttgtccgcattgtggtttttcaattggagaattagagccgcgtatgttctcattcaatagtccgttcggtgcatgtccttcttgtgatgggcttggctcaaagttagaggtagatttagaacttgttattccgaactgggatttatcattaaatgagcatgcgattgcgccttgggaaccgacaagttcacaatattacccacagcttttacaatctgtatgtaatcattatggcgtggatatggatgtgcctgtaaaagatataccgaaagatttatttgataaagtgttgtacggaagcggtgaagagaaagtttatttccgctatgtaaatgaatttggtcaagtaaaggaaaatgagattttatttgaaggtgttattccaaatattgaacgtcgttatcgtgagacgagttcggattacattcgtgagcaaatggaaaagtatatggcagaacaagcttgtccgaagtgtaaaggcggacgcttaaagcctgaaagtttagctgttttcgttggcggaaaaacgattgctgatgtaacgaagtattctgttcaagaagtacaggaattcttctcaaatgtggagctaacagagaaacaacaaaaaattgcccatttaattttaagagaaattcaagagcgcgttgggttcttagtaaacgttggtttagattatttaacgttaagtcgtgccgcaggaactttatctggtggtgaggcgcaacgtattcgtttagcaacgcaaattggttcgcgtcttactggggtgctttacattcttgatgagccttctatcggtttgcatcagcgcgataacgatcgtcttattcgtacattgcaagaaatgcgtgatttaggtaatacgttaattgttgttgagcatgatgaagatacgatgatggcagctgattatttactggatatcgggcctggcgcaggtattcacggtggacaagttgtatcagcgggtacaccagctgaagtgatgcaagatgagaattcactaacaggtaagtatttaagcggtaaagagtttattccagttccacttgaaagacgtaaaggtgatggacgtaaagtggagattgtcggtgcaaaagagaataacttaaagaacgcgaagatgtcattcccgcttggtacgtttgtagcggtaacgggtgtatctggatcaggtaaaagtacgatgattaatgaagtactatataaatcgttagcgcaaaagttatataaagcgaaagcgaagccaggtactcataaagaaattaaaggtcttgagcatttagataaagttatcgatattgatcaatcgccaatcggtcgtacaccacgttctaatccagcaacctatacaggtgtgttcgatgatattcgtgatgtgtttgcgcaaacgaatgaagcgaaagtgcgcggatatcaaaaagggcgtttcagctttaacgtaaaaggtggacgttgtgaagcgtgccgtggtgatggaattattaaaattgagatgcacttcttaccagacgtatacgttccgtgtgaagtttgtcacggtaaacgttacaaccgtgaaacgttagaagtgaaatataaagataaaaacatttctgaagtgttagggatgacgattgaagacggagtagagttcttcgctaatatcccaaaaattaaacgtaaacttcaaacgcttgtagacgttgggcttggttatatgaaattagggcaaccagccacgactttatctggtggtgaagcacagcgtgtgaaattagcttctgaattacaccgtcgttctacaggacgtacactatacattttagacgagccaacgactggtttacatgcgcatgatatcgcccgtcttctagaagtgctgcaacgtcttgttgagagcggtgagacggtacttgtcattgaacataatttagatgtaattaaaacagcggattatatcgttgaccttggaccagaaggcggagacaaaggtggacaaatcgttgcttccggaacgccagagcaagtagtgaaagaagagcgctcgtatacaggtaagtatttaaaagagattttaaatcgtgataaagcgagaatgaaagagaaaataaaagaagtagagttatcacaa

SEQ ID NO: 9191 - DNA, 636 bp, Bacillus anthracis
atgaaacaactttttcgtcaatggtatgacttaagcgagataaaaaaagaattaacaacacgaaattggtttccagcaacgagtggtaatatttctataaaggttagtcatgaaccactcacttttctcattacagcaagtggtaaagataaaaccaaaacgactccagatgactttctactagtagatcatctaggggttcccgtattagagactgaattacgtccctcagcagaaacaatcttgcatacacatatttataacaatacgaatgctgggtgcgtccttcatgttcatacaactgataacaatgtgatcacaaatttatatagtgatgccgtcacacttcaaaatcaagaaattattaaagctctcgatatttgggaagaaggtgcaacaattcacattcctattatcgaaaaccatgctcatatcccaacgcttggagaaaacttccgcaagcatatacagggagattcgggggcagtattaatccgtaaccatggtattaccgtatggggccgagatagctttgatgcaaagaaaagattagaagcttatgagtttttattccaatttcatataaaactactatcaattcaaggaggcgtttctaatggcgcaaattcgtattca

SEQ ID NO: 9192 - DNA, 486 bp, Bacillus anthracis
gtgggagtacatgttgttttatatcaaccagaaattccagcaaatacgggcaatattgctcgtacttgtgcagcaactggaacagaattacatttgattagaccgcttggattttcaacggatgataaaatgttaaagcgtgcaggattagattattggcagcacgtgaaaattacgtattatgattcaattgaagagttttacgagaaaaataaagacggtgaattcttctatttaacaaagtatggtgagaaagctcatacagcgtttgattatagcaaacgtgagaaggattactattttgtatttggaagagaaacaaacggcttaccagctaatgtaatcgaagaaaacttcgatcattgtttacgcattccaatgactgataaagtgcgttcattaaatttatctaatacagcagctattttaatttatgaagcattccgtcaacaaaattatccaggattagatttagaaattgtttat

SEQ ID NO: 9193 - DNA, 549 bp, Bacillus anthracis; identical to SEQ ID NO: 9145

SEQ ID NO: 9194 - DNA, 553 bp, Bacillus anthracis
atgaagtttgcgtttataaaggctactgaaggaagcgcgtttgtggataagtacttttctaaaaatgggacgaatgcgaataaaaccaagtatgcgcgtcggagcgtatcatttttttagttttgatagtaagggtgaaacacaagcagagcaatttatacgaaatgttccaaaatataaacaagcactgccacccgtaattgatgttgagttttacgctaacaaaaaagataatccgcctaagcgtgaagatgttacgaaagagttgtcggtcatgattgaaatgctagaaaaacattacggtaagaaagtaatattgtatgcaactcaagaggcgtatgatttatatataaaggatgcgtatcctcaatgtgatatatggattcgtagtgttcttacaaaaccgagtttatctgatgaaagaaagtggacgttttggcaatacacgaaccgtgggaaactaagtggttataatggaaaagaaaagtatattgatttaaatgtattttatgggaatgaggaagagtttgagaattatggaatgaaagattaa

SEQ ID NO: 9195 - DNA, 366 bp, Bacillus anthracis; identical to SEQ ID NO: 9131

SEQ ID NO: 9196 - DNA, 1076 bp, Bacillus anthracis
atgaaagcattactttggcataatcaccgtgatgtaagagtagaagaagtaccagtaccggatgtaaaaccaggagcagttaagattaaagttaaatggtgtggtatctgcgggacagacttgcatgaatattagccaggacctatttttattccgacagaagagcatccattaacacatgtaaaagcaccggttattttaggtcatgagtttagcggtgaggtagttgaaatcggtgaaggcgttacatctcataaagtgggagaccgcgtcgttgtagaaccaatttattcttgtggtaaatgtgaagcttgtaaacatggacattacaatgtttgtgaacaacttgttttccacggtcttggcggagaaggcggcggtttctctgaatatacagtagtaccagaagatatggttcaccatattccagatgaaatgacgtatgaacaaggtgctcttgtagaaccagcagcagtagcggttcatgcagtacgtcaaagtaaattaaaagaaggggaagcagtagcagtctttggttgtggtccaattggacttcttgttatccaagcagctaaagcagcaggagcaactcctgttattgcagttgaactttctaaagaacgtcaagagttagcaaaattagccaggtgcgggatacgtatttgaattcagggactccaagatgtattagctgaatttcgcactttaacaaatagtttagggtaaaatgttggcttgaaagtaactggtgttgaagtagtacttcgtcaagcaatgaaaagcacaagctttgaaggacaaactgtaattgttagtgtatggaaaaagacgcaccaaatactccaaataatcttgtactaaaagaaaaagaagtggtttggtatttagggatccggtcatattttcccagctgttattaaaataatagctttgggtcaaattcaagcagagaaaattaaattcgaaaaaaattcccagtagatcaagttgttgaagaaagaatttgaagcacttgtaaaagataaaacacaagtgaaaattcttgtttcacctaaataatatagaatagtaaaaag

SEQ ID NO: 9197 - DNA, 1393 bp, Bacillus anthracis
gttaaaaaaggtgctgctctattaatggtagcaacaatggcattatctagtgctgcttgttcaaatagtaaaacagagggaaaacctgaagcacaggcaaaagtagcaccagttgaaaaaaatggtgataaaactgtaattcgtttttggcatgcgatgggtggaaaaacacaaggtgtactagatgggcttgttgcagactataataagtcacaaaataaatatgagataaaggcagaattccaagggacatatgaagagtctttaacgaattttaaaccgatgtctgctacgaaagaaagcaccagctcttgttctgtcgagtggaattacaaccaaatatatgattgttagcaaaaagattacgccccactgatagttgtgataaaaaagataaatatgatacttccccattgggaaaaagcaattacaaattattattcagtgatgggaaaaatgtattctatgccatttaattcatctacaccagtattaatttataataaagatgctttcgcaaaggcgggcttagatccagagaaagctccgaaaacgtatgcggaattacaagaagcagcgaaaaagttaacgattaaagaaggcggaaatgtaaagcaatatggattctcaatgttgaactatggttggttctttgaagaattgttagcgacacaagggcgctttatatgtagataatgaaaatggtcgtaaagatgctgcaaagaaagcagtatttaacggtaaagaaggacagaaagtatttgggatgctagatgagttaaataaagctggtgcattaggaaaatatggagcaagttgggatgatattcgtgctgcgttccagtctggccaagttgctatgtatttagattcttcaagctggtgttcgtgatttaattgacgcatctaagtttaatgtaggcgtttcgtatattccatacccagaagattcgaaacaaaatggtgttgttattggcggagcatcattatggatgacgaatatggtttcagaagaaagacaacaaggtgcttgggactttatgaaagagataacgaagcccagacgtacaagcaaagtggcatactgcaacaggttatttctctattaatccggacgcatataatgaaccattagtgaaagagcaatatgaaaaatatccacagttgaaagtaccagtagatcatttgccagccgccgaaccatttcccagcacccacaaggtccctttaattagtgtatttcccagaatcaagagatgcagttgttaaaagcgttagaagcaatgtatgatgggggaaaatagtaaaagaagcgctagacgaagctgcaaaagcagcagatagagcaactagtattccagctcgtacgagtcaaaaattagaggaaagcccg

SEQ ID NO: 9198 - DNA, 1345 bp, Bacillus anthracis
ttggaaaagatcatcgtccgtggcggaaagcggttaaacggcacagtgcgtgttgagggcgcaaaaaatgctgtattacctataatcgctgcagccctattagcgagtgatggaaagaatgtactatctgaagtaccagttttgtctgatgtatacacaattaatgaggtattacgtcatttaaatgctgaagtcgtatttgaaaataaccaagtaacaatcgatgcttctaaagagctaaacattgaagcaccatttgaatatgtacgtaaaatgcgtgcatctgttcaagtaatgggaccattattagcacgtaacggtcgtgttcgtattgcacttcctgggtggatgtgcaattggttcacgtccaattgaccaacatttaaaaggcttcgaagcaatgggagcaaaagtacaggttggtaacggttttgttgaggcatacgttgtagggagaactaaaaggagctaaaatttatttagacttcccaagcgtgggcgcaacagaaaatattatgtctgcagctacattagcaaaagggacaacaatccttgaaaacgcagcgaaagaaccagaaatcgttgacttagctaacttcttaaatgcgatgggagcgaaagtacgcggagctggaactggaacgattcgtatcgaaggcgttgataaattatatggtgcaaaccactctattattcctgaccgtatttgaaagcggggacattcatggttgcagcagcaattattggtgagacattctaaattgaaaatgctgtacctgaacatttacgctcaattacagcgaaaatggaagaaatggggtgtaaaaattatcgaagaaaatgaaagtgtacgtgttatccggccacataagtttaaaacgggtgaatattaaaactatgcctcacccaggtttcccaacagacatgcaatcacaaatgatggcattattactacaagctgatggcacaagtatgattacagaaacggtatttgaaaaccgctttatgcacgttgaagaattccgtccgtaaaaagcctattttaaaaatggaaggttgtttttgtttttatgaagggtcccaaccagtttacaggggggctgaagtaggcgccaattgatttaccgtgctgcaacctgcattaatcttagctggtttagtatcagaaggtttacaaatagtgtaactgagttaaagcattttgcccgtggttatgtagttttcataggaaaattagtggcattaggggcaactattggaccgtgtaacggaaaaagtagaagaagtgaaagaacaagaagtttctgatcttcacgcttaattgaaatagtctctacgtcttttg

SEQ ID NO: 9199 - DNA, 962 bp, Bacillus anthracis
gaaaatgaatacttaaatttatgccgccatgtaatggaacatggtacgaagaaagaagatcgtacagggacaggcactgtatctgtatttggatatcaaatgcgttttgatttaagtaaaggttttcctttattaacgacaaagagagtgccgtttcgccttgtagcaagtgaattgctttggtttatgaaaggtgatacaaatattcgttatttattgcagcataataataatatttggaatgaatgggcatttaagagctgggtagaaagtgacgagtatactgggtcctgacatgattgatttcggtcttcgctcacaacaagatgaagaatttaaagtacagtccgatgagcaaatggatttgtttaaaaagaacgttttagaagatgatgagttctcaatataaatatgtttatttaggagacgtatacggtaagcagtggcgtgcttggaaaacgacagctggtgagacacttgatcaattaaaagatgtaattgaaatgattaagaaaacgccagattcgcgtcgtctaattgtttctgcttggaatcctgaagatgtaccaagtatggcattaccaccttgtcatacgttattccaattttatgtagcagatggcaaactttcttgtcagctatatcaaagaagtggtgacatattcccttggatttccatttaacattgcaagttactcactactgacacatttaattgcacatgaatgcggacttgaagtgggagaatttgttcatacaattggagatgcacacatttatacgaatcattttgagcaagtagaaaagcaattggcacgtgaaccacgtccatttcccgaaacttacactaaatccagatgtgaaatctgtgttttgattttgaaatggaagatttaacaattgaaggatatgatccacatccagcaattaaagcaccagttgcagtgtaattgtagaggaga

SEQ ID NO: 9200 - DNA, 882 bp, Bacillus anthracis
ttgaagcgatttagctattttatggtaggttgtcttactcttacactattagtaggatgtagtgcagcagaaaagccagtagaacaagtaaaacaagttaaaaatacacttacagcaaaactagctaccgaggaaaaaatgatagaaatagatggtcaaaccatttacttcaaaaagattggtaatgaaaaaccacctttacttatgatccatggatttggaggatcttcagatggttttcgaaagatttattcagatttagcaaaagatcatacaattatttctgtagatgctttaggattcgggcgctcatctaaaccgatggatttttactattctttcccgactcatgcaaatttgtattataaattaatgaaaaaactaggttacgattcgtttgcaatactgggacactcaatgggtggagaaatttctcttaatttaacatatttatatcctgaagccgttacccaccttattttaactgacgctacaggcggtgctcatacactagtgaataaacaaggttcaccaaaaccccagttgtcgactgatttacatactgtctctgctattgcagattatgatgaaagcaaagtgaaatttaaacgtaatgacgaagaacattacaataaaatgaaattatggcctagacgtcttcaaatcaatgcaaatgaaatacaacaaccaactttaattatatggggaagaaatgatagtagcgtttcatggaaagaaggagaaacgtatcatcaattcttaaagaatagtactttccatattatcgaaaagggttatcatgcaccgtttcgtcaagagccacaagaatttgtaggttatgtaaaagaattctttaaaaacaatccgatacaagctgaaaaa

SEQ ID NO: 9201 - DNA, 942 bp, Bacillus anthracis
atgaagaattttaaaatggcgttattagcaatggtactagtcgttacttctgtactatttgcagcttgttctaacaaagaagaaaagaaagcagatgcgaaggatgcgaagactgaagagcgcactgtacaacatgcaaaaggggaaattaaaatccctgcaaatccaaagaaaattgctgaccttagtggttcaacagaagaattattaatctttggtatgaaaccaattattactgctaatacatctcaagaaaaaattgatgcacatattgaaaagaaattaaaagacgtaaaaccagttggttctgcttggggcgataaaattaacatcgaagcagtagctgctgcaaaaccagacttaattcttgtaaacaatcgtcaagaaaagatttatgatcaattatctaaaattgcaccaacagttatgttaaaaactccattagaccaatggcgtccaaaattcgaagaagtaggtcaaatcttcggtaaagagaaagaaacaaaagaatggttcaaacagtatgatgaaaaagcaagcaaattacatgacaaaatcgttgcgaaaactggcgatgctaaattcatgaaaatggctgcatatccaaatgctttccgtgtatatggtgactacggttacggtagcgtaatctttaatgatttaaaattaccagcagttaaaggtacaccaactgataaaccgttagtacaagtgcaaaaagaagctttaattgattacaacccagattacttattcgtatttacgactggtgacggttctcagcgcctaaaagaattccaagaagaatcaatttggaaaaatatgaacgctgttaaaaacaaccacgtatttacaattaaaaacgaagaattaaacaaaggttacttcccactaggtaaagaaatgatcttagatgaagttgctgagttcgttttagggaaa

SEQ ID NO: 9202 - DNA, 249 bp, Bacillus anthracis
atgccgttattctttatagatttagatgaatttcaccttattaatgatacgtttggtcataaagaaggagataaagtgttacaaaaagttacagaatgtttaagcagttttcgaatacccgatatgcacttatttagagaacacgatgatcaatttggtatgttaatagaaaatataacgaaagaacgtgtagaagtatttgcaaaaagcatacaaaaaaagattactgaacattttgtaatcgagagg

SEQ ID NO: 9203 - DNA, 678 bp, Bacillus anthracis
attcgtgatgttgtcaaagaagaacagccacgggagcgtttattgttagagggagctggaagtttatctaatcggggagcttcttgcagtggtactgagaacaggttctaaggaagaatcagttttgaagttatcagataaaattttacatcactttgatggtttacgtatggctatcagatgcaacgttagaagagcttgtcagtatacatggtgtcggggttgcaaaggcaactcagcttatagccgcttttgaactcggtagaagaatggtgcgtttagaatatcaaaatagatacagcattcgaagcccggaagattgcgccacatacatgatggaagaaatgcgcttcttgcagcaggagcattttgtatgtttatatttgaacacaaagaatcaagtcatacataggcaaacgattttcattggaagtttaaaattcatcaatgtaccatccaagggaagtttttaaagaagcgtttcgccgtgcagcagcctctatcatatgtcttcataaccatccctcaggagaccccgcgccgagccgagaagatattgaagtaacgaaacgcttagtagaatgcggtcgaattatcggaattgaagtgcttgaccatattataataggtgaccataaattcgtgagtttaaaggaaaaaggtcatatttaagactat

SEQ ID NO: 9204 - DNA, 663 bp, Bacillus anthracis
atgttaaaaaaagcaatcgctgaatttattggtacatttgtactggtattattcggaactggagtagctgtcattggcggcggaattgaaggaattgggacattaggaatcgctatggctttcggtctatctattgtggctatggcatatagcatcggaacaatttctggatgtcacattaacccagcagtatcagtagctatgttcatcaataaaagaatgaacgctatggaactttgttattatgtattagctcaaattttaggtggtttattaggagctgcaacattggtaacaattttacaatccgctaaaacacctttagataatttaggacaaaatggttttggaactcttggtttatctggagcatttctagttgaatttattttaactttcgtattcattttagtaatcgtcgctgtaacaggtaaaaaaggcagttcttctctagcaggattagtaattggtttcacattagttttagtccacttattaggtattccgttaactgggacttctgttaacccagctcgtagtatcgcaccagctttattcgttggcggagaagcactttctcaactatgggtattcatcgttgcaccaattcttggcggtatcgtagcagctatcgtaggcaaatttattttaaatactgaaaaa

SEQ ID NO: 9205 - DNA, 870 bp, Bacillus anthracis
atttatatgaatggggaatttgtagaaaaagaaaaggcagttgtttcagtatatgatcacggttttttatgagggggccggtgtatttgaaggaattcgtagttacggtggaaatgtattttgtttaaaagaacatgtaaaacgattgtatgaatcggcaaaatctattttacttactgacgccgctgacggttgacgaaatggaagaagcagttttacagacacttcaaaaaaatgagtatgcagatgcttacattcgcttaattgtttcaagaggaaaaggggacttaggacttgatccgagaagctgtgtgaaaccgagcgttattatcattgcagaacaataaaaattattccttcaggaattttacgataacggactaagtgttgtatctgttgcatcaagacgtaatacgcccagatgcattagacccacgaattaagtcaatgaactacttaaataacgtacttgtaaaaattgaagcggcacaagcaggagtgctagaggcacttatgttaaatcagcaaggatatgtttgtgaaggatctggagataatgttttcgttgtgaaagatggaaaagtgttaacacctccgtcatatttaggggcattagaaggcattacgagaaatagtgttatcgagctatgtgagcgactgagtattccgtgtgaggaaagaccattcactcgccatgacgtatatgtagcggatgaagtgtttttaacaggaacggcagctgaattaattccagttgtaaaggtggattcaagagaaattggagatgggaaaccaggaagtgtgacgaaacaattgactgaggaatttaaaaagttaacgagagaaagaggcgtacgtgttccaggactg

SEQ ID NO: 9206 - DNA, 504 bp, Bacillus anthracis
gtgccaactttattattaggggctgccattccatttggaacgattgcttacacattgttcattttcttacttctattagtaatgctacgcaaatttgcgtggggtcctttaatgggaattatgaaagaacgtgaagagcacgttgctaatgaaatcgacgctgcagaaagaaataatgctgaggcgaagaaattagtggaagaacaacgtgagatgttaaaacaatcgcgtgttgaagcacaagagttaatcgaaagagcgaaaaagctcgctgtagatcaaaaggatgttattgttgctgctgcgaaagaagaagcagaatcaattaaagcatctgctgtacaagaaattcaacgcgaaaaagagcaagcaattgctgctttacaagaacaagttgcttctttatctgttcaaattgcttctaaagtaattgaaaaagaactaaaagaagaagatcaagtgaagttaattcgcgattatattaaagaagtaggagaagcgcga

SEQ ID NO: 9207 - DNA, 873 bp, Bacillus anthracis
atgtggcaacaaaaaagctttcaacaaaatgaaaagggagttttatatttagtaccaactcctattggaaatttagaagatatgacatttcgtgcaatccgaattttaaaagaagctgatttaattgctgctgaagatacgagacaaacgaaaaaactttgtaattattttgaaattgaaacgcctgttatgagttaccacgagcataataaagaagtaagtggaaagaaaatattagagaagttagatgaaggaaagactgtggcacttgttagtgacgctggtatgccgtgtatttccgatccaggctatgatattgttgtcgaggcagtagctgagcaatatcatgtaatcccgcttcctggggcaaatgcagcacttacagcattaattgcatcaggccttcaaacaaaacagttttatttctatgggtttttacaaagaaataaaagggaaagaaaaatggagttagagaagcttcgttacgtacaaactacaatgatgttttatgaagcacctcatcgcctggatgatactttaatctcgatgcaagaagtattaggaaatagagaaattgtattatgtcgagagttaacgaaaaaattcgaggaatttattcgaggaacagttgaagaagcaattgagtggacgaaacaaaatgaagttcgtggtgagttttgtattttagtagctggttcaacggaagagcctgctccagaagaacaatggtgggaatctatttcagtatataatcatattgaacattatataaatgaaaaaggtatgaattcaaaagaggcaataaaaacagtcgctaaagatcgagatttgtcgaaacgcgatgtatatcaaatctatcatgtcgataaaaaa

SEQ ID NO: 9208 - DNA, 246 bp, Bacillus anthracis
atgggatggattatcacattaatagttggtgctattataggtgcaattgctagttctataacgggtaaaaatttcccgggtggtatgttcggtaatataattgcaggtttattaggtgcttcgttaggtggtaagttatttggatcctttgggccatcatttggtgggattcatgttgtgccagcattattaggagcaatcgtgttaatttttattgtatcatttgtagtgaaagctgcaaagaaa

SEQ ID NO: 9209 - DNA, 1369 bp, Bacillus anthracis
atgtttcgtacaatctccaactttatgcgcgttggtgagataagacgtaaaatattattcactttagcgatgttaattcgtattcaggattggcacgtttatcccccgtgccatttacaaatggagacgtactgaaggcacaagatcaattaaatgctttaggtattctaaatacatttggcggtggagccttgaaaaatttctccatctttgcgatgggaatcatgccgtatattacagcatccattcttggggcaatttattgcaagagggatgttgttcaataattttcggaaaggggagaggcaaggtgaaatgggcccttcgtaaattaacggcatttcacgcgttattttacaattgttctgcggtttattcaggggggttggtatgtcaattcggttttaacggtatggtagggtggacaaataattttgaatcctgggttggagcacttatttatacattgctacggtactgactgctggtactgcatttttaatgtggttaggtgaacagattacagctaaaggtgtaggtaatggtatttccattcttatctttggtggtattgccgcagcgatcccaagtgttatatctcaagtgtatcagcaacagtttcaaaatatcggagatcaattgttcatgagtatcgttaaagttgcattgatcttactagctgtgctagcagttattgtgggtgggtattttcattcaacaggctggtagaaagatcccaatttcaatatgcgaagcgtgtaacagggaagaaatggtgggttatgctggagcacaaaacacacatttaccgcttaaggtaaatagtgctggtgttattcccagtaatttttgctgtttcattcttaattacgcctccgactattgcacagttcttcccgaaacatgatgtatcgcagtggattattgcaaactttaactattctcacccagtgggaatgatcatatatgttgcgctcattgtagccttcacatatttctatgcatttgttcaggttaatccagagcaaatgtcagaggattctaaccaaacaaaggtggattagttccaggtattcgtcggggtaagaatacggaccaatatctaccaaaaaatcttgtatcgtttgacctttgtaggatcaattttcctagcagcgattgcaatcttaccagttatctttacgaagctgggaaatcttcctccatctgcacagatcggtggaacgagtatgttaatcgttgtcggggtttgcttaggaacaaatgaagcagctagaaagccatcctgtaaaaccgcattacaaaagggtttatcaagcagtgagtaagtggggaagtatgttctcccctacatgctcatgtactctga

SEQ ID NO: 9210 - DNA, 327 bp, Bacillus anthracis
gtgtattttgcagacctttccccagttgttggttctgagcaaggaggtgttcgtccggttcttgtcattcaaaatgacatcggaaatcgttttagtccaacggtgattgtagcggctattactgcacagattcaaaaagcgaaattacccactcatgtggaaattgatgcgaaaaagtacggttttgagagagattctgttattttacttgagcagattcgaacaatcgataagcagcgcttaacggacaaaatcactcacttagatgaagtgatgatgattcgtgtagatgaagcgctacaaattagtttaggactaatagatttt

SEQ ID NO: 9211 - DNA, 1023 bp, Bacillus anthracis
atgcaagagcgatattcaagacaagtattgttttctggaataggtgaaaatggacaaaaggaaaataagggaaaagcatgtgctcttaattggtgcgggggcgctaggagctgcaaatgcagaagcgctcgttcggatgggaattgggaaattgacaattgccgatcgtgattatgtcgaatggagtaatttacaacggcaacagttatatacagaagaagatgcaaaacaatgtaaaccaaaagcaattgcagcggcagaacatgtaagaaagattaattctgaggtggaaattgtaccagttgtaacggatgtcacaatgaaagaaatggaagagttaacgaaagaagtggatcttttattagatgcgactgacaactttgatacgcgtctacttataaatgatatttcacaaaaagaaaatataccttggatatacggtggatgcattggaagttacggtgtaacgtacacaattcttccaggaaaaacaccatgttttcgctgcttaatggatcatccgatggggcggtgcaacatgtgatacagcgggaaattattcagccagctgtacagatggttgttgctcaccaagtgacagaagcaatgaaaatattggtggatgacttcgagacgctacgaggaacaatgttatcatttgatatttggaacaatcaatttctctcattaaaagtaaataaacagaaaaaaagtacatgtccatcttgcggaaatacacgtacgtacccaagtttaacatttgaatcacaggtgaaaacggaggtgctatgcggacggaatacagttcaaatccgtccaggaataaagagagttctaaatttaaacgaaattaaaaaaagattacaaaaaattgtacatgtccaaaaaacgccgtacttactatcatttctaattgatgaatatcgtttcgttttatttacagacggtagggcatttgttcatgggacaaatgatgtgaaaataggaaaacgattgtacgcaaaatatataggatgaacagaa

SEQ ID NO: 9212 - DNA, 711 bp, Bacillus anthracis
atgaaaaagtatgcattagtaactggagggagcggagggattggctctgctatttcgaaacaattaattcaagatggatatacagtatatgttcattataataacagtgaagagaaagtgaatgagttgcagaaagaatggggtgaagtgattcctgttcaagcgaatttagcttctagtgatggagcagagcaattgtgggaacaaattgaacatcctcttgatgctatcatatatgcagctgggaagagtatctttggactcgtaacagatgtaacgaacgatgaattgaatgatatggtagaacttcaagtgaagagtatctataaattattatcgatggcattgccatctatgattcaacggagaagcggtaatattgtacttgtttcgtctatatggggacaaattggcgcgtcatgtgaagtgctttactcgatggtaaaaggtgcgcaaaattcatatgtgaaagctttagcaaaagaggtttcattaagtggaataagagtaaacgcggtggcgccaggtgcaattgaaacggaaatgttaaacgtattttcagaagaggataagaatgaaattgcggaagagattccgttaggacgattaggattaccggaagaagtagcaaaaactgtgtcatttctcgtatcaccaggtgcatcttatataactggacaaattatcggagtaaatggcgggtggcattgc

SEQ ID NO: 9213 - DNA, 714 bp, Bacillus anthracis
atgaaaattttactgattatggaagaagcagaagagcgaagaagtttggctgaaaaatttattgaaaatataaagaatgtagaatgttttgaagcaagtatgggaacagaagcactatttatcatgaaaaagcatacaccagattttgtttttttaaactcaaaattaatggatggaactggatttgaatatgtgaatttattaagggaagtaaattgttatgcaaaatttatttttatgggtgaagatatagaagaatccattacggcatttcgttttcaagcattttattatttactacgcccatttcgcgaagaagatttgcaattccttttatatagaatgggtaaagagcaaggagagaaagcaaagagttatttgcgaaaactaccgatagaaggtcaagaaggaattcggtatatttttccggaagatattgtatatgtaagcaaaaataaggaaaacaaaacagtttcaatttatacaacaaataatcagtatatttcaacatatacacttcaggagctagaaaataagctaaatgcatatgattttttacgtgtgcataaaagttatttaattaatatgtcatatgtacaagagttaaagccttactataatggcacatataatctatatttagataaatatgatgagcaaccgattccagttagtcgtaattatgtgaaacgacttcgaaataaaattgaattg

SEQ ID NO: 9214 - DNA, 1230 bp, Bacillus anthracis
atgacaaacacaaaggacatgcactatatgctcgtcctatacggcattcttttaggctctatagtaggagcaacagtttggctatttttagttacaataaatatcggcattcactttatttgggagtacttacctactattttcgcttctcccccttattacactatttgcgtaacaactatcggtggtattctcgttggtttaactcaaaagtatttcggcacatatccacgtcttatgccagaagtgatgggtgaatataaaaaaacaggtagaattgaataccgctttgtacataaagctactttaactgcgattatcgttttaatctttggagctagtttaggtcccgaggcagcacttgttggtattatcggtggactttgtacatgggtaggggatcgctttacattcgccttaaaaggaatgaacggactaacagaggttggaattggcgctactttaagtgtaatttttaacgcgccattattcggttatttagctccaaatgaaaatgagggtgagcaaattaacgaattttctaaaggaaaaaaagcaattgtatacttagctactactttcgctggtttttccgtttatttattacttagtaaattcgataatcgcggatcctttatcgttgatttcggaaaaggttctctttctctcaatgaatggattgcctttctcccccttgctagtattggcgctatagttggattcttttatttcaaattagagtttacattagagaaattaatccaccccttaaaagaatataaactagcacttggtattatcggtggtattttattaggaattacaggcacgtttctcccgtacacgttattctcaggagaacatcaattaaaagatttagtcgtggaatggagccatttatccttctgggtactacttctttcagggattttaaaattatgtattactgccgtttgtttaaatacaggttggcgcggcggacatattttcccaatcatatttgctggatctagtatcggatatgctatagcttccattatcccgatagatccaatcgcttcggtagccgtcgtcacgacagcaatttcaagctatgcattaagaaaaccaattgctataacattactactactcatgtttttcccgctcaatttgctattaccgatgcttggagcggcagcaattggtaatgcatttccacttcctaaaaacaacgaagctacaaacgaa

SEQ ID NO: 9215 - DNA, 675 bp, Bacillus anthracis
gcagaaaaattttcgttagcagggcgaatcgcagctggtattgcacatgaagtacgtaaccctcttacaaccgtacgaggatatttacaatttttacaagaaaatgtttctccatctaataaagaactatttaaaaacttacttattcctgaattagatcgcgcaaatagtatcattacaaaatttttatctatttcaaaaacacgcgaatttacaagagaaccctttcccattaatacatttttacgtgagtatattcaacagttactagctagtgaagtctttttacataacatttcaattgattataatttttctactgaattagatgatattttagttcatattgatcgccatgaactttgtacaagtttttttaaacttattccagaacgctgtcgatgctcaaggagaaaaaaactttctatacaaatcactagttaccgccttgataattttgttcgtattactttcactggataatgggactggggattcccacaacgattcaagaatatatctttgatccattcttctcaacaaaagattccgggcaaaggttggggcttgtcaggtacgaaaaaatttatccaaaatcataatggtacattaaaaatgactagtaatgaagatggtactacttttactatttcaattccaatcttacctaaaaca

SEQ ID NO: 9216 - DNA, 948 bp, Bacillus anthracis
atgcccaaaaaagttcttattttttgtgatcctgggattgatgatacgatggctctcctcttagcattctttatcgatgaaatagaaatcatcggcatcgttgctgattacggcaatgttccaaagaagatggccgtacaaaatgctcatttccttaagaatgaaacaaggaatagaaatattaagatattcggtggttcagaacgccctcttactggtgccccgcctgctttttttacagaagtacacgggaaacaagggcttgggccaattattccaaatgggaatgtgactaacggagaaatggagaatttctttgaagtcattcctcttattgaacagtataaagatgaattaatcattgtaagtttaggaagacttacctctctagcaattttatttattatgtgcaaacagctaatgaaacaaattaaatcttattacgtaatgggcggtgcctttttacatcctggtaacgttacccctatttccgaagctaacttttatggcgaccctactgctgctaacattgttcttcaatccgcagctaacatgtacatatacccgttaaacgttacccaatactccgtcattacaccagaaatggccgagtacattgaagcaaaaggaaaagtcccactcgtcaaaccattattcgatcattattactatggatattataaaaatgccctgccagatttaaaaggtagccccttccatgacacaatgccaatactcgctttacttgataactctatgtttacgtatcacaaatcacctatcgttgtcatggcagaatcttatgcacaaggagcaagcattggagaatttcgttccttaggaaaacctaaaccatttatggattggccgagtcatcaaatcgcaattgattttgattataaccgtttctttaaacatttcatgtcacttatgacaggtgagcaattt

SEQ ID NO: 9217 - DNA, 561 bp, Bacillus anthracis
atgattacagtaagtaacgttagtttgcgtttcgcggatcgcaaattgtttgaaggtgttaacataaaattcacgccaggtaactgctacggtttaatcggagcaaacggtgctggtaaatcaacatttctaaagattttatctggagaaatcgaaccatcaacaggtgacatacatattacgccaggtgagcgtctagcagtattaaaacagaaccacttcgaatacgaagagttcccagtattagaaacagtaattatgggtcacacgcaactttataaagtaatgcaagagaaaaatgccatttacatgaaagaagacttcagtgatgaagatggtatgcgtgctgctgaacttgaaggtgagttcgctgagctgaacggttgggaagctgagtcagaagctgcaatcttactaaaaggacttggtattggtgaagatcttcatgataagaaattgtcagaattaactggggcagagaaagtaaaagtattacttgctcaagcattattcggtaaacctgatattctattactagatgagcctaccaaccactggact

SEQ ID NO: 9218 - DNA, 1284 bp, Bacillus anthracis
atggagaaaattgtttatgagcaattaaaagagacactctattatgaaaaacttcctaatggattagatgtatatattttaccgaagcaaggatttaataaaacatttgcaacgtctacgacaaaatatggttctgtggataatacattcgtaccactaggtaaagaagaaatgattcgtgtacctgatgggattgctcattttcttgagcataaattatttgaaaaagaagatcatgacgctttccaattgtttagtaaacaaggggcttccgcgaatgctttcacgtctttcacaagaacagcttatcttttttcgtgtacatcaaatgtagaacaaaatttaaatacattgttaaacttcgtacaagagccttacttttctgaaaaaacagtcgaaaaagagaaggggattatcggacaagaaattcaaatgtatcaagataatccagattggcgcttgtactttggattaattgatagtttgtttgtaaagcacccgattaaaattgatattgcagggacgatcgagtctattagtaaaattacgaaagacctactatatgaatgttatgaaacgttttatcatccaagcaatatgttaatgtttgttgtgggtgcaattgatccagagaaaacaatggatttagtacatgaaaatcaagcgaaaaaagattataaaaaccagccggaaattgtacgttcatttgaagaagaaccagatgaggtaaatgaaaagaagaaaattatttccatgcctgtacaaactccgaaatgtttagttggtattaaagcgacaaacttaaaagaaaagggagaagcccttttaaaacaagaaattgcgcttacgttacttttagattatttatttgggaaaagctccgttcattacgaatctttatataatgaagggctcatcgatgatacgttctcgtatgattatacagaagagaataacttcggttttgcaatggttggcggcgatacgaagcaacctgatgagctggaagagcgtttgaaaagtattttattaaacacaaattataatcaattagatgaggcggcattagaacgagtaaagaaaaagaaaataggtggctttttacgttccttgaattcaccggaatatattgcaaatcaatttacacgatatgcgtttaatgaatcgagtctgtttgatgcattgactgtattagaaagtctaacggttcaagatttacaagaagtagctcaattactattatcagaagagaaaatgagtgtttgccaagttttaccgaaaaaa

SEQ ID NO: 9219 - DNA, 897 bp, Bacillus anthracis
atgatttgtagtatgacaggattttggaagggccaaaataaaaaggggaaccttttccaattacagtagaaatgaaatcagtgaaccaccgtttttctagagatgagtattcgactaccgaagcagatgatggtattttgaagacaaaattcgtaaaataattgcacagcaagttcgccgtggacgcattgaagtgtctattagtatagcgggtgaagggcttgttgaaagaaaattaagtgtgaattggtcgcttcttgagcagtaccaatcaattatggaagatataaaagggaaatttcaattaccaagattctattacactcgagcaattaatggcaatgccagaagtaacagcgattgaagaggtagaaaacgtaaatggaacaatttgagaacagtttatatgaggctgttcgccaagctgctcatatgttaaaaacgatgagagatggcgaaggagaacgattacataaagatatagcgtatcgtttacaagagattcacaattgtgtaaatgcgattattccgcatgcaccaattgttacaaaaaaatatcgtgaacgattagaaaatcgcttaaaagaattacataatcaagatctagatgaacaaagattgctaacagaagttgcaatctttgctgaacgttgtgatattcacgaagagttagttcgtttgcaaagtcatttagaacaattccgtgaaacactgcagattgaagaacctgttggaaggaaaatggatttcatcgtgcaagagatgcatagagaaattaatacgattggttctaaggcaaatgacttaacaatttcaaaatatgttgtagaaatgaaaaataaccttgaaaaaattcgtgaacaagtacaaaatattgagtagctttcaaaaaatata

SEQ ID NO: 9220 - DNA, 1493 bp, Bacillus anthracis
aaagaggatagttatcctttacatacagatttatatcaaattaatatggcttatacatattggaaggatggtattccacaatcgccgcaatctcgtaagatttatactttcgaaagcttccttcccagaacggttatgctgtttttgctggtctttgaaaaatttgtagagtacatagaaaactttcactttaaccgaaagcaatatcgccttatttagcagaatttacaatttgaaagaagaattttttcctttttttccaaaattttaaatttccttggttacggtttggtagtatgcaagaaagttgaagtgtgttttaataacgagcctttattacgtgttgatgcaccgcttggtgaagcacaaattattgaaactgcactgttaaacattgtgaattaccaaacattaattgcaacaaaagcagctcgtatgaagcacgctgcaaataacgatgaacttttagagttcggcacaagacgtgcccacgagttcgatgcagccctttggggcacacgcgctgcctttattggtggtttctcctctacaagcaacgtacgggctggaaaacgctttgggatacctgtagccggcacacatgcgcactctttcgttcaagcttatcgcgatgaatatgttgcctttaagaaatacgctgaaactcataaaaaatgtgtctttctcgttgatacatatgacacattaaaatctggtgtgccaaatgcaattcgtgtcgcgaaagagtttggggatcgcatcgatttttatggcattcgcctcgatagtggtgatatggctttattatctcaaaaaggcaagaaaactactagacgaagccgggtttacaaacacaaaaattattgcttctagcgatttagatgaatacacaattatgcacttgaaatctcaaggagcaaaaattaatgtatgggggcggtgggaacaaattgattacgtcctttgaacaaccagcgttaggagctgtttataaactagttgggcgattgaagatacgcgccggaaaattaaatgatacaattaaaatttcatctaaccctagaaaaaattactactccaggacttaaacgaatttatcgcattatcaatcgagtaaacgatcatgctgaaggcgattatattgcattagattatgaagaacccggaaaagaagaaacgcttaaaaatgtttcatcctgttcacacgtatataagtaaatttgtaacaaactttgaagctcgcgaactgcataaagacattttcgttaacggtgaaagaacatatgaactaccaagtatattagatattcaaaaatataatgaacagagcctctctctattttgggaagaatatatgcgacttttaaccccttgaagaataccctgtcgatttaagccaagagtgctgggatcataaaatgaattacattcaaacagttcgagaacaagtgaaaaaaaacatacaaaagtaaacagagaagtttccccttctc

SEQ ID NO: 9221 - DNA, 540 bp, Bacillus anthracis
atgggaaatttccacgctacaacgatatttgcagttcatcataatggagaatgtgcaatggctggagatggccaggtgacgatgggaaatgctgttgtaatgaaacatacagctcgtaaagttcgtaaacttttccaagggaaagttttagctggttttgcaggttcggttgctgatgcatttactctttttgaaatgtttgaagggaaattagaagagtacaatggaaacttgcagcgtgctgctgttgagatggcaaaacaatggcgcggcgacaaaatgttacgtcagctagaagcgatgctcattgtcatggataaaacaacgatgctccttgtttcaggtacgggagaagtgattgaaccggatgatggtattttagcaattggatctggcgggaattatgcgctttcagcaggtcgtgctttaaaacaatatgcaagtgaacatttaacagcgaagcaaattgcgaaagcgagtttagaaattgctggcgatatttgtgtttatacaaaccacaacataattgtggaagaattg

SEQ ID NO: 9222 - DNA, 1065 bp, Bacillus anthracis
gtgttagatcgtttgcaagctgtagaaaatcgttatgagaagttaaatgaattgctaagcgacccagcaattattagtgattcaaataagcttcgtgaatattcaaaggaacagtctgatatacaggaaacggtagaggtgtatcgtgagtataaggatgttcgtgagcaattaaaagatgcgaaagcaatgttagaagataagttagacgcagaaatgcgtgaaatggtaaaagaagaggtttctgagctagaatcacaagaaaaaacattatcagagcgtctgaaaattttacttgtaccaaaagatcctaacgatgataagaacgttatcgttgaggttcgtggagctgccggtggtgacgaggctgctttatttgctggtgatttataccgtatgtatagccgttacgctgaggtacaaggttggaaaacggagattatcgaggctagctatacagagttaggtggatataaagagattatctttatgattaacggtaaaggtgctttcgcgaagttgaaatttgagaatggcgctcaccgtgtacaacgtgttcctgaaacggaatctggtggacgtattcatacatctacagcaactgtagctgtattaccagaggcagaagaagtagaaattgatattcatgagaaagatgttcgtgttgatacattcgcttctagtggacctggtggacagagcgttaatacaacgatgtcagcggtacgtttaacgcatttaccgactggtgtagttgtatcgtgtcaggatgagaaatcacaaattaagaataaagaaaaagcgatgaaagtattacgcgcacgtgtttatgataagtttagacaagaagcacaagctgagtatgatcaaaaccgtaaacaagctgttggtacgggtgatcgttcagagcgtattcgtacgtataacttcccgcaaaaccgtgttacagaccatcgaatcggtttaacgattcaaaagctagatcaaatcttacaaggtaagttagatgatttcatcaatgccttagtgatggaagatcaggctcaaaggatggaggcagctgag

SEQ ID NO: 9223 - DNA, 2516 bp, Bacillus anthracis
caaattaaaaaggctgctgttctagggtcaggcgtaatgggttcaggaattgcggcacacttagctaatattggtattccgacattattgcttgatattgtaccacctgcgcttacgaaagaagaagaggcgaagggacttacattagaacataaaagtgtgaggaattcgttttagtaattcggcctgtgcaaaatctattaaaagcaaaacccagcttctctggacagtgaaagggaaatttagcactgattgaagcaggtacttaggacgatgatcttgagcgtctagctgatgtagatgggattaatgaaagtagtagttgaaaacattagatattaaaaaaaaactattgcggagggtagatgctgtttgttaaaccgggtcttatcgtagcctcgattacgtcaggcatttcagttgaaaaaatggcagaaggttcgttccagacgatttccaggaaacacttcttaggcaccacacttttttaacccacccacgatattaaaaacttctaggagttaatccgccgaaaaaacctgattccacaggtattaagcttcatgaaactatttggcgaagacgttcttggaaaaggcgttgttatcgcaaaagacacaccaaactttattggaaaccgcatcggtacgtacggtttattagtaactcttcaagagatggtaaaacgcggctatagcattggagaagttgattcagtaacaggcccacttattggtcgtccgaaggagcggcaacgttccgtactttagatgttgtcggtttagatccatttggtataccgttgcaaattatgttataggaaacggtacaagaaaaaggaccgcaatttatttaaagtaccagcttttcatgcatgacatgcttgataaaaaatggctggaaggcaaaaccaggtcaaagctttcttcttaaaaccaaggaaaagaatttttagaatttaatccagaaacgatggagtacgaagctcgtaaaaaattaaaagctgcatcgattgagttaagtaaacaagaaaaaggtttatcgaataaattgaaagcgcttgtatatgcgaaagaccgcgcaggagagttgttatggaatatcatcacaccgactcttttatattctgcaaaacttcataaagagattgctgacgatatcgttgcaattgaccaagcgatgaagtggggcttcggctgggagcaaggcccatttgaagtttgggatgcaattggcgttgaaaagtccgttcaaaagatggaagaaagcggcgcagttattccggcttgggtgaaagaaatggtctcagaaaggtttccactactttctacaaatctgataacggagatagctattattacgataatggcgaatataagctaattgagtgtaataaaaaggcaatttctcttaaacaattaaaagcgaaaaatggtgtattaaaggaggaggagcggagccgagcttaattcgatttagggcgagcggtttcccttggctaaaaattcccattgggagaccaacggcaatcggtagggattttgcgcaaatggattaactccgctgttatggaggtggaaaagatttataaggttcttgttatcggtacccaatggaagaacttctgcgttggtgcgaatctagcaatgatcttaatggaagcacaagacgacaactactttgtaatttgagtggggtgtgaaaaacttcccaagatgcaatgatgaaaattaaatactcttctaagccagttgtattctccgccatatggtatgacgcttggcggtggcacagaagtttgcttacacagcagcgagcattcaagcttctaggaaaacgtatatgggctttataaaaagatggtggttgcttaatccctggccggaggcgggtataaagagttatacattaaacacttgaataaaatggcaaacggcgtagaatttgatcctccaaaaagttggcaaattaaaggttttgaaaccagtcgccatgggcgaaagtttttaccttccgggacaagaaggcggttttttcataactttcttaggagaataaagacgggtattagtgtgaaagggggatcactttcctatcggatgcaaaaccagaaagcacttgctttatatgaggctggttacaaagcgacaaattcgtaaaaaagataccggttgttggtgaaacaagatattgcaactcctgcacttgggggcgaagcaatgcatttatctgggtaacttttcgaagtacaacttcacctttgcgaagaaaacttgcatatgtcattgcgtggcggaaaaatggccgtaccggaacgaaagttgatgaagcagtattttattgaatggaagaacctgaaagcatttatttatacttagtaaagtggaaatggaaatcccaggcaagaatgcagcacatgctttgtaaaaggaaagccattacgtaactaataacgaggggagatatcgttcatgagagaagctgtcattgttgccgggagcaagaacaccaattgg

SEQ ID NO: 9224 - DNA, 1529 bp, Bacillus anthracis
atgtttcaaaaaatagcaaaggaaatgtttagctggttttaactgtggcaattgttgcgttgccactctcccattgcattttggtattgctgcaacagggaacatctgagggagaactaatccgaatggatggggcgaatttttgcacgtgtattttcgcggggtattttggtgggacaacctggggaagggtaaaaggcccccggggcccatttcgggtattcccaaaaggggtgatttgccacccacgggatttaaagggaagttttaaaacattatagaagggcgggaactgttccaaattttattcggtgtatgtaagcttggctcgtacgtttgtacaattcccgtatccggtcgtttcaggatttatgaccggtatggcattaatcattattttaggtgaaatgaacgcatgtgcaaaatagttttctactcgtcgtattaacgattatgtccatgattgtttctggaaaatggattaaagcaattccatctagtttagtgcatttagtcggtgtgactgcttgctttccttatttttcttctgcgttagaagggcttacagtgaagttaccggttatcggaaatctgacattaaataaagtaattgaaaagattgggacggattccagaagggaatccgaccgtttcaatattccattcttaaggttaaccagtatatacaggacttgtttttcccagccgctaggtatgcctttattaggattggatgatctggtggttacctccgttggtaatgaataagggcgcggttacgcgtcataaaagtaataaagaactggttggaacaaggtatcggtaatatggtgagcggattgtttggcggaataacaggggcaggtgcgactgtaccgtctatccgtaatataagaagtggcggtaaaccggcgctttcagcaggtaggcataggggtatattatttatttttcatatggggactgggatcagtcgtgcaatccattccgctggctgtattatcaggtattttaattttaactggtattgggcatgtttgatgggaaaaagcatgaagaaaaatgcatgtagcgccaaaagggtgatgtcattgttatgctcgtcacgatgattgtcacagtgaagtttgatttaatgatcgctgttgcgttcggaattcttctttcgttcgttatatacatggtgaaatgtaaagaacgtaaagtttctattgtaaaaagaaaaagaaggcgacatataaaattaaacggccctctttcgtttttaacagtggatcgtgttttttatgctttacaagacgtaaaatctccggttgtttttgcgcatgaaagatgcacgctatatggatgtatcaggagctatggcgttattgaatttcattgagcagtcggataaatcaggattgagtgtgacgctagagcaagtgcctgttcatattaaaaagacgttagtaacgatggcgagtaatgaacagaaagataaattactatttgcagaagttgatagttatgtaaggaaatgccctcgt

SEQ ID NO: 9225 - DNA, 252 bp, Bacillus anthracis
atggatcataaagagcatgaagcagtaacacatagatcagaaaaagaaaaagaacaaattataaatagattaaagagaattgaaggacaagtccgcggtattcaaaatatgattgaaaatgatcgttattgcgtggatattttagtgcaaatttcagcgattaatgcagcgatgaaaaaagtaggaatgggtgtattaaaaaaccatacgagtcattgtgtttcaggtgcaattaaagatggtaatggtgac

SEQ ID NO: 9226 - DNA, 1821 bp, Bacillus anthracis
atgtgtggaattacaggttgggtagattggaaagaagacctttcaaatcaacatgttattttaaaaaagatggcaaatcgtattcagcatcgcggtcctgatgctgaaggattttggttttcacctcgtgcggcctttgcacaccgtcgtttaattgtaattgatccagaaggcggggcacagccgaagacatttcgtgctggtgattatacgtatgctcttacttataatggagaaatttataatttccgtgagctgagggaacaacttcaaaaatgtggtcatacatttgaaacgcattcagatacagaagtgttactacatgcttatttagaatggaaagaagactgcgtgcaacatttaaacggcattttcgctttcgccttatgggatgatcagaagcaacgactgtttttagcacgtgatcatttaggtgtaaaaccgctcttttatacagaaagaaatgacagtattattttcggatctgaaataaaagcattattagctcatccatctgttcctgctgaaattgatgcggatggcataaatgaaatatttggattagggctatttcgaactccaggatgtggcgtctttaaacatattgaagaagtgcgtgccggacattctatcacatttacacgtgataaaaaagtagttacgaagtattggaatttagaaagtaaggtccatacagattctatagaagatacatcatcacatattttatctattttacaagatacagtaaaaagacaattaattgccgacgtccctctcgtttgcatgttatcaggaggattagattctagcggtattactgcactagcaggaaaagaatttgctgctgaaaataaaacacttcatacgtattccgttgactttgtaaatagcgcaaaagatttcgagctgacatttgctcgcactggtttagacgctccttgggtaaaacgcgtttctgaacatgtagggacatctcatcatgatattattgtgaatgctgaagaattagctaatcacttattcgttcccctccgtgcaaaagatttaccgagtgctggcgaaatggaaacttcactatatttactattttgcgaaatgaaaaaagatgcgaccgtagctttatccggcgaatctgctgatgaagtattcggtggatacccttggtttcatcaagaagaattactatatgtcgataagtttccttggctaacaaattggaagaatacatctcctcttctactacatgaaataagtaaccaatgtaatctagaaaactatattgatacacgcttccaagaagcgatacttgaagtacctactcttgaaggcgaaagtaaaaaatccgcgaaacaacgtcaaatgttttatttatttttaacgagatttcttccgttcttacttgaccgtaaagatcgtatgagtatggctgtaggatttgaagttcgtgtaccgttttgcgattatcgattagttgaatatttatggaacgttcctttcaacataaaaagcattgataatattgaaaaaggtattttacgtagagcactgaaacctgctttacctgacgatgtacgtaatagaagaaaaagtgcgtatccaacttcacaagacccacagtatttacaaacaatccgtcatttatcactcgacatgtgcagtaataaaaacaaccctattttctcacttattaatcattccacattacttgccattgccgatggaagtaataaagaaattaacaatttcgaagcaagaagtgctatggaatacatgctacaagtaaatgaatggttaaaaacatatcatattcatattgct

SEQ ID NO: 9227 - DNA, 981 bp, Bacillus anthracis
atgggaaacgtattcgactatgaagatattcaattaattcctgcaaaatgtattgtaaatagccgctctgaatgtgatacaactgtcactttaggaaaacataaatttaaattacctgtcgtacctgcaaatatgcaaacgattattgatgaaagaattgcaacttatttagctgaaaataattacttctatatcatgcatcgtttccaaccagagaaacgaatctcattcattagagatatgcaatcacgtgggttaattgcttctattagcgttggtgtaaaagaagacgagtatgaattcgtgcaacaattagctgctgagcatcttacgcctgaatacatcacaattgatatcgcgcatggacattctaatgctgtaatcaacatgattcaacatattaaaaagcatttaccagaaagcttcgttatcgctggaaacgttggaactccagaagcggtaagagaattagaaaacgctggtgctgatgcaacaaaagttggtattggacctggtaaagtttgtattactaaaattaaaacaggatttggaactggcggttggcaactagctgcacttcgctggtgtgcaaaagctgcaagtaaaccaattatcgctgacggtggtattcgtacaaatggtgacgtagctaaatctattcgatttggggcgactatggttatgatcggttctctatttgctggtcatgaagagtctccaggggaaacaatcgaaaaagatggtaaactttataaagagtacttcggttcagcttctgaattccaaaaaggtgagaagaaaaacgttgaaggtaaaaaaatgttcgttgagcataaaggttctttagaagacactttaatcgaaatggaacaagatcttcaatcttctatctcttacgctggtggaacaaaattagactcaattcgtactgtagattatgtagtcgtaaaaaactctattttcaacggtgataaagtatat

SEQ ID NO: 9228 - DNA, 5461 bp, Bacillus anthracis
cacagtttattagttttcccggacattcgggcaaaagctgaaactttaaaggaaacttcattatttgacactgttgagatgaaagatgcaacggatcagattattgacgaagcaaaaaatcctaacaacttaataaagataggatcaaccattcaagtagaatatgcttggtcaataaaggatcaacaagttgtacatgcaaacgatacagcagtacttcaaataccacttgcattaaaagtatctaaagatttacaagggagatttagtacactcgatcaaaaaaatattggtcaatattttataacagctaaagataataaattaaaactaatatttaatgatcaagtagaaaattcgaaagacgctaaaggaaaaattaaaattgatactgtgtttaacccaactttaaagactgaagaaaaatcagttcaaatcgcttttcctttaggaacactggttcagcctataacagttcctattccagtaaaagaatctaaagaaaaaggaacccaacaggatactaattaaccagtgccagaaccagtaacttaacctactactggttattccgaaccaaaatccaccacttaaactggcaatggacattccgaaccaaattcccccacttaaacttgttactgacaatccgaaccaaattccagcacttaaccctggctactgataatccggaacaaaatccagcaacaaaacctgctgctgatacccaggaccaaaattttagcaagcgatcctgctgagattacaaattcagtcccaaagcaaataacaccaaactttttaaacggtgtaaagttgacggacaaagacggaaaacccatttacagaggatacccgtccaagtacagattcccctgccaatattgagtttacatgggactttttaaatccaatgaatgtgaaagcgggagattactatatttttgatcttcctaaacatttaaagatttacaatacaattaacagccctttatacgatagtgaaaacaatccaattggtaattttactgttacaaaagatggaaaagtcacaatgacattcaacgattatgttgaagaacatccagatgttgttggtaacctacaattaaagacagaatttaataaagctgaaattaagggtacaacaacacagggaaattcctttcccaattaaagataaagatgtttctattacagttgactttaaacctaatgtacaaacggctacaaataaaaaagggttacctgatagacccattaatacaaatgagattaattggacagtagagatgaacaaaacgaaagacacccttaaaaacgctgtttttaaagataacatcccaccaaggacaagtttaaataaagattctattaaagtttattatttaaaagttgatgttaacgggaatgcaacacgtggtcaagaagctgatccagcagattacaaaattatttcatcagatggttcaaaattgagagattgcttttaaagattctattaaaaaagcatatcaaatcgaatatgtcacaaaaatcactggatgaaaaacgtaaaaaagcttcccaaaataacgttacgataacaagtgataatcaagggcaacaaaaaagcaagctctactgtaacagtctctcgtggtacacatttaaacaaaaccaagtaattatgatccaaagacccaagcattgaagtgtacgattacttacagcggtgatcaaagaaatatcaataaacacagatgcactttttaaagaatatttttgacgatacacatgaattagatggtaattctatcgttgttgaaaacgcttcatacgacgataaaagaagggctttgtacaggagacactggtaaatattacactggtactaacaagaagaatgggattcgacttacagtttaatgaagatattaatagtgcgtatgtaattacctataaaacaaagccaactaataatgtcataaaagatggaaaaataaagaatacagttacagctgataatggctcaagtaaagaaaatgaggctggtttccagcagcaaaatattattaaatctaataataaagctgaaacaaactataaagacaaaacaacaacctgggacaattaccggtaaataataacaactatcccattaaccacgcgatcattacggatacctttgaccacggtggatttacattaaaagataaaaaactagaaattaaagacggagattatacccttcaggctgagactgattatgttttagatgtaacagataaagggtttcaaaattaccccttataggtacatatcagtctaatatgaccaagacattactcgtaaaatatacgaacgactttgacttattcaaactagaaaagtggtaaaactttcattaaaaatacaagtaaccttatctgggaaagaatgcagggtccaatccacaatcaaataaagttgaagcagactttgatcctgatactttcacaaaggcaaatggctataaatacggttcttataacgcccaaacgaatagaaatcacttggataataggttttaattataataatgttgagattaaagatccctatgttatagacgtaatacaagataaacaaaagttagtaccaggatccattgaagtgcgccatatgattttaaatggaagtccggataatgcaagacctggtgatgctgtaccaattcgagcaggatgaacttgaagaacctacagataaaaataaaaacaccctacaggttcatttcaagcaatcaattaattcacccttactatattatcttttaaacaagcccttgatgggtgaccttatccaaaacacctaccaaaacgaggcagaggtaaaagatggctctaaaattgtaaacactctttaaggggaccctcaagtaaataaagggggcagtttcggtacttaaaaagcggtgcaagatgacaactatattaattggagtattgcaattaacgaaagccaatcgaccattgcagacgcagttgtaacagacgatccaacagacaatcaagtacttgtggaagattcattccacttatatccacactacagtaagatggctatggaaatgtaacaatacatacagcaaatgaattaaaacgaggaacagactataagttaacgatcacaacattacaataataccgggaaagcaacatttcgaaattgccttcttgaaaaaaattgatcgagcttatattttagaatatcgctcacttattaatgcagacgataaagaaaaagtgagtaataaagcaaaaatcgctggcaatcagttaacagttaagaatacagaaactgttgaaacgattgaagtgagaatgtcttccggttcaggtggaggatctgctactaatgggcgcggaaaccttgaaattataaaggtagataacgacaataagaaagtaccattgtccggagcagaatttactttatatgatcgtacaggaaaaaccgttatccgcaaaattaccaccagaccaaagatggtattgctaagtttaaataactaaaagcgtgataaatatttattaaaagaaacaaaagctcctgagggctatgtaattagctgggatttaaaacagggaaaaattgttgaacttggttcacaagagactacaacatataaacttgcaaataagaaatttgtcggtaaagtaggtttaacataagtctgatgacctgaataaaaacgtaacactgcaaggagcccgttttcacactacttgatatagataaataaataatttcagaacacgaaaaattaacaacaaatgatcgaggacaaattactgtatataatttaaaaccaggaaacttactactttacagaaaccaaccgctcctgagcactataaattagacagtacacctattcaattcacaatcaaagaagatcaaacaacagtaataaaccgaactgcaacaaacagtttgattccaggatcggccattttaacaaaagtcgataaagatggaaaaactttagcaggtgcggagtttagtgtacgcgatcgacataacaatgtaattcgtggatatgaaaaattaacgacaaatgatcaaggacaaatcgaagcaacaaatttacggtcctgtgagactatcaatttgttgaagaaaaagctcctaaaagatttcgacatagataaaacaccaattgagtttacaattgtaaaaagtcaaaggaaaagcagtttctgttactgcgacaaaatcacctcattaaaggtggcgtcactttaacaaaaactgatgatatcgatggtacagctcttgcaggtgctatatttaaaattgtcgatgctaatgatgaaaagaaagtcattcgcgaaaatgtaaaaactggtgcggatggtaaagtaactgttaaagacttggagcctggtacgtataaatttattgaaacagaagctcctaaggattatgtgttaaatgcaaatcctatcgagtttacaatcgataaaagccaacagtcttttgctactgttacggcaacaaacagtttaaaaacaggagaaagtgaaattattaaaagttgatgaattcggtgataaaaaaccttctaaaagggtgccgtatttaaaaatggtggaggaaaataataaggagtttcgtccggatctaactacagatggtgatggaaaaacaaaagctgataagctacgtcctggtacgtataaatttattgaaccagctgctcttgaacattacgttttacgagcagagccatattgaatgtacattcgatagaagtcagaaaggactccctacttgtgacagctgaaaatgctttaaacacgaggcgatgctgaattagcgatagatgatgctatcgatggtacagctcttgcaggcgctgtatgtaaaattgagcatgctaacgatgaaaagaaagtcatcccgcgaaaatgtaaaaactggtgcggatgtgtcaagctatcgctactggcttacgccctggcaattataaatttatcgaagtattacgataagaatacaagtccaatcaagttcacaattacagaaagtcaaacaacgtcagctactgttactgctaaaaacagcttaacaaaaggcggtattgaattaacaaaagtgaatgctgcagatgaaaaggaaacacttgaaggtgcagtatttaaaatcgttaatagagatacgaatgaagatgctcgtacgaaccttgttacgaatagtgaaggaaagttagttgtagacgacttacgtccatggtaactataaacttatcgaaacaaaggcttcccaccttatattgatgttaaaatgtagacccaaattgaattttacaatcgaaaaaagggccaacaaaccattttttcccatttccattaaaaaatagtttaacgaaaggaaaagttaaacttattaaagaagatgatgtggagagtagtatcgctcttgctggagcagtgtc

SEQ ID NO: 9229 - DNA, 840 bp, Bacillus anthracis
atgaaagaaaaagagcgcttaattatagagatggctatgaagttatttgcgactaagggtgtaaatgcgacatcagtgcaggaaattgtgacagcttgtggcatatctaagggagccttttatttatactttaaatcgaaagaggaacttttattagcaacactccgatattactatgacaagattcaaaacaaaatgatggatattgaaaaagagtcgttattgccacgtgaaaaatttgcaaaacaactgcattgccagtttaacgatatacaaaagcataaagaattcattattatgcatgccagagaaaatgctattccctttaataaagaagtagaagaatttatgatgcggatgaagttagagtctcacgccttttatcgaaatagtttactgtctatttatggtgataaggttatgccatatttattagatttagtcattatggtagaaggcatatgccgtggatatttagaattaattattttacaagcgccagaaatcgacttatcttacgtctctgcgtttattttgaaaagagtagacgatttagtagatggattggtaaaatcttcggaagaacctgtgttacatgaagaaaagcttggagaatttctttgtaaatcagagcttattaaggagcaggttaaggaacactttttaaaagaaattattgtgtttaaacgtacattagctgatcaattagaagatgaggaattgcttgttacgttagatgttttagaggcagaaatgaggttgccaaatccaaggattccggttatacaaggaatgctgtctaatttagaagtatatccaaatttaaaagaatttcgtttg

SEQ ID NO: 9230 - DNA, 1445 bp, Bacillus anthracis
atgtcaaccagatttgcagtgattctagctgcaggtaaaggcacactgtatgaagtctaagctatacaaagtgcttcatcctgtatgtggaaaacctatggtacaacatgttgtcgatcaagtatctcaattagggttgcagaaacttgtaacaaccccaagaaatggggctgaaatggggcaacaacaacctacggaaacgtaagggagtttggcctttcaaacagaaaaaacttgggtacagcgcatgctgtagatcaagctgcaggtgtactttgcaatgaagaaaggaacaactttagttatttgtggtgatacgccgctaataactgctgaaacgatggaagcattacttcagcaacataaagaagcagggggcaatgggcacggtggtaacagcttacatagaagaacctgctggatatggtcgtatcgttcgtaatgagaatgggtcatgttgaaaagattgttgagcataaggatgcaaatgagaaagaattagctattaaagaaatcaatacaggtacgtattggttttgataataaagctttattcccttcacttttccaagggttccaatgaaaaacgtacaaaggggaatattaccttgcccaaatgtttttggagaatttttaaaaaatgaaggtcatattgtatcggcttatcaaacagagcacttcgatgaaacgttaggtgttaacgacagagtcgctctatcgcaagcggaaattattatgaaaaaccgtatcaaccgaaagaacctggtaaatggttgtcacaattagtgatccaagtaacccccgtatatttcggctgatccaattatcggtagtgaatacagttctccatccaggaaccattattgagggggaacactgtaattggttctgattgtgaaattggaccgcatacagtaattcgcgatagtgaaattggagatcgtacgacaattcgtcaatctactgtacatgatagtaagcttggtacagaagtatcggttggtccatttgcacatattcgcccagattcagttattggagatgaagtacgcgttggaaacttcgtgggaaatcaaaaaaactgttttttggtaatagaagtaaagcttcacacttaagttatatcgggggatgcgcaagttgggagaagacgggaatcttgggttgtgggtcaattacggggaactatgacggtaagaataaattccaaactgtgaattggtacgggggatttattggaatgtaattcccacccttgttgctccctgtaaacatttgaaaaatgggggctttatgtggcagcaggctctacaattacagagaatgttccatcaaaaagcattatctgtagcacgtgcacgtcaagttaacaaagaagactatgttgatcaattggtgaaaaaaaaaaaattcataatttggagggttaatttagattttggcat

SEQ ID NO: 9231 - DNA, 1817 bp, Bacillus anthracis
aaagaacaaaaaggaaagaagcagaagacatatatatctattcgattaaatatcatgttcctttgtatatttttactattctcagctattattatgcagctaggaaaagtacaaatcgttgagggagaggcttataagaatcaagtggaaaacagtcaaaatgcaacaactagcataccagttccgcgtggacaaattttagatcgagaagggaaaacggtcgttaataataagtctcttcgtacaattacgtatacaagggtgaaggggattacgagtgacgatattttaaaaacagcaaaagacttggcgaaagtacttgaaatgcctgaacaagatattaataaattaactgatatcgataaaaagatttttggatgcagttgaatacgaaacgtgcggatacaaagattactaaaaaagatatagaaaagtttaaagaaaagggaatagagggaaaagagttagataaaaaaatagaagatttaagacgaagtcgcgttacagaagtagaattgggtgaattaacagaacaagatttaaaggtgttagctattaawagtaaaatgagttcaggttatcawctkacyccacyaattattaaaaaagatgtaacagatgaggagtatgcacggataagtgaaaatcttgcgaattttccaggagtagatgcaacggttgattgggaacgtaattatgtaaatggtaatttgtttcgttccgtattaggtaatattacgagtagtgaagaaggtctgccgaaagaaaacttagattcttatttggtacgcggatataaccgtaatgyccgtgtcggaaaaagttatattgaacaacgatatgaagatgtattacatggcacaaaagaagaagtgaaaaacattactgataaatcaggaaacattataaatacagaagtaatcgctaaaggaaaaagtggtaaaagtttaacattawcgattgatatggaattacaaaagaaagtggaagaaagtatagagaaaaacttgagagcttttaagagttcagagccgctactcgatcgagcttttgtcgtcatgacgaatccaaataacggacagattttatctatggcaggcaaaaagattgtagaaaaagaaggagtactagagattgaggatttggcattaggcaatatgacaacttcgtatgagctaggctctgctgtaaaaggtgctactttattaactggatatgagacaggagcaatacatccaggagatcaattttatgatgcaccgatgaaatttaaaggtacacaagctaagaaatcgtggaatgtatctggatttggtaatattaatgatttacgagctttacaagtatcttcgaatgtatacatgttccagacagctttaaaaattgcgggagttaattacgtaccaaatggctcattggatattaaacaaggagcatttgatacgatgcgctattatttcaagcaatttggtttaggagtcccaacaggtatcgatttaccgaatgaaataattggacaaactagaaaagtagatagtcaacctggatttttactagacttttccatcggtcagtatgatacgtatacgccgttgcaattagctcaatatatttcaacgattgcgaatggtggttatagaatgcaacctcaaattgtacaagaaatacgagaacaatcaattaaagaagaggttggtaaagttattcgctctatagagcctgtagtattaaatcggattgatatgaagacagaatatattgatcgaataaaagaagggtttagatgggtattccaagaaggggatggaactggcgta

SEQ ID NO: 9232 - DNA, 1917 bp, Bacillus anthracis
atgaaagaacagatgattgaaattaaatttccagatggtagcgtgaaagaatttgtaaaaggaattactttagaagaaattgctggatccattagcagtagcttaaaaaagaaagcagttgctgggaacgtaaatgatgagttatatgatttacgccgtaatattgaagaaaatgcggaagtagaaatcattactatagattcaaatgaaggagtagaaattgcaagacactccgcggcacatattttagcgcaagctgtaaaaagattgtatggtgatataaatcttggagtagggcctgttattgaaaatggattttattatgatatggatcttccgagtagtgtaaacgtagaagatttacgaaaaatcgaaaaagaaatgaaaaagattataaatgaaaatataaaggtagaacgagttgaggtttctcgagaagaagcagctaaactgtttcaagaaatgaacgatcgattgaaattagaacttttagaagcaattcctagtggggaaagtgtaacattatataaacaaggtgaatttgtagatttatgtagaggtccacatttaccgtcaacaggttatttgaaagtatttcaattaactcacgtttccggtgcatattggcgaggagatagtaataatcaagtgcttcagcgtatatatggtgttgcattctcttctcagaaagaattagaagagtatttacatttcgttgaagaagcagccaaaagaaaccatcgtaagttaggcaatgaactggagctatttatgttttctgaagaggctccgggaatgccgttttatttaccgaaaggccaaattattcgtaatgaattagaagcttttttaagagaaattcaaaaagaatataattatcaagaagtacgcactccattcatgatgaaccaagaagtatgggaaagatcagggcactggggacattataaagataatatgtatttctcagaagtggataataaaagttttgcattaaaaccgatgaactgcccagggcatatgctaatgttcaaaaataaattgcattcttatcgcgaattaccgattcgtatgtgtgagtttggtcaagtacatcgccatgaatttagtggggcgttaaacggattattaagagtacgtactttctgccaagatgatgcacatttatttgtaactccagaacaaattgaagatgaaatcaaatctgtaatggcgcaaatcgattatgtatataaaacttttggattcgaatatgaagtagaactttctactcgtccagaagattcaatgggggatgatgagttatgggagcaagcagaagcgtcattagaaaatgtattacaatcgctaaattataaatatagactaaatgaaggtgatggtgcattttacggaccgaaaattgacttccatattaaagatgctttaaatagaagtcatcagtgtgggacaatccagctagatttccaaatgccagagaagtttgatttaaattatatagatgagaagaatgaaaagagaagaccagttgtcattcatagggcagtattaggatctttagatcgtttcttagcaatattaattgagcactttggaggtgcattcccagcatgggtggcaccagttcaagtgaaagtcattccagtttcaaatgcagtccatgtacaatacgcagatgaggttgcagataaattagcacaagctggtgttcgtgtcgaacgagatatgcgagatgaaaaattaggatataaaataagagaagcacaaatgcaaaaagttccttatgttcttgttattggtgataaggaaatggaaaacggagctgtaaatgtgcgtaaatatggggaagaaaaatcaggtgtaattgaactagatatgtttgtggaaagtatgaaagaggaaataaataatcgaaaa

SEQ ID NO: 9233 - DNA, 763 bp, Bacillus anthracis
ctcgctggcaaaacggtattgattacacgtgctcagcaccaagcaaaacaaatgagtgtagcggtgaaagaaaagagcggaattccattggaaattccgcttttgcgtatggaaggtatgtttcataggcaaattcaacatatagcagggcagttacattcgtatgattgggttatttttacgagtaaaaatggggtagctttttttctagattgtttaggaaagaagctacccgtaacgactaaaattgctgcagtaggcgtgaaaacaaagttagagttagaaaagcgaggctatcatgtagactttgttccaacttcatttgttgcagaagcatttgcagaagagtttggtaaaagaattaagtggaaacgaacgtattttatttcccgaaggggatttttagcagagaggtaattcccgggtgccctctcgggaaattggtggttctcctagatgaacttatcctattccggacgaaagtggatattgaaaaaaaaccaggagcttttatccgcctttggatttagggaagaggacactttattcctttttccagagcccttcaactgttactagtttggttcgtttactggagggtacaaactggagagaatggacaaaaaaatgtacaattgcttgtatagggcctattacggaaaaagaggcgagcctttattttccgcatgttattatgccgaaagagtacactgtagaagcattactacaatgcgtttgtgaatctataaaataaaaagaatgg

SEQ ID NO: 9234 - DNA, 274 bp, Bacillus anthracis
atggattataaaacgcagtttgcggaaagtttatctaatatttttacgaatgaattaacgcaacagcaaattttagatttaattgaaacaccgaaacaagatgaatttggagatgctgcatttccgtgtttttcacttgcgaagcaatataaaaaatcaccagctattatcgcaaaggaagttgcagagaaattaagtgatccgttttttaccaaagtagaggctggtgggtcctatgtgaatgtattttttaatcgtgatacagtaagtgatg

SEQ ID NO: 9235 - DNA, 3759 bp, Bacillus anthracis
ttaaaatatttttcaccaatagatcgttataacgataatcatacacaagaaacatatgaagatcgtgaatgggaaaatgtgtatagaaagcgttggcagcatgataaagtaattcgttctacacatggtgtgaactgtactggttcatgtagttggaacatttatgtgaaagatggaattgtaacttggggaaggacatgagcttaactatccaacaacaggtccagatatgcctgactttgaaccacgaggatgtccacgtggagcgagtttttcttggtacatttatagtccacttcgtgtgaaatatccgtatgtacgtggtgttctttggagtatgtggctagaggaattacaaaataatgagtcaccattagatgcttggaaaagcattgtggaaaaccctgaaaaagcacgcaagtataagcaggcacgtggtaaaaggggattcgttcgtgcgaattggggatgaagtgttacaactcgtttcagcttcattattatatacagtaatgaaatacggtccagaccgaaatgttggcttttcaccaattccagctatgtcgatgttaagtcatgctgcaggcagccgctttatgcaacttatgggcgggccaatgcttagtttttatgattggtatgcagatttaccaccagcttcgccgcaaatttggggcgatcaaacagatgtaccagaaagtagtgattggtataactctggttacattatgacgtggggttcaaatgtaccgatgacgagaacaccagatgctcactttttagcagaggttcgatataaaggaacgaaagtcgtttctgtcagtcctgactttgctgaatctacgaagtttgcggatgattggattagtgtgaaacaaggtacagacggtgcagttgcgatggcaatggggcacgtgatcttacaagaattttacgtagataatcaagtggaatacttcacaaagtatgcgaagcaatatactgattttcctttcttcgttacattgaaacaaaaaggagaccaattcgttgcggatcgattcttaaatgcttctgatattggacgcgaaacaaagttaggagaatggaaacctgtactttggaacgagaacacgaatgattttgcaacacctcatggcacaatggggtcacgttgggataacgaaaagaaatggaatttacgtttagaagatgaagaaacaggtggaaagattgatccacgtctttctttacttgggatggaagatatgttccaacgggtgcaattcccgtacttctctgatgatggaaacacagtgttagaacgtacaatccccgttgaaaagtttatgacacaagaaaggccaaatgttctttaacaccggtataccaccttacggttagccaaattacgggggggaaccaagggcttggcggacaagagccgaaagacttcaatgatgacgtgccgtttacacctgcatggcaagagaaaatgacaggagtaaaacgtgagcttattattcaaatcgctcgtgagttcgcacaaaatgctgttgatacgaacggtcgctcaatgattattgtcggagctggtattaaccattggtttaactctgatacgatttatcgcgccgttttaaatcttgtacttctcgtcggagcacaaggtgtaaacggcggtggctgggcgcattacgttgggcaagaaaaattaccaccagcagaaagatgggcaacaatcccaatggcaaaagaatggcgagggcccccaaaattaaaaatggtaccatctttcttctatttcgtaacagatcaatggcgctatgaaaaatcacccatggggacatttatcatcaccagtcgaaggcaactctcgttatcaacatcacggtgattacaacgtattatccgcggcgacttggctggttaccttcgtatccgacatttgagaaaaatggaattgaactatataaagaagctgttgctgctggtgggaccaacccaagaagaaatcggaaaatatgttgcacaaaaattaaaagaaaaagaactaaaatttgcgattgaagatccagattacaaaaataactttccaagccacttattcgttatggcgtgcgaacttaattttcaagttccggttaagggcacagaatatattcctaaaacatttattaggtacaccaaatgggattaatgaatgacgatagggattcgttacgaccagaagatattaagtggcatgatgatgcaccagaagggaagcttgatttactcattaacttagacttccgtatggctggaacagcgctttattctgatatcgtcttacccagcttcaacttggttcggaaaacccgattttaaccgttccgataagcattccattggttattcggtttattcaaccattgggttcaccatgggaagcacgttctgactgggatattttcacttcactttctaaagctgtgtcagatttagcagagaaaattgatcttgacccaatgaaagaagttgtgggcacacccacttcttcacgatacacccgcagaaattagcacaaccactgggtaagaattaaagattgggagcaagggtgagtgtgaaccaatacccggtaaaacgatgccacaaattcatgttgtcgaaagggattataaaacgatttatgacaaaatgactgcgctaggaccaaatgccgggaaacaaccgattggtacgaaaggaatttcttggtcagcagaaaaagagtatgagcaattacagagccggttaggagttgttcgaacagattctattgcgaaaggttgtccagacataaaagaagcaatcaatgctgctgaagcggtattaacgctttcttctacaacaaacggtcctatggcttgtaaagcatggggaagcacttgtaaaaacaacagattttaaaattaccctgatttagcacaaaaaacgtggagaaaaaatgcttctcatttgaaacaaattacaggcgcagcccaaaacaagaatttacttcttccgcccttttcaaggttctgaaaaaaggtgggggccggtaactcccccttttcaaaaaaagtggaaaggctcatcccctgggagaaaattccctggaggacaatctttctatttagatcatgacatgatgaaagaatttggtgaaacgatggcaacatttaaaccaattctacaacataaaccgttccggtaaatcacggcctgaagtagaaggaaaagaaattacattaaactatttaacgccgcataataagtggtccattcagaaggagggtctttgaatccattacggaaggttaacgttttttagaggtggttccaaccgtttggatgaataaggaggatgcaatggaagcaggccgttgggaataaaaattggttggagtgttttaaccgtaacggtgttgttgtagcacgtgctgttgtaacgcatcgtatacagagagggaatggcgtttatgcatcatgcacaagatcgtcatataaacgtacctggtacgaaattaacaagtaaccgcgggggaacacataatagtccaactcgcattcacgtgaaaccaacacatatgattggtggatatgggtcattaagttatggattactttattatgtcccacgtgggaaccagcgcgatttaacgtttgtaatttcgcaactgaagggaggtagattggcttgaagattaaagcacaagtcggaatggtaatgaacctagataaatgtcctcggctgccatagttgtagggtgtcgt

SEQ ID NO: 9236 - DNA, 1375 bp, Bacillus anthracis
aaatatttaggggcatataactatacgatttatgatggtattcaaagtgcgaaagcatcaacggaaagagcgttagctgatggagataatatgacggaagtaagaaattatttaacatcaacttacgcaagtccaaatcctgagtatttcggtaaaggtaagggaatgaacgtaatttatattcatttagagtcattccaaaacttcttaattgattataaattaaacggtcaagaagttacgccgttcttaaactcatttacaaaagatgcgaatacgctttactttgataacttcttccatcaaacaggacaagggaaaacgtctgatgcggagtttatgttagagaattctatgtttggtttaccacaaggatctgtatttacaacgaaatctcataacacgtatcaatcagcaccagcaattttaggacaacaaggatacacatcagctgtattccatggtaactataaaacattttggaaccgtgatgatatttataaatcatttggttttaataaattctttgatgcttcatactatgatatgaacgaaaaagatgtagtaaactatggattaaaagataaaccattctttaatgaatccattccgttattagaaacattgaaacaaccgttctatacgaagtttattacgttatcgaatcacttcccgtatccaattgataaagaggaagcgacaattgaaccagcgaacacaggtgactcatctgtagatacgtatttccaaacagcacgttatttagacgaatctgtaaaaggtttcatcgattacttgaagcaatctggtttatatgataattctattatcgttatgtacggagaccattacggtatttcagataatcataacgcagcaatgtcaaaagtaatgggtaaagaaattaactcgtttgaaaatgcacagttacagcgtgtacctttaatcgttcgtgtaccaggtgtgaaaggtggcgtacaacatcaatacggtggtgaaattgatgttcttccaactcttttacacttactaggaacagatacaaaaaattatgttcaatttggttcagatttattatcaccagatcataaacaagttgatgcgttccgtaacggcaacttcgtaagcccaacagtctactgcactaaacggcaaatattatgatacagcaactggaaaacctgtagaatttacagatgaaataaaacaaaatgaacaaatggctcaaaactcgttaaaatactctgaccaagtcgtaaatggtgacttattacgattctacacaccggaaggatttacaccgatagatcgttcgaagtataactataacaatcgtgataaaaacaaaacgaaagtaaaaacggctccggaaggg

SEQ ID NO: 9237 - DNA, 692 bp, Bacillus anthracis
ccaaaagtcagtatacttattcctgcctacaatagacctcattacttagaattagcccttaaaagtgctttaaaccaaacctatgaaaatatagaaattattatatctgacgatagtaccaactgatgaaaaaaaagtaatgatccagccatacttaaaagaatataattatataacatatgtgaaaaatgaaacgccattagtagctgaaaattttaatcaatgcatagagcttgctactggtgaatatataaattttttattagatgacgatttgtttgatcatgaaaagattgacagaatgatgaaactattttttggaattagaaaatatctcgtttgtgacgtcatatcgcgaactgattgatgagaatggagaaatattacctccctcaaccttaaatgtgaaaattgccacagaaactacaatttttgaaggagaagcactagggaattatatggtttgaacatttgaaaaatgtagttgggagaaccgaccacgggttttgtttatcggaattttttttggagggcaagttgggtatttttaagggaaaagcgtattcagcccttaaatgacattgcaacttggcctagatatgatgaggaaagggaaaaagtagttatatatacaagaacctcttagttactttagaaaacatattgggggaaattcaaaagcaaatgcactt

SEQ ID NO: 9238 - DNA, 1356 bp, Bacillus anthracis
gtgagcgtaactgctcacatttttttcgggaagaaaaggaaaggtgataaatatatgacaacacaagtagtaaacgtcattggcgcaggtcttgcaggaagtgaagcagcttaccaaattgcaaaacgtggtgtccaagtaagattatacgaaatgagaccggtaaggcaaacgccagctcatcacacagataaatttgcagaattagtatgtagtaactcacttcgcgcaaacacattaacaaatgcggttggtgttattaaagaagaaatgcgtttaatggattctgttattattcgtgcagctgatgagtgctctgtaccagcaggaggggctttagcggtagatcgtcatgaatttgcggcgaaagtaacggaatatgtaaaaaaccatccgaacgtaactgtgatgaatgaagaaatcactgaaattccagaaggtcctactattatcgcgacaggtccacttacgtcaccggatctttctgcacaattaaaagaattaacgggtgaagactacttttatttctatgatgctgcagcaccgattgttgagaaagacagcattgatatgaataaggtgtatttaaaatctcgttacgataaaggtgaagcggcatatttaaactgcccaatgacggaagaggaatttgaccgtttttacgaggctttaatcgctgctgaaacagtacctttaaaagaatttgaaaaagaaattttctttgaaggttgtatgccagtagaagttatggcaagtagaggaagacaaacactagtatttggaccgatgaaacctgttggattagaagatccgaaaacagggaaaacgccatatgctgttgttcagttacgtcaagatgatgcagcgggaacgttatataatatcgtaggtttccaaacgcatttaaaatggggaccacaaaaagaagtgttacagttgattccaggactggaaaacgcagagattgtacgttatggtgtaatgcatcgtaatacgtttattaattcacctaacttgcttcgtccaacataccaatataaacaacgtgatgatttattcttcgctggtcaaatgactggagtagagggatatgttgaatcggcagcttcaggattgttagcgggtatcaacgctgctcgacttgtaaaaggtgaagagccggttgtattaccacctgtaactgcaatgggaagtatggcgaattatattactgcgacaaacgcgaaaaacttccaaccaatgaatgcgaacttcggtctgtttgcaccgttagagaagaaaattaagaagaaagcagaacgtaatgaagcctatgcaacacgcgctttagaaatgattcgaaattttgtaaatatt

SEQ ID NO: 9239 - DNA, 492 bp, Bacillus anthracis
atgcctcgtaaaggacctggttgcaaacgtgacgtgttaccagatccaatgtacatttcgaagctagtaacacgccttatcaacaaaatgatggttgacggcaaaaaaaggtaaaatctcaacaattcctttataatgcgttcgatatccgaaagcgaacgtactggtaaagagcccatgggagtattcgaagcagctctttaggaacattatgcctgttctttgaggtacgccctcgtccgggtgggtggggctaactaccagttccaattagaggttccgtccaaaacccgaacaactttaggtcttcgttggttagtaaactacgctcgtcttcgtggtgaaaaaactatggaagagcgtcttgctaacgaaatcttagatgcagctaacaacgctggtgcatctgttaagaaacgtgaagacactcataaaatggcagaagctaacaaagcatttgctcattaccgttggtaggattcaacgtaaaat

SEQ ID NO: 9240 - DNA, 1782 bp, Bacillus anthracis
atgcttaaaggagcattttatcataggccaaaagataaattacgcatacgcttacgatgaaaaaacgattcacatccgaatacgtacgaaaagagacgatgttcaaagcaccactcttattatgggtgatccttatgaatgaaaagacgggaagtggatttcttcaagtacaccgatgaaaaaaactggttctactgcattgtttgattattggttcattcccatcgagccgaaatttaagcgcttacgttatggatttgaattaaaaaacgatacagacactcttatttatgcagagcgaggatttttttctaccactccaaatgatgacgttggtaactttttctgttttccatttattcatgcaaatgatgtattcaaagcaccttcttggattaaagatactgtttggtatcaaattttcccagaacggttcgctaatggagatcatacgctgaatccagaaaacacccttccttgagtttgacgctgagccaactccaactaattttttcggtggagattttgctggtattattcaaaaccttgattaccttgttaagcttggaatttcaggaatatatttcacacctattttcaaagcacattcaaaccataaatatgacacaatttgactacatgggaatcgatccacaatttgggtacaaagaaacattcaaagaactcgttcaggcatgtcatacacacggtataaaagaaatgctcgatgctgtattcaatcacagggggaaacctttttcgaataaattcaagacgtactaccaaatgggggggcaggccgcctataaagaatggttccatattctgggagttcccaattagaactgagccactcccgaattatgatactttcgcgtttacacccgatttgcccgaaataaacaccacgccaccccgatgtaaaaaatactttacctgaaaaagggcgttattgggtgagagaattcaatatagacggttggcgccttgatgtagcaaatgaagtcgaccataacttttggagagaatttcgaagtgagataaaagcattaaattctgaagtatatattttaggagaaatttggcacgatgcacttccatggctacaaggagatcaattcgatgctgtcatgagctatcctgttacaaacgccctactgtcttactttgctaacgattccattaaggcaaatgaatttatgaaacaaattacagaatctctacattcctactctatgaatgtaaatgaagcagcatttcatttattagatagccatgatacaccaagaattttgacaacatgtaacggagataaaaataagttaaaattactttatgtattccatctttctttcatcggctctccttgtatttattatggagacgaaattggtatggacggcggtatggacccagattgtcgcaaatgtatggtttgggatacggaagaacaagatcatacattatttacacatgtacaaacattaatttcattacgaaagcaatataaagcatttggaggacatggtactttccaattcattgaagcaaatgatgaatataattatatttcttatacgaaaacatatgaagatgaaacgatctttttcgttttaaatccgactaatagtgatattacagcttcactccctctccatgttactgggaaagaaaatcattaatatttatacaaacgaagaattttcagcggaagcaagtgtattacaagttacacttcctccatatggattctccatattaaaatggtaaccaaaaaaatcc

SEQ ID NO: 9241 - DNA, 1005 bp, Bacillus anthracis
tctttacatttaaatcgtcatcctcgcttaagacaaagcgggggcatgcgtgcgcttgtgcgtgaaacgtttttacatacggaagattttatttaccctatttttgtattagaagggggaaaatggtcgtaatgaagtaccttctatggcaggcgtatatcaaatggctttaaatttattgcaagctgaaatgcaaaaaagtggtggatttagggtatcgtttccgttaatgtattgggttacccgctggaaaaagatgaagttggatcatcagcatattgtgtatcctggaattgtgcaacgcgcgattcagcaaattaaaggtgaattccccgatctagtagtagttgcggatacatgtttatgtcaatttacaagcccatggtacattgcggtgtaattgaagatggtattattttaaatgacgagtctcttgcagttcttgcaaaaacagctgtaagccaagcgaaagcaggagcggacattattgcgcccatcaaacatgatggacggattcgtaacagcaattcgccacgcattagatgaaaatggttttggacatgtaccagttatgtcgtacgctgtgaaatattcatcagcattttatggaccattccgtgatgcggcacacggtgcaccgcaatttggtgatcgtaaaacatatcaaatggacccagcgaaccgcatggtaagcattccgtgaagcagaatcttatgtcatggaaggggcagatttcttaattgtaaaaccagctctttcttatttagatatcgttcgtgatgtgaaaaataactttaatttaccagtcgttgcttataacgtaagcggtgaatattcaatgattaaagcggcagcgcaaaatggttggattaatgaaaaagaagttgtactttgaaaaattaattagtatgaaacgtgcaggagcagatttaattattacgtatcatgcaaaagatgcagcaagatggttacaagaaggaggcgctaaataatgagaaaatttg

SEQ ID NO: 9242 - DNA, 396 bp, Bacillus anthracis
atggagcaaattccggtaaagagaatagaagaagtacttgttgtagcaggggatgacaaacaaaagcaaaaggaattttatgaattgctcttatctactgagttttatgttgctggctcactagaagcagaggaaggggcgacagaagggatacttcgtttgcgtcatttccaaggagatggtagatggatcgttccgttctttacacaaatggaatttgtaaaagatgtgttgccagaaggaacgccccttattacgatacgtgggaaagaattatttggtagcattgagaaagatgccacagccgtattaaatgtcggtactgatataagtaaaacatttattcccgaagaaattgcagatatcgcatctggacgaatttttaactattataaa

SEQ ID NO: 9243 - DNA, 1605 bp, Bacillus anthracis
tgcgagagcgctattggaggtaatgaaatgattgtactgatcgataattatgattcattcacatataacttgtatcaactattaggcgaatacgaagaagaaattgttgtcgtaagaaatgatcaaataacgatagaacaattagaagaaatgaacccaaaaggaattgtgctttcgccaggaccaggaaaaccagaggaggctggtatttgtattgaagtaattcgtcatttttataagaacgttcccatattaggtatttgccttggtcatcaagcaattatatcagcatttggaggagagattgtaagagcagagcgcattaaacacggaaaaacatcgcgtgcgaaacataacggaacgtcaatcttttcgtatgtgacgcagccgctaacagcgatgcgctaccattctcttgttgccgcacaaacgagcttgccacaatgttttgacatattagcgacagcgatggacgatggagaaataatggcagttcgtcacaattattatccgctcttcggattacagtttcatccggaatcaatcgcgacagaagaagggggaaagttaatacgtgcctttttaggcgaagtgaaagaggaggaaagagtatgaataactatcttcgtaaattagtggagggacaacatttaacagaagaggaaatgtataaagcggggcttcttttattaaatgaaaacatattgggaagtgaaattgcagctttcttagttttactgagagcgaaaaggtgaaactgcagaaagaatatacggtctcgttcgagctcttcgcgaaaaggcattaccgttttcgaatcatatacaaggcgcgatggacaattgcgggacaggtggtgacggtgcccaaacgtttaatattagcacaacatccgcatttgtactggcaggagctggcgtaaaggttgcaaaacatggtaatcgtgctgtttctagtaaaacaggaagtgcagatttattagaagaactcggtgtaaacattagtagtacgccaaacgaaattgattatttattagagcatgtcggaatcgcatttttattcgcaccagcgatgcatccagcattaaagcgcattatgaaaataagaaaagaattaaacgttccgacgatctttaacttaattggaccgttaacaaatccggtgaatttagaaacacaatttgtcggcatttataaacgagatatgttactaccagttgcgcaagtactacagaaactaggaagaaaacaagcacttgtcgtaaacggaagtgggtttttagatgaagcatcattgcaaggagaaaatcatgttgtcattttaaaagataatgaaatagtagaaacgagtattgaacctgagaaatatggattctcaatagtgaaaaacgaagagattagaggcgggaattcgaaagaaaatgcaaagattacgctcggagtattaagcggagaaaaaaagtgttacccgtgatactgtttttattcaatgcaggacttgcccttttcgccaatgggaaaagcaagacgattgaaagaaggaataacactcgcagcacatagcattgactctgggaaagcattagcgaaactaaacttattaatt

SEQ ID NO: 9244 - DNA, 663 bp, Bacillus anthracis
atgtttaagaggcttcgggaagatattgaagtcgtttttgaacaggatccagcggcaagaagttatttcgaagtcattttgacttactctggattacatgcagtttgggcccatcgaattgcacatgctttttataaaaagaatttcttctttattgcacgttggatctcacaagttagtcgtttctttactggcattgagattcatccaggagcaacaattggtcgtcgttttttcattgaccatggaatgggggttgtaattggagaaacgtgcgaaattggtgataatgtaacgatctaccaaggagttacattaggtggtacaggtaaagaaaagggaaagaggcaccctacaattcaagataatgtattaattgcaacgggtgctaaagtactaggttctattacagttggagagaactctaaaattggagcaggttctgtcgtattaaaagaagtccctgcacattctacagttgtaggtatacctggccgagtcgttattcaaaatggagtaaagatcggtcaagaattaaatcattccgaccttccagacccaatttttgataaattaaaggtcatggaagtagaacttgataaattgaaaaaacaacttgaagtaaaggtagaaaggaaggataaaaatgactattcacattta

SEQ ID NO: 9245 - DNA, 1272 bp, Bacillus anthracis
gtggcatttgaatttaaactaccagatatcggtgaaggtatccacgaaggtggaaatcgtaaaatggtttattaaaccaggcgacgaagtaaacgaagacgacgtacttcttgaagtacaaaatgataaagcagtagtagaaattccttctcctgttaaaggtaaagtacttgaagtacttgtagaagaaggtacggttgcagtagttggagatacattaattaaatttgatgctccaggatacgaaaaccttaaatttaaaggcgacgatcatgacgaagctcctaaagctgaagatactccagcagcaactgcagaagtagtaaatgagcgcgtaatcgctatgccagctattcgtaaatatgctcgtgtaaacggcgtagacattcataaagtagctggttctggtaagaacggtcgtatcgtaaaagctgacatcgatgcatttgcaaatggtggacaagcagtagcagcaactgaggctccagcagcagtagaagctactccagcagcagcgaaagaagaagcaccaaaagcacaaccaatcccagctgggggaaaatccagaaactcgtgagaaaatgagtggtatccgtaaagcaattgcgaaagcaatggttaactctaaaaatacaggtcctccccttaacttaagggaggaagaaaatcgaactgcaacttgttgctcaccgtaagaagttcaaagctgtggcagctgacaaaggtattaaattaactttaccttccatacgttgttaaagctttaacatctggattacgtgaatacccaatgttaaacacttctttggatggtgcttctcaagaagtagttcataaacattacttcaacatcggtatcgcagctgatacagacaaaggtttatttagttccagttgttaaagatacggatcggcaggcttatcttcgcaatttctaacgagatcaatgatcttgctggtaaagcacgtgaaggtcgtttagctcctgctgaaatgaaaggcgcttcttgcacaattacaaacattggttctgcaggtggacaatggttcactccagttatcaaccacccagaagtagcaatccttggtatcggccgtatcgctgagaaaccagttgtgaaaaacggtgagatcgttgcagctccagtattagcattatctcttaagctttgaccattcgtttaattgacggcgcaactggctcaaaaagcattaaaccaaattaaacgtctattggaaggccccccaaattattagtaatggagcgttaat

SEQ ID NO: 9246 - DNA, 303 bp, Bacillus anthracis
gtggcacaagattttcagttatatgagaaaaagtttaaagcgttggcggatcagaaacgtctagaaatcatgtatgaactttgtcagcggggacagacgtgtgtatgtgatttaacagagatttttgaaatgacgcaatctaagctgtcatatcatttaaagattttattagacgcaggtttaattgtaaaagaaacaaaaggtacgtggagttattatgatttaaatgatgcggaagtgaataatttattatcagaagaattatgctgtatctttagaaaaacaggcaaaggtagctgttgt

SEQ ID NO: 9247 - DNA, 543 bp, Bacillus anthracis
atgtttgttatacatggcagttcaagacaaaacggaaatacagaagctttaacacatatgatgatagagggcattgaaacagaacaaatttacttgcgagaccatacaatccatcctattacagaccaacgtcataatgcagaaggattccaacctgtagatgatgactacgagcagttaatgaaacgcatgttagagcacgacacaattatctttgctacaccgctatactggtacggaatgagcggacatatgaaaaacttctttgatcgctggtcacaaagcttacgcgatacatcacttcatttcaaagagaaaatgaaaggtaaaaaaatgtatgttgtcatcgttggcggagataacccaaagctaaaagcattaccgcttattgctcagttccaatatatctttgattttattggttcatcgtttgagggttatattattggagatgcgaatgggttagatgaaattcaaaatgatgctgaggcgctggcgaaggcacaaatttataataaagaattcaaaaatcacaagcagaaa

SEQ ID NO: 9248 - DNA, 882 bp, Bacillus anthracis
ttgagtttacaaattcaaaacttaacgaaacaatttggggaatcaaaagctgttaacagcttgcaaatttcattaccaaaaggtgaagtgttaggattacttggacgaaatggtgcaggaaaaacaacgacaatcaaaatgcttctcggattattaacgcctaatgaaggctctattacatgggatggaaaaacatttgggactagtggggtaacgataggatacttaccagaagaaagaggtttatatacaaaaagtagagtaatagaccagttgcgatattttggtagattagaaggaatggcgaaaaaagaagtagatcttgctattgatcattggttagatcgattagcgataccagaatataaatttaaaacagcaggagagctttcaaaagggaaccagcaaaaaattcaattaattgctgctcttcttcataatccagaacttctcattttagatgagccatttagcggactggatccagttaacgctgggatgttagctagcattattgaagaacaagtacagagcggaaagacaattattttatctagtcatcgtatggaacaagtagaagctttttgccaacatgtatgtattttgaaaaaaggagaagcagtcgtaaaaggccagttaagtgatataaaaaaagaatatggtttccgtaatttaacgattgaagatacagaagagaatgagaaggggttacaagctatacatgtatcgtatgaaaaacaacaaggccttctttatgtaaaagtacaagatgatgcagaagctctcaacattttacaacaattgcaagagcaaggtgttactttacgacaatttaaaatgttagagccgacgttaaacgaaatctttgtagagagggcgaaa

SEQ ID NO: 9249 - DNA, 585 bp, Bacillus anthracis
atgacaatcagacaggcgattaataatttagtggaacaaggttatttatatcggaaacgtggaatcggtacgtttgtccaacttccgaaagtggaacaaaaattgcaaggaatgacaggattcacagaagatatgatttctcgtggaatgaacccaagtagtcaattgctaagtttccgcctagttccagctactgcgaaaatagcagaccggctgagaatacaggagggagaatcggtttatgaagtgagacgtattcgtttagcggatgatgaaccgattgcttttgagacgacatatttgtcgccagctcttgtaaaagatattaacgaagaaatattgcaacaatctttatatgaacatctagagaaaaaactgggctttaaacttgttagcgctactcaatcaattgaagcttcaattgcaacggataatgaagcggaacatctgcatattcctaaaaaggcgccagtgcttgtaatgcgtcaatggtcatattcagaaggtgaagtaccgttagagtatgtgaaatgtatttatcgcggggatcgttataagtttattacgaacatcgcacgtaacaaa

SEQ ID NO: 9250 - DNA, 963 bp, Bacillus anthracis
gtgagtatagttaataagaaaatcatcttttttggagactttggtattgatgatgctgtggcgttaatttatgcaaataaaacatgtaaattagatattttaggtattgttgctgaatatgggaatgtatcgcgagaaatcgtaacagaaaatgtgtattttttagaaagatactatgctacagaagtaaaaatcattgagggtgcagcaagaccgatgacagctgaagaacctttattctttcctgaaattcatggggagcatggtttagggccaattattccgcctgatctgaggatttgtaaacgggaaaatttttgtgaattaattaaattaattgaaccttgtccagaagatattattatcgtagcaacaggacgattaacaacattggcaacgttatttttattatatccaaatgtcatggataaagtatgttcgtattatattatgggcggtgcttttttatttcctggtaatgttactcctgtatcagaagcgaatttttatggagatccaatcgccgcaaatattgtaatgaagtacgcaaagaatgcgcatatttatccattaaatgtaacgcaagaagccctaattactcctgaaatggtggatattattaataaagaaggaacagggcaggcgaaacttataaaaccaatgattgatttttattatgagaacttttataaaaaagaataccctggtattgctggaagtccgattcatgatttacttccgtttatttcgtttataaatgatgatatttttgaatataaaaaatcagcagtttggattagtacgacaaatgacgtaacaagagggcaaagtgtggcagactttagaaaaatagctgagccgacaaggtttgatgatcgtccagtacaaaagattgcagttggttttaactatcctgcatttaaagaagagtttatgcggacaatattgaaacctgattgtcca

SEQ ID NO: 9251 - DNA, 762 bp, Bacillus anthracis
gtctttgaagtaaagggattaacgaaggtgtatcaatcgaaaggttcagtagcgacgactgctttaaatgatataaattttaaaatagaagaaggcgaatttgtaggaattatgggtccttcagggagcgggaaaacaacgcttttaaatttattagcaacaattgataagcaaacttcaggtcatgtgcttgtaaatggagaagaaattaatcaaatgcgtgctgcaaaattagcggaatttcgccgtacacatttaggtttcattttccaagattttaacttacttgatacattatcgattaaagaaaatattattttaccgcttgtaatggcgaagaaatctgtaaatgaaatcgatgcgaaagtactggaaattgcgaagtttttaaatatcgaagaaattttaaataaaaaggtttatgaagtatcaggcgggcaacaacaacgtgcagcagctgcgagagcgatcattcatgaaccgactttaattttagcggatgagcctactggaaacttagattctaagtcagcaaaatcgttaatgagcgcgttgcaagacttacatgaacaaaagagagtgacaattgcaatggtgacgcatgatccagtagcggcgagttattgcgaacgcattctttttcattcgcgatggagaagattttttccgaaattcataaaggagcacggaagcaagcctttttccaagaaaattctggacgtacttgcgatgctaggaggagaatatcatgacttttcgcca

SEQ ID NO: 9252 - DNA, 1028 bp, Bacillus anthracis
acgcaaataaataaacgagatttattacaagtgcaaaatttaaaacaatacttccctataaaaaaaggaattctaggacgctctattagctatattaaagcggttgacgatattagttttacagtttatgaaaaggagactgttagtattgttggtgaatctgggtgcggaaagtccaccactggtgcgtgcaatattgcgccttgatgaagcgacaagtgggaaaaattatatttcaagataaaggatttactagcatttaataacccccccaagcgcaaaggtgtcgaaaaaatttccaaggtattttttaagaacccctcccctctttttaacccccggcaaatggtaggaagcattttagaagaagctatgtccattcaaaacgtatgtccaaaagggggaaagaaaagcaaaagtaatttgagtttactcgggaaaagttgggtcttccaccctgaatgcaagtgaagcggctattccacaatgaaatttagtggtggtcaacggcaaagaattggaatcgcgcgcgctttagctgtgaatccaagactcatcatttgtggacgaagccgtctccgccttagatgtttcagtggcaagccacaagtttttaatttatttaaagcaggttgcaaacaaccaatagggtttaccgtactttatttcatctctcatgactttagctggtcgttcgtcacatatcagatcgcatcatttgtatgtaccttgggaacatcgtggagattgccgataaacattctctttttaaaaattccgcaaccccctacaacaaaaaggtttttttccagcaattcttaccattagtgcagaaacgaaaaaagagcgtattgaacttaaggggagccttcccttctcttataaatccgccaacaggctgtcgctttcatactcgttgtccgtatgctattgaaaaatgcgctacgcaacaaccaagttttcaatctataagtaaagatcataaagtagcctgtcatattatttaatgcgagtctgaataatagaaa

SEQ ID NO: 9253 - DNA, 1500 bp, Bacillus anthracis
atgagcaacatgcagcaaaaaacagacgttatcttaattggtgcaggaattatgagtgcaacgttaggctcattactaaaagaattagcacctgaatgggaaattaaagtttttgaaaaactcgcaagtgccggggaagaaagctctaacgaatggaataatgcaggtacagggcattctgcgctatgcgaactgaactatacttccgaaaaatctgacggatctatagatattagtaaggctgtaaaagtgaatgagcaattccagctttcaagacaattttgggcatatcttgtaaaaagcaaattaattcgtaatccacaagattttattatgcctctacctcatatgagtttagtacaaggtgaaaaaaatgttgagtttctaaaaaaccgttttgaagcgctttcaaaaaatccactgtttcaaggaatggaattttctgatgctcctgaaacattaaaaaaatggcttccactcattatggaaggtcgtacatctaatgaaccgatggctgcaacgaagattgactctggaacagatgttaacttcggtgcattaacacgtatgctgtttgattacttaaaaacgaaagatgtcgagctaaactacaaacatagtgtcgaaaacattaaacgtacgaagaatggtttgtgggaagtgaaagtacacgatatgaatagtggtaaaatcgaacatcatactgcaaaattcgtctttatcggcggtggtggaggtagcctacctctcctacaaaagactggtattcccgaatcaaaacatattggtggattcccagtaagtggactatttatggtatgtaagaaccaaaaagttgtagagcaacatcatgcgaaagtatacggtaaagctaaagttggcgctccgccaatgtctgtacctcaccttgatacgagatatatagacaataaaaaagctttactattcggaccgttcgcagggttttctcctaagttcttaaaaactggctcaaaccttgacttaatcggttctgtaaaaccgaataacgtcttaacgatgttagctgctggtgtaaaagaaatgggattaacaaaatacttaattcagcaagttatgttatcacatgaaaaacgtatggaagaattacgcgaattcattccgaacgcgaaaagtgaagattgggatattgtagttgctggtcagcgtgtacaagtaattaaagatactgatgctggcggtaaaggaacacttcaattcggtacagaagttgttagtgcggctgatggatcaatcgcagcattactaggtgcttcaccgggtgcttctactgccgttcacgttatgcttgaagtattagaaaaatgtttcccaagtcgaatggtagaatgggaaggaaaaataaaagaaatgattccttcttacggcatttcattaacagaaaatccaagattattccaagacctccacacttctacaggtcgtacccttggattaaatgaaaaagaaacggttcataat

SEQ ID NO: 9254 - DNA, 893 bp, Bacillus anthracis
gttattgaaaaatacaacctcaaaaacgtggtgaggtatctatgtaaaattgctggagtttcacgttcagaatactataattatttttccgtttcctcacaaaatcagcggaagaacaaaatggatcagggtgaaatatcgaaagagttcatattaaaggcatttcgttttaaaaactgaagaaaaagggttcgtaaaatcaaaatgacattggcgggtcaatttcaagttgtctataacttgaaacgtattcgtagaattatgaagaaatgtgaagaaatatgggattatctgtcccactcgtaaagcgaatccttacaaaagaatgacgagagcgacgaaagaacatttcgtggtaccgaattaattgaagcaagaattgaggaaaggtgtacatggaaaggtgcttcttgcagatatcacatacctgttttatggtaggaatcggaaagtatatttatctactattctagacaggtccacgaatgaaattttagcctatcatgtttcagggcagctcacataagatatcgcaacaatgacatttgacaacctaaagaagaataagaaaattcgattgactaaagatgcctatattcattccgatcaaggagctcattacataagtccaatctatcaaaaattagtcgaaaaaattaaaacttggacaatcgatatcaagacgaggaaactgttgggaaaatgcccctcaagaatcctttttcgggaatattaaatatgaagcgtatataaaaacttgtacatcttccgcccagctaatacaagaaattaaagactatatgaaatactataaccagtatagatatcggtggaatttaaagaagatgactcctgttgaatacagaaatcaccttcttaaggccgcctaactt

SEQ ID NO: 9255 - DNA, 945 bp, Bacillus anthracis
atgagaaaaattattagcgtattagttattttctttatgacgggaagtatttttgctgggggagctgttcatgcgaaagcagaaggaaagcatgagtggaataagaataagtttttaaatattgcacatcgcggagcaagtggacatgcacctgagcatacttttgcttcttatgatttagtgaaaaaaatgaaagcggattatttggaggttagatattcaattaactaaggatggccaattaattgcaatgcatgatacagcagttgatcgtacgacaaatggaacaggcgaagtacgagataaaacgttaagcgaaataaagagtttagatgcaggatcgtggttcaataaagcgtatccagaaaaggctaagcaagagtatgttggtcaaaaagttccgactcttgaagaaattttccaaaagtacggaagaagcatgaagtattacattgaaacaaaatcaccagatgtgtatccaggaatggaagagaaattattagctttattagaaaaatataatttaataggtcaaaacatgtcttctagccgtgtgatgattccatcatttagtaaagatagtttaaaaaagatttatagtataaataaaaatatttggttagtttaattggttttggtattatttaaatgaaaataatgagatttgttgaatggtctggcattacacatgagccgaaacgtgtaacgaatgatgattttccagaaattaaaaagtatgcagtcggtattggaccaaacttacgtaatgataacggagatttaattatcaatgagtcatatatgaaaatggctaggcaaaatggtctgttaattcatccttatacaattaatgagaaaccagatatgagattgttaatgaaatggggcgctacaggaatgtttacaaattatccggatcgattacatactgtgttaaaagaaaaa

SEQ ID NO: 9256 - DNA, 729 bp, Bacillus anthracis
gtaaaaaacgggacattgtcaagtaattggagcaagcatctattatgaggtgcgtggctcgggtccaattcttcttttgattcatggtgggggtggtgatgccgacaagttccataatatcgcccaccatcttgctaaatggtataccgttgttacttaccatcgtcgtggtcattccccgagcaatctcctccataaaaatggaggaataccctgggcccacgccataaccaagaatgctccttcggtggcttagctattcctgaccaaaaaaccggccttatgtatttccgaaagtaggttcttggtggctgttatcggacttgatttgtgcatacgtcatcctgagcaggtacagttactaattccacaccgaaccggttttattacaacttttatctgaaaatgagttgaagcaggctataaatttccctggaagaccttaaagggaatcatccaaaatgaggtcatgaaattattgtccaaaatttgatgatagtaattcccgaaccatcgaaggatatgctaacagaacggcctacttgggaatatccaccaatttccctgagtatgaaaatccccggaaatttcaccctatactttaaatatcgatgcattagaagtccctattaaaacctgcatcgatacaggtacgtccagcctgtggaaagtatttcaagaaagacttttccttatcattgccgcattcactgtaacaagcaccccgga

SEQ ID NO: 9257 - DNA, 738 bp, Bacillus anthracis
atgttaaaagggaaagtagcattagtaacgggcgcttcacgtggaattggtcgtgcgattgcgattgatttagcgaaacaaggggcaaatgtggtagtaaattatgctggtaatgagcaaaaggcaaatgaagtagttgatgaaataaagaaattaggttcggatgccattgcagtaagagcagatgttgcaaatgctgaagacgttacaaatatggtgaaacaaactgtagatgtatttggacaagttgatattcttgttaataatgcaggtgtaacaaaagataatttattaatgcgtatgaaagaagaagaatgggatacagttattaatacaaacttaaaaggtgtattcttatgtacgaaggcagtatctcgttttatgatgcgtcaacgtcatgggcgtattgttaatatcgcctctgttgttggagtaacgggtaatccaggacaagcaaactatgttgctgctaaagcaggtgtaattggattaacaaaaacatcagcaaaagagttagcgagccgcaatattactgtaaatgcaattgctcctggatttattgcgacggatatgacagacgtattagatgaaaatataaaagctgaaatgttaaaattaattcctgcagctcagtttggtgaagcgcaagatatcgcaaatgctgtaacgttttttgcttctgatcaaagcaaatatattacaggtcaaacgttaaatgttgatggcggtatggtaatg

SEQ ID NO: 9258 - DNA, 715 bp, Bacillus anthracis
atgcaacaatcaaaagaagaaagagtacatgatgtatttgagaaaatctctgataaatacgatgtgatgaattctgtaattagttttcaaagacataaagcgtgggcgcaaagagacgatgcgcattatggatgtaaaaccaggtagtaaagcgcttgatgtatgttgcgggacagcggactggacaattgcgctagctggagcggtgggtgaacagggcaaggtttgttggtttaagctttcagggaaaaataggtaatctggtggtaagcaaaagggtagagggcgttacaattaaaacaagtaggaacttctacacgggaatgcaatggaacttccatttgaaagatacacgtttgattatgtaacgattggatttgggttacgtaatgtaccggattatatgcacgtattaaaagaaatgacgcgtgtagtacaactaggtgggaaaagtaatttgtttagaaacatctcaaccaacaatgattggttttcgaccaagttatattctatatttttaaatatatccatgccgttattttgcaaaagttatttgcgaaaagttataaagaatattcatggctacaagaatctgctagtacattcccaggtatgaaagaattgggctatatgttcgaaaaaactggacttgaaacgtgtgcaagtgaagccatttacttttggggtagcagcgatgcattttaggcatgaaacc

SEQ ID NO: 9259 - DNA, 1257 bp, Bacillus anthracis
gtggcatttgaatttaaactaccagatatcggtgaaggtatccacgaaggtgaaatcgtaaaatggtttattaaaccaggcgacgaagtaaacgaagacgacgtacttcttgaagtacaaaatgataaagcagtagtagaaattccttctcctgttaaaggtaaagtacttgaagtacttgtagaagaaggtacggttgcagtagttggagatacattaattaaatttgatgctccaggatacgaaaaccttaaatttaaaggcgacgatcatgacgaagctcctaaagctgaagctactccagcagcaactgcagaagtagtaaatgagcgcgtaatcgctatgccatctgttcgtaaatatgctcgtgaaaacggcgtagacattcataaagtagctggttctggtaagaacggtcgtatcgtaaaagctgacatcgatgcatttgcaaatggtggacaagcagtagcagcaactgaggctccagcagcagtagaagctactccagcagcagcgaaagaagaagcaccaaaagcacaaccaatcccagctggtgaatatccagaaactcgtgagaaaatgagtggtatccgtaaagcaattgcgaaagcaatggttaactctaaacatacagctcctcacgtaacattaatggatgaagtagatgtaactgaacttgttgctcaccgtaagaagttcaaagctgtggcagctgacaaaggtattaaattaacttaccttccatacgttgttaaagctttaacatctgcattacgtgaatacccaatgttaaacacttctttagatgatgcttctcaagaagtagttcataaacattacttcaacatcggtatcgcagctgatacagacaaaggtctattagtaccagttgttaaagatacagatcgcaagtctatcttcacaatttctaacgagatcaatgatcttgctggtaaagcacgtgaaggtcgtttagctcctgctgaaatgaaaggcgcttcttgcacaattacaaacattggttctgcaggtggacaatggttcactccagttatcaaccacccagaagtagcaatccttggtatcggccgtatcgctgagaaaccagttgtgaaaaacggtgagatcgttgcagctccagtattagcattatctctaagctttgaccatcgtttaattgacggcgcaactgctcaaaaagcattaaaccaaattaaacgtctattgaatgacccacaattattagtaatggaggcg

SEQ ID NO: 9260 - DNA, 1620 bp, Bacillus anthracis
atactcatttccatttggcttgcaacagtcggtgcagttgttggctttttttgtcgaaaagtctattgctgaaagcgaagattaaatggtgccagctaaatgaagcgaaaacgtattctagacgaagcgaatcgtgaggctgaagcacttaagaaagaaagcgctattagaagcaagggatgaaattcatacacttcgtacagaagctgaattagaaattcgtgactcgtagaagcgaattacaaaaaccaagaaaatcgtttaatgcaaaaagaagagaaccttgatcgtaaagacgaaacgctcgataaacgcgagctacagttagaaaagaaagaggattctcttgtagcgagacaacaacagattgaagagttggaaagcaaagtgggagagttagttcaaaagcaacaaacagaattaagagcgcatttcccaatctgacacgcggaacaagcgaaagccattattcctgggtaaagtagaaaagtgaaagttcctcatgaaaatgccgttaatggtaaaaaaaaagggaaagtcgggccgaaagaagaagccgaataagaaagcaaaagagattttatctcttggcaatgcagtccatccgcagctgatcatgttgctgaaacaaccgtttcggttgtaaatcttccaaatgacgaaatgaagggacgtattatcggacgtgaaggtcgaaatattcgtacgttagaaacgttaacaggtattgacctaattatcgatgatacaccagaagcggttatcctttctggattcgaccccattcgttcgtgaaacagctcgtatcgctcttgataaactagtacagaccggacgtattcacccagcgcgtattgagaggatggtcgaaaaatcaagacgtgaagtgacgaagtatattcgtgaagtcggagagcaaacaacgtttgaaagtggtgtttcacggtttacatccagatttaattaagattttaggtcgtttaaaataccgtacaagttacggacaaaacgtcttaaaacactctatggaagttgcatatttaactggacttatggcagcagagcttggtgaggatgaaaaactagcaagacgtgctggtctattacatgatatcggtaaagcgattgaccatgaagtagaagtgtagccacgttgaaatttggtgttgaacttcccaacgaaaaattaaagaggcatcctgttgttataacaggtattgcatttcaccaggggacaacagaacccaatttttatcattgcagttttagttgcagcagcagatgcattatcagctgcaagactgggagctcgtagtgaaacactggagaactatatttcgtcgtcttgaaaagttagaagagatttcagagtcttatgaaggcgtagaaaaatctttcggcatttcaagcaggacgagaagttcgtatttctggtaaaaccagatacaattgatgatttagaagctcatcgtttagctcgtgatattcgaaaacgtattgaaaatgaactggattaccccaggacatattaaagtaactgttattcgtgaaacacgtgcagtggaatacgcaaaataaagtgggtgaaacaccactttatttttttgtgttggaatgggt

SEQ ID NO: 9261 - DNA, 1026 bp, Bacillus anthracis
atggacagtaagggaggaacaacgatgttagatgaaatctcctccaaagaaaaagctgccatccttattcgtacattagaagaaggggtggcagcaaaagtcattgaatatatgacggctaaggaaaaagaagtattacttcgtgaaatcgcgaagtttcgtgtatataaatcggaaacgttagaaaatgtactaggggagttcttgtatgaattaaatgtaaaagaattaaacctagtgactccagataaagaatatattcgtcgcatatttaaaaatatgccagaagacgaactagaaaaattattagaagatctttggtataacaaagataatccgtttgaattcttaaattcacttacagatttagaaccacttcttactgtacttaatgatgaatcgccgcaaacgattgcgattatcgcttcgtatattaaaccgcagcttgcttctcaattaattgagagattaycagatcataagcgagtagaaacggtaatggggattgcgaagctagagcaagttgatggtgaattaataaatcaaattggggatttattaaaatcaaaattaaataatatggcatttaatgcaattaataaaacagatggcttgaaaacaatagtaaacattttaaataacgtttcacgaggtgttgaaaaaacagtctttcaaaagctggatgaaatggattatgagttatctgagaaaattaaagaaaacatgtttgtatttgaagacttactcggacttgaagatctcgcacttcgtcgtgtattagaggaaattacagataatggtgttattgcgaaagcacttaaaattgcaaaagaagaaattaaagagaaattatttacatgtatgtcttcaaaccgtaaagagatgattctagaagaattagatggcttaggaccgcttaagatgacggatgctgagaaagcgcagcaaacgattacagacacagtgaaaaagctagagaaggaaggaagaattatcgttcaaagaggtgaagatgatgtccttatt

SEQ ID NO: 9262 - DNA, 529 bp, Bacillus anthracis
atgagcattgtcaatacgatatcattatgggtaatcccttgtgtcattggttttatccttttatatggaacgataaagaaagttccgacgtatgaatcgttcgttgaaggaggaaaagaagggatttcaattgcaatttccattttaccgtttatgggttggaatgctcgtatctatttctatatttcgagcttcaggtgcattagatgcaatgatatcagtgatgaagccgatgttagatttaattcatgtcccagcagaaattgttccactagcacttatacgtcctatttcgggctctgctggtttaagtattacgaccgatttaattgcgacgtatggaccagactcgttcattgggcgattggcttctacgatgcaagggagtacagatacgactttttatattttaacagtatacttcggagctgttggaattagaaaaatgggagatgcattaaaagtaggactttttgccgatttaatcggaattatttgttcgattgtgtttgtttctttaatgtttaag

SEQ ID NO: 9263 - DNA, 945 bp, Bacillus anthracis
atgaaaaaagcaaagggaatagctaaaagtgttgccgtagcgtccgttataatgtctggatcacttggtttacaagcaacatctgcatttgcagattctaaaggaactgtagaaaatcttcaaaatggtgggaaagtctataatagttttaaaactacttatgacatgaagcagaatatcaaaaattcaataaaggtttcttttattgaggatccttacgcagataaaaaattgcaattgttaccactgatggtagtaatatagatgcgaaatatacaattaatgggggatactataacgcaggtttaaaatggccatcggcgtatcatacggaagcagaaataactagtggcgatagcgctcaattccataaagctgccccagttaatacaatgacttcagcaaaggttacttctgaggtagggtatacacttggtgggagtgttaaagttggagtaaacgataaagggccaaatgccgatgcaagtattacaggtagctttgcttggaaagaaagtgtatcttatgatcaggtagactataaaacggtattagagactcacacagataaaaaattaaattggaaagtaggattccaatcgtttaatttcccagagtggggaatttataatcgtgattcattcaatactttctatggtaatcaactatttatgaaatcacgtagttataatgaaggaacgaataattttgtttcaaaagacacagtaccagctttaacaggatatggtttttctcctaatgtagtagcggttatcactgctgataaaacagaatctacatcagatttaaaaataacaaatcgtagaatttcagatcagtaccatattgaatgggtaagttcaaaatggtgggggaacaataataaggatacatataatgagttcttttacaacaactataaatttagactggaaaaaccatcca
